United States Patent Application Publication US 2005/0228172 A9 - sequence listing, part 31

SEQ ID NO: 100586 - DNA, 575 bp, Homo sapiens
tgaactaagcaaccacagtaaactttaagtccatgtgaagataactggtaggtgtttggggagaacaaaccagggcacattagctagtctgggctaatgggggaagacttccaggtgaaagtgaagtttaaaagacagaaacaggccaggcgtggtggctcatgcctgtaatcccagcactttgggaggctgaatcacaagttcaggaggttgagaccatcctggctaacacggtgaaaccccgtctctactaaaaaatacaaaaaattagccgggcgtggtggcaggtgcctgtagtcccagctactcaggaggctgaggcaagagaatgatgtgaacccaggaggcagagcttgcagtgagccaagattgcgccactgcactccagcctgggygacagatcgagactctgtctcaaataaaaataaaaataaaaataaaaataaaagacagaaagagaagaagcaggggaagagaacgacaacccactacctgcaaaggtctagaatccagaaagaacttaactcacagggatccactataaagcctaataaattttttaaatctagaaaaat

SEQ ID NO: 100587 - DNA, 575 bp, Homo sapiens
tgaactaagcaaccacagtaaactttaagtccatgtgaagataactggtaggtgtttggggagaacaaaccagggcacattagctagtctgggctaatgggggaagacttccaggtgaaagtgaagtttaaaagacagaaacaggccaggcgtggtggctcatgcctgtaatcccagcactttgggaggctgaatcacaagttcaggaggttgagaccatcctggctaacacggtgaaaccccgtctctactaaaaaatacaaaaaattagccgggcgtggtggcaggtgcctgtagtcccagctactcaggaggctgaggcaagagaatgatgtgaacccaggaggcagagcttgcagtgagccaagattgcgccactgcactccagcctgggtgayagatcgagactctgtctcaaataaaaataaaaataaaaataaaaataaaagacagaaagagaagaagcaggggaagagaacgacaacccactacctgcaaaggtctagaatccagaaagaacttaactcacagggatccactataaagcctaataaattttttaaatctagaaaaat

SEQ ID NO: 100588 - DNA, 610 bp, Homo sapiens
agtttcttcttctttagctcctccaaggtttctttcctaatggaggasaaggtgagcatgaaagaaactgctaaaggcccatgaatatttcaaaaggaaaagccaagggactccattaaaccttgtacactattctgtaaatggagaaagaagctgaataatgaaatgctcagaggtactgaggcaatttcagagaaaaacaggcagatataaaataaaatgcttctcaccatgatgaactctcaaatttattttttagccttctctctcagccaattttttttatatctccaactcctcgtgcctatcactacaaaaaggcacagaggccatactgcacagtggctaaagatagaaactttctagtctaagagtcgtggctgagatctggtgtctcacactgattgtctgcgttactgtagaattgtagattattttatcatggtgtcaagatgaagatagtgagggagagagggattgtaatacagtcctcactttagatgagaatgacatatggcaaagcacgtaaatctcagagcatgggctaatcacttattaaatgtttcttcttagtattatgtattcctcatccacattttttctactttca

SEQ ID NO: 100589 - DNA, 486 bp, Homo sapiens
ttatatgccttgcattatatcatagtttgtggtatctttttagtcttcttcagttgactgtggactaacttctcaaaagaaaagyatacatttgttggtgttttaactccacaaaagcagagatttcttttattttgttcaccagtgaataccaagtacctagaaacatgcctggaaagtatgtttctagatacttggtatatatgtgtgtgtgtgtatatatatatgtgtgtgtgtgtgtgtgtgtgtgtatcccgatatatatatcttgaatgctttgtgacatgtagatgtcaccaaagtaattaaagtcacctcaattacctcgggaagaaaacctgtggtcctataatgttaccatgatcaaaggaaatagcaaaagtttgtaaatttaaaaatattggattataaaaaggaaccccaatgctattctgtttcatagccatgaaaatcattatcccatcattctccatttttttgctaact

SEQ ID NO: 100590 - DNA, 663 bp, Homo sapiens
atttaaacctatcacctgccttttctccaagtcaggctgagttcccactcttctctccactgtgggaattctttactaaacttctccactcagggctccagacttcccacatgggcagggaagtgggtgtgggggctggggatctgagtggaaggtggtgaccaggactcatctagaagctgtgaaaacatcaatgatctgtaccaaagaatggggggatctastgaagctggggcccctgagaaaggtttactggataaaatataggatacccagagaaatctgaattttagataaacagcaaatcatttactactaattaaaaaattaacaaacttattgtttatttgcaattccaatgtccctggatgccctgtatttttctttgttaatctggccacccatccctaaggctccctgtcccctctcctccacatccggtggccagcctctcttaccctcccatttgacggttgggaaaatggaggcccagagacgcggaagcgacttgatccaggtccagggaggttcagctccctggggctggaccctgacccctggcccaggccctctcagcaccccacagacacgagggaagggaacaacggctcggcttgcttgaatggagccttactacacacacaaatgacggccatttcatat

SEQ ID NO: 100591 - DNA, 497 bp, Homo sapiens
atagaatccagggctcatggttctggaatgtgactagacttgctggctccttgctccttgctctccaggatcgatygtatcttgagttaaaagaacctgctttccattatctcaagtagaagagcaaatgctaaaccatcacagctgtaaatcatgtgcttaatgcaatgcacccttttgacctccacattctcaccacctgtttctttgttggattaccaataaatagcgtgggctcctagagctcagggcctttgcagcctccacaatcatgatggtcccctggcctcacttctctctctctgtcttttctcaattctttgactccaccagacttcgttgcccccacgacctggtgttgagtctgatcaccccaacagtcagccttaaaaaaagaaaacatgagcttatcacctttttagtcaattcaggggctgctcactctgtttgtttcccctcatctaatgtttctcctcctcagaggaatttttagtttc

SEQ ID NO: 100592 - DNA, 333 bp, Homo sapiens
cacttttccttcataaataacatcaccttaatatacatacatactttcagaaaatagaagagaatgagagcctcaacaacttgctataggaaggcagaattacccaaatacaaaaatatgatattgacattacaagataagaagaacacaccacacaaatatcyttcaggaacatcaacccaaaaaggcataacaaatattggtaaatgaaatccagcaatatataaaaagttttataatgtccatgaccaagtggaatttgtctgaatagtcatataataaataaatcaatttaataagtacataaacatcttttcagaagggaagcccaga

SEQ ID NO: 100593 - DNA, 570 bp, Homo sapiens
agattcctcagagctagcagggggaaagactaagtctgttggtctgaagagaccatgcccacccctccctttaggggcttaggcccagggagatcagagttctgtccctaagcccctggctggagttgctggagttccagcaggcctagggaacatcccacccagtgagagggaatgggtcagggttctgcctaagaggcagcctggccaggatctgccacagctagtgtgctgcgctgtggggaatgcctcttgggactaagccatccagtgtcccaggctcaagcaggggcaaaacagctgcctggagctgtagagatggctgtygcctttcccctctgggagttcagtgtctgaggcagctagcagctgcagtgatggctgccatccctctcgtggggatctcggttttcttaggcagcaggcaactgcagtgatgatggctgccacccctcccccagggagctcagttggcttaggcagcagccacagtgatgatggccacccctccccctggaactccacagtcttaggcagactccagctgagtggctgttgagaatctgcatg

SEQ ID NO: 100594 - DNA, 605 bp, Homo sapiens
ttctctgccaaactgcattagtttcgttgtttataaatcagtcctggattccctgatgcagaaaggccaggcagtcagcttaataggcccttaagctgtattagccttaagcttctctgtcagagaggtctgtagacaatttccatagggagaaaaaaggcaaaaatataatacatggctaattatatgggaatgatatgaaatttgggaaaaagtttctgttttattttcttaacactaagaaaataaaaggtgactctgacaggagaggctcaactgtagggyacaagtggtccattttgagcaaacacacgaatggaaaagggcatatagtatttagtagaacatttgatgcttttaaagttctagcacctttcagccgaccatcatgttttctatctgataataacttcttccaagttgaatcaccatggttgactgcaccctatcacacctttggattaggaaagtggaacttagaagtatttgtgaagtttcttgattattcacaagttaactcctaattgaaataggctgcagcaaaacacccagttcaccccagcatacagcaaaaacactgatctatggttcaacaaatcaacctt

SEQ ID NO: 100595 - DNA, 587 bp, Homo sapiens
  misc_feature (1)...(587): n = A,T,C or G
tatttatagtaataatttaatatacatctggtaaaaagaatatttgaattcaaattagaattcactttcactcgaatatggtaccctcattcagaatatgactaattccactaagcagtagacaaattcccagaatcacaacctacctcaacctatgtgaaagcaaattttttctatcctctttatttggacacagacacacatgtgtgcgcacmcacacatacagagagcgacagggacatacacaaataatttattactgtcccttgttctggaccccaataccttattgctttttatgatctttcaattcttaaatatgttattaacttttcagagttctttatgtgaatnatacaactcaatttatcatttgtactttacaagaaaaataagacttggcttcatatcatataatattttattttcactttatgacttataaaataattttatattcttgaaatgtaatttttgaccaattttgaaatggtcattgaaattaaaatacattcttaatttgaaacccttttttaatggaaccacagaaaggaatattgattagggcttattagaaattgagtttc

SEQ ID NO: 100596 - DNA, 587 bp, Homo sapiens
  misc_feature (1)...(587): n = A,T,C or G
tatttatagtaataatttaatatacatctggtaaaaagaatatttgaattcaaattagaattcactttcactcgaatatggtaccctcattcagaatatgactaattccactaagcagtagacaaattcccagaatcacaacctacctcaacctatgtgaaagcaaattttttctatcctctttatttggacacagacacacatgtgtgcgcacccacacatacagagagcgacagggacatacacaaataatttattactrtcccttgttctggaccccaataccttattgctttttatgatctttcaattcttaaatatgttattaacttttcagagttctttatgtgaatnatacaactcaatttatcatttgtactttacaagaaaaataagacttggcttcatatcatataatattttattttcactttatgacttataaaataattttatattcttgaaatgtaatttttgaccaattttgaaatggtcattgaaattaaaatacattcttaatttgaaacccttttttaatggaaccacagaaaggaatattgattagggcttattagaaattgagtttc

SEQ ID NO: 100597 - DNA, 612 bp, Homo sapiens
tgacattagaactatgatctgcatctctccccacctcctgcccaattttgttttacagaaatttttttacagaagaaaatgtctgagaggtccartgctttcttctttacctagcccccacagatagggtagcaggttcatccaaagcattttagactgagtatcctgcagtcctaactctcaatttcctcacctcagcttatttacaaggcaaaactgcacacatgaaggggcaagccaaaaagaccagaagttaacatctcactcagcttcctgagcctaaaatagagagaccacttaaaaagaaagaggttattgtccatttcccagctccaaggcaacatcagatgtttttgtcaagggggagaggaaagctaaaagaacagggagttttgacgctttctgtgaaagaagtgaccttatctggaacagaatatgggagagttcaagcgtaagggtgtgctaaaaagcaatggctattgtggtggtaagcaattaagaagaagctgttagctccataaaagcagccagttaaatcatactctaattgcatatttaatctatatcacacttatccttccttcattttcttccctattgtcatagattact

SEQ ID NO: 100598 - DNA, 559 bp, Homo sapiens
tggtcctctttattgcaaagagctgcatactatctgattatttcattgttccccatctgtttttatcacttgtcaccttcctggccctcatggacactgggaactctcaaactaggatgagaatcctggtctcctacatatcacataatcacccttgtcattataccataccactgcatgtgatgtggcctggccacactctttcaaaaagtaggaagcctgaatgaggaaactacccrcatctcatgaagggcttatgccactccattgctattagaggtattccttttttccttccagttcttcatatattccctccttttgctttatgccttaagacggtatttaattggttctttttaacctggcattaaacaatattttggatcatttatattgaaaaagatcaaacttgaagaattacagatttgccaggttagattaggactggggaatgatcccgagaacaacataccacaagttgcctttttacaggagttgctgtatctgacataattaggaagctgattaatcaggaacttgctgctttaactgctat

SEQ ID NO: 100599 - DNA, 674 bp, Homo sapiens
tatggttaacaacagagggaaagaaaaaagctgcattggtcttctgagagccttgagatctgcaagtaagtcttagtcatctgtttatctccagcaggtactacagtattggaggctgtgatggttcattttatgcctcacctgcactgagtcacaggatacccggatatctggttaaatgcttgtactagtccgtttttacgctgctgataaagacatacccaagactaggctatttacaaaagaaagaggtttaatggkcttacagttccacatggctggggaggcctcacaatcatggcagaaggtacaaggtacatctcacatggtggcagacaagagaagagagcttgtgcagggaaactcccctataaacccatcagatctcgtgagacttattcactatcctgagaacaacacaggaaagaactttccccatgattcaattacctcccacagggtccctcccacaacatgtgggaattcaagatgaggtttggatgaggacacagccacaccatatcaacgctatttctgggtgtgcctgtgaggggtttccagaagagattcacatttgaatcagtggactgagtaaagtagattgccctccccaatgttggtgggcatgatccaatctgtcaagagcctgaatagaacaaaaaggcagatgaagg

SEQ ID NO: 100600 - DNA, 471 bp, Homo sapiens
aacagagggaaagaaaaaagctgcattggtcttctgagagccttgagatctgcaagtaagtcttagtcatctgtttatctccagcaggtactacagtattggaggctgtgatggttcattttatgcctcacctgcactgagtcacaggatacccggatatctggttaaatgcttgtactagtccgtttttacgctgctgataaagacatacccaagactaggctatttacaaaagaaagaggtttaatgggcttacagttccacatggctggggaggcctcacaatcatrgcagaaggtacaaggtacatctcacatggtggcagacaagagaagagagcttgtgcagggaaactcccctataaacccatcagatctcgtgagacttattcactatcctgagaacaacacaggaaagaactttccccatgattcaattacctcccacagggtccctcccacaacatgtggg

SEQ ID NO: 100601 - DNA, 471 bp, Homo sapiens
aacagagggaaagaaaaaagctgcattggtcttctgagagccttgagatctgcaagtaagtcttagtcatctgtttatctccagcaggtactacagtattggaggctgtgatggttcattttatgcctcacctgcactgagtcacaggatacccggatatctggttaaatgcttgtactagtccgtttttacgctgctgataaagacatacccaagactaggctatttacaaaagaaagaggtttaatgggcttacagttccacatggctggggaggcctcacaatcatggcagaaggtacaaggtacatctcacatggtggcagacaagagaagagagcttgtgcagggaaactcccctataaamccatcagatctcgtgagacttattcactatcctgagaacaacacaggaaagaactttccccatgattcaattacctcccacagggtccctcccacaacatgtggg

SEQ ID NO: 100602 - DNA, 557 bp, Homo sapiens
tccatccatatagtttttatgttgaaaaatttagtttttaacttagagatattttatttgactcctttttacactaatctgtctttttttctacatcatgggtaaggyggtctaatattggaggtctggaatgggaagtccagtgttgctctatacccagaacttatcttttaatagctctgtcagtaataaagccaccattttaatctcctatgtcactcttaaattagatcctagtgtgtttgtttcttaaatggaataaattaatatgtgaaaacatggaagaatgcagaaatctcaaactcagatacctgtgagaataatgcaaatagcataaacaagtggaagcagccaggggaaaactacatcagactggaaagataattgccagtgtaaaatgggtcattactactcagttgtagccaattgttgctatgtggaatgtaggcctactgttgccatattttcggtttttctttttttcaagagaatccaaatatttctacttttctgtgaaatctgccaaaatttaagtgtttgaaactgatttattttta

SEQ ID NO: 100603 - DNA, 535 bp, Homo sapiens
ctaaaactaataagcaaataaaagaattaagaggaattttaaaaactactgaattaattttttaaatggaagagaaaaaaaggaaacaaagatgggaaaaaatctaatagcaagatgatagatttaaacccaatttatcaacaatcatattaaatataaatggtctgaatacttcaattaaaagtaaaaggctttcagattgtatttttaaaaagctccacagaaaagcatggtagctctcacctgtagtcccagcactttgggaggccaaggtgggcrgatcaccagaggtcaagagttcaagacaagcctggccaacatggcgaaaccctgcctctactaaaaaatacaaaaagtagccgggcatagtggcaggtgcctgtgatcccagctactcaggatgctgaggcagggagaattgcttgaacctgggaagtggaggttgcagtgagccaagattaattgcaccactgcattccagcctgggcggcacagtaagactctgtctcacaaaataataatattaataataaaa

SEQ ID NO: 100604 - DNA, 606 bp, Homo sapiens
acgtaaaacctacagtttgaaacttgcaggtctaaacctacaaaaggaagataaatgtcattactactgatgacttaagaattacacaacatgatttgtagagaaaggctaataaaagatgtaaggcattacaaaggaatacaaagataaaattaattgtctgaagtatgtgcttgtagttccaagcttttgaaatattctttctctcagtttctggtggcatgtaggaaatactttgatgcatgatagcctgtaagcacaccatcaggcaagctattccagggacaactccccccacccacagtgtcacttgccaggtaacctgatgagcagctgtggttcatgccattctcctgcttcagcctcccaagtagctgggactacaggtgccagccaccacgcccagctaattttttgtatttttagtagagacagggtttcaccgtgttagccaggatggtctcgatctcccgacctcgtgatcckcccgcctcggcttcccaaagtgctggtattacaggcgtgagccaccgcgcccggccctaaggtatttctttatagcaatatgagaacaaactaatacaactactaatacacacaacaaca

SEQ ID NO: 100605 - DNA, 581 bp, Homo sapiens
cctaactgattctcctttttttctctattaatcagaatgcagatatttcaggaggcaggaggtgttgccaacttgattgcccttgctttcttttgattagaagtggcccatggaccactccctggctaatgatatggaagcagaaatttattgggtacrgctctagggaaaacaactctagactcagctggcaatgtatttttgccttttgctcttcctctcctttttgcctaaaatacagatatcatgcctaaagggagtgcagccaggtgatgatgacaaaagcaacaagaaagaggactgagtgggaatgcaggagattaggcccctcttagcaccgtggaactgcactggatggcctgcttccagactcctgttatgtgagaaacacaagcccctttttagtcagatttcttgttttgtgtagctgaaggtaaccctaatggaaacactccccactgaccaaagcacctctaatccctggcagcccctcaaaagatgaatgagatgaatgcccaaattccctactctctccaaacaatgattagaattcttttacttctcctccttcttcctcattc

SEQ ID NO: 100606 - DNA, 518 bp, Homo sapiens
gtatttcatggtgtatatgtaccatattttctgtatccaattcaccattgttaggttgattccatgtctttgctatggtgagtagtgctgcggtgaacatcgagtgcatatgtctttttggtagaatgttttattttattttcggtatgtacctaataatgggattgctgaatcaaatggtagctctgttttttttttttttktttttttttttgagacggagtctcgctctgtctcccaggccggactgcggactgcagtggcgcaatctcggctcactgcaagctccgcttcccgggttcacgccattctcctgcctcagcctccccagtagctgggactacaggcgcccgccaccgcgcccggctaattttttgtatttttagtagagacggggtttcaccttgttagccaggatggtctcggtagctctgttttaagttatttgagagatctccaaactgctttccacagtggctgaattaatttacattcttaccaacagtgtataagcattt

SEQ ID NO: 100607 - DNA, 684 bp, Homo sapiens
acgtccctcctgtaccactactgaagccaggaacatatgtactatcagcagtttctttcaaccatgaaggagcatgctgttgagcacccaacctcatctaacagcagcaaacaaatagtccaactttattaatttctcagacaaactttgaatttcctttagaaaagtagaactggacataaggatgttatacttttccattgatggcattactaggcgggaaattagcttcatttctgacccaaaacccgtatccagtatgtaatcagctacatctaaaactaaatattttagttgtctgagaccaatcttttctttttttttttctgaagctaagttacttgtcctaatttttttttattattattatactttaagttctagggtacatgtgcacaatgtgcaggtttgttacatacgtatacatgtgccatgctggtgtgctgcacctgttaactcatcatttacattaggtatatctccaaatgctatccctcccccctcccctaccccatgacaggccctggtgtgtgatgttccccaccctgtgtccaagtgttctcattgttcaattccmacctatgagtgagaacatgtggtgtttggttttctgtccttgcgatagtttgctcagattgatggtttctagcttcatccatgtccctacaaaggacatgaactcat

SEQ ID NO: 100608 - DNA, 438 bp, Homo sapiens
gcagcccagcactgagcctgggtttctgggatcagccaggcctgcattccagcccgagctstgcgcctctcttgctgtgtcacccgggacaagtgagtcagtctctctgagccaccagctcctcaggcatgaaacctgtaactcagactcccaagtctgatttgcacatctctgattttaagcggcgccggctaaaggtgaaaattattctagtaggtattctttgcaccgctgatttgtacttcaggcaattggttggttttccatttagggtcgggagacaggggccctttttttgtccatcaattgatgtcagttaaacaaaaaagagtgggttttttggaagaaaaatattaagcaactacagctgccctgaggatgggacagaaatcagaaagtcgtgtgtaaagtttcagaggtccacttttagagaattct

SEQ ID NO: 100609 - DNA, 534 bp, Homo sapiens
cgctttcattggcagaccctcaatccacttgttttccatctaatcccacgcatgtgtgcaaaagctgctgtgcttctttgcatctcagtagttccttctggaattcagcaatgaaactcagggaaatgggttccaaatgcgaggctgactttcgtcctgggtttccttcttctccatcttcacctcatgtctgtttactgccatgttagcaatttgatgtattcaatcatgggttttatattctgtttggtgtcccccattgttctcatcggagatcagaagcttcagatgcacttatgtcaactcaagagtagaatgcttccttagcttccctccagagtcaggttttgtgtttctagttcccaagtgcacagcaggagtagtgatgtcctcactggcttctcatttgcattaarctgtgagcttctttagcgtggggacaggaccctgctcccattgcattctcagcaccacaccacacactccttgtttgaggccactccagacagcatgtgctgaaggatgccttgtggt

SEQ ID NO: 100610 - DNA, 534 bp, Homo sapiens
cgctttcattggcagaccctcaatccacttgttttccatctaatcccacgcatgtgtgcaaaagctgctgtgcttctttgcatctcagtagttccttctggaattcagcaatgaaactcagggaaatgggttccaaatgcgaggctgactttcgtcctgggtttccttcttctccatcttcacctcatgtctgtttactgccatgttagcaatttgatgtattcaatcatgggttttatattctgtttggtgtcccccattgttctcatcggagatcagaagcttcagatgcacttatgtcaactcaagagtagaatgcttccttagcttccctccagagtcaggttttgtgtttctagttcccaagtgcacagcaggagtagtgatgtcctcactggcttctcatttgcattaagctgtgagcttctttagcgtggggacaggaccctgctcccattgcattctcagcaccacaccacacactccttgttkgaggccactccagacagcatgtgctgaaggatgccttgtggt

SEQ ID NO: 100611 - DNA, 552 bp, Homo sapiens
aagaacttctagaggcattcactgaaggaagagctacaggaagcctggactcctgcagtttcatccggcacaagatccaggtgggagtaacaggaaaatgttgaacaagagtgagaagtggagtgaactacaaaatggcattctgaaaagccagatggccagtgttaagccaggtcctgacatgcatgagaaggcatgcctgcagcaacttcagcatattcctttcaacataacccgattaacctatggaatctgagttaatacccacattgaggaaagtggcactataaagtcaagattaggagactgagccctctctgcctcaatctgtcagacttcagccttcaagcagctggagaaacagtgggagggcagcattcttgtaaacaagctaatctttttagagttaagtaggcagtgacatttgttatttaaaacrtcaaacttggaaaagaccaactcacactgtaagagcctgcccttctcttactcccttgcactggactggtgtgttctctctgacaagttctcggctttctaaccttccctcag

SEQ ID NO: 100612 - DNA, 409 bp, Homo sapiens
ctccagaatggagatctttgggraaaaagaaagatgaaaatgcacatggaacagaaaagacatttcaattgagagcatacacaaacattgaggatataataaagggaatcatttaagagaaactcctggaaaaagtaagaaacaaacaccaccttggacaaaacccaaatgttaaattcatattccagatgtgatgcaaacatattgtggcaagcaaggttttaaacaaatgatagagaattttaatataaagacacatgttaagatcatttgcatttgcatgtttaaaggacatggcattaaaaataatacaattataacacatattgggcctagaataaactatgtttatatagcagttgcaatacaaatgttgttttaggttttataaccaaagcgtaggaaaatt

SEQ ID NO: 100613 - DNA, 541 bp, Homo sapiens
tatttatcctgtctgagtctttctcattttaaaatggcgcagggaggtgccgggcgcggtagctcacacctgtaatcccaacactttgggaagccaaggcaggtggatcacttgaggtcaggagtttgaggccagcctaaccaacatggtgaaaccccatctctagtaaaaaatatgaaaaaatcagccagctgtagtggcgcacatccgtaatcccagctactcatgtggctgaggcaggagaaccacttgaacctgggaggcggaagttgcagtgagcccagatcgcaccactgcactccagtytgggcaacagagggagactcagtctcaaaaaaaaaaaaaaaaaaaaaaaaaaaaaggtgtgtggcaggggagaggagataattcctgtgtggcagaaacatcaagagggatccccacctcatagagttgttttgagaattgaatgatttaaatttgatcgctaatgaattaaatgaaataattgtgtctggcaaacatttgggacaattgagtatcaaaatacatacattaaaga

SEQ ID NO: 100614 - DNA, 424 bp, Homo sapiens
gaattccagaaggaactactgagatgcaaagaagcacagcagcttttgcacacatgcgtgggattagatggaaaacaagtggattgagggtctgccaatgaaagcgacccgtactgaagtccactggctctggttgagacccagaagagtcatgcatcagaataaaggtggacaggaaataccctggcctttgtagggactgagcctgcaccgacgacttcaattgcagcytgtatggaggacccctgaccatcccccagaagtagactcccatctcttctgcagcaagataacatgctactaggcctcaattcattgctaaacattttttaacaagtatctcacatttaacaaaaaaagatcagtcatatggcagcaaaatacaatgtcatatgaccaaaacatgaaagactgtgaaaatgaa

SEQ ID NO: 100615 - DNA, 520 bp, Homo sapiens
ggagcaagaaactatatggattttgctgccaaagacacaattgttctatttactaataaaaggggaaacatatttttaycctgcagtccttatgtagtcatgataccagataatcagctccagagataacttcaaaaaagagcagctggacaaatttcaggagatattttatctgtaccactgcatacaatcatgcaagtatttaccccaagaggctggaccaaaggaaagcaatttctaaaatcaagaagacgatttcatcatacaagaagaaaacaaattgtgacttactaacctcagaaagataaacatcatttatatgtaatttgagtgccttcatggtatggtttgtttatggtgtggtatggaaactaacataatataagccatcttgctttattaataacagcaccaaactcatgagttggcagccatgtatgtgtgaaaagtgactggtgtaagcatggttggatgtaaaagtcaccaaaagcctggctttgcctactgactctgtcactac

SEQ ID NO: 100616 - DNA, 608 bp, Homo sapiens
tatataagtacagttatctttctgatatactgatttcttttcctttgcataratacccagtggtgggattgctgaatcagacagagccaatagacgatcagtaatggtggccaatcatcagctagaaacaaagtatttagcagtgcttgaaaacaccaaaactctgagaccactgaccttccaaaacttcaacagccctgagtgaaaagtccaaacacatttatccaccattcaaagaccctttattttctgtcctctgtgcatctcagtagtctctttttaccacactgtctatatactgcatgagccatttacgtgaaactatctgacactccaaggcatcttatactatatattcaaccatgtatccctagtacctagcacagtcctggcatatagtttgctactaaacatttgcagaatgaaggaattatcttgtatccaggttcaagttttaagttgattcttcactaaacaaagtattacagttcacaaataatctacttccttttttacaaatgggatcgatcttaatcttatcccctaataacattactttcatttactcccatctaaatatactgtcctaagagagcaataagaaagag

SEQ ID NO: 100617 - DNA, 608 bp, Homo sapiens
tatataagtacagttatctttctgatatactgatttcttttcctttgcatagatacccagtggtgggattgctgaatcagacagagccaatagacgatcagtaatggtggccaatcatcagctagaaacaaagtatttagcagtgcttgaaaacaccaaaactctgagaccactgaccttccaaaacttcaacagccctgagtgaaaagtccaaacacatttatccaccattcaaagaccctttattttctgtcctctgtgcatctcagtagtctctttttaccacactgtctatatactgcatgagccatttaygtgaaactatctgacactccaaggcatcttatactatatattcaaccatgtatccctagtacctagcacagtcctggcatatagtttgctactaaacatttgcagaatgaaggaattatcttgtatccaggttcaagttttaagttgattcttcactaaacaaagtattacagttcacaaataatctacttccttttttacaaatgggatcgatcttaatcttatcccctaataacattactttcatttactcccatctaaatatactgtcctaagagagcaataagaaagag

SEQ ID NO: 100618 - DNA, 598 bp, Homo sapiens
tggtggccaatcatcagctagaaacaaagtatttagcagtgcttgaaaacaccaaaactctgagaccactgaccttccaaaacttcaacagccctgagtgaaaagtccaaacacatttatccaccattcaaagaccctttattttctgtcctctgtgcatctcagtagtctctttttaccacactgtctatatactgcatgagccatttacgtgaaactatctgacactccaaggcatcttatactatatattcaaccatgtatccctagtacctagcacagtcctggcatatagtttgctactaaacatttgcagaatgaaggaattatcttgtatccaggttcaagttttaagttgattcttcactaaamaaagtattacagttcacaaataatctacttccttttttacaaatgggatcgatcttaatcttatcccctaataacattactttcatttactcccatctaaatatactgtcctaagagagcaataagaaagagagttgaagctggagcttgaagaattgtacatggtcctgtgataacctaccttgttttaacctgagtgactgtctcctagcagagagctggacag

SEQ ID NO: 100619 - DNA, 598 bp, Homo sapiens
tggtggccaatcatcagctagaaacaaagtatttagcagtgcttgaaaacaccaaaactctgagaccactgaccttccaaaacttcaacagccctgagtgaaaagtccaaacacatttatccaccattcaaagaccctttattttctgtcctctgtgcatctcagtagtctctttttaccacactgtctatatactgcatgagccatttacgtgaaactatctgacactccaaggcatcttatactatatattcaaccatgtatccctagtacctagcacagtcctggcatatagtttgctactaaacatttgcagaatgaaggaattatcttgtatccaggttcaagttttaagttgattcttcactaaacaaagtattacagttcacaaataatctacttccttttttacaaatgrgatcgatcttaatcttatcccctaataacattactttcatttactcccatctaaatatactgtcctaagagagcaataagaaagagagttgaagctggagcttgaagaattgtacatggtcctgtgataacctaccttgttttaacctgagtgactgtctcctagcagagagctggacag

SEQ ID NO: 100620 - DNA, 526 bp, Homo sapiens
ccacagtttcaacaaatcctaacattatgtctttatcacagaattttaaagaaaatgtttcagagttaaaatccattgggctttttttctaaatttatttattatttatttattttgagatggagtctcactctgtcacccaggctggagtgcagtggtgcgatctcagctcgctgcaacctccacctcctgggttcaagcaattctgccgccttagcctcccaagtagctggaaatacaggtgcccgccaccgcgcctggctgatttttttttgtatctttagcagagatgggacttcaccatgttggccaggttgatttcgaactcctgacctcaagtgatccacccgcctcagtctccaaaagtgctaggattacaggcatgagccaccatgcctggcctcattgggttattctttccaagatcatctctgcttctcagcggtaaccaacatcctgaatgaggtatcaytcccatgcattgttaaaacatttactacatgtgtatatggtcataaataataca

SEQ ID NO: 100621 - DNA, 365 bp, Homo sapiens
aacatggccttttatcagagcaactaaattattattattattggtagtagtagtagtagyagtagtagtagtagtagtagtagtagtagtagtagtatgagacagggtctcactctgttgcccaggctgaagtgcagtggcatgatgacagcctcgaccttcccagggctcagtgatcctcccatctcagcctctcgagtagctgggaccataggcacatgccaccatgtctggctaatttttttatttttttgtagagatggggtttgaccatgttgaccaggcttgtctcaaactcctgggctcaagcgatctgcccgcctcagcctcccaaagtgctgggcttagaggcgtgagtcactgca

SEQ ID NO: 100622 - DNA, 365 bp, Homo sapiens
aacatggccttttatcagagcaactaaattattattattattggtagtagtagtagtagcagtagtagtagtagtagtagtagtagtagtagtagtatgagacagggtctcactctgttgcccaggctgaagtgcagtggcatgatgacagcctcgaccttcccagggctcagtgatcctcccatctcagcctctcgagtagctgggaccataggcacatgccacyatgtctggctaatttttttatttttttgtagagatggggtttgaccatgttgaccaggcttgtctcaaactcctgggctcaagcgatctgcccgcctcagcctcccaaagtgctgggcttagaggcgtgagtcactgca

SEQ ID NO: 100623 - DNA, 562 bp, Homo sapiens
aaataaattggaaaagagctgcgctgtaaggaaatgaatattttggaggttatggcagtaaagtaagcaaaattctacaaggttctgttgtacgtttatgatatagggaaagaaaaagatcacaaagatgttaaggagggtgaattaattggctgtaagagacaaggaagatggagctatgctttcagattaattttaggtactacataaataaaggtgacattcgctgagataaggatatagcaaaagagccatgttattgtgaaaacaaaaggagaggggagatattgtatgtgtgtaatatataaaattctaacaygttgagtttgagctgtctgatggaagttaagatattaagggacatttggatattaatacatgtatctgagtattcaggacagagatatggttggcaatttgaattgggcacctttggttcatacagagatagcactagaaatcataggaagaaaggaaacaaaccaaagatcatcaagcgtgaaaagacatgaaggacaagaactacatctgaagatgtacgatcaaattgatgttcacagaa

SEQ ID NO: 100624 - DNA, 557 bp, Homo sapiens
cgacatcactaatgaccagggaaaatcaaaaccacagtgcagtaccaccttactcttgcaagaatggccataataaaaaaaaatttaaaaatcgtagatgttggcatggatttggtgaacagggaacacttctacactgcagtgggaatgtaaactagtacaaccattatggaaaacagtgtggagattacttgaagaactaaaagtagaactagcatttgatccagcaatcccactactgagtatctatccagaagaaaataagtcattatacacacatatattgcacacacatacttatagcagcacaatttgcaattgcaaaaatgtggaacaaactcaaatacccatcaatcaatgagtggataaagaaactgtgatatatatatatatatayacacacacaatggaatactactcagacataaaaaagaatgaattaatggcattcacagagatctggatgatattggagactatcattctaagtgaagtaactcaggaatggaaaaccaaacattttatgttctcactcgtaagtgggagctaagctatga

SEQ ID NO: 100625 - DNA, 579 bp, Homo sapiens
attcaggttgtagattaattttttttctccttaatttacgatgctgtgggctgctttcttcccgcttatcggaattctcaggcattacaaacggggrctacaacatccaagtccacataaggaagaccctccagttagccccatttctcccaattttcagtagccaaaatcctaaatggtagtttcaaaacgtcgggaacagcccgaagctctaccgcccgcggcacaaatccattttttttgcctcaggccccgcgcccacagctcacgggtgtctccatcgcaaacttcctaaggcttaacccaggggcgcatcagccgcagacacgacgccgcgggaagaagacccagtgtctgcgaccgccaccctgagacctcttcccgaggtggctcctaccggcgcacgggcggcggcgggcaccgcagaaggcgctgccgctctaactccttctggaagcggaaggcggcgcggaatcccttcttcactccccgaaccggagggaccagcttgggggcgactggagccaggaggcagcgatgtccctgctgcagcaatcttaccagcccggacgccattgc

SEQ ID NO: 100626 - DNA, 506 bp, Homo sapiens
acaacaggtactgcttttttaagtatcctggaatctgttcaatttttggtgtccaaaacaacaggcactgtttttttaagtctcctggaagctgttcagttaatggggtttaaaacaatgacaaacagcccccatgcctgccccatcagtgatcagaaacagcaatccatagtcagaacacagaaccctaatatttggaggacaaggtccttattgcccactctagctccagtgagccatacaagaaacattggttgctgtccctacagctgcctgctgccagctggggatttgagatgggtagtcataactgtactgatggctgaaataaataaaaartagataaaatttgccagccaaactgttccctggaagatgcaaacattaaaataaactccagagttccaaaatagtcacttcagactgtttctaacagtataattgttgtctaggtagagagacagattcttgctgcttcttactccaccattttccctgtcatcact

SEQ ID NO: 100627 - DNA, 506 bp, Homo sapiens
acaacaggtactgcttttttaagtatcctggaatctgttcaatttttggtgtccaaaacaacaggcactgtttttttaagtctcctggaagctgttcagttaatggggtttaaaacaatgacaaacagcccccatgcctgccccatcagtgatcagaaacagcaatccatagtcagaacacagaaccctaatatttggaggacaaggtccttattgcccactctagctccagtgagccatacaagaaacattggttgctgtccctacagctgcctgctgccagctggggatttgagatgggtagtcataactgtactgatggctgaaataaataaaaagtagataaaatttgccagccaaactgttccctggaagatgcaaacattaaaataaactccagagttccaaaatagtcacttcagactgtttctaacagtataattgttgtctaggtrgagagacagattcttgctgcttcttactccaccattttccctgtcatcact

SEQ ID NO: 100628 - DNA, 454 bp, Homo sapiens
aggaaccattcagtttttatactatcttactttcgtcaaaaccctaaaattctgaattttcaaatgcttctggcttgcagagttttggctgaggggtcatgcactttattatattaatgctcattgttgttgctgctgtttaagagtggcaagggtgagctgggactaaagggtcccccagacacccaccaaccctccaactgctcctcagacatcactgctgccaacttctggttggacttcatcagctccatctcaggccagatcatcgccatggctcaaagctgtgaccaggaaaaactccccacacagaggccyctaaaactgtgcttgctttcctggcccaaaggcaggtggtggcttttcccattgggcttcagggtgtactgtggctctgagccccaggcaggaccaaggaggacgccaaggtagctgtcaatgccagcagtaatga

SEQ ID NO: 100629 - DNA, 552 bp, Homo sapiens
ctcctctcactcactcccttcctgctccccatcatgctaaggtggccaccattttgaatgctgtttccatcgattccttttgctgcttcttgaccatcacataagtggactcataaatacagtcaaccctctctgtccatgggttccacattcatggagtcaaccaactgtggatcaaaaatatttgaagaagaaaacaataaaaaataacaatacagcaataaaaactatataaataaaaatacataataattatttgcatagcatttatattgttttaggtattatacataatctagagatgatttaaagcacacgggaggatgtgcgtaggttatatgcaaatrctatgccattttacataagggacttgagcattcatggagtttagcgtccactgggatcctggaaccaattcccccaggatgccaagggataactgaacatacacttttgcatctggcttctttcactcagcataatttctgtaagattcatccatgtggttgtacatatttggaaatttgtcccctttaattactgaatagaaat

SEQ ID NO: 100630 - DNA, 619 bp, Homo sapiens
gcccactggcacctttgaaaagcagaagaggggctaggcacagtggctcatacctttaatcccagcactttgggaggccaaggtaggtggatctcctgaggtcaggaggttgagacgagcctggccaacatggtgaaatgctgtctctaataaaaatacaaagattagctgggcgtggtggtgggtgcctgtaatcccagctatttgggaggatgaggcagaagaatcgcttgagcctggaaggcsgttgttgcagtcagtcaagatcacactattgcactccagcctgggcaacaagagtgagactccgtctcaaggaaaaaaaaaaagaaaagaaaagtagaagagttgccatttatttgcctggggtgcagtgcaagctgacactcaggtacactcaccccttggtaggtgcccctgagaaggacacaatttgccaactgcaagtggtggccccaggtaagatgcctcactcattggcaggcactcttggtggatctcctgagaaggagccatacagattgtctgctggtgtgggtgatctgtgcagacagccccactacagttgtggactgggcctcgaatgtgtttctctggcagtggtgcattgactggaccc

SEQ ID NO: 100631 - DNA, 532 bp, Homo sapiens
ttgctgaatctcagatagctttattaaatttaatcatatttaaccaagaatatatgcacatgatacaaaattcaaaaggggcaaaagaacatacagtgaagtctcctccacccactgtaactcacccacccagttctccttcccagaggcaaccattgccactaatttttgttatatccttccaaagataaccagtgcacatatagtaatttaatatataaatatatatgcatatatatatgtacacacatacatacatgtctatttgttgtttatacraatggcagcatttgttctgtacttctatcacttaatatatattagggaatattccatatttatacatatagctgtgtcattctttttaatggctaggtaatattttattatacaaatgcatcataatttatctaataagtcttctatttaagtagacttattagtcttaatttttattaagtattaagtattaataattagacttattattattaataagacttctattaagtccttagttacttgactcttc

SEQ ID NO: 100632 - DNA, 594 bp, Homo sapiens
tttcctgtgtttttctcatgatagagaataagtctcaaactctcatgatagtgaatacgtctcaaactctttttgcccgccaccatgtaagacatctctttgctcttccttcatcttcygccatgaatgtgaggtctccccagccatgtggaactgtgagtccattaaacctctttcctttataaattacccagtcttgggtatgtctttaccagcagggtgaaacggactaatacagatggggtctgttgaaagactggccaatacaaggttggagtggatagcagaagttgactttggactattttaagatacctgtagaaaatcaaggggaaacttcaagtattagttgggtatacagttctgaaaccttgaagaagaggctgggctgaacatagaaatttgggaaccattttgtgtatttggaatttaaagcaacaggagtaagtaaaaatgccaaaactgggggcagtggcggggaggtgcagggtacactgctaaggaagccaagataaagaaagaagcaaatggtcacatgtgttggatgctgctgaaacacttgagaatagcaaagaatgaaaaaagtcccattca

SEQ ID NO: 100633 - DNA, 611 bp, Homo sapiens
ttgcaagtggcacttggtgcagagaatagcattgttttctccctttctctcatactgacctcaaatagaaacatctctgaaatctgaaaatatatctaccatgtaggttattttttgcatacaatcttcaaaggagagcattaaagtataataattaaataattatgatctgtggaatcagttggaccccacctttagccatcagtttaggcagataaaaatgtttccagattttcttcccatttcctcctcccactctaaattaaaaaaaattttacaataagcatttatatcaatatttaaagagctctatcatctgaggagtcttattttttttctttttttgaagggaactctttatcttactgtatattaagatcccccaccctcgttgccttggtttttgtctttttgtgtgtttcttttatgtggtaccaggataaacaataactcgacaaagcaaaatctcttagactaacagrccatagttttcactttcccaggataaacaatgtatgttccttctgtcttttttgttgcgttttaatttacagctgttgaatcatctttaatctgtatatgcacattccttttttgcagtgacttattag

SEQ ID NO: 100634 - DNA, 599 bp, Homo sapiens
gccaggttcctaggaggtctggctcagctcaccaggctgaccatttaatgcaataatggcagaggccaaggcaagatgaccaggtcagtgtagatcttaaccagccagagacatggaagctagaagcggataaaagtaagccctcctggataagatcttttaatacacaatgtctctgcccactgtggttccatcagcatcttgaaatctgtccaataatattagcaatccttcttcctgatgtgtgagtgggggtgggtggataggaatttcactaaaatattcatgctatgtgaaatgaaaaagtccaaaaggactcttctatggtttgaatgtctgtccccttgaaaactcatgttgaaattgaattgccaatataatggtattgggagatgggaactttaagaggtgattaggccacagggctccatcctcatgggtgggtttagcacctttactaaagggcttttgggtgtggattcttgctatcatgtgtgctctcaygcccttctgccttctaccaggtcctcttggacttcccaacctccacaactgtgagaaatatgttttttctttataaattatccagtttgtggtat

SEQ ID NO: 100635 - DNA, 553 bp, Homo sapiens
tgttttataattcagattcttctgctttcttcctcctttcttattgaaatgaaggtggrccataaacctgccctaaataatgaaatataatcaaatgtggaaaaggattcagattccgtcaaaggaaaaaagggcctcatagttcattgtaatttaccacaatacccttctctgaactccataattatttatggcttcactagcttcactggtgctttggttatgctagggttgtaattatttagccttttgtgtacgtgccttggctctcttatcagatggtcaaccactggagggaggtctccaacagagtgtccaactcagttcccagcacattctgtgtggtgaatggttgtgctgatgatgagctgaggggataccagagaaggaaggtgagttgaagcttggtgggaaatggaactcctgtgtgaggaccattgaacccctctaggccacacctgtgttctcaatgggcatctgccttccagtaggagctcattccctcatgggttggggatgcgtatcatggatctttgaactaaattacctgctc

SEQ ID NO: 100636 - DNA, 668 bp, Homo sapiens
ctatattttaatcctttctcatagaatcactgaaatcacagttacctaggttctcaggagagaaaatgtggactctgctttttgcattcgctttttctcttctctcctgactctggacctaggaagcaataaaggagtgatccttctggaaggggaagggaacttggcactgtggaagctcyggaagtatccagaaggatgatgtcatgtaacagaaaggctgcttctgggtctcctgtctgcaatagtcagttgccacaaggggattatcatggaacatccaaagaaatattacatacctgcttcccctaggactaggttctaaactgccataaaattgcttccaggatgcgtctgtgggaaccatgctgagggcttgggtggctcattatgatggaggcctcagaatgaacgtgaaacaacagtgagatatggagaaaggtattaatttgagacccaccattagcaataaaattgttgagaaaaacagtcagagttcagtgttggagccaggtttattcttgcacatgattagcttagttaaaccacatcagatgccctgaagcccgcccccgccactctcaccacctcacctgaaacacagagttttgagaattaacagcaatgaaaaaaatcacctcatgaacatattaaagggatttttgttt

SEQ ID NO: 100637 - DNA, 668 bp, Homo sapiens
ctatattttaatcctttctcatagaatcactgaaatcacagttacctaggttctcaggagagaaaatgtggactctgctttttgcattcgctttttctcttctctcctgactctggacctaggaagcaataaaggagtgatccttctggaaggggaagggaacttggcactgtggaagctctggaagtatccagaaggatgatgtcatgtaacagaaaggctgcttctgggtctcctgtctgcaatagtcagttgccacaaggggattatcatggaacatccaaagaaatattacatacctgcttcccctaggactaggttctaaactgccataaaattgcttccaggatgcgtctgtgggaaccatgctgagggcttgggtggctcattatgatggaggcctcagaatgaacrtgaaacaacagtgagatatggagaaaggtattaatttgagacccaccattagcaataaaattgttgagaaaaacagtcagagttcagtgttggagccaggtttattcttgcacatgattagcttagttaaaccacatcagatgccctgaagcccgcccccgccactctcaccacctcacctgaaacacagagttttgagaattaacagcaatgaaaaaaatcacctcatgaacatattaaagggatttttgttt

SEQ ID NO: 100638 - DNA, 556 bp, Homo sapiens
tttttgactataataaacactccatcaaccagttcgatcacccaatttattcattaagtttggctctgcgtgactaatacagatgtttccaaaactccaattcaacttaaaaagacasagaaatggtaccactgctacctcatcttcaaagacaattccaaaaaaattttcaaggcattttaaataaagcagcattagaataagtgggtggccttctctagcaattactttgaaggaagttttggatacagcctgggctgcttttcatccagcagacactggaaggcatgccagccagtgttctgatttaaaaatttagattaaaggtcaggaaaccagcacccttaggccaaatccacttctcagcctgtttttatggatgaagtttggaacacagccctgcccatttgtttatgtgttgtcgatggcagctgttgcctacaacggcagagttgagtagctgagatggagaccgtacagcctgcagagcctaaatatatgtattatctgctatttttcagaaaaagtttgcccactcctgatttagactatcacc

SEQ ID NO: 100639 - DNA, 403 bp, Homo sapiens
ccttcaggactcaagaaacaacatggtgataagttccctgggttttctttatgcctcatatattccagagttggacctaagaaactgacaacctcaaagaartaatagctgaaaatttcccaaattttgcaagagacatagcctacagatttaagaagctaagcaaacccaaagcaggagaaatactatgaaatcacactacaaaacatcatagtcaaaattctataaacaaagacaaagaaatcctaaaagtaatgagatagagacaaaagcttacctatattaaaaaataataaatcagagacaatggatttcttatcaaaaactatgaaagccagaaggaagtggcacagtttttcgaatactgaaagaaaacaactatcaaccaagaataatgtatgca

SEQ ID NO: 100640 - DNA, 536 bp, Homo sapiens
tttacttttgcattcctctccctgtatgtggctgtgaaaaggaagaagagtggcacaggatggcaatgaaagttgatgactggctctgctgccttactaagcttttcagggagtgtctggttggtgggcttcttcagaatgtccagttctttttcttactttgggacttacctgcaattccaggataacaggaaaagacctcttgagcatcctgtaacacataggtagtactcactaatcatctgaattggtagatactttatgtctgtgttgctaaattctactcacttttcaaatttcagttcaaatggcatctgttcaaagaaccctaactccctgtagttgaaaatataatttctgatatctaaattgtcatggtcctttattcataacactatagtaatattatatattcctrtgttttataattatcactacctttatacattttatcattttaggtgataatattattaaaaatattatttaagaattgaatgggaaaaataacttaaaaataaagtttacacaggaat

SEQ ID NO: 100641 - DNA, 574 bp, Homo sapiens
tcaacatctgtttaacctcaactgaaggagatttgtttgaaagtatttttaatgccttttaggttgcttcatattattgaggggggctccatttccactatatacaactgcctatttaaagtgccttatagctttacatagggattgggctatagttggacatacaaaaaaaaatcaatagatgtwaaaacttggcttagttttcactccattataatggagcaatgctagatgttttaggttagtagagcaaactatttttagaaattactgaaccttaaatagattctaaatgagcagaaataagatttgagaatttttttaaaatgaaaagagattcacatttacagctttgttataatgtgaaagcattagaagaaacttacactatcaactcaggcaaagagctcgtgtatagctatggtcacctttaagcaagagacagtggacaaggccaggcaagtgggagaaataaaggttggagcagaacaccccagcaaatttctggttgccatattaaagaagggaaagacacacatagccagaaataaagcttctgctgtagctgccatgg

SEQ ID NO: 100642 - DNA, 651 bp, Homo sapiens
aattaacattcacttattgaaagacaactagaacctgttctaggaacacaggatgaaaaaaaataatcttcctgaaaagttcatttagtcccctaaagtcatagtatctgattatgaaattataacattcaattcatgaaacatctccccggtggcaaatgactgtttttacatcttgtagtaracagacaaaagcaatgaaatttgatgtcctcagacaccctgctggctttacgcttatgtaaagtccgcatttgtgttctctggcagctgtatttcttgcttgaaagacatggctcctgtcggcttgacttagtttcttccatctctccttgaagtgtgagtggtacaaaccagtgaaaaaggggacatactagaaagttctcaagtgtgaaattgaacccttagccaaacactaaaaatactctttgtggctcagcaaaagttccattatcttttgtttatttctgggtgccacagttcttcttgattatatctagccccagctgtggaagtaatagaaatgtcttgtgaatcaattagtacatggggaagctgttgaactataaaaaaaagttataagcacctgagcttgagaatgtttatctcatatgtaccttaaattatagaaattcaaccatccttattgca

SEQ ID NO: 100643 - DNA, 596 bp, Homo sapiens
ttctgtaagaaagaaaagggctctgaaagtgcaaggagtatcctcaactaatcatcgaaagcctagtgcttacatttacatgagtatacaggctgtgtatcctggtgctgcaatcctggaagactgacacgcatatggcagggagggttaccaaatcaaacctggtcatcactcacacctgggcatgtttcagtccccagtggggtccagtgcagtatcattcatggttaggtgcctccttttacaattacttcactgtttatgtcagcacttctcaaactttttgctttcaagatcctgttacactaaaaagttattgagaacatgtaataattatgtgttatagctatcaatattaccctactagaaattaaaactgacattgtaaacatttacttattaatataktctcaaaatatctcttccatgttaacataagtgtggttttatttgattaaaaaataaccacattttttccaagccaaaagtatttagtgagaagagtagcactgtatttatatagtactattttataatgagattttagtaaatcttattaattgtctgggttcttatatctgcttcttcattcaatt

SEQ ID NO: 100644 - DNA, 534 bp, Homo sapiens
gtttccaaataacaaaattgtagttatagttcatatttatgatacataatgttttaatttattaaaaatacacaattatattatattaagtataacatataaactatagactacatattcaaaactataaagtaaatgaatacaaaacatagtattttaaatgttatatcacagacattgtgaatgtatgtcattcaaaactgagcatgattttgcttttgacagtttttaaccctccatcaacatttcctgttcaatagtgaaagcagtaagatttccagggcatatattcattcctcattgagggaatttttaaatgtaaacatttttagatttatctactgaaaagtttaaaaattatttttaagagccacacaattaccatccrtttttctagttgaaaatacgaaggagaattcgagctgacaaaaatgcaacctcaatactattttgactttttaaaataaaactattccctatgtttaaggagcctatctatcctgcaaattctttataagggggaaaaaacatggt

SEQ ID NO: 100645 - DNA, 505 bp, Homo sapiens
ccaacaataagacaagttgctttttgagggcataaatctctcatagtcaacagaattgctgaaagaactcttagaaagattttagaattcattctccaattgcacaggagatgtaactagtgactcactaagttcttttttttttttttttttttttgagacagagtctcgctctgtcgcccagcctggagtacagtggcatgatctcggctcactgcaacctccgcctcccaggttcaagcgattctcctgcctytgcttcccaagtagctaggactacaggtgcgtgccaccgtgcccagctaattttttgtagaagattctgatactgatctaaggtagctctcactttccctcagagcattctaatttactcaaagacaaaatgaaggtttttgactgaataatctctaagctccatcctctgtaacattctagggtcctatgcgtgaactagtctaatctgttattacaggcattacattttttcctgcaaaaatttccg

SEQ ID NO: 100646 - DNA, 585 bp, Homo sapiens
ggaaatgtattaatagatgcatgaagcaggcaagggcagaggcagagtgtggcaaattaaagggcacctgcctcatctagaggcagcctctacccagcacgagcaggttagtgccaagagaggaagagaacccagttttgtcagatctccaactatcaaagaaagctggaaacctggcttttaagttatacttaccaattttgtaagaaaaaaaaaatcaggtcgagctaaacaccttaccactgtgggacagatccacccatcctcctccgggcttctcaatagttcatgtcatagggaaacctggctctttatttctaggaaccttaaaaacargtctataaatgccaccattcgctccagtattacatttggagtctttctgaatggtggcaccacctaagtctgcagaaggccgattctgtgggttattttagaagagccagtgggtttctgaaagctttgtatgaatgctaaaggttagtatgtctcttacaccagatttgaaatcctgtacaaataagtcagtggagcactaatgaaaaaactactgtgatagggcctgtgctgctccgattagacatt

SEQ ID NO: 100647 - DNA, 588 bp, Homo sapiens
ggtgaattaactttttgatgtgctattgaatttggtttgctagtattttgttaagtatgtttacatctatgttcatcagggatactggcctatagctttcttttttttttcattgtgtccttgccaggttttggtattgggatgatgggactcattctactttatagaatgagtaaggaaggagttcctcctcaattttttagaatagtagaattggtaccagctcttctctttttgaatttctagtagaattcagstataaattcatttgatcctagggtgtttgtttgtttcattgatactttgtatggattttggtgtctcaatttgttatattcagctctgatttagttatttcatttcttctgctagccttgagattagtttgttcttgattttcctagttcttctaggtgtgatgttagatcattaatttgagatctttctaactttttgaggtgatgttcagtgctacatatgctccttttaatactgttgccactgcatcccagatattttggtatgttgtgcctctgttttcatttatttcaaagaattttttaaatttctgccttgatttcattaccc

SEQ ID NO: 100648 - DNA, 556 bp, Homo sapiens
gctgcctgccaaacaggatcacccatcatggacttgatatgagtgagaaattcaattctattgtgctaaaccatagggtgtaatgggtttatatgtacaacagagccaatctaactaacacacccaccacctgccatatgtgttacaactgtttccgccaactgtcatttgtgtaatgactgtgcttgcagtaaaatttaaattgtaaaatgtttatattttcttgtatgcctgcattttatagcctctatattttccgtgtaaaatggtttctggggagctgtttacaagtacagattctaagatccaccctaraaaattctgctgcaagcagtctggagtggagccaggaaatctcgatcttattaaagctccctggggttattctgctgcatcccaggattggagagtattgcttaggatattaaagtggcagcccctgccacaatggaagcaactctgggagtaacctaacctgcctcctaaaagtagattcctagcgacacctggaaatagcctaaactgaagctgggttagcccagtattgtgtgggagg

SEQ ID NO: 100649 - DNA, 538 bp, Homo sapiens
aattttgactgagttacctgcttgcctaagcagaccagacacattagttcatttgatagatctttgaagatccatgatttgagggaacacagccactccaacctgtaattcactctgctattgatagagacttctcaattgtttgaaagcattcttactagagccaatgatctcagccttgtgtctaggacacttcctaaggtcaccatttttaaaattttttttaggtggagtcttgctctgtcacccaggcgggggtgcagtggcgycatctcagctcactgcaaccttcaccttccggctcaagcgattctcctgccttagtctcccaggtggctgggactaaaggcgtgtaccaccacacctggctaattttttgtatttttagtagagacagggcttcaccgtattagccaggatggcctcgatctcctgaccttgtgatccacccgcttaagcctcccaaagtgctgggattacagctatgagccactacacccggcccaggtcaccatttcttataaagcacccaatcaca

SEQ ID NO: 100650 - DNA, 538 bp, Homo sapiens
aattttgactgagttacctgcttgcctaagcagaccagacacattagttcatttgatagatctttgaagatccatgatttgagggaacacagccactccaacctgtaattcactctgctattgatagagacttctcaattgtttgaaagcattcttactagagccaatgatctcagccttgtgtctaggacacttcctaaggtcaccatttttaaaattttttttaggtggagtcttgctctgtcacccaggcgggggtgcagtggcgccatctcagctcactgcaaccttcaccttccggctcaagcgattctcctgccttagtctcccaggtggctgggactaaaggcgtgtaccaccacacctggctaattttttgtatttttagtagagacagggcttcaccgtattagccaggatggcctcgatctcctgaccttgtgatccacccgcttaagcctcccaaagtgctgggattacagstatgagccactacacccggcccaggtcaccatttcttataaagcacccaatcaca

SEQ ID NO: 100651 - DNA, 658 bp, Homo sapiens
atgctgattttaaaaaaaagttttccaggaattataagcacatgatataatttctgcattcttttagacagtgagttttacagtaaatttattaaatatgaactaaaagaaatggtatatctttttgttcctgagttgaactagatagcagaaactgatgagtcttgtgaagtgttaatgcgagacatctccagagctgggatgatattagagcagctctatctgatgagcagcatgatctctctgctcatcgtgagatttgagctataataaaagagaactgtaaggtgcaagtctaagagcatgttgtctaaccaagtggaaattaaaatgaggttgttccaggtatagtgttataccactttatttgaattcagaaattaatatgtgcctgactttatctttttttccagttaatctctaaaaaaataacatatttggcaaagtgaaatgcacactcatggtttatagtttgtagtcactctcagatctccaatsatgaggccctaagactcgctatttgaatattccactattcctatgaaccagtactgtcactgttaacatttgcctacagttaaaagggtgacttctttctggaaaaatgcaggtcccccttgtgaatacaacgtagagagatgtatgattttcttacatc

SEQ ID NO: 100652 - DNA, 561 bp, Homo sapiens
agaatacatttgagatgatgtatgatgaagattaattggaacatcagttataatgtcaaagcttataaacaactaaaatgtacatcagtgagagttaatatattaattatcattctaccacacaatgcaatgccttataaaccatttaaaaaatatgaaattctgtatttgtgatatggaaagttttccaagatgttttaagggaaaaaaattacaaggtgcagaacaacatatatagcattttcccatttatgtggaataatatttctgtggataattttagaaatgaatggaatatctcctgaagtttatgaaaactggttgtctttgaggagtggaatggtttttgaggcacaggggaaaatgagagatttttcattgtacgccatatagtgcatttctatcttatatcatgtacattaatcctacttaatattcacaaatattataaataaatgaagcaaaataaggaatttatcacatattttgttacatgctgtttcccatcatawtacaacttattgggaggcattctaattcctaaaatttaggtaatcacaa

SEQ ID NO: 100653 - DNA, 620 bp, Homo sapiens
agccatgacaccagtaattatgtctgtctttctcttgattgtatttctagaacctaaaatagttcctggaccagattaaattctgataaatatctgtgaataaatgaagggcagaaatatgatcagaactgttctctctctagatctatctatctatcctgccataatccttggtgatatggtttggctctgtttccccacccaaatctcatcttgaattgtaatccccatgtgttagggtaggggcctgatgggaggtgattgaatcatgggggcagatttccttcttgatcatgatagtgagtgagttctcacaagatgtaggtgtttgaaagtatgtggcacttcccccttcactctctctcccctggtccaccatggtaagacrtgcctacttctcctttgccttctgccatgattgtaagtttcctgaggcctcccaatcatgcctcccattaagcctacagaactgtgagtcaattaaacctctcttcttcaaaaattacctagtcttaggtagttttttatagcagtgtaaaaacagactaattcacatggggactagagacagctcattccctaaattaaaaaagaagtacctaaataagctacactaaaat

SEQ ID NO: 100654 - DNA, 540 bp, Homo sapiens
ttttaacaggggtgaagctattgacaaaagcacaaaaagtgcattctccaaatacacattcacctgcccccaggagagagaamctctattgctttggcaacagtgaggggaggcagtgaggagatgacaattttccatgtctattcctggcatctggtgctgcccttttcagtgaatggcatgattagcactgcatccatattttttttttgtcccaaggggagctttggtgagctgcacacccctctcacttaggggtgacccccattgagggtaagatctccaggtgtcctgtacctcccagtgacctgctggtcccctgtattttgccacagtcagagaaggctgtggggtaggtttgtgagggatctggtggtgcagtgactcaggagaagagattgcctgggcagggcagtggcctaccagtatggtgcctgacttctcctttctggccttaggggagtgcagttatgcttgtgtgaggtgaccacctggttctgtgtccctgggaagttcttaagttgctgccaacagtgttat

SEQ ID NO: 100655 - DNA, 623 bp, Homo sapiens
atggcatacatggcataatctcattttacaaaagaaaaaattcaataatatgtaagaatatatggaaaccagataaaagattatggaaaatattcagcaagatattaatagcagttacctttgaatgagtgggattatgacgttctttgtgtttgccatattgtttcagattttttttcttttctgcagtaataatttctttgtttttttttctaataaggaaaaggtattggaagaaggtaatgatgaaagtatctactttttaatgagtgaaggcttactgtgtgtagggcactttggcgaattttagttctaattgcgtgttttaatccttaaaatttctgggrgacagataccatgaatggcattttataaatgcaaaagtaaaaacttagagatgttaagtaatgttcaaggccacattgtgcctggatctagacatggcatttgaacacagactagcccaactcctaggaagtcgttatgctactcccttgttactggtagattgttaagccatgtttctattacaaacagcacaaagaagaaataaatgactatgcaattaatccgacattaaaaaaataaagttaaaaaggcacttaacaaatcaaaatgcttaa

SEQ ID NO: 100656 - DNA, 573 bp, Homo sapiens
ttgttagaaatcaaagattattttagtgcttctctgatcttgcccccctcccgcatcattgcctactcttttccccaagaagaattaatcatcctcagccatagtagcttcccttctttttccaaatacatctagcatggtgatctaatggttagggtacaatgcactctctcagacacatctagcagacccttgcctcatggcctttgcatctgttgtaagatgtctggagcacatgtagattcagatctttatgtaaatgtcacttttatacatagtgcttgcattattatcctatgtaaaatagttgccccactcctacactcctcccattattcttcattgtatcacttgttaaagttttcttcatatgtcttatcactacctaacscatgccataggtttgtttattcattgtctttctcttcaccctaaaatgaaagttctaagagggtaagagcttttttgtttagtcaattgttttattcctagaacgtgaaatagtgcctaaccctaagaagtccttcaataaatatttgctgaaaattgttcacatgatctcattattatttt

SEQ ID NO: 100657 - DNA, 573 bp, Homo sapiens
ttgttagaaatcaaagattattttagtgcttctctgatcttgcccccctcccgcatcattgcctactcttttccccaagaagaattaatcatcctcagccatagtagcttcccttctttttccaaatacatctagcatggtgatctaatggttagggtacaatgcactctctcagacacatctagcagacccttgcctcatggcctttgcatctgttgtaagatgtctggagcacatgtagattcagatctttatgtaaatgtcacttttatacatagtgcttgcattattatcctatgtaaaatagttgccccactcctacactcctcccattattcttcattgtatcacttgttaaagttttcttcatatgtcttatcactacctaacgcatgccataggtttgtttattmattgtctttctcttcaccctaaaatgaaagttctaagagggtaagagcttttttgtttagtcaattgttttattcctagaacgtgaaatagtgcctaaccctaagaagtccttcaataaatatttgctgaaaattgttcacatgatctcattattatttt

SEQ ID NO: 100658 - DNA, 573 bp, Homo sapiens
ttgttagaaatcaaagattattttagtgcttctctgatcttgcccccctcccgcatcattgcctactcttttccccaagaagaattaatcatcctcagccatagtagcttcccttctttttccaaatacatctagcatggtgatctaatggttagggtacaatgcactctctcagacacatctagcagacccttgcctcatggcctttgcatctgttgtaagatgtctggagcacatgtagattcagatctttatgtaaatgtcacttttatacatagtgcttgcattattatcctatgtaaaatagttgccccactcctacactcctcccattattcttcattgtatcacttgttaaagttttcttcatatgtcttatcactacctaacgcatgccataggtttgtttattcattgtctttctcttcaccctaaaatgaaagttctaagagggtaagagcttttttgtttagtcaattgttttattcctagaacgtgaaatagtgcctaaccctaagargtccttcaataaatatttgctgaaaattgttcacatgatctcattattatttt

SEQ ID NO: 100659 - DNA, 600 bp, Homo sapiens
tcattctcatacctcctctccctgacatcattgctgccatgtgccaggcactgccctaggaatcagcagcaggaagaatctaaagcaatcagaaaagatgaggtgcctgcttctattgaacatatattctagttgagaaaactggataataaatcaataaatatcagatatcagggacaataatatctaatatatttctaatgctgtaatgagccagtcaccattctctctcttatgtggtttgtgttcttttacacatatgaattcccrcagaaacctcatgaaagataattaattacatcctatttacaaataggaaattgaatagtggagacaagcaactttgataaagtcatacaactactccgtggtggagtaataatgggtcccagcagtctggcttcagaagcaaggcatttaacccccgtgccacatcattaagtatcaagcagagtgttaaaatggactgatataaaagagagggacttaccagacagctactttagatttgtagatcaagaaaagcctttctctggaggtgatatttaagctgagatctaaaggacacaactatgcaaaaactagaataacatagtaggc

SEQ ID NO: 100660 - DNA, 505 bp, Homo sapiens
aagaacagtcagaatctgtggcaattgcaccattacttgttcccttccttacaccccacacctgctcagacttacrgaaaccctactcctggcacatgcaaccaagaagtcagacactccctctacactcaattttaagtctaaagctatagtttcactggtatttctcatacctcttagcactgtatagcaaaagtatattttaggtgaataaggccaaaaaatctgaaactctttccacacctagcacgtacttacagggaagaagctgtacttcatacacagtagcccaagactacttgggtcttgactacccctatgcaagctcacttgtaggatagattttcaaagcttgatgaacaagacagtaaagcaggggctacccttgtacccagtgttcacactccgggagaagtggatctcagtttcaaccctcagttcctgtacagtggcacagagtttctgcccagtggaagagataggctataagaggacagactttctt

SEQ ID NO: 100661 - DNA, 599 bp, Homo sapiens
atacaattaagtattcacagccttagattaggcatgcttatttaaatgacaacagaaacaaaagctataaaagaaaaatagattaatttcacttcatcaaaattaagaacttttgtgcttcttaagacaccatgaagaaattgtagagagatgtcaaagaatggcaaaaagtatttgtaaatcacttatctgataaagacttgtattcaaaatataaataaagttacaaatcaacaataacgacaacacccaagtgacccaattttaaaatgggcaaaatatttgaattgctatttctactacatattgtatggagtacaatacacttaaggaatgttctgcacataaaatggccagaaacagtaactctatagatacagsgttgattagaagttgcctagagctgggagtggaagggaattaattactgataatgggtagaaggtttctttttggttgcaaaatgttttaaacttagattgtggtgatggttgcacaagtttataaatacactaaaaataattgaaatatacattttaagttgataaatgttatattaattatatctcaataaagatgtgttttaaaagataatatgc

SEQ ID NO: 100662 - DNA, 541 bp, Homo sapiens
ttattcatattaatattcctgcaataactttctttaattcatggtgatacagctggtgaccaattgattcagttctatatctgtatttttctggtgattctactctaaagaagtttttcctcttctttttctcctctttataacattattttatagaacgtatttcatttattattattattgttaatcttcgaatgaggygttaaagaaaatctgagctatatttcaagtcagaaagaacttttcctggttcacgtaaagttccttataaagcacaaagttgtaggaatgaatgacttgatgtttttctggacaaaagtgattgatagctgaaatattgctcatttccctccatttgtttcctgaacataggtgtgtcttgtgcttctatatttggcagctcttctcttccttcttaaactccaactaagtctaggggatctcctgccaatagacgcaccatgtttctattgttgaaaataagaaatgttggttttctcttctaataattgttatctactttgcactgcaatgtcctgta

SEQ ID NO: 100663 - DNA, 589 bp, Homo sapiens
ttgtttcctgaacataggtgtgtcttgtgcttctatatttggcagctcttctcttccttcttaaactccaactaagtctaggggatctcctgccaatagacgcaccatgtttctattgttgaaaataagaaatgttggttttctcttctaataaktgttatctactttgcactgcaatgtcctgtaggtctctccttagatctgcacctctgtttaatttttttttttctttttctttttttttttttttttttttttttgagacggagtcttgcccttgtcatctaggctggagtgcagtggtacgatctcggctcactgcaatatccacctcccgggttcaagcaattctcctgcctcagcctcctgagtagctgggattataggtgcctgccaccatgcccggctactttttgtacttttagtagagatggggttccgccatgttggccaggctggtctcaaactcctgacctcaggtgatccacccacctcggtttcccaaagtgctgggattacagatgtgagccaccatgtctggccacctctgtttaatttttatggtatttgacaacccattctttcacat

SEQ ID NO: 100664 - DNA, 643 bp, Homo sapiens
gaaacacttaaaaaaaataggcccttgtcaagttccccctaatagaaaggtattagatcatatctttttgtcctccaatcatatttctcgacaactgttcactctttatcaaacctaaagataaaaatgcacgagtttaccgatttctttgggtcttcattttcaaaggctctcatatcctgtaaaacctatgtaaaataaatatgtacgtgtttccattcttaatctgtctttttgtacagtggcctcagctgtgaacctagtagtaagtaagagaaagatattgattttcctctgctacactgagaaagctaaatttttatgtatattttgattctatcaacatatagtgaagtctttggtgaaccctaattttatastttgagtgttggtcttacctttaacacttttactttttattctttactttcatttttactttcctttcttagttttttcaagggttctgataggcaacattagtatttgaagtttttcatataaaaatgctcttagataatatggaaaagttatacacatattgacagttcagaaatcacttgatccaaggcacaatgtgatcaaagccaaacagtaaaatccacatgtgtgggctggcttgggccagtcatcatacaaataa

SEQ ID NO: 100665 - DNA, 588 bp, Homo sapiens
tcaaatcctagaactatcaatgactgtaaatattgtttaatgccagtaagtttaagttggtttgttacatgttaatgaataatgaataggtaacagtgcgtttattctgccagcaaagaaataggttcaaacagcaaaagttactttctgactstcctaaaaaaatgtttatagaaaagacgagattagaagagctacttgaatggcctctatgactttttattgagaaaacagattcctggcctaaccacaagactaatattttgagataggtcataccccaaaggtcaattccaagtttgaagactatcaaggatagcatctcagaatagttctttcatctcattttgctaccaaagtccacaaacaacagaaaaggtatttggcaatcaatgaaacacagtagtgtagaagtcacagtttttcttgcttctcttcctctttctgatggtacactttaagtttactagtataagcacccttcagaaagtaaggaatgcaccaggtaacaggagcccataactgcaggctgctgcttttcattcccctttaatcaggggaacagtaaatgaggaaaaggttaatact

SEQ ID NO: 100666 - DNA, 643 bp, Homo sapiens
attgaaaaaccctgattaaaaggatgaaccaaggatgagttcataggtgaaccccattctctttaatatagttagctacagagtaagaaaccagactggaaaacatgtttctaaaytaatggggattttttctctctttttattcttttacttagggattttggatttagtgcttatgatagtgaaagtgtatgtttaaaaattttataaagcaaattaaaggcttcattgcatttttattccccttttctcatgttactcgacatcatcccacagtatgcaggctttcaaggcaaactagtctgtcagtcacttgagagtacagaccactatagaagccaattctgacaaatctgatttgaaatagttccaaaaagattctcctgagactgacttttccatggattacacctaaaggatgctctagggcccttcaactgatatgtcactttgtgaatacagcagcaaaatccctgaccactagtcctcttgggtgctcacagagtaaagcttgagtaagacatagttggaataaataaaaattaagaggtggtacaaaggaaaaatataaatagctttgaatacggtttaccaaaattaaacagtagataaagaaattaaaacaagattaaagggggaaaaa

SEQ ID NO: 100667 - DNA, 643 bp, Homo sapiens
attgaaaaaccctgattaaaaggatgaaccaaggatgagttcataggtgaaccccattctctttaatatagttagctacagagtaagaaaccagactggaaaacatgtttctaaactaatggggattttttctctctttttattcttttacttagggattttggatttagtgcttatgatagtgaaagtgtatgtttaaaaattttataaagcaaattaaaggcttcattgcatttttattccccttttctcatgttactcgacatcatcccacagtatgcaggctttcaaggcaaactagtctgtcagtcacttgagagyacagaccactatagaagccaattctgacaaatctgatttgaaatagttccaaaaagattctcctgagactgacttttccatggattacacctaaaggatgctctagggcccttcaactgatatgtcactttgtgaatacagcagcaaaatccctgaccactagtcctcttgggtgctcacagagtaaagcttgagtaagacatagttggaataaataaaaattaagaggtggtacaaaggaaaaatataaatagctttgaatacggtttaccaaaattaaacagtagataaagaaattaaaacaagattaaagggggaaaaa

SEQ ID NO: 100668 - DNA, 574 bp, Homo sapiens
aaggaaaaattgaatgcaggaccagagactgaactatcgtaacatacaaaaagacagctttctttctgcagttagtagagctgggtcgatatatgaaaatatctcatctagaaagatacagctttgccaagctcaagctcaagctgtgccagggaccagaaatgaatgcagaagtagaagaatggactagaaagaaccagtatggcaatacagaaccagaaaaacaaaagagatggtaaccctgaggtcaattgcagtcatttccttcatcatcttaggacaaatttgaatgatggaatccagtgagcagaaactggaagttaaaccagagccatctcatatgtcaatcatyccttatcaattaatttctaaattcataaatatctactcagtgtttgacatattccaaacaatgtgttgggtgttgacaatacaaaaataaaacagatagacatgttttttgcttccacatttgttttttaattgttgttgttatacctctgaattatttaacaaagtacatatagtctatttcatagtgtcagatgtcattcttaattaaattttatgtaca

SEQ ID NO: 100669 - DNA, 535 bp, Homo sapiens
attatgactttgttattttctttatttggaaaataagtatgctttaaggaaatgtagatggatgccaagttgacaaggggtggacttattatagttgattttatgtgtcaactataatgttccaacatttctgacaattttaggaatagtcgatttattaaagcacttatttttctccaagccaatcagaatagagctcttttactaatttggtcatgacactcagaggttggaaagtacacatacacttaacatacgtacagacagagagacagttgcaagtagagatctttatggctttcattccaaaaacttagctatgcatcaagcrtaagtatactaatataaaactcactagtatgtatttgggttggttttcgtctttgcttcactgtgtatttttatccaaattacatttctgacaaatggaacaagttgttacttgctcaatataagggctaaagcttttttatgaatatttgtaaaggagatttttaaattttcatatgtaatattatggagactgtgaacaact

SEQ ID NO: 100670 - DNA, 574 bp, Homo sapiens
aaggaaaaattgaatgcaggaccagagactgaactatcgtaacatacaaaaagacagctttctttctgcagttagtagagctgggtcgatatatgaaaatatctcatctagaaagatacagctttgccaagctcaagctcaagctgtgccagggaccagaaatgaatgcagaagtagaagaatggactagaaagaaccagtatggcaatacagaaccagaaaaacaaaagagatggtaaccctgaggtcaattgcagtcatttccttcatcatcttaggacaaatttgaatgatggaatccagtgagcagaaactggaagttaaaccagagccatctcatatgtcaatcatcccttatcaattaatttctaaattcataaatatctactcagtgtttgacatattccaaacaatgtgttgggtgttgacaatacaaaaataaaacagatagacrtgttttttgcttccacatttgttttttaattgttgttgttatacctctgaattatttaacaaagtacatatagtctatttcatagtgtcagatgtcattcttaattaaattttatgtaca

SEQ ID NO: 100671 - DNA, 530 bp, Homo sapiens
taatcctcaggagcaatcttctactttattactctagctgactgtttacctctgagcaagtggctagacctctgtatttcacattattataaacaccaaatacatcattaacttgcattgttctcacatttgtaattcaactagcaatcttttcacaaatttgcataactgccagcttcaatatgctagtaagttattttcaattgtataaaatgtgagagctcagtgatgtgggaagttgttcttccagcctaatctactgagtgacctctcttctgtgcttagcatcctcatatggccttcaggccagcagtggctcccaagaatcctaccagaatctgagctgcccaaggcacamttcatgctttagatactcctgcatactcttaagcaatgagagagaatggataaaagaatgcatagacacagagatgatagatagatagatagatagatagatagatagatagatagatagatagatagatgatagagacagataagatagaaagaaagatagatattggtaa

SEQ ID NO: 100672 - DNA, 626 bp, Homo sapiens
catatattcaaccacctcagcatcaccaaaatctaattataattccatgtgtatttttggaaatatcttcatctttatctttttcccaaacgtgtcactttcttcttcttttcagattgttttaagtagtttgtgtgaaactgtgctatttcttaaaatctaaagatttgctagactctattgcttcttaaaaacaaatatatcctttcttaacaaaggtaaytatggaaagtttaaaacaattttcaaaagagtatttataaatagtatcctacttcttcagatataaatattgacaatagaactatggaatggttgaatataacagcaattataaactcagacagtgattatgaagtctagattacataagctttgtttaaaataccgatgacaggcatgctcaatttaaggacctatatattaacttttttctttatatttttacacaaaaacccaaatacatttgaatttgacaagtgtttaatgatcatccattacaagcaaggtgtcatgcatgataaaatcattagcaagctgtgactgctccttgaaatgtgtaccccaatatcaaagataatgcaacaaagtgtgaatgtattaatagaacaaaaaatgccgacaaa

SEQ ID NO: 100673 - DNA, 626 bp, Homo sapiens
catatattcaaccacctcagcatcaccaaaatctaattataattccatgtgtatttttggaaatatcttcatctttatctttttcccaaacgtgtcactttcttcttcttttcagattgttttaagtagtttgtgtgaaactgtgctatttcttaaaatctaaagatttgctagactctattgcttcttaaaaacaaatatatcctttcttaacaaaggtaactatggaaagtttaaaacaattttcaaaagagtatttataaatagtatcctacttcttcagatataaatattgacaatagaactatggaatggttgaatrtaacagcaattataaactcagacagtgattatgaagtctagattacataagctttgtttaaaataccgatgacaggcatgctcaatttaaggacctatatattaacttttttctttatatttttacacaaaaacccaaatacatttgaatttgacaagtgtttaatgatcatccattacaagcaaggtgtcatgcatgataaaatcattagcaagctgtgactgctccttgaaatgtgtaccccaatatcaaagataatgcaacaaagtgtgaatgtattaatagaacaaaaaatgccgacaaa

SEQ ID NO: 100674 - DNA, 588 bp, Homo sapiens
accaggctgatagcagaggttacctacagacacttttatttcctacaactgattttctgaaaaaaaaatttatagtgaactgtttaaagtggaataggaaataaaagtgttgtggttgaattgtgtcccctaaaaaaaagatatgaaatcctaactcccaatacttgtaaatcttacctaatttggcaatcgtgttttggcagtaatcaagttaagatgaagtcatgttggattggggtgagccttaaattcaataattggtatccatgtgaatacactgggacacagacacacccagggagaatgccacatgatggtgcatgcagagaatggagtgatrcaactgcaggtcaagagatgtcaatgagttccagcaaccaacagaaaagagaggaaagaacaggagagagggaaggagcagattctccttcaacctccagaagaaaccaatcttatcaacaccttggctatgaattctacctggtaccacttctgcattctgccattgtatctaatatttgaggaatctgtgatttggtgggcagcagcttattaaggggaaccaagctagcttaataaataagactt

SEQ ID NO: 100675 - DNA, 589 bp, Homo sapiens
ctgtttgcacaggttctgagaggaatgaaggagattgaaaaggcccttgcggagtctgtatcttatatgtaggtgagacaggcttagaattgttccatagtaatgcacagtcaagcacaacatcatgtttgtggaaatcccagagggggccctgggaaatgtgtcagaggagaaagtttgaatgaggctttcttgtataaaaagaggttttgtgaccagattcacagctacttctgtccacttttcaacattgtatagatattattatacaaggcatgtctcagaattagtggatcctctggctgaactagtagtaaatggatagattaattgatgaatccctgccatttttctgatagtgtgtgccatamgtagttagagaaggctcaaaccttcaccaccatctgaatataatagtctttgcaaatacttccattgcagtatctaattcttaatcttacatacagtggtctccccttattcacggttttgctttctgtggtttcagttaaccatggtcaactgtggtccaaaaatattaactataaaattccagaaataaacaatgtataaattttaaattgcacac

SEQ ID NO: 100676 - DNA, 569 bp, Homo sapiens
atagcttaggtcagggtgtgaaagacagagctataagggctggtaaaagaacgaaagctttccaatccagagacaaaaggaaaagtgagatccatccatgacatgtctcttgaggactcttttaggaccaagatggtgaatgctgaacggaccatgcatgcctcagtctgtcaaattgtatgtttctaaggacaaataggctacaaaactttcaccctatttttatatgggaagtctgttgaaaagaatacaatacataaaagatgaattacttattgagtctttaatatgtctctagcacagaaataaacatcttgtgtatrttgtttctaatttccacaataccatgagctagaaatatacagaatagaagaacagtgggatcagagaggttaagtgatttatccaagaccacacaggtgttaagaggtagaggaatggtttgaacttgcaacaatgtgactccaaaatcaatacattttccttacactgaaatacaaagtatcaggccaaatctctctgcaaatattcatcctgtttcttttggttcttcattcatttaattaaaa

SEQ ID NO: 100677 - DNA, 594 bp, Homo sapiens
ttttggtcctttgtgtaaggcttcctaaagaaagtgatacttgaaaggaattagrtgcctctcctccatgtcaggtgactgctgaatgaattgagcgataggtgattggttggttgattgattgaaatgaatgaatgaatgaatgagacttgtcctgcacagcttgtcagttagccaaatacccaagtcagaactgagcaaattgagcaaattaatagaactgaaatcccaccaggacttagtagcccagggacctcccagagcctccctctccttctccgcccaccccaacccccttccctggacagacctttccatcagccaaagctccaccaggacaggagagcagggccgcagctcccattacggaatttatctcccttgtcggcctgtcagaaacagagaatttattgcctcattcactttgaacaaaacctgtttctggagacttttatgatggaggagtaaggaaaggagtgaagtgagggagtaagtggggatggaagggatgtggcccagaatatgtaatctcacagagagaagcacttcggcaagaggccagaagtgggctccaggcatctctggtctctctag

SEQ ID NO: 100678 - DNA, 594 bp, Homo sapiens
ttttggtcctttgtgtaaggcttcctaaagaaagtgatacttgaaaggaattagatgcctctcctccatgtcaggtgactgctgaatgaattgagcgataggtgattggttggttgattgattgaaatgaatgaatgaatgaatgagacttgtcctgcacagcttgtcagttagccaaatacccaagtcagaactgagcaaattgagcaaattaatagaactgaaatcccaccaggacttagtagcccagggacctcccagagcctccctctccttctccgcccaccccaacccccttccctggacagacctttccatcagccaaagctccaccaggacaggagagcagggccgcagctcccattacggaatttatctcycttgtcggcctgtcagaaacagagaatttattgcctcattcactttgaacaaaacctgtttctggagacttttatgatggaggagtaaggaaaggagtgaagtgagggagtaagtggggatggaagggatgtggcccagaatatgtaatctcacagagagaagcacttcggcaagaggccagaagtgggctccaggcatctctggtctctctag

SEQ ID NO: 100679 - DNA, 586 bp, Homo sapiens
acaacctaaatagaatttgaagcttctcctatgacagactctrtgtgcaatttattgttggcctggttaagcagctgtaatgttgtgtcattaatacattgattttggccctcttactttaataagctttgccattgcaattaattgtacttaaaaaaaaatcctggcattcacaaagattcagtgaaaggcatcaatttttattactctgatgtttacttctcagcccctccattgggggttttagaactttggactgtgtcttatatgcatttaagagccatgtatttaaatttggagcacggttacataagccacactagacttgttaatgaataaggcagtctaatttacatcattcattatttaatacaacttgcaagctggagttgagaacatgctgtcttcatagtgtaggtatttacagacatcagcttggcacaactgtgtggagtctttttagtttcataccttcaatctctgcaatatggacacttttgttaccctgggtaaaacagtggaaaagccttgtgacccttttgaccctactttcttccacctcccctagccatcacccattatttat

SEQ ID NO: 100680 - DNA, 620 bp, Homo sapiens
ctgcttcttgaacagccccttcattgtttgttcagctattctgctgcatctgcagatagccctgcctgagaaacagcctcaaaccagaaggagaggatggcggcaagccttagagaaacatgtaagtcaagggtggtggtggatgactgtgaggcattttcttttgcaaaaaatacccaaaccaaaacaagcaaaaaaactaccaaataacaatggtgggtattcattactaggttaaaaaatkgactgattgcaagttcaaagcactgtaaacaatccccatgtttctgtctctttggctgtagtcaatatagtttgaaatgagtctgctaagacaaatgctgatttggtgaataaaaaagataatctgagttttagaagtggggatattcagccacataagacaccgaaaataaggaagattgaacttgacatgtatcatcatcatggtcaagaccagggagatgctatctcaaggtctttcaagctctttaatctatgcaaaaatgtgtatgatttttaggggaagatgttggtcaaaggatacaatatttcagttagacaggagggataaattcaagagatctattgtgcaatatggtgactatagttaataacaa

SEQ ID NO: 100681 - DNA, 620 bp, Homo sapiens
ctgcttcttgaacagccccttcattgtttgttcagctattctgctgcatctgcagatagccctgcctgagaaacagcctcaaaccagaaggagaggatggcggcaagccttagagaaacatgtaagtcaagggtggtggtggatgactgtgaggcattttcttttgcaaaaaatacccaaaccaaaacaagcaaaaaaactaccaaataacaatggtgggtattcattactaggttaaaaaatggactkattgcaagttcaaagcactgtaaacaatccccatgtttctgtctctttggctgtagtcaatatagtttgaaatgagtctgctaagacaaatgctgatttggtgaataaaaaagataatctgagttttagaagtggggatattcagccacataagacaccgaaaataaggaagattgaacttgacatgtatcatcatcatggtcaagaccagggagatgctatctcaaggtctttcaagctctttaatctatgcaaaaatgtgtatgatttttaggggaagatgttggtcaaaggatacaatatttcagttagacaggagggataaattcaagagatctattgtgcaatatggtgactatagttaataacaa

SEQ ID NO: 100682 - DNA, 620 bp, Homo sapiens
ctgcttcttgaacagccccttcattgtttgttcagctattctgctgcatctgcagatagccctgcctgagaaacagcctcaaaccagaaggagaggatggcggcaagccttagagaaacatgtaagtcaagggtggtggtggatgactgtgaggcattttcttttgcaaaaaatacccaaaccaaaacaagcaaaaaaactaccaaataacaatggtgggtattcattactaggttaaaaaatggactgattgcaagttcaaagcactgtaaacaatccccatgtttctgtctctttggctgtagtcaatatagtttgaaatgagtctgctaagacaaatgctgatttggtgaataaaaaagataatctgagttttagaagtggggatattcagccacataagacaccgaaaataaggaagattgaacttgacatgtatcatcatcatggtcaagaccagggagatgctatctcaaggtctttcmagctctttaatctatgcaaaaatgtgtatgatttttaggggaagatgttggtcaaaggatacaatatttcagttagacaggagggataaattcaagagatctattgtgcaatatggtgactatagttaataacaa

SEQ ID NO: 100683 - DNA, 574 bp, Homo sapiens
tagaagcgccacactacctgatttcaaaatctcctacaaagctatagtaatcaaaagcgcatggtactgacgtaaaaacagacacatagaccaaytgaacaaatagaaaacccagaaattatttaattcaatttaatttaattattaaattacttttggatttttaaataatttgatttattcattatcaaaagaaaaaacattacaaatgttggcaaggatgcagagaaaagggaactcttttacactgttggtgggaatataaactagtacagccattagggaaaagagtatagaagttcctcaagaaactgtaagtagaactgccatattacccagcaatcccaatgcttgtaatttgcccaaaggaaaggaaatcattatagtgaagagacatcggcacctccttgtttattgcagaactatccacaatagccaatatatggaataaacttaggtgtccaacaacagatgaatggataaatgggatatatacatatatatacacacacaatggaataccattcagccataaacaaagaatgaaatcatgtcattcacagcaacatgcata

SEQ ID NO: 100684 - DNA, 560 bp, Homo sapiens
cacatgtttaaaaaacagtgtaaaggagttgaacatgccatatattctcgtagagactcctagaaaagagaaatattaatgtggaaatatcaaggaaaggtacaacttagcaaatgctaacaacttttcctatgtgaaaggaaagttcaattaacattttattgaacctaaagttttatatatttatctattttttttgagatggagtttcaatcttgttgcccatgctggagtgcaatggcttggtctcagctcacygcaacctctgcctcctgggatcaagcgattctcctgcctcagcctcccgagtagctgggattgcaggagcacaccaacacgcccagctaattttcgtatttttctagagacagggcttcaccatgttggccaggctggtgtcgaactccttacctcaggtgattagcctgccttggcctcccaaagtgctgggattacagacgtgaaccacagcgccgggcctgaacctaaactcttatcagtaataaagagaatagtaattccagatatattgaagtgtgataaagcttgcatattagaat

SEQ ID NO: 100685 - DNA, 595 bp, Homo sapiens
tatgggtgaatattacccagttttccatatgtgacacattttctttatccattcatctatgaatggacacataggttgctttcaaatcttggttattatgaacagtgctgcaacaraacctgagaatgcagatctttcttcaatatattatttcctttcttttgggtatatacccagcagtgaggttgctggatcatatggtagctctatttttcggtttttgaggaagctgaaagctgttatccatagtggttgtactaatttacattcccaccaacagtgtataagggttcccttttctcctcatccttgtcagcatttgttattgcctgtcttttggataactgaggtgagatgatacctcattgtagttttgccttacatttctctgatgatcaatgatctcaagtaccttttcatatgtctgtttgccctttgtgttttcttttgagaaatggctactcaaatcttttgcccgttttttaattgggttattagatttttttcctatagagttgtttcagctcctaatatgttgcgcttattaatcccttgtcagatgggtagcttgcaaatgttcccccattatgtgggt

SEQ ID NO: 100686 - DNA, 566 bp, Homo sapiens
gcctcataaagttctccattcaaagtgttcaggtctagggcacaattagtgcaaaatatccaaatatgaaacaactttttcaaggttgtggaaataaaatatgaaaacgaygtatagtttcggtgaaatgtattggtggcagtagtgggatccgtttggcacatggaatgaactaaatatgggacagagaaggagaaaagaaggggtccatggtgctttccaaatctcttctctactttatatgttaaagctcatttaagatgacaatcaaataattaaatctacctggctagtttaagtacataagaaatgtaaccatttaataaaatgctggtagcattacttttaataaaagaattgcaaagcaatgctgaattcttttatagtcaggatttttattgctataaaaatgcttttaagctttcaggtgaagagtagaacagaacatctaatgctttttatgttctcttatgtattcatgtttgtcatggctaaggcagataaaacaactgccttagtgagaataagatgtgtataaactcaaggcagatagaacagccacttta

SEQ ID NO: 100687 - DNA, 645 bp, Homo sapiens
gtcctacaagaaatgctaaagggagtttttcaatctggaaggaatgggtgttgatgagcaagaaatcttacagtgcaaaactcattggtaataggagacagaaaaacacagaatattagaacactgtaactgtggtatgtaaactactcttaacctaagtggaaagactaaatgagccaatcaaaaataataactacaatttttaagacatagtacaataacaaatagaaacaatgaaaaggtaagaagtgggggggggtgaagtaaaggcataattttttgttttctttttgttggttaggccaacagtgtggttatcagactaaaataagggttttaatatagtatttgaatgtttcatggtaaccataaaccaaataaaacatagagtggatacacaaaataaaaagcggaaactaaatcatgtcactagagaaaatcaccttamctaaaggaagataggaaggaaagaaaaatatcagaaaacaaataacaaaaatgacaggagtaagtccttatcaatgataacattaaatgtaaatgtaaatgaactgaactgtccaatcaaaagacatagagtggctgagtagattttttttaaaaaaggaaccaatgatctattgcctacaagaaacatgtttcacc

SEQ ID NO: 100688 - DNA, 550 bp, Homo sapiens
gtttaatatgcaaatagcccccagtaagatgtatgatctatcttttaagcattagttcaacaatcatttatcaagcacctactctatttgctgtctgccaggtactctaccaagtcctggtgatagagatatcaatactaagaggtcagaaagcacctaaagactacttagtggtgaatataaaaaagcaaatgagcagatacagagagtgagacagtgctacttttccaatagtrgtaagaaaggggtgtcatgggaatatgaagaagagaaacataatcccatatcagaatatcaaggaaaggttgaaggaagtggcttctaacctaagacctgaaaaaaggagggttagttgaaaaggagaggggatgaatttgaagagtagttcatacagggcaggtgagctaggaagaagtaggattatcccttcatagaaagaaagaaatacaaagaccagagtccctgctttgaatgcattctgtgtaaactaggtggctgcgacttgaagcatagctgggaagggcgcagagtggcacagatgagggtggcg

SEQ ID NO: 100689 - DNA, 550 bp, Homo sapiens
gtttaatatgcaaatagcccccagtaagatgtatgatctatcttttaagcattagttcaacaatcatttatcaagcacctactctatttgctgtctgccaggtactctaccaagtcctggtgatagagatatcaatactaagaggtcagaaagcacctaaagactacttagtggtgaatataaaaaagcaaatgagcagatacagagagtgagacagtgctacttttccaatagtggtaagaaaggggtgtcatgggaatatgaagragagaaacataatcccatatcagaatatcaaggaaaggttgaaggaagtggcttctaacctaagacctgaaaaaaggagggttagttgaaaaggagaggggatgaatttgaagagtagttcatacagggcaggtgagctaggaagaagtaggattatcccttcatagaaagaaagaaatacaaagaccagagtccctgctttgaatgcattctgtgtaaactaggtggctgcgacttgaagcatagctgggaagggcgcagagtggcacagatgagggtggcg

SEQ ID NO: 100690 - DNA, 550 bp, Homo sapiens
gtttaatatgcaaatagcccccagtaagatgtatgatctatcttttaagcattagttcaacaatcatttatcaagcacctactctatttgctgtctgccaggtactctaccaagtcctggtgatagagatatcaatactaagaggtcagaaagcacctaaagactacttagtggtgaatataaaaaagcaaatgagcagatacagagagtgagacagtgctacttttccaatagtggtaagaaaggggtgtcatgggaatatgaagaagmgaaacataatcccatatcagaatatcaaggaaaggttgaaggaagtggcttctaacctaagacctgaaaaaaggagggttagttgaaaaggagaggggatgaatttgaagagtagttcatacagggcaggtgagctaggaagaagtaggattatcccttcatagaaagaaagaaatacaaagaccagagtccctgctttgaatgcattctgtgtaaactaggtggctgcgacttgaagcatagctgggaagggcgcagagtggcacagatgagggtggcg

SEQ ID NO: 100691 - DNA, 550 bp, Homo sapiens
gtttaatatgcaaatagcccccagtaagatgtatgatctatcttttaagcattagttcaacaatcatttatcaagcacctactctatttgctgtctgccaggtactctaccaagtcctggtgatagagatatcaatactaagaggtcagaaagcacctaaagactacttagtggtgaatataaaaaagcaaatgagcagatacagagagtgagacagtgctacttttccaatagtggtaagaaaggggtgtcatgggaatatgaagaagagaaacataatcccatatcagaatatcaaggaaaggttgaaggaagtggcttctaacctaagacctgaaaaaaggagggttagttgaaaaggagaggggatgaatttgaagagtagttcatacagggcaggtgagctaggaagaagtaggattatcccttcatagaaagaaagaaatacaaagaccagagtccctgctttgaatgcattctgtgtaaactaggtggctgcgacttgaagcatasctgggaagggcgcagagtggcacagatgagggtggcg

SEQ ID NO: 100692 - DNA, 560 bp, Homo sapiens
caagaaaaaaagagtgttactgaaacttaactaggattttaaccatgggagaatggccacccaacaggacataaattcatatgtgaaccaagaactacagccagattgggagaggacacgagtaaaaatatcccacccttcctctcctctactactcatctctggctctgggagggctcggaattcattgtctgaacccagtgagcaagaggccagagagcctgatgatggagtccatagyggtccaccaccccagggccattcatggcagagaggtcaggagaatggatctagaggagcagagaatcacacacacagcaatgggtcaatcatttggaagtatgcactgttaaaatgctggtataaatctttccaagcttttccaaacttacctcctatgatgattgggactacttttttcccctttctgagacttgtatcaaattgtaagtatgtgtgtccacggcaatatttcaaaggataatgacatctgttagaagaatcagaagaaccttcttgtcctcttcttataagtagaaagttgcctttcagaaaagtcc

SEQ ID NO: 100693 - DNA, 606 bp, Homo sapiens
ctttaaatactaagagcatctctctttattgccaacttgctaatgacacttccatatttgaaattaaaaaaatagaaggttgactcaagagatctttgccaaatgtttcatctagtttcaattaggctctttctttagactggatctatgccccatgtacctcctttatgctgaaagacgtagatggaaatcacaggagctcagtacagttaaggwgtaggtgggcaaaaagttcatgggcagatttcaggctctgtttcagaacaaaagacacagatatggcctgaaggaagaaagcaaggctcaatgaatgctctgaaaaccaatagataaagactaaatgtcttgggagtttcatacctctgttagcagtaggaaagaagtctgagaactagaaagtcaagcagaggggcaagggactccaaagtgagttaaacattcactcaatgcacatttgctgagtctaggaataagcgtaacctgccttcaaagcctaggctagtgtctatcattatccgtgagatgcaggtcaaacatttaaaattttgcatgagaagaggagattgatggtcttaaaaaaggcttcaaatttagtatgttaaaaat

SEQ ID NO: 100694 - DNA, 656 bp, Homo sapiens
tgaacaatggattatattattattattattttcagggcagactatttgagatgagaaaaaactttagttaccacctagtccagtacctctctttacaaattgggaccacaaaagataccagactactctcttagctttggagccaaaattaagactcttttcttttcttttttttttttttttttgacacgcagtttccctttttgttgcccaggctggagtgcagggacgccatctcggctcaccgcaacctccgcctcccaggttcaagcgattctcctgcctcagcctcccgagtagctgggattacagacatgcgtcaccatgcctgggtaattttttttgtcattttagtrgagacggggtttctccgtgttggtcaggctggcctcgccctccctacctcaggtgatctgcccgcctcggcctcccaaagtgctaggattacaggcgtaagccatcactccaggcctaattaagactcttaatttactccttctactgtccatggtacagaccttattggttttgatttatcttttcatattatcgtatcagtattacagcaaaatgaatatagataataacatgaataataaaataccataatattacttctagaattatattattaaataatatattatttatactgt

SEQ ID NO: 100695 - DNA, 551 bp, Homo sapiens
gcctgatgcctagagtttgtacttgcctcagtgctagcaagtacaagtagtcatatactcaggagcactgtagaaagaaaaagaccagagacactgcaatgaattatttggccacttgtttcatttgggcaaaaatartaagtatagaagtcgcctttatgttgcaaattctaagccagagaattattattgctcactgatctcatttttgtgtaggataatactaaggacatctgcagactagtagatgagtagactactaatatctagcaatgcctgcagctttaataatcaccttttaagtatgctctgaaaaacagaaacagaaatctcagtctttcaaaagacagaaacatttaaagatgaaaccaagtaatttatcattgtcttgatgctgtaattcaatctttgttgaaatgcagaaaacaacaattagtattgcttctgtatctgcttttattatacccactgtatcataggaactctgtgaaaatgactaactctcacaggtctctcgttttctgctaacctttcttgttatgaaaagcata

SEQ ID NO: 100696 - DNA, 585 bp, Homo sapiens
acacacttgtagatgatacactcaccaggtcctagaggacatattaatgaaggggcctcttataaaggtatgaacaggttaagggaaactaataaggtatggtgaagtactcctcagctggcatcacacataggcctaaaatggaaagagagaaagtgataacaaaagagtaattacagagagctaattgcagctctaggaaaggactcccagtcagtagagaaatacaaccaatttactacctgggagaattmataccctaaactcattcttctctcacttccaatctcctgccattacctctcattgctaaacccaaccagaagccagaggggaaggaagccaactgatgatgtcagtatagatcaggctcccagggcacacagagcagggtgatgaagggtagaccgtgaatcaaagtgaaataggaaacgcccagtagaggaataagaaatttcactgcataggtgttagagaatcattaaaaaaattttaggcggaagtattgcaggatcagatttgagaaaaggaaagatgactctggcaagagaaaaataataaatgtagacaactagtgagtcagta

SEQ ID NO: 100697 - DNA, 585 bp, Homo sapiens
acacacttgtagatgatacactcaccaggtcctagaggacatattaatgaaggggcctcttataaaggtatgaacaggttaagggaaactaataaggtatggtgaagtactcctcagctggcatcacacataggcctaaaatggaaagagagaaagtgataacaaaagagtaattacagagagctaattgcagctctaggaaaggactcccagtcagtagagaaatacaaccaatttactacctgggagaattaatamcctaaactcattcttctctcacttccaatctcctgccattacctctcattgctaaacccaaccagaagccagaggggaaggaagccaactgatgatgtcagtatagatcaggctcccagggcacacagagcagggtgatgaagggtagaccgtgaatcaaagtgaaataggaaacgcccagtagaggaataagaaatttcactgcataggtgttagagaatcattaaaaaaattttaggcggaagtattgcaggatcagatttgagaaaaggaaagatgactctggcaagagaaaaataataaatgtagacaactagtgagtcagta

SEQ ID NO: 100698 - DNA, 585 bp, Homo sapiens
gaatagcataattgtaacttaaattaattttctcaaggagaaaataaaaataattacagagaatgagacggattcagttgttttgcaaataacatttgcagttatttaagaaaggacttttttgaaaaaaattrtgtgagttaaaaatgactatagataatggctgtagtgttcttacagtttctaaatactatattttaaatctatcatcagttgtagataattgtttgaaagataaagacacagttcctaactatgaaacagaaaaagtgatgatttttataaaatttgaaacttttttagagaccaaaaatctgaatatctgaaagagaagatttgagcttctatcatcttggaggtctttttctagaaatatctttgggtttgtgctgactagaggagacaataagtataaccccaccttgcagtgaccagattgaacagtttaaatcctacctattaacaaatgaaggctactgtgaaataataacaatacatgtgaataaaatcgtaacagcacactaaatgagttcttttaggaggaaatagttctgtgagcagacgctaaatcaacaatgattatat

SEQ ID NO: 100699 - DNA, 611 bp, Homo sapiens
gtttgggtaaatcatcttagccagcactgtaactcctttcttagcctgttgacttagaagtaggaggagcccaaagtggccaagtggcagtcttaacttccactttaatggaaccattgtgtgtctcctggtggcagcattcctccctctggaactaagacctctaggccagcagaacgtaatgtaactgcaacaggaagcaaaaattttgctagtgggtcactaggggtgatggtgagtggtaccacttccacttccaccccttgattcctggacccatgaatcctggctatgggagaaatagtaccacattttggaagctaattcagggcatatacaaccttccggagaactttgacccagccctgcaaagtactgtcacctagttgccattgtaattgtgacttcaaaaggctackccactgttctattaatccagttgcttcaggatgatggtgaacatggtaagaccaccaaattccattagcatgagcccactgctgcacttctttagtcacaaagtgccttgatcagaggcagtgctgtgtggaataccaagacagtggataaggcattccatgagtccatagatgtttctatggactgcaatt

SEQ ID NO: 100700 - DNA, 549 bp, Homo sapiens
gaattcttctgtgtcatctccaagggatactggctctaaacttaagaaacaattactttatctacttgttagtagacttagaacaatattcattaagaaagaagaaacttagggctccttatgtattcactttggttaattgaaatttaccagaacttacaggcccctataggtttcatatccttaaccaatagaaacatgtgcttctcttacctttattccactgggcctagcaaactaattttatatggcactaagtacatttgggaaaaagccttaaaacatttttttcttaagttacagagagttttggtatttgttgactgttaactgtgtttactgttcttgaactttaagaaaatcttcgtcttcaacggaattgatgtatttgttacatcttgagagtttctccygctacctgcaaatcttgaaaggcactcttagtgcagaggaccgggtgtaactactgaccccatgtggacaccctccctggggaggcagagtggctggaagggcccttcccaggactcccttgtggggaagagggag

SEQ ID NO: 100701 - DNA, 560 bp, Homo sapiens
attacatttatgtattgagtggttcttaagcaggagtgtatccagattttgagaaaattgttgttgttgtcgtcgtcgttgttgttgttgttgttgttagagacagggtctcattatgttgaccaggctagactcgaactcctgagctcaagcaatcctcccacctcagcctccctagcagctgggactacagccatgcaccaccatgcctggcttcaaggaaacattttcaaatatacatatccaggctttattagacttactgtatcaaaatattcagaaaaagcctagacttgttgattatttaaacattttcctcaggttactgggatgcacaattctagctgaaagctagtgcaacagacaattacttcagtctcatttctcacccatatgaccarttccctttctcatttgaagatttggccaaaaagagtaaggagtaggagagagacccatttgctgaaaacaccacatgattttccccggtaagagaagaacagggtctagtcaactcaaaatccaacttgatcttgttacttatttatcttccaccttcc

SEQ ID NO: 100702 - DNA, 577 bp, Homo sapiens
agacttgttgattatttaaacattttcctcaggttactgggatgcacaattctagctgaaagctagtgcaacagacaattacttcagtctcatttctcacccatatgaccagttccctttctcatttgaagatttggccaaaaagagtaaggagtaggagagagacccatttgctgaaaacaccacatgattttccccggtaagagaagaacagggtctagtcaactcaaaatccaacttgatcttgttacttatttatcttccaccttcccatccagacactctagatttgaaagcagagctgagactctaattggccatttctaccagaataggatactaagtcagttaattacttgatattccctctgctcaagggtttccccttacattaccacctattcactgccaatctggttcctcagaggcctcctaaaattgatctctattcagtttacaacccactaactccctctcccaaactgaaaactgtcattctctaaaattgaagagaaccttgtctcamcatacaaagggaacaaatcaatcaacaacgacaacacacacacacacacaa

SEQ ID NO: 100703 - DNA, 558 bp, Homo sapiens
tctatccagcgcatttaaattcgcttttttcttgattaaaaatttcaccacttgctgtttttgctcatgtacaccaagtagcagtggtgtgaggccatgctgtaaaacaatataaagcaaaaacctatgtaattcaaaaaagtacatattcctcaaccraagtggaaactttatataagatcttatggacttacacgcatagaagtaaataaaatgtagtcacttccttctcactcttctgtgctttcccacacgctgctccttcccttggaaacaccccttctctgcctcaccacagtacctctaatcatctcaaaaactcactttaaacatttactgcttccaaggctctttgcttctaaaccagcatttggcatggtgttattggatgataatatttttcccatctaaacaaaaagcttcttgagggcaggggctgtatcttttgtctctatatcctcaaccctaagacaaattgtgtataaagcaagaatctgcatgtaaaatatttctttagtttcatgttttaccaaaagttcaacctccaacatgcaacaa

SEQ ID NO: 100704 - DNA, 599 bp, Homo sapiens
ttatggacttacacgcatagaagtaaataaaatgtagtcacttccttctcactcttctgtgctttcccacacgctgctccttcccttggaaacaccccttctctgcctcaccacagtamctctaatcatctcaaaaactcactttaaacatttactgcttccaaggctctttgcttctaaaccagcatttggcatggtgttattggatgataatatttttcccatctaaacaaaaagcttcttgagggcaggggctgtatcttttgtctctatatcctcaaccctaagacaaattgtgtataaagcaagaatctgcatgtaaaatatttctttagtttcatgttttaccaaaagttcaacctccaacatgcaacaaaaattgctgttaaaactcatactgcccatttgaaaaaattttccaacatttatttatttaaaatctatttgtatttaattttcccagattgttaactaaaccatcagttcataggactactgaaactaaattaacagaattcctatctgtattcttaataactccatggtttttagtgtttaaaactgccatgctgattatgccaaagctctacatacttaag

SEQ ID NO: 100705 - DNA, 599 bp, Homo sapiens
ttatggacttacacgcatagaagtaaataaaatgtagtcacttccttctcactcttctgtgctttcccacacgctgctccttcccttggaaacaccccttctctgcctcaccacagtacctctaatcatctcaaaaactcactttaaacatttactgcttccaaggctctttgcttctaaaccagcatttggcatggtgttattggatgataatatttttcccatctaaacaaaaagcttcttgagggcaggggctgtatcttttgtctctatatcctcaaccctaagacaaattgtgtataaagcaagaatctgcatgtaaaatatttctttagtttcatgttttaccaaaagttcaacctccaacatgcaacaaaaattgctrttaaaactcatactgcccatttgaaaaaattttccaacatttatttatttaaaatctatttgtatttaattttcccagattgttaactaaaccatcagttcataggactactgaaactaaattaacagaattcctatctgtattcttaataactccatggtttttagtgtttaaaactgccatgctgattatgccaaagctctacatacttaag

SEQ ID NO: 100706 - DNA, 608 bp, Homo sapiens
tgggacactttctattatgtcatgctaatgctagctaatttactgggtcacagtgcccttgatttatgagtatttcaccttacatttttttcgtctttaattagaagcttaaagagaagtttgtagaatgtactcataagtggatgggataatactattaagttctgatattctgatattgtttgaaatactcttaataattctrcatttggtaagtttttttatatcagtattaaaatagtaatttggtttattacatttttatacatagaatttgccagttactttctgactacaaagaaaaacagatgctaaaaatctcttctgaaaacagcaatccaggtaagacttgtgatagtgaattactttagtcagttgtccccaacctttttgacaccagggaccggttttgtggaagacaatttttccatgggctgggggaaggtggggatggtttcaggattattcaatcatgttacatttattgtgctactttatattattatcacattgtaatatataatgaaataattacacaacttaccataatgtagaatccgtggaagctctgaactcatttttctgcaactggatggtctcatctgggg

SEQ ID NO: 100707 - DNA, 644 bp, Homo sapiens
gagtatttcaccttacatttttttcgtctttaattagaagcttaaagagaagtttgtagaatgtactcataagtggatgggataatactattaagttctgatattctgatattgtttgaaatactcttaataattctacatttggtaagtttttttatatcagtattaaaatagtaatttggtttattacatttttatacatagaatttgccagttactttctgactacaaagaaaaacagatgctaaaaatctcttctgaaaacagcaatccaggtaagacttgtgatagtgaattactttagtcagttgtccccaacctttttgacaccagggaccggttttgtggaagacaatttttccatgggctgggggaaggtggggatggtttcaggattattcaatcatgttacatttattgtgctactttatattattatcacattgtaatatataatgaaataattacacaacttaccataatgtagaatccgtggaagctctgaactmatttttctgcaactggatggtctcatctgggggcaaagtgagacagtgacagatcatcaggcattagattctcatacgaagcacacaacctagatccctcagatgggcagttcacaacaggttcatgctccaatg

SEQ ID NO: 100708 - DNA, 588 bp, Homo sapiens
taaggtctcactattattgacttcattcctcctcatttgaagttggaaagagatatatttactttgttggaacaagatgtgttcttctacctgctggttaattgtcatcataacagtaattttgttagaacaagatgctctgctaccatttgccaaaagattgtcataataaatatacaaattgcccaactctaggctcagcagattataataaaagcagaaaaacgtttcacactaacaaaaatgctagtatgctacctggttgtggacacctaatacattatatagtccaaactgtatgaggacacctttaatttagccatctatttatcaaagagcttttgtaagttaggttttataagtygcaggagacaaagatggaatagatgtagttttgatctttaaggtgctcataatagagctgtctccatttcatttctgtgctttttcaacagaatttacaaagaaaacattgctatttatgttttcacttgtccacttaacatataactatcaaatgtcttttagatggtaaccatttttctaatgctatagaccacagacaattaaaaatacagacaggagctt

SEQ ID NO: 100709 - DNA, 588 bp, Homo sapiens
taaggtctcactattattgacttcattcctcctcatttgaagttggaaagagatatatttactttgttggaacaagatgtgttcttctacctgctggttaattgtcatcataacagtaattttgttagaacaagatgctctgctaccatttgccaaaagattgtcataataaatatacaaattgcccaactctaggctcagcagattataataaaagcagaaaaacgtttcacactaacaaaaatgctagtatgctacctggttgtggacacctaatacattatatagtccaaactgtatgaggacacctttaatttagccatctatttatcaaagagcttttgtaagttaggttttataagtcgcaggagacaaagatggaatagatgtagttttgatctttaaggtgctcataatagagctgtctccatttcatttctgtgctttttcaacagaatttacaaagaaaacattgctatttatgttttcacttgtccacttaacatataactatcaaatgtcttttagatggtaaccatttttctaatgctatagaccacaracaattaaaaatacagacaggagctt

SEQ ID NO: 100710 - DNA, 599 bp, Homo sapiens
actcttcagaatcttatgtatgtatttaccccatttgactcatgggaacacgcaaataaaaagacaaagatgcaaaatgtgtcttctgtctttaccacctagattttacattaaacagtcagatttagaggatgacacactgtgcggcttcaggaacagaaaggaagtttgcccttttctgcgctaagatattcttctaccccactgcctttgagcattcttttttcatttggttgctgggatatcaaaaacatgatggtgctcactgaaaatgggagccaaagtttgccacaacacaagaagcagagtgaaactgctgaygtgcaagcatggaattccagaaaatgagatgctccccaaatttcacattgaatagccatacaattttctagctggaagatacacagaataagaagctatcttctttagccacattatctattgataatcagactaaaaccaagaaagataaaatgattggtccaaagctcctaaagtggcattacctagcattttatggcaccattcaggattgttccataataatcaaagaatatctctaggctttgtatctcttgaaaactcaaagtacagaattc

SEQ ID NO: 100711 - DNA, 210 bp, Homo sapiens
tcacattgaatagccatacaattwtctagctggaagatacacagaataagaagctatcttctttagccacattatctattgataatcagactaaaaccaagaaagataaaatgattggtccaaagctcctaaagtggcattacctagcattttatggcaccattcaggattgttccataataatcaaagaatatctctaggctttgtatc

SEQ ID NO: 100712 - DNA, 599 bp, Homo sapiens
actcttcagaatcttatgtatgtatttaccccatttgactcatgggaacacgcaaataaaaagacaaagatgcaaaatgtgtcttctgtctttaccacctagattttacattaaacagtcagatttagaggatgacacactgtgcggcttcaggaacagaaaggaagtttgcccttttctgcgctaagatattcttctaccccactgcctttgagcattcttttttcatttggttgctgggatatcaaaaacatgatggtgctcactgaaaatgggagccaaagtttgccacaacacaagaagcagagtgaaactgctgacgtgcaagcatggaattccagaaaatgagatgctccccaaatttcacattgaatagccatacaattttctagctggaagatacacagaataaraagctatcttctttagccacattatctattgataatcagactaaaaccaagaaagataaaatgattggtccaaagctcctaaagtggcattacctagcattttatggcaccattcaggattgttccataataatcaaagaatatctctaggctttgtatctcttgaaaactcaaagtacagaattc

SEQ ID NO: 100713 - DNA, 599 bp, Homo sapiens
actcttcagaatcttatgtatgtatttaccccatttgactcatgggaacacgcaaataaaaagacaaagatgcaaaatgtgtcttctgtctttaccacctagattttacattaaacagtcagatttagaggatgacacactgtgcggcttcaggaacagaaaggaagtttgcccttttctgcgctaagatattcttctaccccactgcctttgagcattcttttttcatttggttgctgggatatcaaaaacatgatggtgctcactgaaaatgggagccaaagtttgccacaacacaagaagcagagtgaaactgctgacgtgcaagcatggaattccagaaaatgagatgctccccaaatttcacattgaatagccatacaattttctagctggaagatacacagaataagaagctatcttctttagccacattatctattgataatcagactaaaaccaagaaagataaaatgattggtccaaagctcctaaagtggcattacctagcattttatrgcaccattcaggattgttccataataatcaaagaatatctctaggctttgtatctcttgaaaactcaaagtacagaattc

SEQ ID NO: 100714 - DNA, 450 bp, Homo sapiens
attagtgtacaatctcttcccaatatctaaaatgtttccctccackattcagacatatttattttcatttttctttctttttttttttttgagccagggtcttgctctgtcaccaggctggagtgcagtggcgcaatctcagctcactgcaacctctgacactccctggttcaagcgattctcctgtctcagtctccggagaagctgggattacaggcatgcaccatcatgccctgctaattttcgtgtttttagtagagacggggtttcaccattggccatgatggtcctgatcttttgaccttgtgatctgcctgctccagcctcccaaaatgctgggattagaggtgtgagccaccacacttatccttatttttatcttttaaaacaatgctatgagaacgtcttccttgattctgcatgtctttccccagataaacaggtacctcc

SEQ ID NO: 100715 - DNA, 450 bp, Homo sapiens
attagtgtacaatctcttcccaatatctaaaatgtttccctccacgattcagacayatttattttcatttttctttctttttttttttttgagccagggtcttgctctgtcaccaggctggagtgcagtggcgcaatctcagctcactgcaacctctgacactccctggttcaagcgattctcctgtctcagtctccggagaagctgggattacaggcatgcaccatcatgccctgctaattttcgtgtttttagtagagacggggtttcaccattggccatgatggtcctgatcttttgaccttgtgatctgcctgctccagcctcccaaaatgctgggattagaggtgtgagccaccacacttatccttatttttatcttttaaaacaatgctatgagaacgtcttccttgattctgcatgtctttccccagataaacaggtacctcc

SEQ ID NO: 100716 - DNA, 450 bp, Homo sapiens
attagtgtacaatctcttcccaatatctaaaatgtttccctccacgattcagacatatttattttcatttttctttctttttttttttttgagccagggtcttgctctgtcaccaggctggagtgcagtggcgcaatctcagctcactgcaacctctgacactccctggttcaagcgattctcctgtctcagtctccggagaagctgggattacaggcatgyaccatcatgccctgctaattttcgtgtttttagtagagacggggtttcaccattggccatgatggtcctgatcttttgaccttgtgatctgcctgctccagcctcccaaaatgctgggattagaggtgtgagccaccacacttatccttatttttatcttttaaaacaatgctatgagaacgtcttccttgattctgcatgtctttccccagataaacaggtacctcc

SEQ ID NO: 100717 - DNA, 450 bp, Homo sapiens
attagtgtacaatctcttcccaatatctaaaatgtttccctccacgattcagacatatttattttcatttttctttctttttttttttttgagccagggtcttgctctgtcaccaggctggagtgcagtggcgcaatctcagctcactgcaacctctgacactccctggttcaagcgattctcctgtctcagtctccggagaagctgggattacaggcatgcaccatcatgcccwgctaattttcgtgtttttagtagagacggggtttcaccattggccatgatggtcctgatcttttgaccttgtgatctgcctgctccagcctcccaaaatgctgggattagaggtgtgagccaccacacttatccttatttttatcttttaaaacaatgctatgagaacgtcttccttgattctgcatgtctttccccagataaacaggtacctcc

SEQ ID NO: 100718 - DNA, 589 bp, Homo sapiens
tcaattctataagaagtcagagaaattataataaatcacttaatacttggtttgggaaggtgatttctaaagttatagtgcctatgaatttaactaataattgtgaattcagagctgtgacaataaagcaaagaaaccacattgygtttgagtcagcaatctttagatttctatctagtcttcctacccagtccataaattctaactcctggtactcactctcaagtttatgttaaatactagcctatacaaaaaacactctttctcttttttcattttgttatttatatattgctttgtttaaaggaagaacacaaaaatgccctgctaaagggattctgtttggttgcaggctgcaagcggggaaaaaatcaaagtgtattttgcagaaaatgattttttagaagtcagaactatgacatgaagtcaagcagggcactctaggaccgaatttgctgtgctgccttcatatgctccttgctcgctcttttctggcagctgtgactcacacaggtcatggagagtatcattccctaaaaggaacaactccgatattcatctttatccattaagttcatctgtcccattc

SEQ ID NO: 100719 - DNA, 589 bp, Homo sapiens
tcaattctataagaagtcagagaaattataataaatcacttaatacttggtttgggaaggtgatttctaaagttatagtgcctatgaatttaactaataattgtgaattcagagctgtgacaataaagcaaagaaaccacattgcgtttgagtcagcaatctttagatttctatcyagtcttcctacccagtccataaattctaactcctggtactcactctcaagtttatgttaaatactagcctatacaaaaaacactctttctcttttttcattttgttatttatatattgctttgtttaaaggaagaacacaaaaatgccctgctaaagggattctgtttggttgcaggctgcaagcggggaaaaaatcaaagtgtattttgcagaaaatgattttttagaagtcagaactatgacatgaagtcaagcagggcactctaggaccgaatttgctgtgctgccttcatatgctccttgctcgctcttttctggcagctgtgactcacacaggtcatggagagtatcattccctaaaaggaacaactccgatattcatctttatccattaagttcatctgtcccattc

SEQ ID NO: 100720 - DNA, 589 bp, Homo sapiens
tcaattctataagaagtcagagaaattataataaatcacttaatacttggtttgggaaggtgatttctaaagttatagtgcctatgaatttaactaataattgtgaattcagagctgtgacaataaagcaaagaaaccacattgcgtttgagtcagcaatctttagatttctatctagtcttcctacccagtccrtaaattctaactcctggtactcactctcaagtttatgttaaatactagcctatacaaaaaacactctttctcttttttcattttgttatttatatattgctttgtttaaaggaagaacacaaaaatgccctgctaaagggattctgtttggttgcaggctgcaagcggggaaaaaatcaaagtgtattttgcagaaaatgattttttagaagtcagaactatgacatgaagtcaagcagggcactctaggaccgaatttgctgtgctgccttcatatgctccttgctcgctcttttctggcagctgtgactcacacaggtcatggagagtatcattccctaaaaggaacaactccgatattcatctttatccattaagttcatctgtcccattc

SEQ ID NO: 100721 - DNA, 589 bp, Homo sapiens
tcaattctataagaagtcagagaaattataataaatcacttaatacttggtttgggaaggtgatttctaaagttatagtgcctatgaatttaactaataattgtgaattcagagctgtgacaataaagcaaagaaaccacattgcgtttgagtcagcaatctttagatttctatctagtcttcctacccagtccataaattctaactcctggtactcactctcaagtttatgttaaatactagcctatacaaaaaacactctttctcttttttcattttgttatttatatattgctttgtttaaaggaagaacacaaaaatgccctgctaaagggattctgtttggttgcaggctgcaagcggggaaaaaatcaaagtgtattttgcagaaaatgattttttagaagtcagaactatgacatgaagtcaagcagggcactctaggacygaatttgctgtgctgccttcatatgctccttgctcgctcttttctggcagctgtgactcacacaggtcatggagagtatcattccctaaaaggaacaactccgatattcatctttatccattaagttcatctgtcccattc

SEQ ID NO: 100722 - DNA, 634 bp, Homo sapiens
ttccctttcaactgggtggcattcaggaaacagccaggaccctgcagtgcctgagtgctttgaccagaagcatttgggcttggaagggtctttcctgccctttcctccacccagcccctacaccctccacttccagcctggtggcctctcccctgcaccagcacatatggcctcccctagggtaggagggagagggtgagagagtgggagtccccgccttttgtgacctgctgtctgttagaggtgagtccagggccactctaagggtggaggttgcacattggcatgaaggccaggaaggactctttggggccctgtcagagacttagccacacccatagattaaactcgttttgccatatgtgctattttgtttttagtgaagaattttaaagtaaattacatacatcatgacatcttcttcctgaatattttcatatttaggatgtctgaaaaatgaggctgtgttcccacaaatctgtattagatggaactgaattaacaacagtgctccagaaccctggaccatccagcctaaattccatttggggatgagatgcgtttttgcctcagaatcccaagcggtaagcaccatsaacccctcagttcatatctcaatcttcctttctattgg

SEQ ID NO: 100723 - DNA, 608 bp, Homo sapiens
aagtatagtcagccttctacttgagcaaaatattgatgtatcttctcaagatctatctggacagacggccagagagtatgctgtttctagtcatcatcatgtgtaagtgttcacattaaaaggctagttaatgctgaattgaggtttaaaataattataacagttgcatctkacatatcaggtgagatgtcatagtttggttcaggtagttttcgcgtggcagtgagttagtcccctgcatcagccagaaatcagacaaaaagcaagacaagttagaagtaccaatgggtgcgggattctttatctcaggacttttaagatctttatccttagagatcccagcattgttcatttgatccaagtgtaacacctatgcatgggataaaaaatagtgtcacatctttaatttttctgattagttatttgggtcttgaaatgtccagtttagcggaaagtcttgtactgtcttctgggcactatgtcctacatactccttgaatttttcaagaaccgaaggggtttactaaatccaaggaagacagtcccttttatcaagtcagaaggaggaggaaaaaagacattgcaatcattctgttgtttccgttgat

SEQ ID NO: 100724 - DNA, 646 bp, Homo sapiens
ttatttctggttcttgagatcttttctgcagatgtaaaaacagaaggttaatttgcttgttgtatttctgtgacatttcctcttttggagtgcatgtttttaaaataattttattctkaagtaatcaagtatggacaataaaaattagaaagtaattaaaattaaactgtttaaataaataataattaaaattaagaattaactttttaatctatgtttagctactgccacatcactggcttctaacatgtgaaaaataattcaccttagacaaagggagaagaaaaacatgaaccagcaaacttaactttctcactatttgtttggactaaacttaatttgttatgtgttaaatctaccaaaaatgaatcagcagatgatttgtagtgttccaaaatcttcctcacttgaaaagagtttacctcatgaaaccctaactagtgagcccctacagtgcactgaagtgcttttttaaaagattcctaactggattgtaggcaccctttaaactattaggagccgaaatcaacaccaaacagaaagaaatgcaaattctcacattttaattgaaattatatactgtcatatgatagtgttatgtatccagattatctgcgtaagtccagttctaatatattctaatgtg

SEQ ID NO: 100725 - DNA, 646 bp, Homo sapiens
ttatttctggttcttgagatcttttctgcagatgtaaaaacagaaggttaatttgcttgttgtatttctgtgacatttcctcttttggagtgcatgtttttaaaataattttattctgaagtaatcaagtatggacaataaaaattagaaagtaattaaaattaaactgtttaaataaataataattaaaattaagaattaactttttaatctatgtttagctactgccacatcactggcttctaacatgtgaaaaataattcaccttagacaaagggagaagaaaaacatgaaccagcaaacttaactttctcactatttgtttggactaaayttaatttgttatgtgttaaatctaccaaaaatgaatcagcagatgatttgtagtgttccaaaatcttcctcacttgaaaagagtttacctcatgaaaccctaactagtgagcccctacagtgcactgaagtgcttttttaaaagattcctaactggattgtaggcaccctttaaactattaggagccgaaatcaacaccaaacagaaagaaatgcaaattctcacattttaattgaaattatatactgtcatatgatagtgttatgtatccagattatctgcgtaagtccagttctaatatattctaatgtg

SEQ ID NO: 100726 - DNA, 646 bp, Homo sapiens
ttatttctggttcttgagatcttttctgcagatgtaaaaacagaaggttaatttgcttgttgtatttctgtgacatttcctcttttggagtgcatgtttttaaaataattttattctgaagtaatcaagtatggacaataaaaattagaaagtaattaaaattaaactgtttaaataaataataattaaaattaagaattaactttttaatctatgtttagctactgccacatcactggcttctaacatgtgaaaaataattcaccttagacaaagggagaagaaaaacatgaaccagcaaacttaactttctcactatttgtttggactaaacttaatttgttatgtgttaaatctaccaaaaatgaatcagcagatgatttgtagtgttccaaaatcttcctcacttgaaaagagtttacctcatgaaaccctaactagtgagcmcctacagtgcactgaagtgcttttttaaaagattcctaactggattgtaggcaccctttaaactattaggagccgaaatcaacaccaaacagaaagaaatgcaaattctcacattttaattgaaattatatactgtcatatgatagtgttatgtatccagattatctgcgtaagtccagttctaatatattctaatgtg

SEQ ID NO: 100727 - DNA, 459 bp, Homo sapiens
tcccatctctacgaaaaatacaaaatatagctgggcgtggtggcatgtgcctacaatcccagctacttgggaggctgaggcaggagaatggcttgagtccgggaggtggaggatgcagtgagcagagactgcgccattgcattccagcctgggcgacagagcaagattctgtctcaaaaaaaataaaaaataaaaaagtaaaaaaaggaaattatcaatttacttttctgcatctcgtgtctgcgttagcagaatctgtctcataggagactgtggtagggagaattctaagctaaccctcaacaacccacatcctatgtaattcctccccacaagggtgggagggactgtgaatataatgggcyatcagtcttgtgactgtgttaaccatatagcactttaagaaagggagattattgattaaggaagggtgatgtccttgaaagttcagaccaaatc

SEQ ID NO: 100728 - DNA, 597 bp, Homo sapiens
gcattgccctagggcatctctgttgaccctgcatgtcctcagacactccttcatcccctccatttaaaatttttaaaaatgattctggcttggtggtaatctggacatggatctttaagatgatggagaagttcatagagcaacagttctcttccctgagtgcaaactggggtcacttgagagagatttaaaaaatcaggtttaggccccacctgtacagattctcattcatggagaatgagatgattgatagatggagttggcatctatcatctatctagccatatgtatgcgtgtataaactttttattaaaatacaatatacaaaaaygtacacattcaattggtatatttataaattgctggagattctgccatgcagcccgtattgagaaccattcttgttggcaaaactgtagaacaatcagagtttaccactgctgcctcccagccattccccctgctaaccacagagaacttctgcatctgtctgccttccacaggcagcatgcgtttattgcatgccagatttcagagtgccaggagcccgggagcagccactgtacgtctcagcaggctggtggcactgcattaggc

SEQ ID NO: 100729 - DNA, 467 bp, Homo sapiens
agctctgctacttagcaactccaatccctagtgcctcactgtctaacggggacatatctaaaaaggctgctattatgatacataaaagaatggataaacaaacggtggcacatccatataatggatgctactcagcattaaacacaaggatccaacagttgacatgcaacacgtgaatgaatttcaaatgatttacgctaaatggaagaagcctgcctacagtataatttcacttacatgacattctggaaaaggcaaaattaaagggttggaggttggggcagagagggaatttgggggacratagacctgtatgactgtgacggtggatctgtgactccatgcctttatgaaaccacagaactgaacaccaaaatgaattttactgtatgtaaattttatttatttttttgagacagtctcgctctgttgcccaggctggagtgcagtggcatgatttcagctca

SEQ ID NO: 100730 - DNA, 584 bp, Homo sapiens
tataatgtatatagtgatatatacataataatatacaaatatatgtattgatataaatatacctatgtagatatatgtacatgttatatagaatgccatatgtacgatatataatgatatataggtatattttatatataccccatatagcataactattctcttcatttcataggctcagggtgtttagtaaatagcaacagtggactctgaatcagggggaatttcaagtcctactaccctttactgccctttaccaaggaacagaagacaccttgcttttttgttttggagacagggtctggctttgtcgcccaggctagagtgcagtggtacaatgatagctcactgaagcctcggcctcctgagctcaagtgatcctcccacctcagcctcctgaataactgggactacaggtgtgtaccaccacatctggctaayatttttattttttgtagagatggagtctccctgttgcccaggctggtctcaaactcctggcctcaagtgatcctcttgcctcagcctcccaaagtgctgggattacaggcatgtgccatcgcgcctggctgacagtttggagt

SEQ ID NO: 100731 - DNA, 624 bp, Homo sapiens
gctgatattgtatctgctgtgaaacatttcttctctctttctagagtctctttcctgtaaggtgaacttcttttgaagtttcattttgataaaattccatcactcgtttcttgtcaagcttttgaacttcatcttctatctttgcattttctgatacactcttgctttggaatattttaatataatgcataagcttcttttagtgaatttactgtatatttgattattttttcaagagtttgtaaggaagattttacttgatgttatacrtgattcttcaaaactcttcatctaagttgtctcttatttctgactctcttactatatccaacacctagtgaccactgtccatttcatctctaaggacagcaaacaaatctgtcatcttcaacaaacattcagtcaaatgctagatctgatgttccttctcatgtagaattttttccaaacatggtcttgaaatttcaacctcctttttttctatgtaaattaagaccactcagtcttcctttacctttgtataaaagtaattttccatttccctaaagtttggatttttcatcgaaatttttctttaatactatctatagctgtgttttacttttctgacataaatttcaagat

SEQ ID NO: 100732 - DNA, 624 bp, Homo sapiens
gctgatattgtatctgctgtgaaacatttcttctctctttctagagtctctttcctgtaaggtgaacttcttttgaagtttcattttgataaaattccatcactcgtttcttgtcaagcttttgaacttcatcttctatctttgcattttctgatacactcttgctttggaatattttaatataatgcataagcttcttttagtgaatttactgtatatttgattattttttcaagagtttgtaaggaagattttacttgatgttatacgtgattcttcaaaactcttcatctaagttgtctcttatttctgactctcttactatatccaacacctartgaccactgtccatttcatctctaaggacagcaaacaaatctgtcatcttcaacaaacattcagtcaaatgctagatctgatgttccttctcatgtagaattttttccaaacatggtcttgaaatttcaacctcctttttttctatgtaaattaagaccactcagtcttcctttacctttgtataaaagtaattttccatttccctaaagtttggatttttcatcgaaatttttctttaatactatctatagctgtgttttacttttctgacataaatttcaagat

SEQ ID NO: 100733 - DNA, 624 bp, Homo sapiens
gctgatattgtatctgctgtgaaacatttcttctctctttctagagtctctttcctgtaaggtgaacttcttttgaagtttcattttgataaaattccatcactcgtttcttgtcaagcttttgaacttcatcttctatctttgcattttctgatacactcttgctttggaatattttaatataatgcataagcttcttttagtgaatttactgtatatttgattattttttcaagagtttgtaaggaagattttacttgatgttatacgtgattcttcaaaactcttcatctaagttgtctcttatttctgactctcttactatatccaacacctagtgaccactgtccatttcatctctaaggacagcaaacaaatctgtcatcttcaacaaacattcagtcaaatgctagatctgatgttccttctcatgtagaattttttccaaacatggtcttgaaatttcaacctcctttttttctatgtaaattaagaccactcagtctycctttacctttgtataaaagtaattttccatttccctaaagtttggatttttcatcgaaatttttctttaatactatctatagctgtgttttacttttctgacataaatttcaagat

SEQ ID NO: 100734 - DNA, 624 bp, Homo sapiens
gctgatattgtatctgctgtgaaacatttcttctctctttctagagtctctttcctgtaaggtgaacttcttttgaagtttcattttgataaaattccatcactcgtttcttgtcaagcttttgaacttcatcttctatctttgcattttctgatacactcttgctttggaatattttaatataatgcataagcttcttttagtgaatttactgtatatttgattattttttcaagagtttgtaaggaagattttacttgatgttatacgtgattcttcaaaactcttcatctaagttgtctcttatttctgactctcttactatatccaacacctagtgaccactgtccatttcatctctaaggacagcaaacaaatctgtcatcttcaacaaacattcagtcaaatgctagatctgatgttccttctcatgtagaattttttccaaacatggtcttgaaatttcaacctcctttttttctatgtaaattaagaccactcagtcttcctttacctttgtataaaagtaattttccatttccctaaagwttggatttttcatcgaaatttttctttaatactatctatagctgtgttttacttttctgacataaatttcaagat

SEQ ID NO: 100735 - DNA, 590 bp, Homo sapiens
ctaatatgttcatgtcctaattcctgaaacttgttaatatggttttgctgtgtccccacccaaatctcatcttgaataactcccatgtgtagtgggaggtaattgaatcatgggggcaggtctttcccgtgctgttctcatgatagtgaataagtctcatgagacctgatggttttataaagggaagttttcctacacacgctctcttgcctgctgccgtgtaagatgtgactttgctcctcattcaccttccactgtgattgtgaagcctccccagccatgtagaactgtgagtcaattaaacctcttttttcaaataaattatccagtctcaggtatgtctttattagaagcatgtgaacagactaatrcacttctgtattgttaccttacataagaaaagggatttgtggatataattatgttacggatctctactttttgttgtttttgtttttatgttctttttatttatttatttatttttcattttttaaaacatttatcccagatactgaaggttaaggattttgaggtggggagatgactgggcctttgacattggcccagtgtaatcccaaggggcctta

SEQ ID NO: 100736 - DNA, 587 bp, Homo sapiens
ggctttgattgcttatcttctccagtccaatattcaatttttaacatcaattacattagaaatagtctttaatttgtcttttcaatggaaagaagatggatggccttggtctctactggatgtctgccttttgawaaaggaaagtgataaaatcagaagtaagagactgctgggttgggaaaaggaccttggaagtgatgtagtccagcctaccctgcataatgtatatagatcaccacattccctaaaacattccagatagttgactattctattttacttaacctcctaagtgaagaggtgggacctcacaagacagctcagttcctcaacaaaaattatagttggtaggacattctttcttccactgtacataagtctgcttcaagtaccaccaaaccactctccttagctctactcactggacatctcaaaccaagccttctttgtcttcatcataattattccacaaatacctaacgatagccaccacacttctctcaatcttttcaatctttttatatcttcttttacttaattttttctatgacatgattcctttcccttggacttcccatcatcatgtt

SEQ ID NO: 100737 - DNA, 564 bp, Homo sapiens
aacaacataaacctcaaagtctaaaatgaaagtaccaaaaaattgtgttgtggaaaggacattgtctctactttctctcactcactctttcacttacttggccctcaactaatgtaaatcagtctctttacttttttcagggataactggtacaattttgggtttctcccaaattaagtgaactttgaactcacatcttacctttatctgcccagatcttycccatgggccagttcttgtcctctcttctctagtcttaattagtatgactgtcctctaaatccttaatgcttgtacagtatacattacatctttaagccctgtattatatgctgtcttttattggcttccacttctattttcattcagagtacattgaactgcaatcaatgagaagaattacatttaatatagcctctgtctatagcaataggagtactgcttacggtgtgccagatcttatcattgacatacattactactaatctggctcatgaccctatatggttaataccattattcttactttttagatgaataaatttatgtttagagtgtccaagt

SEQ ID NO: 100738 - DNA, 564 bp, Homo sapiens
aacaacataaacctcaaagtctaaaatgaaagtaccaaaaaattgtgttgtggaaaggacattgtctctactttctctcactcactctttcacttacttggccctcaactaatgtaaatcagtctctttacttttttcagggataactggtacaattttgggtttctcccaaattaagtgaactttgaactcacatcttacctttatctgcccagatctttcccatgggccrgttcttgtcctctcttctctagtcttaattagtatgactgtcctctaaatccttaatgcttgtacagtatacattacatctttaagccctgtattatatgctgtcttttattggcttccacttctattttcattcagagtacattgaactgcaatcaatgagaagaattacatttaatatagcctctgtctatagcaataggagtactgcttacggtgtgccagatcttatcattgacatacattactactaatctggctcatgaccctatatggttaataccattattcttactttttagatgaataaatttatgtttagagtgtccaagt

SEQ ID NO: 100739 - DNA, 609 bp, Homo sapiens
accagctctactctaggaatgtcagcttgagtaacctcttaactatcctatttcctgtcagtaaaatgtgagttcttttcttcctcgtatattttgagcacattcttgacagttaatactgatatgccatttaatggttgctctttcctttgcgtctccatttagtaagtgtccatgaaagagttttattggtttctcccaagatattacctgataacattttgtttgtttctaatttctgtttagagatttgttaacttggttggagtggtccattggacatttgagggctctctatacactttcttaaattgtttgccaaattgtttttgtgccctgttgcattcatcatactttcaaaggaatacaaattcaaaaatgaaaagattaatgagtatcttttttgttggtaaatatgctttctttttaggcagtcttttattccccctttaaccygattcacctagatggaagtattgacagtgtgcatgctcagacagggagctagtgataaacggggtcatccaaggttatttgagtccccaagaatgctaaccattttggatgtcctcataagtatacagcagaaattggacacagtgtccctga

SEQ ID NO: 100740 - DNA, 555 bp, Homo sapiens
ctgtcattagcaggaggtagagttcttgattaaccagagctgctgcaaaatcaactatatttccaggaagcttaattgacagagatcacagtcagggttcgagtcgagacaaagaatgtgaagtcagggtttgagattcaatctgatgccaaacaatgtgaagttaagctataatatctgtaatgaggctacctgaattttaaaatctaaatcagcctttaccacttaatacatataatcattgggttaatcatataatcttggtctgactcaattttcttttccatatcatgggcaaactcataattcctacttcagagtataggcagtcctcactttgtgcacatttctgagatgcamaagttttacttatcacagtttaggtaaatgacaaagccctccaaaaacatggctcaatgtttaattactatggtatatgaattttgagtaaaggcataaagtacaaactttgctgctagctctttagttcacaaatcaccacatacataagagatgcacagcatgaccagtggccagtcacatcacttcttccaa

SEQ ID NO: 100741 - DNA, 563 bp, Homo sapiens
atttatcaaaattacagaatttaagaattagaaaattatttgatttacagatcttgctcccagtccagatcttactctatgctgcattttctgctcccataaaaggactatgagttcacttatttatcattgagttgmacacatcttagttgatcatagctctgaagtgagaacagagtgtttacaagggcaatggatgcctggaatttcctggcctcactattatcctagctgttctagccctttcatgcacatgcttcaaatctcagcctttgggttgtgaagcacttcagagctaagagtgcacatatgtcattatgaccatcacctaatgctgagatggcttctctgttagtctgtctttcccccacggagtgggaaagcactgaatctttccatctttacattcctggcaccagaattgaccattatatcataggacctcaagagacaatattgagtaaatgtatggatggatgaggaaaataaagtaaaatcagcaaaaatatcctgcatgtgagaaggtaagttctgattgaataatcctttatttagcaaagtca

SEQ ID NO: 100742 - DNA, 589 bp, Homo sapiens
tcatcttcatttcacaaatccataagccaaggctttgaaagggaattttactccccacagatcagcgtgataatcagcagtggagctggaggaacattgactgccctgtgattcaagtctttcctcttgtccctaggtcatctctrctctccctcctgctgctccacactggtcttgctggaattccaaactgtctctttaagattctttcagagtcgaccatgagcttctcaaagccttaacccttttacgaaaatcaagattacctgtcaactctatttgtctgtgttttctgcaacatgatacattaattggcacaaatctaccctcaccctgaacccttttttagatgcactttgcaaggccaactgggcttctgttttatacgaggtgagggtggctggccacgcacattatctccagaggagcaaaggcttgctctatcccacttgtccagaagaggctcaactgcttgcccccagaatttgcaatagacttggtcattaaggtaagaattgctttccctgaagtatcacagatgcagtactccctttctttcaaatttattgatttttattttgttttgttt

SEQ ID NO: 100743 - DNA, 569 bp, Homo sapiens
agattggactttggagttagacttttgggttaatgctaaaatgagataagactgtgggagattgttgggaaagcatgtttggttttgaaatatgaaaagggcatgagatttggaaggggccaggggcggaatgatactcatggtgttcttgtgatactgagtgagttctcatgagattggatggttttataagtggtcatttttcctgctytccttcacctagtgaaaaatatacctgcttctccttcaacttctgccattattgtaaggttcttgaggcctccccagtcatgcttatctgtgagtcaaattaacctctttcctttttaatttacctagtcttgggtgtgtctttatagcagtgtgagaatggactaatagacacagtaacttaataacaaaggtattattgtcctcaatttacaaagaaagaaaaagagccagagaaataatttgctcacaatagcagagccagtattaaaacacaagcaactttgactccagagataatgctcttgaatacaacaataaaaaccctttcaaacagaaaagaagttacctttaacatc

SEQ ID NO: 100744 - DNA, 549 bp, Homo sapiens
ctgagattatgggcacatgccaccatgcccagctcatttttgtatttatagtagagacaggatttcaccatgttggccaagctggtctcgaactccyggcctcaggtgatccacccaccttggcctcccgaagtgctgggattacaggcctgagccactgccctggctgaaagtatctgtttctgaggacataggattttagggacatcaattattaagaggctacatggaagcagaagtgctcctggatgtttccactatctagacaaaaaatttcaacacatcagtcccagcaagtttagttacatccctgactgctgtaggtgatgagcattccatccaaagcagagatgttaaacttcataggtttcaaatgacttccaagtgatccacaccttgaaagtttctcccacaaagctggagcgccatctgttctggagagagctggtcaccatccacgtctttgagacactggccagtcaggtctaaggtgagatgaggcccatggttacacgtgtaaaatatcaaaacaatcatcatgtttaggtt

SEQ ID NO: 100745 - DNA, 492 bp, Homo sapiens
aatcaccacactcacaggcagaaggccctagaattgcagataaagtctgcctttgtttgtcttttatcacaggggaggtttggaaccagtaaactcctaaataaaaaccaaaatatgagtttcccctttccaacactcagttgcccttctctgccacagatgccagaaatttctactgcagcaaygagaatatgggccgcagtgacctgcccctaccaaacctaagcagagcagtctctatgatctttatctgggactaaaactaaactcacctctcgtgaaagtatctgaaagcactcgtggttgaccctgggctcaccttagcctcacatgtggcacttaattcaaacaacatggctgcaggggggaagtggagcaagatgactaaatagcaccctccagcaaccatcccccagataaaacaccaagtagaatgactatccaaataagaagcatcttcctaagaaccaaaactctggggagcgatcacag

SEQ ID NO: 100746 - DNA, 498 bp, Homo sapiens
aatacttggaaagcctttctaagaaggacaggtattaaaaagcccagaatgcaaaaactaaaataaatacctaactcattaatgcccagacatcaatgaacatccacaaaaattaagactattcaggaaaacgcaacctcataaaactaaataaggcactagtgtgcaaatcctgagacagagatatgtaacctttcagacaggaaattcaaaacagctgttttgaaaaagctcagcaaaattcaaaataacaacaaaaaaaataagaaattcggaatctgatccaataaacttaataaattgattaaaatcattttgaagaatcaggcaaaaattctggtgctgaaaattcaaatgacattgaagagtgcatcagagtctctcaacagcagaaytgatcaagcagaagaaagaattagtgaatttgaacacaggctatttgaaaagatacagtcagatgagacaaaaaaaaaatagcctcaagagggcaattctaaa

SEQ ID NO: 100747 - DNA, 479 bp, Homo sapiens
tcagtaagtagctgttttgggctggcttctgcttgcaacgaaagccatgccctggatgtgagggtggccttccctcaatgcacacacatgtctgaaagcacacctcagtttctggttggtctatgcagtgaaagaaaaactcatcttcaggtttgtcttcaaaaggagagaaagatgaggttgcttagaacctcaggaattaaacttgctggggtagagaccaatatatgtttcttgctataatcgcatcctcacactgacacagctctttacgatatgctatgaccaaggctccctacaggcacatagaggtctctctcttctatcttratagctgctgagtgttctaatatagatggtggcatgagactattcaccctttgccctgtgaataaacatagctgctctgtctgttattttgctatgacaaataaggtcacagggaataacctcagaaatatttgtttaatgtttgtaaa

SEQ ID NO: 100748 - DNA, 585 bp, Homo sapiens
agaaactgaaactggactggtgctctaggaggcctcaagtagataaggttactagaagacagggaatcctgggcttatctggatttaaggagtctacaactccatctgcaactccagccgatttcatttataagaattatggaccaagaacctgtgcttttctagagaaatgtgtgagccttactaaaggtaacttagaattacaatggactgcygagaccagctcggtcgtggagaccctaacccagcagcgctagaggaatcaaagacacacacacagaaatgtagagtgtggagtgggaaatcaggggactcacagccttcagagctgagagcccctaacagagatttacccacatatttactgacagcaagccagtgataagcattatcgctatagattatagattaactaaaagtattccttacaggaaacaaagggatgggccgaaacaaagggataggctctggctagatgtctgcagcaggaacacgtccttaaggcacagattgctcatgctattgttgtggcttaggaacacgttaagcggttttctgccctgggtgggccaggtgttccttgcc

SEQ ID NO: 100749 - DNA, 593 bp, Homo sapiens
ccctgtcctgtgagtgcatcaccacactgacactcttgaagtcctctaacttgatagtttccacgtgaaatcttaatccagtttcatgagcagggttggttctactgaaaattaatgaggaagcagatgaaatttatttttacttcccaccccaatccccaaarcttattaatctccttacatcctggccccttgctcttccatttgttctgagctcttgacgtctgtttctctatgttttttatcctatcgattcaataattgttgttagagtgtctcctctgtattacccagggacatcccgttaaacgctgctattacaaagtagataagatgctgtccattcccccagttaatgcttctcttaaataattatcataaatatcatgggcaatggcataagcagatttttctggtctactccacggcagcagtaatagaatgttatctcagtgtgttcagtgttgttaacaatgtcctgttttgtattttactataagtttttcttcggataaacttgttttgtgaaatatgttcaaaatgtattaagagtctgccttttaagcaaattctctgaaaagcttctcctaggt

SEQ ID NO: 100750 - DNA, 593 bp, Homo sapiens
ccctgtcctgtgagtgcatcaccacactgacactcttgaagtcctctaacttgatagtttccacgtgaaatcttaatccagtttcatgagcagggttggttctactgaaaattaatgaggaagcagatgaaatttatttttacttcccaccccaatccccaaaacttattaatctccttacatcctggccccttgctcttccatttgttctgagctcttgaygtctgtttctctatgttttttatcctatcgattcaataattgttgttagagtgtctcctctgtattacccagggacatcccgttaaacgctgctattacaaagtagataagatgctgtccattcccccagttaatgcttctcttaaataattatcataaatatcatgggcaatggcataagcagatttttctggtctactccacggcagcagtaatagaatgttatctcagtgtgttcagtgttgttaacaatgtcctgttttgtattttactataagtttttcttcggataaacttgttttgtgaaatatgttcaaaatgtattaagagtctgccttttaagcaaattctctgaaaagcttctcctaggt

SEQ ID NO: 100751 - DNA, 593 bp, Homo sapiens
ccctgtcctgtgagtgcatcaccacactgacactcttgaagtcctctaacttgatagtttccacgtgaaatcttaatccagtttcatgagcagggttggttctactgaaaattaatgaggaagcagatgaaatttatttttacttcccaccccaatccccaaaacttattaatctccttacatcctggccccttgctcttccatttgttctgagctcttgacgtctgtttctctatgttttttatcctatcgattcaataattgttgttagagtgtctcctctgtattacccagggacatcccgttaaacgctgctattacaaagtagataagatgctgtccattcccccagttaatgcttctcttaaataattatcataaatatcatgggcaatggcataagcagatttttctggtctactccacggcagcagtaatagaatgttatctcagtgtgttcagtgttgttaacaatgtcctgttttgtattttactataagwttttcttcggataaacttgttttgtgaaatatgttcaaaatgtattaagagtctgccttttaagcaaattctctgaaaagcttctcctaggt

SEQ ID NO: 100752 - DNA, 424 bp, Homo sapiens
agctctaaagttccagtgttgttgctggctgttgagcagaaaccaaacatccatccttgccacatggtctgctcttgaagaagaaattcacttcttccaggacagaagtagcacatctctcctgsttttgtgcatcatctctcatttttggaatccctccactgcttctagtctccttttaaatggctaatttgattacctcagctccactcaggataatctccctttttagtaaattatagtcaactgattagaagtcttaattacatctgcaaaatccgttctcccttggcagataactgaatcacggagtgtatcctacctgtggtatcctattcagagacctgattcacactgaaaggcagtgagttatacatgagcactagaggctggcaccataattgtgggtgccctcttagaattc

SEQ ID NO: 100753 - DNA, 459 bp, Homo sapiens
ttttcccatccccaccccaaaaaaccatccatttaaaaatgccactttttctaacagaggaaaattattttaaattaggaatactgcaaccacatcaaaccatcaaacttgatgagaaaatgcatagaagtaaacattcggtaactatgtaacccactacacaaagctcatcaaagtccccacacataacatgaccctgaaaactgaattatatatattcttacaattctttttagctgtaaagacaaaaacatcytaagttaggaattcaaaaactaaaaaatagacaagaaataggaataaatgaaatgggaatttattgaatacaagaaagaaattaataaaaaaagacaacattgtaccagaaaaaaattaaattataatgcactcaaggagtaggagatttgaataaatatttagttagaatcattgaagacaggcagaaaacaagcaagataa

SEQ ID NO: 100754 - DNA, 588 bp, Homo sapiens
tactatttatagaattgatgagtatctaagaaagtaagtaggagaatcaatttaaaactactaaccatgttcatgcctttaaaaacattttaaaatattttccatattaaaatggaaaatattgaagttgacattacttcccataggtccttgtttgcattttgaatgtccactaggaattttatagaaggttaaaactatctgaatttaaaaacacttggttatactcattaaaaattgcacttaggatcgacaatattattcttcacattatttgcttcccctttcttaagcagtggttatacatccctgtcccattgatggcaagtttgaccatgtgacctgctgagctctgcgtggaaagaagatgacatgtcctctcctccaccttcacatcaggcttggctatgtgatacactatsgatagtgcattgtgaatacaagtgacataagcaaaacttaagaaccagcttgggattcattatttattttctccttctgctgtaagactggtaatgcttccagatagaggttgctacagcaagctgggtcctaagatgaagatgatacagagaaaagctgcagcca

SEQ ID NO: 100755 - DNA, 584 bp, Homo sapiens
cacaaaaaaaaaagggaagaaagtctctttagtagctcacagcttcttcactacgtaaagctggaatgtataaagccaaaatctagcagagcaacgtaatcctggtgatcctagtgttaattttaggaggtggtctcaaataatataatctaaggtgaatcaaatggagaggataaattgaagctattggrgagagcatgagtgagtgaaggaaataaatttatgagaaagtatgggaatacaaggtcaagggcataagtagctaggattttctcataacgggcataaaaacatgaaagatataaggactggtaaatgcatcttgtctctaaaccctgggaaaaggaggtaaaggtagttataaatatacaattttatcttggtgggagagaggaactgataaagcttgaatatctgtcccctccaaatctcatgttgaaatttgatccccaatgctggaggtgggacctggtgggaggcatttaggtcatggcttcagaatccctcatgaatggcttggtgctctccccacagtaatgagtgagttctctccatattagtgcatgtgagagctggttgttttc

SEQ ID NO: 100756 - DNA, 545 bp, Homo sapiens
aatgataaagtgtcaaatagtcaaaatacataagaatcataaatgtaaatatactttataaaagtgtttcaaatacacgaagcaaatgatgtcagtaagatgacagaataggcagatacaaccacctctctgtacaaagaaacattgagaaataaccataaatgatcagaaccaattctstcagaactctggaaaacaatcacaggtctacagcaactgagaaaactgtatatcaagaaaaagacaacttaaaaaacagtgggaaatgtttctggtgattttatctacctttctttggcttcatgacagtcttgaatatggcagcccgcagcctcagtcagtatgagaacctggtcccttgttccagagagagcagagcagatcttattcacacattattgtttctgtctttgctaacctgtctggcagctactcgaaggactgatgcaaggtgcttatctctgtttgacttaaatcaaaactcattcagggaagaaaactaaaaggtgttgctttaaaacactgcaaggtggaagaagaatctg

SEQ ID NO: 100757 - DNA, 597 bp, Homo sapiens
cagattcttaggtaggacacaaaaagcatgcactatttaaaaaatagacaaatagcatgtcatcacaatttaatacattttaaagcacaaacttttatctaaaaagtgaaaaggcaacttttaattggaaaattaaagagaatggagaatttactgaatctacagaaaatacttgcaaatcatatatttaataagggtctattaaacagaatatataaacaattcttraaactccacaacaaaattcaaacaacctaacttaaaaatggataaggcacttgaataaacatttttccaaagacaatattcaaagacccagaaaactcataaaaatatgtctaacattattaatcattagtgaaattgaaatcaaaatgacagtgaagtactacttcatacccaccaggaggactataattttttaaaatggaaaacaacaagtgatggtgaggatgtggaagaattggaatttgtatacattacaggtgggaagtttcagctgctctgtgaaggattttggtaattcctcaaaaagttaaagacaaaattaccaaataactgcaatttttggtgtacactcaaaataattttaaaaag

SEQ ID NO: 100758 - DNA, 573 bp, Homo sapiens
gacacaattatttttaagaaaagggctgtatgcactcccaactccacttagattgtcatttaaggctgagggcaagatagaccacagaggaaatcgttccaaggtgcaatgtgtcctgcggctacgttcatagagctcataaagttaaaaccccttccaataaagaatctctaggaggccttgtctgtataacgttgcagtagctactgctacttgggtcaagtgaaagcaattgccctatcctagctattatttcctgaaccaaagtcagttgtgtttgggctggctacaaaaaggctaaattycttttaaatgaaagattactataatgtaagctaaaagaaggtacagtgtagttcaaaaaaacaaagtaaactcagaactgaggacagtgtttgacacatgataggttgttgaattattacagaaaaaaaaaccactttgcgtgaaaaattctaatcaatagggtgatcaatactgaaaagtgacaaatggatcccaaaagatcctttctttgaaggtctgaatattaggtgactcatgacagaacactcaatatcatactatttttta

SEQ ID NO: 100759 - DNA, 602 bp, Homo sapiens
tatccactatgttggttataattctacttaaaaaaaggaaaaggaaagtattggttaggatgtggagaaaatggaatcctcatacattattggtgagaatgcaaatgtgtaaatagcagtgycaaagtttctcgaaatgttaaccataaaattaccatatgatcccataattccaggcaaaactctggtaagatgatttttttcagtcaacaaaaaccacataaaatgttaaagggagtctcttcagacaaaaggaaaatgaaactacatgctagtttgaatctccaccaaaataatgaacaatgtacacagcaggaaataaatggataaatatagaattatttccattttaaaaatcattattgcacattaaattatataaagcagaaataatatactatggtattatcaacatttacagaagcaaaatggctaaacctaatagcagaagttaggcaaaaggaatggaagtagtgtgctttaaggttcttacagtgtacatgtagaaatatggtattattttaaattagaaggtgataagtaaaagatgcatattgtaaaccatagaaacttcagtaaaacaaagatgtataattagtaat

SEQ ID NO: 100760 - DNA, 602 bp, Homo sapiens
tatccactatgttggttataattctacttaaaaaaaggaaaaggaaagtattggttaggatgtggagaaaatggaatcctcatacattattggtgagaatgcaaatgtgtaaatagcagtgccaaagtttctcgaaatgttaaccataaaattaccatatgatcccataattccaggcaaaactctggtaagatgatttttttcagtsaacaaaaaccacataaaatgttaaagggagtctcttcagacaaaaggaaaatgaaactacatgctagtttgaatctccaccaaaataatgaacaatgtacacagcaggaaataaatggataaatatagaattatttccattttaaaaatcattattgcacattaaattatataaagcagaaataatatactatggtattatcaacatttacagaagcaaaatggctaaacctaatagcagaagttaggcaaaaggaatggaagtagtgtgctttaaggttcttacagtgtacatgtagaaatatggtattattttaaattagaaggtgataagtaaaagatgcatattgtaaaccatagaaacttcagtaaaacaaagatgtataattagtaat

SEQ ID NO: 100761 - DNA, 602 bp, Homo sapiens
tatccactatgttggttataattctacttaaaaaaaggaaaaggaaagtattggttaggatgtggagaaaatggaatcctcatacattattggtgagaatgcaaatgtgtaaatagcagtgccaaagtttctcgaaatgttaaccataaaattaccatatgatcccataattccaggcaaaactctggtaagatgatttttttcagtcaacaaaaaccacataaaatgttaaagggagtctcttcagacaaaaggaaaatgaaactacatgctagtttgaatctccacmaaaataatgaacaatgtacacagcaggaaataaatggataaatatagaattatttccattttaaaaatcattattgcacattaaattatataaagcagaaataatatactatggtattatcaacatttacagaagcaaaatggctaaacctaatagcagaagttaggcaaaaggaatggaagtagtgtgctttaaggttcttacagtgtacatgtagaaatatggtattattttaaattagaaggtgataagtaaaagatgcatattgtaaaccatagaaacttcagtaaaacaaagatgtataattagtaat

SEQ ID NO: 100762 - DNA, 569 bp, Homo sapiens
cgactctttgtgagagacctaactgtagcacttctcaagatattttttcaaagatatttccctttgtttgaagaattcaaatgccagttagaataatacttttatttttcacagaaaatggactgtatttaggaatctaggttaatctctcctttctacaagaaagtacagatacaaggagcagctcagttgatcactatagtctgtggtaactgccatttagcatcaagatggaaaaggatgtacagccagccactcattaactacacccctgtttatcttcatgccatggatcctttttagaaattcacttgtttagtattttccaaattgctagtcatgaaccattaatggctcaaggctgtgatattttttttttaaatgaactggaaatatactagaaaagataawgtaagtgtgagtacctcacatatagaagtactgctaattgtttaacggaaattttgacttggatgtatatgtacatttacgcataggagttttagattacaatatttaacttatgctttattccaattaaaaattaaaaatctttaaaataaactgca

SEQ ID NO: 100763 - DNA, 569 bp, Homo sapiens
cgactctttgtgagagacctaactgtagcacttctcaagatattttttcaaagatatttccctttgtttgaagaattcaaatgccagttagaataatacttttatttttcacagaaaatggactgtatttaggaatctaggttaatctctcctttctacaagaaagtacagatacaaggagcagctcagttgatcactatagtctgtggtaactgccatttagcatcaagatggaaaaggatgtacagccagccactcattaactacacccctgtttatcttcatgccatggatcctttttagaaattcacttgtttagtattttccaaattgctagtcatgaaccattaatggctcaaggctgtgatattttttttttaaatgaactggaaatatactagaaaagataaagtaagtgtgagtacctcacatatagaagtactgctaattgtttaayggaaattttgacttggatgtatatgtacatttacgcataggagttttagattacaatatttaacttatgctttattccaattaaaaattaaaaatctttaaaataaactgca

SEQ ID NO: 100764 - DNA, 579 bp, Homo sapiens
ggggattatatacctgacttcagactggggctaaaagtcactgctggatcaagttacaaacctggactataggaagaaaaattccacaaaccagaaacccaaatttgcattttaagggtgctgagccttaattcatgatagtcacataaaaacaaacctgcttaaaagcaaaataagcctaatgaggccaagaagaagcaagagcaaaacagtacccagaaaggcctccacatctcaggatgaaaackttctcatttacagtaattcccacagaagatgaactcacagaaataattacaaaacatatgaggaatgctatttccaaagaagagaagatatacttgaagagtaacttaatagatccactgaactttaacataataatcctcaaatatataaaggaaggaatagcacccatgtaccagaaataagaagctatgcagcaaagtaaggatagagaaaaacagtaagagtcttagttaataaaagacagtcattttttattgtaaaagtctgtagatgtgaccaaatagtagatgggccatctattattccattttcacactgctataaagaact

SEQ ID NO: 100765 - DNA, 470 bp, Homo sapiens
ataattaagacatcaataaatatacaaaattttttaaacagtaagaaattaagcaaaataactatgaatatcctatatgtcaaagaataaatcacaagagggattataggatattattaattccataataatcaaaccacatcctacaaaaacctgcaaaattcaacaaagcagtaatttgagtgaaattaacagtttatactatacaaaaataaaagatctaaaatcaatgatagaagcttttaacttaagaaaaamaaaataaacccaaaataagtagaggaaataaaattttaaaaaaaggactaaataattgaaccataaaattaacaatgaaggaaaatttcaaagtctaaagttggttctttaaaaagattagtaaaattggtgaagctttagcaagattgatcatgaaaaagataaaggtaaaaataaattaccaacactagctataaaataagaattgatat

SEQ ID NO: 100766 - DNA, 583 bp, Homo sapiens
gggcttaccacatacagatggggagttctgtgtagtatattggcaaacacatcttgcagtawtcttgtcaaggttgaaatgtgacctactaatgcatttatgttaatgttggaggttttaaaattctttgattacaaaaataattggctgtatgttgggagtaataaacagctcagagtaaaagtaccacctttcagcatttcactgcatgagtagaagctcttgttaacacctctgagatctatcatgtaacataggaagaaagatgatacataggttcaattttagtaatgaaaataaaactatatagcaaagataagctagacttgcatgtttattaaaggcgaaatcctgtagtacaaggtaagaatttagtaacaaatccattatgctctcagacgcacaataagccaaaagggctgtttcagagatggacatatttgactacataatttattgattacttgcctgtaaggtgaccctaaatcaaatgacatttttcatgacagtgcttatgtcagttgcatttttaaaacaatgggagtttttgccagatttttgttttttaccacagtacattaat

SEQ ID NO: 100767 - DNA, 570 bp, Homo sapiens
ggtaatgactgcataagttaatatagggaatctctaacagtgcttgcacactctctaaatgtcagctatatgagatagtatttctccccaccctgtacccatctccactgtgtagctccctaagagccgggaaaatacgtcatttttttttccatatctctgtagcacacagcatggggaataagcaatttatgctttcagagagaagtagttatatggaaattatgttttaccaataaatctaatttccaaaggaggatgaaaatagaacacgtgtatraagccctcatgagcagcaaaccatctgagaacattttaactctgtcttatggcacttatagcctgacctgttccccgtagaatatttgcagaggatcttggctttaaaatcctcacatcagccgtggccaccttgcctcccttgggtccctccctagttgtaaccactggtatcaaatctgtaggtctcctgtaaatttttcatttcatcttcataaacaggtcttggcaatccttaaatgttagcacatgtagatctaccagattcctcttagcagtctacattttgtg

SEQ ID NO: 100768 - DNA, 564 bp, Homo sapiens
ttgtttgtgtcatctacaatttatttcaccactgttttgtagttttccttgtagagatctttcactttcttggttaaatatattcttaggtattttatttcatttttttagttactgtaaataaaattgccttttcgatttggttcttagcttcactgttattggtgtataraaatactactgatttttatacattgattttatatcctcaaactttgctaaattcatttaacaaaattaagagttttttgcaggagtttttagggttttctaaatataagatcatattgttggcaaatagagataattcgatttcttcttttgcaatctggatgtatttcatttctttctcttgcatgaatgctctagctaggctatccactactatgataaataggagtggtaaaagtgggcattcttgtcttattccagtttgtagggagattgctttcaaccttcccccatttagtatgatgttggcatatatggcctttgttattttgaggtatgttccttctacgtctggtttgtagagggtttctatcatgaagagatgctgaattt

SEQ ID NO: 100769 - DNA, 586 bp, Homo sapiens
ggatccaggtagaagaatcaggtctaaaactgtaatctcccaaagaggtcttccaaaagcttctaacatcctctccctattggagatttttgattcaaggaatcgatttcatttttcgccctagaaaaatgtgatcatccaggaatcttccattttaagcaaatcctttgcaatccacatcattcaccaatttttggaaaacactttattctacaaaattgtcctcatttaggaaggtgcttagaatattaattactcaaatgcctgtttatttcatcatgtacatggtctrgggcaacctccatcaaaccttttgagtcttaccagcctctcctcctctcccagcctttctacaaaggaacatttttatttggctgttcaagctttcctctcagtggccctctaagtagaaatttatctttctttagctacattccagggctcttaaaatcagagaggaggtagacagagattggactacaaggagtctttctggtggagtcagttcctgaactcacctttatgggtgagaatctgggtaataagcataaaagagaaaaaacagaaaaacgaaacaaaaaaaagc

SEQ ID NO: 100770 - DNA, 586 bp, Homo sapiens
ggatccaggtagaagaatcaggtctaaaactgtaatctcccaaagaggtcttccaaaagcttctaacatcctctccctattggagatttttgattcaaggaatcgatttcatttttcgccctagaaaaatgtgatcatccaggaatcttccattttaagcaaatcctttgcaatccacatcattcaccaatttttggaaaacactttattctacaaaattgtcctcatttaggaaggtgcttagaatattaattactcaaatgcctgtttatttcatcatgtacatggtctagggcaacctccatcaaaccttttgagtcttaccagcctctcctcctctcccagcctttctacaaaggaacatttttatttggctgttcaagctttcctctcrgtggccctctaagtagaaatttatctttctttagctacattccagggctcttaaaatcagagaggaggtagacagagattggactacaaggagtctttctggtggagtcagttcctgaactcacctttatgggtgagaatctgggtaataagcataaaagagaaaaaacagaaaaacgaaacaaaaaaaagc

SEQ ID NO: 100771 - DNA, 586 bp, Homo sapiens
ggatccaggtagaagaatcaggtctaaaactgtaatctcccaaagaggtcttccaaaagcttctaacatcctctccctattggagatttttgattcaaggaatcgatttcatttttcgccctagaaaaatgtgatcatccaggaatcttccattttaagcaaatcctttgcaatccacatcattcaccaatttttggaaaacactttattctacaaaattgtcctcatttaggaaggtgcttagaatattaattactcaaatgcctgtttatttcatcatgtacatggtctagggcaacctccatcaaaccttttgagtcttaccagcctctcctcctctcccagcctttctacaaaggaacatttttatttggctgttcaagctttcctctcagtggccctctaagtagaaatttatctttctttagctacattccagggctyttaaaatcagagaggaggtagacagagattggactacaaggagtctttctggtggagtcagttcctgaactcacctttatgggtgagaatctgggtaataagcataaaagagaaaaaacagaaaaacgaaacaaaaaaaagc

SEQ ID NO: 100772 - DNA, 603 bp, Homo sapiens
tgttggatctagagaagtatgatctatttgtgaaagtaacaaggaaatggtgatacttgccatgggaatctgtctgctcctgaagtgggctctatagcaataaccgaaagaatagtcaatcaagaccaaaatgtgcaaaataaatggattgaggtatagaattagcattgcaaactagcaagctattgggtttctctcactagtaggcaatgaaaattcagtttatatttttaaattttacctatcrgtatctgtaattagtttgtgttttttatttaactgattggtaaagctggttacagttttgcccatactttactgattgagttatttttaaagcatgctttgattttgaggtatgaatttcagaattataaccaggaccatttgaaattgaaatacttgaatctgttcacacagttctcaacactttggttattatatttctgtgtcttattgataaagagggaaaatcattatgttaatttctactcagtctattattgctacattatcaaagataactagattatattctgcaaaaaagccacctatatttgtactaataatgatgtaatttggagacactgtgcaggaaaacag

SEQ ID NO: 100773 - DNA, 540 bp, Homo sapiens
atccagctaggactagtggagcacaggacatatgcctgaggaatacaagaaaaaaagatgacatggcttgcactaaaggartttactctcttccagggagaccaatcccacccacagttgacaaaattgggcatgaaataaattgtatgttttaaaggacggtcacattaggtgtaattacatgccgtagtacaagatacagcaagtgctaaacacaatcagaaatcaaagataattcacattcactaaagctctgttcaaatgcaatttcttttgtggtctcatccctctagtcactgttagtcaccttttcctcggggtatacttgtctatctaactagttttttctttaaaccgtaagctctttgaggataaatatcctaacttgcccttatattcttcacagcacataataatgacataaaatatacattcaataaatatttactaagatgcaaattaaaaaagggaagatatttgtgttttctagaggttactggggaaagagttatggagaatataaaaaataagccagagcca

SEQ ID NO: 100774 - DNA, 582 bp, Homo sapiens
aacaatatttaccttttgatatacatacttggcagttgttttctatgtataatttaagtagctgaaattatatgtaatatttttctaaatttttacttaaccttcaacttttaatgttttctcatataattgcaaattctttttaatattatttttaaaggccacataatattttataaccaattaaccatttacctatcattggccacttatgttgtttccatatacgtgatattcatgattgttttactctgcttacaaagagagaagaatgccttgcgtctacactgtaccagtcctggacctcagattcatttctttccttcctctgctcttctccacattatagtaatcagsgtcagttggcttctggctgaattcacctagtggaagacactaacaggaaaattgcagaatggggaaaggaggaagtccagaagtccatttctcccctcccactctgccgtggatggtttctttggcagtagctatgcctccctcttggttacatccctcaccagacaggcccttcatggttccagaaccccacctcccagtaaaacccaaacctttggttccagt

SEQ ID NO: 100775 - DNA, 535 bp, Homo sapiens
actgctctactgaccgtcctttcccaggatcgattcttcctttggtgacagtgcatagagccctggtcattagagctgtaagcaaatactctgatcctccttctttaggacttttggtagaactattttttccccaccttctttgaaataaggtgtggccatctgactatctgacttgctttgctcagtaaaatgtgggaagaaatgattatgtcacttctgtgttgaagctttaagagttattacataattcacacttcttttacctgccaaggtaactggtgatggtttcagtgattgctgctgccaaagggagaatgacttggattagatgccctgccaacctttgatggacatgtagggagagtgagaaataagctyctactgttataagccactaaaataattggcttgtttgttactgcagcacagcttgttctgtttttcctgattcccacaatcccctctgggaagacagggacttttagttgccagtggaagtgcatttcatggagataatctatgtttgtaggga

SEQ ID NO: 100776 - DNA, 524 bp, Homo sapiens
acaaaacttctttcttcccccatccccaacttcttacttcttcttttttaaatcttagactggccatggacttcatataggccaaaaatgccacacttggctggtcagcaggtagtctgggggaccctgagaccagtagacctcatttgaaagggcaacaaccactgccctagggatttatgttctcttgaaagattcctataataagcactttgcatatagatatgtgagttggtgatcagaactgtccttctagttgtattatttatgctctttcaggcagcacaaaggagaaaaacccagactgcttttgatgatgggagtttattattataccctgtggtatatgcaccatgcctcatggataataggaatggtagctcaccagtgtttgaattattgctcagactgaaataatgagtcatctcagtgcaaatcaataatcataatccccaaaagagaygatatgaccaggttagttttcacctttcagtatcaaacactccacatcatcagagatttgc

SEQ ID NO: 100777 - DNA, 627 bp, Homo sapiens
tatgacctcactattattaactactattacaactaagtaaggggtagaattcaactcctacttgcttactactctgtgacattaggcaattcacttaaactctctaagcttcagttttctcatctataaaaatgataataataataatagtacttaccttgtagcattgttgcaarttaatatttgtaaaatgcttagaacagagtttgggtgcatattaagtactgatgttttgtttaataacagttaagaagttgtactttctgatgactgatgaacttttattaacaattacacacacagattttctgtaattttcagatgaccgttatgcttcaaactggactgtaaacaaaatgactactttccactgatgggaaatgtatgtagataatgtttaagcataatcactaaccatgtaaagcattgagccctttacaatttcttctggtgaaaacactcaattatctccattcatccataccttccttcttttactcatttaacaaacattctcatgccagtactttgctgagtcctggggacgcaggatgaataaatggagaaggatccaatctagagctgactgtattctctggtttagcacataagggagtgtgagaaagt

SEQ ID NO: 100778 - DNA, 590 bp, Homo sapiens
atgcttccacatttatgtttaggtaaaaaatggaaagacttttttaaragaaaaccaagggttaaaattgagttattctatagaaacatgttattttaaaacataacttgtaatcatttaaatagctgaatcccaacaattttaatttacaaaattatttatcttgtaagtaactatgattattttccctagacttccaactgcactttcaactagatgttcagatattagctagtgccaacgtttcgtatttataaaatcgcatgcactctgttgccatttagcgtagtgaatacccatttgtaaacaaagtggtgatacattatgatagccaaagggcaaagctttacctgaacagagattcatcatcttttaatgcagcacagcttgctacttgcaatatcatcaagcactctgaaaggttcttgtcagagattgatgacctaaacagtcactgaaacttaataacagcgttaacaactgcaggtcgatctcacacaccacaaaatagtgcttgtgtttttctccatgcttatttttagccaagttatatcaacattttgaccagagaaaatgttggaccaagttac

SEQ ID NO: 100779 - DNA, 590 bp, Homo sapiens
atgcttccacatttatgtttaggtaaaaaatggaaagacttttttaagagaaaaccaagggttaaaattgagttattctatagaaacatgttattttaaaacataacttgtaatcatttaaatagctgaatcmcaacaattttaatttacaaaattatttatcttgtaagtaactatgattattttccctagacttccaactgcactttcaactagatgttcagatattagctagtgccaacgtttcgtatttataaaatcgcatgcactctgttgccatttagcgtagtgaatacccatttgtaaacaaagtggtgatacattatgatagccaaagggcaaagctttacctgaacagagattcatcatcttttaatgcagcacagcttgctacttgcaatatcatcaagcactctgaaaggttcttgtcagagattgatgacctaaacagtcactgaaacttaataacagcgttaacaactgcaggtcgatctcacacaccacaaaatagtgcttgtgtttttctccatgcttatttttagccaagttatatcaacattttgaccagagaaaatgttggaccaagttac

SEQ ID NO: 100780 - DNA, 590 bp, Homo sapiens
atgcttccacatttatgtttaggtaaaaaatggaaagacttttttaagagaaaaccaagggttaaaattgagttattctatagaaacatgttattttaaaacataacttgtaatcatttaaatagctgaatcccaacaattttaatttacaaaattatttatcttgtaagtaactatgattattttccctagacttccaactgcactttcaactagatgttcagatattagctagtgccaacgtttcgtatttataaaatcgcatgcactctgttgccatttagcgtagtgaatacccatttgtaaacaaagtggtgatacattatgatagccaaagggcaaagctttacctgaacagagattcatcatcttttaatgcagcacagcttgctacttgcaatatcatcaagcactctgaaaggttcttgtcagagattgatgacctaaacartcactgaaacttaataacagcgttaacaactgcaggtcgatctcacacaccacaaaatagtgcttgtgtttttctccatgcttatttttagccaagttatatcaacattttgaccagagaaaatgttggaccaagttac

SEQ ID NO: 100781 - DNA, 646 bp, Homo sapiens
gctagtattattgcaatgtggagtggccagattggttacaaaatcgaaaggaaaggcattgatgactacgcttcagtctgcacatttattattttgaaatttacatttgttcattcgattgcactcaggtataaaatctatttgtacctataattacaattatatagctatttgatgaacagactaagtttggctttagctataaagtcaggcttcttaacatgttttcagagcattcatggggccacagtatcctggtgttgaacacataaagaaaatgtaaaagaagaargtgtaaaagaaaaaaataataagataaattttgtctaatttttacaccctctttgtctcatctctacagccctgttgatgtatgatttttctctcaaccccttcattgcacttgtaacaggggtgtctcatttattcagcctgacatgctcaaacttttgcaaagggagcacgtgagtgagtgtgggatctggctgactgctttgggtgctggcaggagcaggctccgtgtgggccctgtggcagtgcccaggtgagggtgtctgtgcccctgaagtcccagaaggcatgttacaatgctctcttagctccgccatctgtggacagcggtgtgttatcagcttagtaggctctt

SEQ ID NO: 100782 - DNA, 646 bp, Homo sapiens
gctagtattattgcaatgtggagtggccagattggttacaaaatcgaaaggaaaggcattgatgactacgcttcagtctgcacatttattattttgaaatttacatttgttcattcgattgcactcaggtataaaatctatttgtacctataattacaattatatagctatttgatgaacagactaagtttggctttagctataaagtcaggcttcttaacatgttttcagagcattcatggggccacagtatcctggtgttgaacacataaagaaaatgtaaaagaagaaagtgtaaaagaaaaaaataataagataaattttgtctaatttttacaccctctttgtctcatctctacagccctgttgatgtatgatttttctctcaaccccttcattgcacttgtaacaggggtgtctcatttattcagcctgacawgctcaaacttttgcaaagggagcacgtgagtgagtgtgggatctggctgactgctttgggtgctggcaggagcaggctccgtgtgggccctgtggcagtgcccaggtgagggtgtctgtgcccctgaagtcccagaaggcatgttacaatgctctcttagctccgccatctgtggacagcggtgtgttatcagcttagtaggctctt

SEQ ID NO: 100783 - DNA, 646 bp, Homo sapiens
gctagtattattgcaatgtggagtggccagattggttacaaaatcgaaaggaaaggcattgatgactacgcttcagtctgcacatttattattttgaaatttacatttgttcattcgattgcactcaggtataaaatctatttgtacctataattacaattatatagctatttgatgaacagactaagtttggctttagctataaagtcaggcttcttaacatgttttcagagcattcatggggccacagtatcctggtgttgaacacataaagaaaatgtaaaagaagaaagtgtaaaagaaaaaaataataagataaattttgtctaatttttacaccctctttgtctcatctctacagccctgttgatgtatgatttttctctcaaccccttcattgcacttgtaacaggggtgtctcatttattcagcctgacatgctcaaacttttgcaragggagcacgtgagtgagtgtgggatctggctgactgctttgggtgctggcaggagcaggctccgtgtgggccctgtggcagtgcccaggtgagggtgtctgtgcccctgaagtcccagaaggcatgttacaatgctctcttagctccgccatctgtggacagcggtgtgttatcagcttagtaggctctt

SEQ ID NO: 100784 - DNA, 646 bp, Homo sapiens
gctagtattattgcaatgtggagtggccagattggttacaaaatcgaaaggaaaggcattgatgactacgcttcagtctgcacatttattattttgaaatttacatttgttcattcgattgcactcaggtataaaatctatttgtacctataattacaattatatagctatttgatgaacagactaagtttggctttagctataaagtcaggcttcttaacatgttttcagagcattcatggggccacagtatcctggtgttgaacacataaagaaaatgtaaaagaagaaagtgtaaaagaaaaaaataataagataaattttgtctaatttttacaccctctttgtctcatctctacagccctgttgatgtatgatttttctctcaaccccttcattgcacttgtaacaggggtgtctcatttattcagcctgacatgctcaaacttttgcaaagggagcacgtgagtgagtgtgggatctggctgactgctttgggtgctggcaggagcaggctccgtgtgggccctgtggcwgtgcccaggtgagggtgtctgtgcccctgaagtcccagaaggcatgttacaatgctctcttagctccgccatctgtggacagcggtgtgttatcagcttagtaggctctt

SEQ ID NO: 100785 - DNA, 582 bp, Homo sapiens
ctcactgaagcattacctacacacaatgacatttgatgtcatgaattcctagaactaggtatccaaggagaagctctaacaagaaattcaaaactctttgccaattataaatagtaatgtaacatattatataattagttacagaatcagaacgtgagtttctctctgaatagagactggctcttgtctttgtagctatatcattgtgcctggagcttgtcaagtakgcaataaatagtgggtaaattgaattatttcccagaatatttgcaaggaatctaaatatattaccatatagcaatatatcagtagtcttgacaagccacatttgcatccattcaaataactgctgcttttggaatgtgtgcattttatttgcgcctcagttttctaatttattttaaaaatcacttgaccagataattttaaatatcctttcgattataccttctaaaatcatgccacaaagatatttccttcatgattcctgtttttttttatgctgtcattggtgcattaaaatgacaatcttatcttagattcttatttatggagcaggaagataaatgtatggcaagttac

SEQ ID NO: 100786 - DNA, 581 bp, Homo sapiens
ttgaagagatggaacatcaaaaaagtaccatttgtcctggtttttacatacatctggcaagttgtatgagttgcactagttttaatgcccagtggtgaagagaaaatataccagagtttttagacatgcaagcactagagtcacacttttattgacaatagtgtaattggggctgggtcatccaggcttgtgagaactaatgkttacagtgaaagtgctatataatggtatgctactactgagcatctgtttccaactctgcttcagtggtatcacattgaaatcaaccaaatcaatcctaatgagcatattaaccccacagaaatattcaaatgctacagaccagaaaatcaagcagccaaaaatgaagtggtttgctgttaaatgtttaagaactacctctctgaaggcagagaggaaccctgatgctagagactgaacaatatcagactgttcagggtgctgtaacaaactaccatagactgcatagcttacaaacaacagaattgtatttgctagattctggatgctgggaagtccaaaatcaagtggccagaagatgtggtgtctggtgatagcct

SEQ ID NO: 100787 - DNA, 642 bp, Homo sapiens
ccccaggatagggccaaggaggtaaagagaaaggtggaggacgggaaagagaaagaaatgtggacaactgaggggggaattttttgattgtcttactatatccgtgagtggcaggaatcttgaatatctattcaccttttttccttatcctgacaccatcatgtaaatgtatcctcctgcgctctcatcactcctacctggcatcccatctagaatgcctcaggccagcttttccaattcacataggtgtgatgttcctgattaatgtgtgactaaccctagtctttgcttgtagaaacaaagtactcatctgtaatttgccaagatgtttgccagccacttgagaaataaatgaagaaataatgtttgaaacatgaagattatttagtcgactgactaaataatcaagtgagttcttggtcaagacaacactrattaacttaggaaaatagccaatgacagcattgcatttctcactgcatctctaagtgttaaacttacataaacgttctatatccttttggactaaatggacacatgaaacacctctaaataagaagcagtaattatcactttctttaactgactaaattctgagctgaaaaaagtgttccatagacagctgtagtttgaacaacaaat

SEQ ID NO: 100788 - DNA, 591 bp, Homo sapiens
taagagcaaaaacagcacatacagactggctacatatgaaaaaaaaaaatcaatggatggaacaactccgaaatcccctaagtaccttcagttccaagaatgtctggatttccttcccaccagcagcattatttactggatttatgttcttcctcacctacccatgccaagctgatatgaaagggcttgtatgagtcaggaaagaaaaaaaactggcttgtctccatgtcaacaatgacaacaaaaaatattaatttgagaaaatatccactttgctcccaggaaaacatagcagaaaataaaatacgctgttatgaagtgcttcattaacagggtgggaagggtggtcactttgatgtaactactctgccaaaagatgtcttcatttttttctattcttggccaaggagttcgaatttaagaaagagtgaaggagcatttaataggtgcagcaatatcacagaatatcycatatctgcacccaatttcccctatgcaaacatgcaacaaacttccaatggtttaagggttttggttcagcaaactcttgttatatgtgaaacaatcaaacataagacactgtacactgca

SEQ ID NO: 100789 - DNA, 585 bp, Homo sapiens
ataaacagtaacattcaaaaattaacattcaataatctgacttctgatttttagctccaaaatgtgaagaatttgtaagtcattattccttttctcacaaaacagatagttaaacaaactgaaaataaatgtttcttagatccatcagggagttaaggttacatagcaaacctccattcttacagctagagagatagacaagtacagagaaacacagcctacatcagttcactgggagccataaactggaaggaacactgaaagctaattgatgaattgctgcagaatgactgtgaatagcttgatagttaaatgttcctgtgggcacaatcttagtgtcctgrtacttttctgggttttgcgaccatgagcaccatcaggttctcatggtaaaaatgggagaataaaatccctcttgcttcagtgtatggggaggggaaaaataaccattttgaaagatcaggtgaaagtaatcactttgaaatacatccagagaattattcataacaaaggccagctttcaaagaaaactactttgtcttagccttatctgaacagaggagaggtcaattagacaattacaag

SEQ ID NO: 100790 - DNA, 320 bp, Homo sapiens
aataataaaaagaagaactggatggaacagagggataaaaaatactcaaagagttagagttagagggtagaattaattataaagattgaaaagctgtaacaaaatattccaatatatcttaccatttcccatgtgaatcattctcagtatgatatgagattatgtaattccttaaaaagcattgagctactattctgtttacttttctcactgaaaaggcaatacattccttgtttgtttgtttatttatttatttttttattattattattwttttgagatggattctcgctcttgcccaggctggaatgcagtggcgc

SEQ ID NO: 100791 - DNA, 547 bp, Homo sapiens
aatattacaaactatttaaaaaacataaatttaataacttacatgaaatgcacaaattccttgaaagatgaaaactggcccaagcagagtctcacaagttttgaaaacaaggtgagaaggccaaagctgtgtcccttgtgatgctagtttggatactctcagcagtatgaagcctgactgtactattaaaagtgattagataaaggaattttaatagagctaccacccctaatagtttattagagctgccatgacaaaataccaaaagactgagtagcttaaacaacagaatatatttatcagaattgtagagactggaaaatccaaggtcaaggtgccagcagggttggtgtctagttgaggatgctccctttgggctgatatattagtctgttctcacaccactatacttcctgagactaagtaatttataaaagaaagaggtttggttcacagttccacatggctgaggagacctcaggaaacttacaattatggtmgaaggtgaaggtggagcaaggcacgtctcttcatggctgcaagagag

SEQ ID NO: 100792 - DNA, 587 bp, Homo sapiens
gggtttgtttgctcgtgtacttttatatcctggctgtgggatcccgccagcctgggaggagggtggagccagcagcacaggacagggctgagcctgctactgaggaggtctctgtgctgcggaggcggggcagtggacagtgctggccacagcctctgctggtctctgggatgtgctgtattgcaggtccatgagaaactaattctgtacsaagttctttcattatttctctggacctagagaaaatgtggggaggaaagacttaacagccattttatctaggtgctagaagctcacaccaagaagcaataagaatttgaataacaagtacattgtcctcagagagaaaagaagaaagggaaaaaagtaacccacccacccgtggatgccaagtcacaaaatttaattaggaagataagaagtgggggagggcgagatagggttgatgttcctttttttttttttttcctagttatgagctcagagagaggagtgagagaaataatttaagcacagaattaacatcttctaataatcttagacaaagcccgagtctgttttgctttggtttgtaaattagctcatga

SEQ ID NO: 100793 - DNA, 531 bp, Homo sapiens
ttttttaatgtgcttgtttgccttctgtatctcctctttaataaaatgtctttcacccatttactaatttaatttttttgtttttayacgattgagttttgagagtgctttatatattctaaatacataaccttgatcaggtatgtggtttgcaaactttcttccagtctgtacgttgcctttacatctttttaacagggttttttgcaatgtaaaagtttttgatgaagttcaatttatcaatatttttaatggattatgtctttggtgtcatggctaagaactcctcaccaagccctaggtttcaaattttatggctttccaaactttgtttttgaattcagtccatctgccacactcccaactgccaccagtgactaatccaggacccatttgcaaagggctttttgtatatgtatcagtctcagctaaacatcagctggggaaggcttaaggagttaattctcttctttagatccagtcccaaaggaatcttctttagaacaaaagttcaggcactggaggagatat

SEQ ID NO: 100794 - DNA, 473 bp, Homo sapiens
ggtatgtctttgtcagcagcatgaaaatggactaatacagatggcaaatatgtatatgaaaaggtgctccacatcctagattaccagggagatgcaaatgaaacacaccaaaatccagaacactgacaacaccaaatgctggtgaggatgcagagtaacaggagctctcattggttgctgataggaataaaaaatggaacagccacttgggaagacagttggatagtttctcacaaaactaaacattctcttattataccatctagcaattgtgctctatggtattgtaccaaatgagtttgaagctatgtccacayaaaaacctgcacaaagatgtttatagcagctttattcataattgcccaaactgggaagcaaccaagatgtccttcagtaggtagatggataaataaactgtggcacattcagatagtagaatattattcagcactaaaaagaaatgagctataaag

SEQ ID NO: 100795 - DNA, 528 bp, Homo sapiens
ctccagcctgggtctcagaaaaaaaaaatttttttgaccraaatgtcattatgcattacatgactgtatatgaatgctcaaagctacattactcatcaaagaaaataacaaaacaattaaatgtccattaactgataaatgaataaacactatctgtatgagtaaacacagcagactatgaaggaaaacacatgaccagcacgtgctaacacgtcaattaacttcaaacatagtatgctaaatgaaggaagtcagattccaaatatatatatatgtccatttctattaagcaaatgggaaatttatggagatggaatgtcacagcagtattgcttagggctggagatgggagtggggattaactgccagtgcgcaagagagaacttgggtgagggaaacatatttaaattagatcgtggtgatgggtgcacacagtatcaatttaataaagcatcaaattgtagaccttttcagtgggcaaactttatggtgggttcacacccaatataggtgttaaaaataaattaa

SEQ ID NO: 100796 - DNA, 528 bp, Homo sapiens
ctccagcctgggtctcagaaaaaaaaaatttttttgaccgaaatgtcattatgcattacatgactgtatatgaatgctcaaagctacattactcatcaaagaaaataacaaaacaattaaatgtccattaactgataaatgaataaacactatctgtatgagtaaacacagcagactatgaaggaaaacacatgaccagcacgtgctaacacgtcaattaacttcaaacatagtatgctaaatgaaggaagtcagattccaaatatatatatatgtccatttctattaagcaaatgggaaatttatggagatggaatgtcacagcagtattgcttagggctggagatgggrgtggggattaactgccagtgcgcaagagagaacttgggtgagggaaacatatttaaattagatcgtggtgatgggtgcacacagtatcaatttaataaagcatcaaattgtagaccttttcagtgggcaaactttatggtgggttcacacccaatataggtgttaaaaataaattaa

SEQ ID NO: 100797 - DNA, 539 bp, Homo sapiens
aagcatctccccaattcttactggacttgatccatgtcttgaggagacccagctatgacacgcaggcaccacgttgtcctacttagtgcctcccttagtgtttcagaacctgtgatttgatcagaaacatgggctttctatgttggtttcacactaargactatgtgacacctgcaggaagatgtctacatagctacctggattatgagatcatgacgttctcttatgtgagggatggcgtttgggatctctgcaggtgtgggtaattccaggcatagagggtgctggaactcccttgcatggtgaatagtgatctcttcactggctgataaatagaggttgtagttcaggccttcaacattagcaccgtatgagtaaacattttgactcttcactatgcagcaagtggaacccaggcacattatttatgtggggcttagtttctcccctggcatgtgggctcaataaacaagctcacaacatatgggcatgatgatgatgaggtgtgaactaatgtaagtaaagtatgtggtctgatt

SEQ ID NO: 100798 - DNA, 539 bp, Homo sapiens
aagcatctccccaattcttactggacttgatccatgtcttgaggagacccagctatgacacgcaggcaccacgttgtcctacttagtgcctcccttagtgtttcagaacctgtgatttgatcagaaacatgggctttctatgttggtttcacactaaggactatgtgacacctgcaggaagatgtctacatagctacctggattatgagatcatgacgttctcttatgtgagggatggcgtttgggatctctgcaggygtgggtaattccaggcatagagggtgctggaactcccttgcatggtgaatagtgatctcttcactggctgataaatagaggttgtagttcaggccttcaacattagcaccgtatgagtaaacattttgactcttcactatgcagcaagtggaacccaggcacattatttatgtggggcttagtttctcccctggcatgtgggctcaataaacaagctcacaacatatgggcatgatgatgatgaggtgtgaactaatgtaagtaaagtatgtggtctgatt

SEQ ID NO: 100799 - DNA, 600 bp, Homo sapiens
tcaccatggcgatagggcataaacattccagggtgaaggcacaatccacactgtgaggtccaactgctgccatgcagacaggtgggcttttacaagtacaggaaggtcatcaaaggctcagtgttttgtttcaaaaagtgaatcccaagcccacacattattatgctggcttcttaaaataagttatgagatgggaaatagggcacccacaaatatatatatataattatatataatataatatatagtatatatataatatatttaatataatatatatatattatataaaatatatatktatatatatatataatttgggaatttgggaataaactgaatcccaattcacactgggactacaccagctgccaccatgcctggctaattttttgtatttgtagtagagacagggtttcactgtattggccaggatggtcttgatctcctctccttgtgatcctcttgccttggcctcccaaagtgctgggattacaggcctgagtcaagatacatattttttaaatgaagaaaaatttcaaagatactctgcttggtacaataatcaaatatataaattgaggaataaaacataatcat

SEQ ID NO: 100800 - DNA, 600 bp, Homo sapiens
tcaccatggcgatagggcataaacattccagggtgaaggcacaatccacactgtgaggtccaactgctgccatgcagacaggtgggcttttacaagtacaggaaggtcatcaaaggctcagtgttttgtttcaaaaagtgaatcccaagcccacacattattatgctggcttcttaaaataagttatgagatgggaaatagggcacccacaaatatatatatataattatatataatataatatatagtatatatataatatatttaatataatatatatatattatataaaatatatatttatatatatatataatttgggaatttgggaataaactgaatcccaattcacactgggactacaccagctgccaccatgcctggctaawtttttgtatttgtagtagagacagggtttcactgtattggccaggatggtcttgatctcctctccttgtgatcctcttgccttggcctcccaaagtgctgggattacaggcctgagtcaagatacatattttttaaatgaagaaaaatttcaaagatactctgcttggtacaataatcaaatatataaattgaggaataaaacataatcat

SEQ ID NO: 100801 - DNA, 600 bp, Homo sapiens
tcaccatggcgatagggcataaacattccagggtgaaggcacaatccacactgtgaggtccaactgctgccatgcagacaggtgggcttttacaagtacaggaaggtcatcaaaggctcagtgttttgtttcaaaaagtgaatcccaagcccacacattattatgctggcttcttaaaataagttatgagatgggaaatagggcacccacaaatatatatatataattatatataatataatatatagtatatatataatatatttaatataatatatatatattatataaaatatatatttatatatatatataatttgggaatttgggaataaactgaatcccaattcacactgggactacaccagctgccaccatgcctggctaattttttgtatttgtagtagagacagggtttcactgtattggccaggatggtcttgatctcctcwccttgtgatcctcttgccttggcctcccaaagtgctgggattacaggcctgagtcaagatacatattttttaaatgaagaaaaatttcaaagatactctgcttggtacaataatcaaatatataaattgaggaataaaacataatcat

SEQ ID NO: 100802 - DNA, 558 bp, Homo sapiens
gcaacaatcgctgaggttaatcctgcaggggaggggtgacctattattatccccacttacagtccaggaaacagaggctggggaccagaatgacacaccaaagccaccagcaagaaaggtcaaatagtgagggcaccttgaaccccagcgcccatgactttcggggcaaggatgggaggaaggtgtaggatgtctcttgcccygctgtgggcctggaactgccaccccatcccaagaccacagcctccctcctgcccaggcccccctgctgatccaggccaagatggagccctgcaggaggtcagaggaggggacttctttgcaccctgcgcctctttccaatcgccagagggcagggccctacccacattggggatgggaagtcaaatgcagaagttaggtgaagtcagttcttggatactcctgtactgtcaccctggtcttatctcatgccttagcccaagctgtgcacacaatggggtcctaggtccccctcacctcccagattccaccttcccagggatgggaccccctagaaccctcgggggcctgggcagt

SEQ ID NO: 100803 - DNA, 558 bp, Homo sapiens
gcaacaatcgctgaggttaatcctgcaggggaggggtgacctattattatccccacttacagtccaggaaacagaggctggggaccagaatgacacaccaaagccaccagcaagaaaggtcaaatagtgagggcaccttgaaccccagcgcccatgactttcggggcaaggatgggaggaaggtgtaggatgtctcttgccccgctgtgggcctggaactgccaccccatcccaagaccacagcctccctcctgcccaggcccccctgckgatccaggccaagatggagccctgcaggaggtcagaggaggggacttctttgcaccctgcgcctctttccaatcgccagagggcagggccctacccacattggggatgggaagtcaaatgcagaagttaggtgaagtcagttcttggatactcctgtactgtcaccctggtcttatctcatgccttagcccaagctgtgcacacaatggggtcctaggtccccctcacctcccagattccaccttcccagggatgggaccccctagaaccctcgggggcctgggcagt

SEQ ID NO: 100804 - DNA, 558 bp, Homo sapiens
gcaacaatcgctgaggttaatcctgcaggggaggggtgacctattattatccccacttacagtccaggaaacagaggctggggaccagaatgacacaccaaagccaccagcaagaaaggtcaaatagtgagggcaccttgaaccccagcgcccatgactttcggggcaaggatgggaggaaggtgtaggatgtctcttgccccgctgtgggcctggaactgccaccccatcccaagaccacagcctccctcctgcccaggcccccctgctgatccaggccaagayggagccctgcaggaggtcagaggaggggacttctttgcaccctgcgcctctttccaatcgccagagggcagggccctacccacattggggatgggaagtcaaatgcagaagttaggtgaagtcagttcttggatactcctgtactgtcaccctggtcttatctcatgccttagcccaagctgtgcacacaatggggtcctaggtccccctcacctcccagattccaccttcccagggatgggaccccctagaaccctcgggggcctgggcagt

SEQ ID NO: 100805 - DNA, 558 bp, Homo sapiens
gcaacaatcgctgaggttaatcctgcaggggaggggtgacctattattatccccacttacagtccaggaaacagaggctggggaccagaatgacacaccaaagccaccagcaagaaaggtcaaatagtgagggcaccttgaaccccagcgcccatgactttcggggcaaggatgggaggaaggtgtaggatgtctcttgccccgctgtgggcctggaactgccaccccatcccaagaccacagcctccctcctgcccaggcccccctgctgatccaggccaagatggagccctgcaggaggtcagaggaggggacttctttgcaccctgcgcctctttccaatcgccagagggcagggccctacccacattggggatgggaagtcaaatgcagaagttaggtgaagtcagttcttggatactcctgtactgtcaccctggtcttatctcatgccttagcccaagctgtgcacacaatggggtcctaggtccccctcacctcccagattccamcttcccagggatgggaccccctagaaccctcgggggcctgggcagt

SEQ ID NO: 100806 - DNA, 579 bp, Homo sapiens
agattataccatttttaagtgtagaatttagtggtagtaagtatagagagaatcttaaaagcagcaagagaaaagtgacttctcatgtgcaagggagcctctagaagattatcagtggatatttcagcagaaaccctgcaggccagaaggtggtgggatgatacattgaaagtactgaaagagtaaagcctgccaactgagaatactatatttgacaaaaytgtccttcaaaagtgaaggagaaattaagacattcccagataaataaaagctgaaggagtttattaccactagacctgaccaataagaaataataaaggggccgggcacagtggctcatgtctgtaatcccagcactttcgggagccgaggcaggtggatcacctgaggtcaggtgttcaagaccagcttgaccaacatggcgaaaccccatctctaataaaaatacaaaaattagctgggtgtggtggcacgcacctgtaatcctagctactcaggaggctgaggcaggagaatcacttgtacccgggaggtagaggttgcagtgagctgagatcacaccactgcactccagtctgg

SEQ ID NO: 100807 - DNA, 604 bp, Homo sapiens
gctgtatagctctccagaacttacttatcttgcataactgaaatttgtacactttaaccatcaacttcccatttccttctcttccccagctcccagcaaccaccattctgttctcttcttctgagtttgacgtctttaggttccacacataagtgagattgtacaatatttcactttctgtgtctggcttattttacttaacataatgycctccagtccatctatgcatagaaatgcaactgatttttggatgttgactctgtatcttgctactttattgaatttattacttctaacagtcttttagtgaagtctttacagttttctatacataaaaatatgtcatctatggagaccattttacttccattcttatttctttacttgcttaattgttctggctaggacttccagtcctattttgaggagaaatggtgagagtaggaattcttgtcttgttcttcatcttcgaggaaaaacgttcagtctttcactgttgagtatgttacatgtggtcttcattatgttgaggtacattccttctgcgcctaatttgctcagtttgttgttttttttaatcatgaaaggatgttgaattttatca

SEQ ID NO: 100808 - DNA, 604 bp, Homo sapiens
gctgtatagctctccagaacttacttatcttgcataactgaaatttgtacactttaaccatcaacttcccatttccttctcttccccagctcccagcaaccaccattctgttctcttcttctgagtttgacgtctttaggttccacacataagtgagattgtacaatatttcactttctgtgtctggcttattttacttaacataatgtcctccagtccatctatgcatagaaatgcaactgatttttggatgttgactctgtatcttgctactttattgaatttattacttctaacagtcttttagtgaagtctttacagttttctatacataaaaatatgtcatctatggagaccattttacttccattcttatttctttacttgcttaattgttctggctaggacttccagtcctattttgaggagaaatggtgagagtaggaattcttgtcttgttcttcatcttcgaggaaaaacgttcagtctttcactgttgagtatgttacatgtggtcttcattatgttgaggtacattccttctgcrcctaatttgctcagtttgttgttttttttaatcatgaaaggatgttgaattttatca

SEQ ID NO: 100809 - DNA, 577 bp, Homo sapiens
aagtcaagaatacccccgggagcagatttctcatggacacatattgtacattatcttctaaattaatccttatttttgatggcagcaggccctccacgttgatggggtctcctccgtcgggtgcaggaggagactgggtaatctcctcgccggccgctgctgactcatgctgcccggccgggcgtcctgctcccctcgcaccccacgagctctcccgccctctcgcgctcagctcgagcaccgccccccacgcgccgatttccaagggcccagcacctaaggggtccgcggcctcctccgaggcgtcgcccggctaggccgtccctcccgccagtaaacgcggcacggcctcacgtgcccgggagctcccgacgcagacggaaaaggagcagggagacccgcggatctcaagtcgcccggcccgccatcttcccgcatgcgcagtcaaaatagttgctcttytggagagatggctgtgggattcatgtgtcataggcatcccttcttaaacatcagtgtttgactttctatcccttgtcctgagacctctgagggtagcccctgttttagcagaatc

SEQ ID NO: 100810 - DNA, 549 bp, Homo sapiens
attctcggacgtgaagcagccatcttgttgcaatgaggaaagcaggtttgttgaggccagcagacgggaagagatgggaaaaaccctgagggccaagcccctgaagactgaagcgtccaatctccatacattttgtcctcactgttgaagccagttgagtgggaattttctaytacttatagtcgaaggcaacctatattagacactccctcaaaggagcatgaaataggatttcttcttgtaccattcagattatcatcaaaaagcacattattcagagacagagcttagctttgtggtaaggcagaaaggagaggggaaagcaagttggtaggaaagagttgagtgaggagattgtattttaaatgggtcctgagggaggattaggatttgtgtgggaggagcagaagggcgttctggggaaaggaatggtggcatgagcaaacctgtgaagacaggtatggatgtggcactgccaaaaaacagggagattatgtcctgactaattccatggacagattctagagcacctcaaattgtgagtttata

SEQ ID NO: 100811 - DNA, 549 bp, Homo sapiens
attctcggacgtgaagcagccatcttgttgcaatgaggaaagcaggtttgttgaggccagcagacgggaagagatgggaaaaaccctgagggccaagcccctgaagactgaagcgtccaatctccatacattttgtcctcactgttgaagccagttgagtgggaattttctactacttatagtcgaaggcaacctatattagacactccctcaaaggagcatgaaataggatttcttcttgtaccattcagattatcatcaaaaagcacattattcagagacagagcttagctttgtggtaaggcagaaaggagaggggaaagcaagttggtaggaaagagttgagtgaggagattgtattttaaatgggtcctgagggaggrttaggatttgtgtgggaggagcagaagggcgttctggggaaaggaatggtggcatgagcaaacctgtgaagacaggtatggatgtggcactgccaaaaaacagggagattatgtcctgactaattccatggacagattctagagcacctcaaattgtgagtttata

SEQ ID NO: 100812 - DNA, 549 bp, Homo sapiens
attctcggacgtgaagcagccatcttgttgcaatgaggaaagcaggtttgttgaggccagcagacgggaagagatgggaaaaaccctgagggccaagcccctgaagactgaagcgtccaatctccatacattttgtcctcactgttgaagccagttgagtgggaattttctactacttatagtcgaaggcaacctatattagacactccctcaaaggagcatgaaataggatttcttcttgtaccattcagattatcatcaaaaagcacattattcagagacagagcttagctttgtggtaaggcagaaaggagaggggaaagcaagttggtaggaaagagttgagtgaggagattgtattttaaatgggtcctgagggaggattaggatttgtgtgggaggagcagaagggcgttctggggaaaggaatggtggcatgagcaaacctgtgaagacaggtatggatgtggcactgccraaaaacagggagattatgtcctgactaattccatggacagattctagagcacctcaaattgtgagtttata

SEQ ID NO: 100813 - DNA, 478 bp, Homo sapiens
attatgacatttaaagtcaccatgaggacaactcattagtaatatcagtatgttaaaatatggtgcataacatttttamtatatgtacagtcatgcactgaataacatttcagtcaatgaggaaacacatgtgcaacagtgatcctgtaagattataatggagcatatatagagatctaatatatggcacttaatgttggcatggcagatcaagtaggggaaatgactgatatttagtaacagtgctgggacatttgattttccataataaaatatataaatgaaaatatatatcccatctaggtttgttgaaatacaccctatgatgttcacacaagaatgaaattgcctaatgatgcatttcttaaaacatgtccccatcattaagtgacccatgactgtatacacacacacatatggtgacacttaaatcaaatgattgcagtattcctgaaacacagaacattttgcaaacaat

SEQ ID NO: 100814 - DNA, 478 bp, Homo sapiens
attatgacatttaaagtcaccatgaggacaactcattagtaatatcagtatgttaaaatatggtgcataacatttttaatatatgtacagtcatgcactgaataacatttcagtcaatgaggaaacacatgtgcaacagtgatcctgtaagattataatggagcatatatagagatctaatawatggcacttaatgttggcatggcagatcaagtaggggaaatgactgatatttagtaacagtgctgggacatttgattttccataataaaatatataaatgaaaatatatatcccatctaggtttgttgaaatacaccctatgatgttcacacaagaatgaaattgcctaatgatgcatttcttaaaacatgtccccatcattaagtgacccatgactgtatacacacacacatatggtgacacttaaatcaaatgattgcagtattcctgaaacacagaacattttgcaaacaat

SEQ ID NO: 100815 - DNA, 478 bp, Homo sapiens
attatgacatttaaagtcaccatgaggacaactcattagtaatatcagtatgttaaaatatggtgcataacatttttaatatatgtacagtcatgcactgaataacatttcagtcaatgaggaaacacatgtgcaacagtgatcctgtaagattataatggagcatatatagagatctaatatatggcacttaatgttggcatggcagatcaagtaggggaaatgactgatatttagtaacagtgctgggacatttgattttccataataaaatatataaatgaaaatatrtatcccatctaggtttgttgaaatacaccctatgatgttcacacaagaatgaaattgcctaatgatgcatttcttaaaacatgtccccatcattaagtgacccatgactgtatacacacacacatatggtgacacttaaatcaaatgattgcagtattcctgaaacacagaacattttgcaaacaat

SEQ ID NO: 100816 - DNA, 602 bp, Homo sapiens
tgggtgagggaaacatatttaaattagatcgtggtgttgggtgcacacagtatcaatttaataaagcatcaaattctagaccttttcagtgggcaaactttatggtgggttcacacccaatataggtgttaaaaataatgttacggaaattcttgtcgggtttttaacaagccaagagatatgctgtgaaagcagcattaattcaagtggttgtcacaggtcacttaaagttaatcagatagttgtcctacaaatatagggtgaatgttattcatgaatttcctgaatctattgcaataatcrcatttttttccattaaactcttgaggtagctaattttatttattgcattttcaatgttaatctactatttcatatgttgagattaactcacattagtcagaatttaaagtattttaaaatatcacagaatttaatttaccttatctggttttggtttcaagactatagtagccatttcatttaattgtacatgtagggtattctaatttatggaaaactattacattttccttgatttttttttttttagaaattacttctagggatctatatggtagagtccatggagaattgtttta

SEQ ID NO: 100817 - DNA, 581 bp, Homo sapiens
gaatgtcacagcagtattgcttagggctggagatgggagtggggattaactgccagtgcgcaagagagaacttgggtgagggaaacatatttaaattagatcgtggtgttgggtgcacacagtatcaatttaataaagcatcaaattctagaccttttcagtgggcaaactttatggtgggttcacacccaatataggtgttaaaaataatgttacggaaattcttgtcgggtttttaacaagccaagagatatgctgtgaaagcagcattaattcaagtggttgtcacaggtcacttaaagttaatcagatagttgtcctacaaatatagggtgaatgttattcatgaatttcctgaatctattgcaataatcacatttttttccattaaactcttgaggtagctaattttatttattgcattttcaatgttaatctactatttcatatgttgagattaactcacattagtcagaatttaaagtattttaaaatatcacagaatttaatttaccttatctggwtttggtttcaagactatagtagccatttcatttaattgtacatgtagggtattctaa

SEQ ID NO: 100818 - DNA, 581 bp, Homo sapiens
gaatgtcacagcagtattgcttagggctggagatgggagtggggattaactgccagtgcgcaagagagaacttgggtgagggaaacatatttaaattagatcgtggtgttgggtgcacacagtatcaatttaataaagcatcaaattctagaccttttcagtgggcaaactttatggtgggttcacacccaatataggtgttaaaaataatgttacggaaattcttgtcgggtttttaacaagccaagagatatgctgtgaaagcagcattaattcaagtggttgtcacaggtcacttaaagttaatcagatagttgtcctacaaatatagggtgaatgttattcatgaatttcctgaatctattgcaataatcacatttttttccattaaactcttgaggtagctaattttatttattgcattttcaatgttaatctactatttcatatgttgagattaactcacattagtcagaatttaaagtattttaaaatatcacagaatttaatttaccttatctggttttggtttcaagactatastagccatttcatttaattgtacatgtagggtattctaa

SEQ ID NO: 100819 - DNA, 592 bp, Homo sapiens
gggggtgttaaagaaccttgttttgtcatattaccagattgtttttctggtactttcttatttgggtagactttgtcagagggaagatctgggattcaagggctgctgttcagataattttgtctgacaaggtgttccttgatgtggtgttctcccacttcccctaggaatggggcttcctgagagctgaactgtagtgattgtttttgctcttctgggtctagccacacagcggagctactgggctctgggccggcastgggtagtgtctgcaaagagttctgtgatgtgagccatcttcaggtcttgcagctgtagatataagcatctgctcgggtgaggtagcaggggagtgaagaggactccatgagggtccttggttgtgttttgtttagtgcactgggtttttgttggttgacctccaccagaaggtggcactttcaaaagtgcgtcagctatggtcctatagggaggatgcaaacttgccctagggacatctggttaagtgttcaggtggtgggaagggccacagagctggaaagagtttatgacctttgtcttccgctaccaggacgggtagagaaagaccacc

SEQ ID NO: 100820 - DNA, 592 bp, Homo sapiens
gggggtgttaaagaaccttgttttgtcatattaccagattgtttttctggtactttcttatttgggtagactttgtcagagggaagatctgggattcaagggctgctgttcagataattttgtctgacaaggtgttccttgatgtggtgttctcccacttcccctaggaatggggcttcctgagagctgaactgtagtgattgtttttgctcttctgggtctagccacacagcggagctactgggctctgggccggcagtgggtagtgtctgcaaagagttctgtgatgtgagccatcttcaggtcttgcagctgtagatataagcatctgctcgggtgaggtagcaggggagtgaagaggactccatgagggtccttggttgtgttttgtttagtgcactgggtttttgttggttgacctccaccagaaggtggcactttcaaaagtgcgtcagctatggtcctatagggaggatgcaaacttgccctagggacatctggttaartgttcaggtggtgggaagggccacagagctggaaagagtttatgacctttgtcttccgctaccaggacgggtagagaaagaccacc

SEQ ID NO: 100821 - DNA, 595 bp, Homo sapiens
tagacacttcactgaagcagaaaaatggatggccaataagcctgtataacattgtacagaatcatttgtcattagagaaatccaaattaaaactggaataatatacaatttactaaaatttaaaaaaatgatcataccagctgataaggctaacagattatctcccaagtgctgagaactgttccttgtcaatgatgagaagctgaaatgttataatcacttggaagagagtttagaatgttttttaaaaagttaaccatacacttaccataagattcagcaatctcaccccttaggcatttacctaaatgaatcaaaaacatactcatacaaaaacttatatacaaatgttaagagtaattttattaataattaccaaaaacctgaaacaaccaagattttctttaagagctgaatagataacaaactgtgatacttacataaatggaaataatacacagcaataaaaaggaatgagctattgatttatgcaacaacayggatgaaacttaaatggattttgcaaagtgaaaaaagcttacatatcatacatattacatgattaaatttatatgacattatgaaaagaagatag

SEQ ID NO: 100822 - DNA, 435 bp, Homo sapiens
ccctgctaaaaatctcagagtaaaagcaaactaaacttgttactatccaaacatccaaaggggaaggtagagaggttaacaaaacagagagggggaaaaaatgaaagaaaatctctaagatgtgggcaaggtcctcctgaaagtttggtccaagaaacctcaagaaattaatttagtagaaggggattctaaacaarttgtactctcaggccttagcagaatcaaactcgaatcctctcttgaagtatgcagcttcatgcaagatttggaaaagtcccataagcagtttttaaaaggcaatgagaagctacacagctacacagaacccagcacaaaaagaaataaaaacatgaaacatgaaaaactaaaaacagcagcaaaaagaggtccacaaagtcttcacatactagaattatcagaggcagattatcaatc

SEQ ID NO: 100823 - DNA, 452 bp, Homo sapiens
tgattgctcttatgcaaacacattggctccataaacttcagggtagttgtgatcaattatrtcacatcccttttatgaagtagaatgattgtttgctttgctgctaggctcacaaagagcagttcctctgtgttttctgtaaggttgtactgatcaggatatagccttacctgatgtgtatacacaagcataccctgtgaagatctgcattagttcttccatccaacaggagctagcaaagaccatcagaattttgtgatgagcttctttaatattgtagttgatattggctcatcatgtaactaggttacatgaactgaaatataacctaatttaattaaaattcaatgggcaataactgagaggcagttctagggttttaaactgttttgcacgcaacacataataattaaacagctaagttacaatatttcaaataaaaatttaacaca

SEQ ID NO: 100824 - DNA, 611 bp, Homo sapiens
actgcaagatgttttcataacatgaagcagtgccccagcctacagctttatttgcacaggttatatctatgatcagcttcctttcagatgccatcccccatgtcccacaggaggggaggaggttgctccttcatcttagcagtggcatttcccccctggatcccactgtcaaatgggagatttctaggaagcctccttcaacagctgctcctacccaggatcagaggcctcctcttagtctccctcagtatctctgctaggaccttcccttgttttacctttttttctattttctgccttactgtcaggaaggcatatggtgcagtagtaaagagcatgggttttgcagttagagctggattttcatcctggatctgccttttattagctattcagcttgggcgaattactaaacttctttgggcttcaattttcttatctgtgaactaggaagaatactattacccgcttcatagggttattgtgaggtttactactgcaaggggttcagaacagagcctgcaaacaatacacacttcagtaaatrttatctatcacaactattatatggtgtgttgactgctgacactgaggatgacatgggtagcaag

SEQ ID NO: 100825 - DNA, 521 bp, Homo sapiens
tggctttaaaatactgagctgtggctgggtgtggtggttcatgcctgtaatcccagcactttgggatgctgaagaaggtrgatcacctggggctaagagtttgagaccagcctggccaacatggtgaaacctcatctctactaaaaatacaaaaaattagctgggtgtggtggtgcacacctgtagtcccagctactcgggaggctgaggcatgagaatttcttgaacccaagaggtgaaggttgcagtgagctgaaattgcgccactgcacttcagcctgggcagcagactgaacactctgtctgaacaacagcaacaacaaaaagatgctaagctgtgcctctgaccctgcattttttcctctttgctatgtcttagtactttctggtcatgtttcatattaattatttctggtttcctgtcagctttgaattaatcctagctttgtcccctgggccctcactttcagatcctctcagttctattccatgcatattatggggagtgtcttaccctaccc

SEQ ID NO: 100826 - DNA, 534 bp, Homo sapiens
atcacactacctgatttcaatctgtactgtactacaaaacagtagtaattaaagcaacatagtactggcaaaaaagtagacacattgaccaatggaacagaagagagagcacagaaattaaacccacacatctgtggtcaattgatttttgacaaaggtgctaagaatatacaatgggaaaaagagcactgtcttcaataaatggtattgggaaaactggatattcatatgcaaaagaaatacactgtatacacactgtatacaaaaatcaactcaaaatgggttaaagaaacataaaacctgaaagcgtgaaactactaaaacaggggaagagctacatgacattggcctggatgataacatttttacatttcacctcgaaagcacaggcaacaaaggcaaaaataaacamatgggattacattcaaataaaaagcttatttaaaacaaaggaattagcagagtgaagacacaacctagggattaggagaaaatacttgcaaaccatatacctgatagaaaactaatatccaa

SEQ ID NO: 100827 - DNA, 570 bp, Homo sapiens
ctaaatgaaaaatagcgatgaaaagtagaataaagacaaaaactgtctctagagccttttattttatgtcctctcctagtttccccatttgagctgatagtgagcctatcgcctatataatattctgaagtattttcccttttatcagtgccagtatctatttcttctggaattttctaagmtctaagaggagagagaagcatttatgtttaattaatgatgttaaacataagtgagtcatttgatccatttcttactggctccctctcttttccagttgtaaatcccttccacttccctccccttcccttccctgggcctctgtttagagattgctttggttgagaagatggcgtccacctgatgtaactccttcagctttctttccaactcagaatcccccaagtgacttcattcgtccttccctccttcgatttttatctcagaggaagagatgttcctttccttttctaaaactagcccctctgtcaacacactgaatccagtggaaataaatgaaggccaaccccatgagaaaagcaaaggctatttattctgagcttgtatagc

SEQ ID NO: 100828 - DNA, 565 bp, Homo sapiens
aggggaaaaaaagaagcttgaatttggtcagtgagaatgaaaagaagcatgcagtggacattttcaaggtcaaatcttaaaagtatgaggggcaggtaaagcagaaacaatgaggacacagattttcttgcaaaaccaacatattgtctcttaattgggctgtataaccccctccartggtctcctcacatgggttcctgcccttctccaaatcattttccctactagtgttggattaatcttttaaaaatgtgaatctggacactctgcctgctgcctaatgaaacttcctatggacctccccactgtctttaggatgatgcccttgacccgcccccacatgattgacaagtgtttaccagcctggcctgcctctctgcagcttcactggattcaaatgccctttgtgaattccataccacagccatatttgtcatctttacttccttccccactattctttctgacttttgcatttcacatgcattgtcctaatcccaattcctacactggttattgagccatctcccagttaacctttaaagttccaatcaaaacttcactt

SEQ ID NO: 100829 - DNA, 534 bp, Homo sapiens
atcacactacctgatttcaatctrtactgtactacaaaacagtagtaattaaagcaacatagtactggcaaaaaagtagacacattgaccaatggaacagaagagagagcacagaaattaaacccacacatctgtggtcaattgatttttgacaaaggtgctaagaatatacaatgggaaaaagagcactgtcttcaataaatggtattgggaaaactggatattcatatgcaaaagaaatacactgtatacacactgtatacaaaaatcaactcaaaatgggttaaagaaacataaaacctgaaagcgtgaaactactaaaacaggggaagagctacatgacattggcctggatgataacatttttacatttcacctcgaaagcacaggcaacaaaggcaaaaataaacacatgggattacattcaaataaaaagcttatttaaaacaaaggaattagcagagtgaagacacaacctagggattaggagaaaatacttgcaaaccatatacctgatagaaaactaatatccaa

SEQ ID NO: 100830 - DNA, 587 bp, Homo sapiens
aagctcttcactttaaagaagactcccaggaaaggaagttaacttgcccaagatcacatgaaatggttacggctaagctatgccaaagaaagaccccactgagggctggtgctgggaagaagctggctaggggacacatctgacccagcttaggtttgtgcctacatttcctaaagaagtgaggcagaggggaggagcgacacacatgtcaatgagggttaaggggaagaaaccaactgggaaggaaattaatcttcatagagttctacttcagttctgggagctgaggtactacaagctcagcttacctctcactctccttaggaccagatttttaaccctattttactaatgagaaaattgaagcccatagaggttaagtaatttgcccaatactacatagtttatacccaacagagccagaatgaaaagccaggtctctgtacaattctcttaggttcacacctccttctctaatcaactcccaaccccacrccccataaggtcaagccaggataaccaaaccaacctcctaccaggtaccccaccttggaaatctctgcaagtcaggccacctctacatcacc

SEQ ID NO: 100831 - DNA, 631 bp, Homo sapiens
gctacttgggaggctgaggcaggaggattgcttgagcctaggagatggaagttgcagcaagtcaagatcgtgccactgcattccagcctgggcagcggaataagacccgctcaaaaaataagcaaacaacatagtatgcctggtattttgaaacatttagatgtaattggttgtagggagtggcctgtgcatatggaattttgaaaactctccaagtggttctaacatttagccaggtctgagaactactggtccagtgctttgcaggttacaagtttcacaacccacctgtgcagtaggtgaggcaggttcgttttgtggttttctgactggagaagtgaagtccagaggagtgtggtgttgccctgtgagtgctgaagttgggatttttactcagctgttctgactcctaactcttgtcaaggagtagggcatagtctgggcataytgtcagattcacaaagggagtcctccatgtgtcttctcttttccaattgttttccctatccacgatctctcacatcctcactcctgtttgtgtttctttatgcaaaggtgcagctagcaatctcctacactttagtgtgaacgtgaggctgctctgtctcttttagggggaattgcaagttct

SEQ ID NO: 100832 - DNA, 572 bp, Homo sapiens
cttcaactcctgttgctcgtttatgctggttttattccatgatacacattcaggtagaataaaccttctttttcttcacacacacttggctcacttctgtctgtgaggtttgaggcttcttttttctccttttaaatatgtactctttttccattatacgaagttgtatccctgttgtgctgaaccccaataaggggttaacctcaataaggaaggaaccagattcaagaggcagaagagacccagagccagtacagaagacatggggttgtgttgggtgtttacatacaggagagagaggccagtggcagcaggctggacaagagaattacyttatgtgcagaaactggccagcagtggccagcataaccacatggcccaggggtggtgggctggacaggaaaactgcaaccacctgcaaatatcatgcattttatacaacgttttcacttaacacccttcgcctaacagcctccacttggcaaccttcatttaacctgaaactcagggcttcagtcccttgtatggcccatgttccatgggatgggccagtgactcagatgttcctcatg

SEQ ID NO: 100833 - DNA, 572 bp, Homo sapiens
cttcaactcctgttgctcgtttatgctggttttattccatgatacacattcaggtagaataaaccttctttttcttcacacacacttggctcacttctgtctgtgaggtttgaggcttcttttttctccttttaaatatgtactctttttccattatacgaagttgtatccctgttgtgctgaaccccaataaggggttaacctcaataaggaaggaaccagattcaagaggcagaagagacccagagccagtacagaagacatggggttgtgttgggtgtttacatacaggagagagaggccagtggcagcaggctggacaagagaattactttatgtgcagaaactgkccagcagtggccagcataaccacatggcccaggggtggtgggctggacaggaaaactgcaaccacctgcaaatatcatgcattttatacaacgttttcacttaacacccttcgcctaacagcctccacttggcaaccttcatttaacctgaaactcagggcttcagtcccttgtatggcccatgttccatgggatgggccagtgactcagatgttcctcatg

SEQ ID NO: 100834 - DNA, 607 bp, Homo sapiens
aactcctgttgctcgtttatgctggttttattccatgatacacattcaggtagaataaaccttctttttcttcacacacacttggctcacttctgtctgtgaggtttgaggcttcttttttctccttttaaatatgtactctttttccattatacgaagttgtatccctgttgtgctgaaccccaataaggggttaacctcaataaggaaggaaccagattcaagaggcagaagagacccagagccagtacagaagacatggggttgtgttgggtgtttacatacaggagagagaggccagtggcagcaggctggacaagagaattactttatgtgcagaaactggccagcagtggccagcataaccacatggcccaggggtggtgggctggacaggaaaactgcaaccacctgcaaatatcatgcattttatacaacrttttcacttaacacccttcgcctaacagcctccacttggcaaccttcatttaacctgaaactcagggcttcagtcccttgtatggcccatgttccatgggatgggccagtgactcagatgttcctcatgaacagggaatgaatctccaggttggccatacctggattc

SEQ ID NO: 100835 - DNA, 452 bp, Homo sapiens
actctgaccaaaacatttgtttcagtaccagtaggaagcaaatgcaggtagctaaccaaggtattgaatgatccatataaacagaaaggaccaaaagcaggtaggacaaatagccatcacaaaaactatgaactaatctttttttctactttctgcacctgagcgagtttgaaccaattaatgcaagggatgccaggttaccttgaggactcctccaatccttttgcaaatggacctacaaatagttgccagaatatacttgggaaatttaaaaaccccgcaaatattaattttttaaaatacagggtatgagctgacactgatagcaraagaagcaaaatgccatcatggatcttttgctacaatgagagcatgtgaagatcaggtgataaataggctcctgcccaagttcatctgacaagggtccaatgggcataaaggtaatggtcact

SEQ ID NO: 100836 - DNA, 578 bp, Homo sapiens
ctacagtgaatccataatttacagagaatttattttcgacaaaggtgtcaagaacatacactggggaaaaggctgtgtcttcagacatttatacaatgctgggaaaactgtatatgcatatgcaaaagaatgaaactgtatatgcatatgcaaaagaatgaaagaaagatatggtgaaatatctctcaccatattcaaatatcaaatcaaaattgattaaagacttaaatctaagacctcaaactatgaaactactaaaagaaaacactggggggaaacttcaagscttcagtctggacaaagatttcttgaataataccctataagcagagacaatcaaagcaaaaatagacaaatgggatcacatcacgttaaaaagcttctgcacagaaaaggaaatgacaaaatgaagagacaacccccagaataagagaaaatacttgcaaactacccctctgacaagggattaataaccagaatatacagggagttcaaacatctctatagtaaaaactctaataatctaatttaaaaatgtgcaaaagatttgaatagacatttctcaaaagaagagctac

SEQ ID NO: 100837 - DNA, 578 bp, Homo sapiens
ctacagtgaatccataatttacagagaatttattttcgacaaaggtgtcaagaacatacactggggaaaaggctgtgtcttcagacatttatacaatgctgggaaaactgtatatgcatatgcaaaagaatgaaactgtatatgcatatgcaaaagaatgaaagaaagatatggtgaaatatctctcaccatattcaaatatcaaatcaaaattgattaaagacttaaatctaagacctcaaactatgaaactactaaaagaaaacactggggggaaacttcaaggcttcagtctggacaaagatttcttgaataataccctataagcagagacaatcaaagcaaaaatagacaaatgggatcacatcacgttaaaaagcttctgcacagaaaaggaaatgacaaaatgaagagacaacccccagaataagagaaaatacttgcaaactacccctctgacaagggattaataaccagaatatacagggagttcaaacakctctatagtaaaaactctaataatctaatttaaaaatgtgcaaaagatttgaatagacatttctcaaaagaagagctac

SEQ ID NO: 100838 - DNA, 479 bp, Homo sapiens
tgatctcattcttctttatggctgcacagtattccatggtgtatatttaccaaattttctttatccrtagtaccattggttagcatttaggttgaatccatgtttttgttattgcaaatagttccaccatgaacatacacatgcatgtgtccttatggtagaatgatttagattcctttgggtacatttccaatgggattactgaatcaaataattctgttttaaattttttgaggaatcacaaaattgctttccacaatggctgaactatcttacatttccaccagcagtgcataagcattcccttttctccataagctcactagcatctgttattttttgacttttgaaacagtagccattctgactggtgtgagatgatatctcattgtagtttttatttgcatttatctcataattaatgacattgagcattttgtcatgtacttgttcgttgcatgaatgtcttccttggaaaa

SEQ ID NO: 100839 - DNA, 479 bp, Homo sapiens
tgatctcattcttctttatggctgcacagtattccatggtgtatatttaccaaattttctttatccgtagtaccattggttagcatttaggttgaatccatgtttttgttattgcaaatagttccaccatgaacatacacatgcatgtgtcyttatggtagaatgatttagattcctttgggtacatttccaatgggattactgaatcaaataattctgttttaaattttttgaggaatcacaaaattgctttccacaatggctgaactatcttacatttccaccagcagtgcataagcattcccttttctccataagctcactagcatctgttattttttgacttttgaaacagtagccattctgactggtgtgagatgatatctcattgtagtttttatttgcatttatctcataattaatgacattgagcattttgtcatgtacttgttcgttgcatgaatgtcttccttggaaaa

SEQ ID NO: 100840 - DNA, 489 bp, Homo sapiens
tgtggacttcttgtaactcagcaagtcccttgtgagaaccctggaaggtatgcctatggagttatattaagcttctaaggagcatgaggcttttaagccattgcagctttcacattttgttcaatgtgaatcttattacttcgaaactgatctgttacttggagagtcagaaaaaaataactcctatgtggctgtgggactactgcagggactgctgtaggggtctacttttataggagataaacrtcaggcaagctgtgatgcttgtccatatccttttgagtaaatctaaggattaactgtgattgttttgttttgttttgttttttggttggttggttttatttttggtcagtggatacatacatatggcatagttaagtacaattgcttttcttatgttccattgctttataaactcacagccaatatacagtcatcattaaaatttactgactgccagtaccaaatgtagaagcctccaacact

SEQ ID NO: 100841 - DNA, 549 bp, Homo sapiens
gacgcacattctggatactaagtatctgtaagtcttggcattactttcataaagaacctgttttggactgaagaatgataaatcatactcaccagtgaaactgattatgaacatcacattgggctgaactgactgacaacacaaaaagaattagaacatttcaaaaaccatacakgaagagtgtagaaaaaacattggctaattcactatagtgtggagaagtccacaaacagcaattgttagaattattttctaatgtctaataatattttacatgtatttcagaggaagaaaaaaataagatattttataaaatgtgcacctttctgtggaacagccaacaggaacaaaacaaacatgcaaatcgaatatttaagtcatgctggaggaaagaaggaatgaataaagtgcaaacctgggactgagaatcagttctagggactgaaaaaacagaagtatatcacaaatcttgatgaataaatgagaaaattaaaaatgaggatcctctaaatgtcatccagttgccggaattcatactaggcattttcg

SEQ ID NO: 100842 - DNA, 549 bp, Homo sapiens
gacgcacattctggatactaagtatctgtaagtcttggcattactttcataaagaacctgttttggactgaagaatgataaatcatactcaccagtgaaactgattatgaacatcacattgggctgaactgactgacaacacaaaaagaattagaacatttcaaaaaccatacatgaagagtgtagaaaaaacattggctaattcactatagtgtggagaagyccacaaacagcaattgttagaattattttctaatgtctaataatattttacatgtatttcagaggaagaaaaaaataagatattttataaaatgtgcacctttctgtggaacagccaacaggaacaaaacaaacatgcaaatcgaatatttaagtcatgctggaggaaagaaggaatgaataaagtgcaaacctgggactgagaatcagttctagggactgaaaaaacagaagtatatcacaaatcttgatgaataaatgagaaaattaaaaatgaggatcctctaaatgtcatccagttgccggaattcatactaggcattttcg

SEQ ID NO: 100843 - DNA, 549 bp, Homo sapiens
gacgcacattctggatactaagtatctgtaagtcttggcattactttcataaagaacctgttttggactgaagaatgataaatcatactcaccagtgaaactgattatgaacatcacattgggctgaactgactgacaacacaaaaagaattagaacatttcaaaaaccatacatgaagagtgtagaaaaaacattggctaattcactatagtgtggagaagtcmacaaacagcaattgttagaattattttctaatgtctaataatattttacatgtatttcagaggaagaaaaaaataagatattttataaaatgtgcacctttctgtggaacagccaacaggaacaaaacaaacatgcaaatcgaatatttaagtcatgctggaggaaagaaggaatgaataaagtgcaaacctgggactgagaatcagttctagggactgaaaaaacagaagtatatcacaaatcttgatgaataaatgagaaaattaaaaatgaggatcctctaaatgtcatccagttgccggaattcatactaggcattttcg

SEQ ID NO: 100844 - DNA, 467 bp, Homo sapiens
gctcccttgttactcgatatttaaactaacaatttaaggctttcagcagtgaacttataatgcacgttggtaattgttagtcttgtctctaaagtggaaaaagatgtagagatggccaggatctttgaccagccatcattgctagggtaatgaggaagagctaaacacagagggcaaagccaagcaaaatgctcactcttttttttttttttttttttttttgagatggagcctcgctctatcacccaggctggagcgcagtggcgcgcaaattatctccctgcttgccaccccaaactggtcatttgtttaggaaatgtaaccacttgcaggggctgctgggtggttaaaaaagtccagaaacttgaatcttgaatcctgtctggcaactgaaacactggaaggctgcggaraaaaggaagggaaaaaaatgcagtttcaaaattagtgttgctggtattgaattc

SEQ ID NO: 100845 - DNA, 428 bp, Homo sapiens
ctacaattgaattacactttgcagtctcagatctacctcgccatttaccacaaacacagattaacacttgggcctytttgcttttcctgttcgttgaaatgtctcttgctaagccaaatgtggaaaaaattttttctaacagtttagtcataagcaaaatgacttctagatgcttctcaacttttaagggtaattatctttaatgctttcaagtacattaagagtgcccacttaccaatgatattttacatcttaaaaatattgtgtatggttatgttagtgaagatcttttaaaaaaagttagagaagtaagacatcacaagggagaaatgtatatatcatgtcctccctattgacagtgcaatttgccaaggtttgggggttttatttttgttttttgtattatttaagtagagagaatgatgttc

SEQ ID NO: 100846 - DNA, 472 bp, Homo sapiens
tttttttttatatatattgaaaccagttatctgcagttacttaaaggcagaaaagagacctagaactgtgggtcatctggataaaagttacactccattcaaacacctttgttgcatgcctgctgcagtccaggcacagagctggctacccacacaagtacatcatttctgaatcacatgcacttgggccttgctttgcgctgtgaagacctatttgtggtcttgatgaagaagcaaataaaaatgtatttgatcttctttctcgagggtmattatgaaccaaattgaaatacctctaaagttcagaaaagttcacccaagctttcctttgtttgctgtaattcctgtttctttctgaccttcctgagttcacaaaacttttgttccaaatagactcaatgatgtaacaaaaagtctttaatctaatttcaagatggataagttcctgagtgtgctgcagtttgggagggta

SEQ ID NO: 100847 - DNA, 473 bp, Homo sapiens
gagcattttgtagcacattcttcaattaaaactttcattcttagacttaaagctgtctgagaaccaaagcactaacgcttggcatttcatgtcagcagaggcatgggtatgattattcacagtkaaatgctgacaggcccttctcttcaatgacaccagctagctcaggttataattacccttgttacatcatccctttccctgctatacacacagcaagtgagctcttgcttggaagacagatttgtgtttatagccaaagagtttttcctttctaatttaaaccaggtttgctgatagctgggagggggcaagaaagaaaaacagttataattagagtatcacaaggagaaacaataaacacttaaatgatgaggaagtgatcatcatccagtctgaaacagatcagggtttaagccaggcatttctgacaaggatatcaggactaggttcattaactgccctcgctgctt

SEQ ID NO: 100848 - DNA, 473 bp, Homo sapiens
gagcattttgtagcacattcttcaattaaaactttcattcttagacttaaagctgtctgagaaccaaagcactaacgcttggcatttcatgtcagcagaggcatgggtatgattattcacagtgaaatgctgacaggcccttctcttcaatgacaccagctagctcaggttataattacccttgttacatcatccctttcccygctatacacacagcaagtgagctcttgcttggaagacagatttgtgtttatagccaaagagtttttcctttctaatttaaaccaggtttgctgatagctgggagggggcaagaaagaaaaacagttataattagagtatcacaaggagaaacaataaacacttaaatgatgaggaagtgatcatcatccagtctgaaacagatcagggtttaagccaggcatttctgacaaggatatcaggactaggttcattaactgccctcgctgctt

SEQ ID NO: 100849 - DNA, 456 bp, Homo sapiens
cccttccccatgaagctgaaagaagttggtcactcatcctgtatttcccctagaatgccccaaggcagacacagtggtaaccaggagctgctcactccatcccctgggctagggcaagatgtgcatttccacttcctgtgtccattcattccagagaagacactgaccacagccattctggtctctcaaawcccagccctgccctccaggagctcctcacagcgtagtggaagagaaagcagtgccatgtggaggatctccctacagtagagaaaagattctccctcctggcgctgtgggaacagggtgggggcatttagcccagaaatgggggtcagggtagacttcctggagtggtgtggaaggctaagtggggggtaaggaaggcagggagggccttccaggaagagcccctgcatgactaaagctgcagaggtggaaacagctgggtgtggg

SEQ ID NO: 100850 - DNA, 482 bp, Homo sapiens
tcatgcttttttcgcttagaaagtcatagaaaggtactttttttctatatatccatgacattgattgtatgctggagaactttcgtttttcagcattcatgtatgtcttgatttaagacaatctgaaacataaagcatcaattaatctaataaacctggaacaagtatttgcattatgaaaatggttcatcacagaggtctttaaaggttagctctgaaattgttaagccgatacattgccattggcatggtaaattgaatctagtgattcatttgtgggaaattatcttaaatttttttgaaaaaagcattacaattatgcacacagatttgctcatcatcatgttacgtaggctttgaaaaaaatagaaatggcctaaatacctaacaattgcrcaatagtaaataaatggcattaaatttactggatgaacaattacaaagttttaaagatgaatatttaaaaatattataaattttac

SEQ ID NO: 100851 - DNA, 573 bp, Homo sapiens
gttccaacactcattgaaaacttcaggagtttcaagacttcaatggaggaagtaactgcagatgtggtgggaatagcaaaagaactagaattagaagtggagcctgaagttgtaactgaatttctgtaatcttatggttaaactcgaactgatgaggagttgcttcttatggatgagcaaataaaatacgtttttcctcttaaaaawttttttgggtacatagtagctatatatatttatggggtacatgagatatttgatacagacatacaatgtataataattacatcagggtaaatggggtattcatcacctcaagcatttattctttctttgtgttagaaacaatccagtcatctttttgttatttaaaaatatacaataaattattgttgcctgtaatcacctattatgctatcaaatactagatcttattcattccacctgactatatttttgtacccattagccatccccactacccttctcagcctctggtaaccatcatcctactgtctgtctctatgagttcgattattttaaatttttagctcctaccaataattgagaaca

SEQ ID NO: 100852 - DNA, 498 bp, Homo sapiens
ataaaggagacctctggctggcatctggcaactgcccctcagggatgaagcttccagaggaaggagcaggcagcaatctttgctgttctgcagcctctgctggtgatacccaggcaaacagggtctggagtggacctccagcaaactccagcagcctgcagaagagggacctgactatgagaaaaaaaaccaaaaaactaacaaacagaaagcagtagcatcaacatcaacaaaaaggaccctcacacaaaaaccatctgaaggtcactaacatcaaagaccaatggtagataaatccatgaagatgagaaaaaaacagtgcaaaaaggctgaaaatttcaaaaatcagaatgtctcttcttctccaaaggatcacaactcckagccagcaagggaagaaaactggacagagaatgagtttgacgaattgacagaagtaggcttcagaaggtgggtaataacaaactcctccgagctaaaggaacatgttctaacaca

SEQ ID NO: 100853 - DNA, 629 bp, Homo sapiens
accttaagaaacctgaaaaaaagggaaaatgaaactcaaagcaaatagaaggaaaataacagtaaagattaaataaatgaaacagagattagaaaacaatagaatcaataaaaacaaacttggttaaaataacatcttccttttacttaaaatataaagacacagtttaattaaaattaaaatatatgtcatggaagtactaatgataagaaaagtagagagaatatattaatatcaggcaaatagttttcaagaaaagggttattataagagaaaggggacattttctacttataaatcatcagtttattaagaagacacaacaacctttttttgttcatgcagactrttagaacaaaatctaatagacatggtggcttatttatttctcacctttctggaggctgagaagttatccatgatcactggtagatttggtgcctggcaaggacccactttctggttcagagatggtgacttctcattgtgttcacacatggtagaagagatgaagcagctctctggggcttcttttataaagatactaatcacctcccaggagccccactttctaataccagcacctgggtgagcaggtttaaccatatgaattttgggaaaacataatc

SEQ ID NO: 100854 - DNA, 619 bp, Homo sapiens
tgccattttgttatttgttttcttgttgttttgtggtcttctctttcttctttctttcattcatatactcctctagtgaagtgattttctctggtgatgtgrtttagtttcttgctttttattttttgtggtaattttttctgccattttgttatttgttttctggttgttttgtggtcttctcttccttctttctttcattcatatcttcctctagtgaagtgattttctctggtgatatgatttagcttcttgcttcttatttttttgtggtaattttcaaatgtcttaataagaattttctttagaaggaagaagctaaaccaaaaattattgtaatctttcaatctgttaaactggcctagggataaagtcagggtgtccttccctgtggttttgtagaaagcctggcccctccatgagcacacctgccatatccacttggaggactcataggcagctcaaagttaacatattcaaaaacacaacttttgcttttttcttctcccaaacctgctcttcccctagtccttcccattccacaaaatgatcctttcatccattcacctgattctacctgaaaaacttggcagacagctttggttgtacgcttctaact

SEQ ID NO: 100855 - DNA, 682 bp, Homo sapiens
ccattcacctgattctacctgaaaaacttggcagacagctttggttgtacgcttctaactcctcctacatctaatccattagcaagctctgtgtcttcctccaatctgtttcctgaatccttgcccttctccccatctgcagtttctgttatgtcccacttagacgattgcaggagcctcttaactggcttctaacttccacttcttgtycctcttcaatcctttctccatacagaagcccaaattaacctttaatgacacaagtcagactctgccatttccttgcttaataccatctatggttttccacttcatgcagaataaaatgcaaaggcctacagtggtccagaaggcccccacgtgtccacattggctgctgcccaccttgtcagcctcagctcccgtcgctctgtcccagcttgctatgctccacctgctcttgtcttcctaattcttgtttctgccttggggcttctgcaatggccattccttccccaggaacagcttcccccacatcttaggatggctagctgctcaaccatcaggactcagtcaaatatcaccttctcagagatgcctttgaacatagtctctccccatcaaattattctgtttgtctctttcttattatatttactatgatctaaatttattacacttttatacaagcattaattgctta

SEQ ID NO: 100856 - DNA, 682 bp, Homo sapiens
ccattcacctgattctacctgaaaaacttggcagacagctttggttgtacgcttctaactcctcctacatctaatccattagcaagctctgtgtcttcctccaatctgtttcctgaatccttgcccttctccccatctgcagtttctgttatgtcccacttagacgattgcaggagcctcttaactggcttctaacttccacttcttgtccctcttcaatcctttctccatacagaagcccaaattaacctttaatgacacaagtcagactctgccatttccttgcttaataccatctatggttttccacttcatgcagaataaaatgcaaaggcctacagtggtccagaaggcccccacgtgtccrcattggctgctgcccaccttgtcagcctcagctcccgtcgctctgtcccagcttgctatgctccacctgctcttgtcttcctaattcttgtttctgccttggggcttctgcaatggccattccttccccaggaacagcttcccccacatcttaggatggctagctgctcaaccatcaggactcagtcaaatatcaccttctcagagatgcctttgaacatagtctctccccatcaaattattctgtttgtctctttcttattatatttactatgatctaaatttattacacttttatacaagcattaattgctta

SEQ ID NO: 100857 - DNA, 682 bp, Homo sapiens
ccattcacctgattctacctgaaaaacttggcagacagctttggttgtacgcttctaactcctcctacatctaatccattagcaagctctgtgtcttcctccaatctgtttcctgaatccttgcccttctccccatctgcagtttctgttatgtcccacttagacgattgcaggagcctcttaactggcttctaacttccacttcttgtccctcttcaatcctttctccatacagaagcccaaattaacctttaatgacacaagtcagactctgccatttccttgcttaataccatctatggttttccacttcatgcagaataaaatgcaaaggcctacagtggtccagaaggcccccacgtgtccacattggctgctgcccaccttgtcagcctcagctcccgtcgctctgtcccagcttgctatgctccacctgctcttgtcttcctaattcttgtttctgccttggggcttctgcaatggccattccttccccaggaacagcttcccccacatcttaggatggctagctgctcaaccatcaggactcagtcaaatatcaccttctcagagatgcctttgaacatagtctctccccatcaaattattctgtttgtctctttcttattatatttactatgatstaaatttattacacttttatacaagcattaattgctta

SEQ ID NO: 100858 - DNA, 548 bp, Homo sapiens
taatataactacaatatattatttaaaaagcttaaaacaaggaaagctatataatcttatgcagacatatgataaaacaaaaattttaaaagcaaaagaaaaaaacacacaagtcgggaaagatgttgcaatgggggagattcaagtgttaatgttttagtttttaaattagatgatgactttatgggtggtattgtattattattgttatgctttatatttatatattcattagaataattttttgcattttaaaatatttataatacayggaaacatatgcatgttttcattcaatcttcactaacatactgagaactaattaaattccatactactaaaaaaaacacaaatgcttagaatcgcttacccatgtcactcatccaattagaatcaaattggaattagtacctttccagtgctcatatcactttgcaatgaacatctttttttcagaaattgcagaacgcaagagggatctgatagcatgaggttttccctagactactttgtggaattggtttaatgccataatggactcatacaaa

SEQ ID NO: 100859 - DNA, 507 bp, Homo sapiens
ttcttggctcatgggcccatcctcaatcttcaaagttagcagggtagcatattttctctttcctgacctattacctcccttttaaaatgatctttgtgattagctaattttatcatttattgggaaaatcamagctcatagattatttggattgtatgtatctaaatgaacattttgctctgataaatatgttttggttattgtatgaagttttttttctttatatgattgtgttaagatatttagccaaactttcaaagagcagatagtactgatacactataaattgttcccaaacatttctaaaataaaacaatcctaatatcttttatacaacaaggaaaatattgtgtcttaaatccgataaagaaaatataaataagtttagaccaatattatgaaaaaatattcctgtaaaaatattaaatataatatcataaaagagagcataagataacaaatacaaaatgactaaggactaagtgaaattaaatccagtaattcaag

SEQ ID NO: 100860 - DNA, 624 bp, Homo sapiens
atctaaaacaactattttattttgtccacaatttttcagatcaggaattagggaagagcttatttgaacacagtttatgattcacttgccatcagctggagaaacttgtgcctagggaatccactttcaaaatggcttcttcagaaacaggagtttaaaaagaaaacggtatcagtgcaagagaaggtaaacctgaagtaaaaagtaaactgttacagaatgatacatatagtataatactgcttatgtaacgtttaaccccacatcaaaatactatgttttgtttataaaaacagtcacatttaggaaaatgtgaaaacatgggcagaaattatatctaaaagcttctgaacaatgacaaccacaggagagagggcaaggagaatgaaactgagaggaacacataaaagacttcaactgtatctctaacatgtataattcttattatctgagctcttgttattttttctcctggaactgaatagattctagtgattgattgattgactgattaattgatttctctttttctctttctttyctttcctcccctccctccctcccttccttccttcctttcttccttccttctttcttttttttgaaagaggattgtttgcagga

SEQ ID NO: 100861 - DNA, 585 bp, Homo sapiens
actgatatactttgatacagattatctccataaaaatgttaccacatgagactttggagtgtccggagtaataattaaacatagcactttgcatttcagcaacaactgatagattcttccatcatcctttagagcaggaaggctagaatttgttatttctctgatacagaaaagtctttcaagtgtgatagagattattctattacatctttaatataattctataaccacaccggacatgtggaatttatcatttcacctatttgagaaatagaaaaataaaggcatgctgatgaaatacatgaaattattattacataaaatatgtagaaagaagagtatgggattccatawtagaaaatcagtactcaattcaggttctgccatttactagttaggttatctcagtggatagtcaaatgtctggatcttttcctcatgtataaaaaattcatagaatgctctcagaatgaaataagtagtacaaagcatgtggcttaacttactcttcctaaacaggtaattcaaaagtttcgtgtttagaagataattgatcacattcacttaatattttaggttacctat

SEQ ID NO: 100862 - DNA, 599 bp, Homo sapiens
tcatgaaattctaggtaattcatcccctggtaaaatacttaataccatagtcgtttatagttgaattccatttatcattaacaaatgtacaactaaaaataaataaatgtaaatcagaagcgattcagtggataatgtcacatgatcaaaatgtaaaattgtttcaaaccataggcctttttaccaaatcaataactcaaaatgatttactatgtatatttaatacaaatcagtccacttcaataaatagaattaaattatgccttttcagataagcaaaaatatcgtatagcattattgtatctaaagtgatttcaccttcggggtaggggcagagaaggcaccaggatctccgaagggagaatatctaagtcagtaatatccacctggtcctggataagggccagagataaaagatgaaagaaaattataagaatagaggaagctgccgggctaargttttgctcatattgaagagaaatagtcaaaacagatggagtctccatgatgacctagaaagtctagccccccatctgtggtcctcgaacccacatctttactccttcaacttctgcagcttccaaattagacacacacat

SEQ ID NO: 100863 - DNA, 423 bp, Homo sapiens
gaattccttttactccacaatctacaaagtccaaccaaaaggcaaatgacagataattttcaacacactactgagtacagagcaggtgtttaatgaatattcactgatagaattaatgatctgctcaaaacccaggaaagattgtaaagtcagttttcaaagcccccaggttccccactccactttctttgcccatcttttcctatcatttctactccaccacctcaactcttactattatcccgcatgccctctcttccacccgtaataatttactttttaaaaacgctatattaaacatccaactgttcatatgtaaattttttgaggtcattatcacttgtgctggaaagtctcatktcaaagaaacaactccctaactgtgaaacgttgcatttctaggtatcggccactagagaaaac

SEQ ID NO: 100864 - DNA, 555 bp, Homo sapiens
gtttcattataggtttatattagactcgcacgccattaaaacttctgggattatttttctatgtaaactatcattaatctaagactcacgcattatatacttttgttttttttttttttttaaccataattgtcagccttaaatttcaactggttgttcttagcaactctttcctacttgctggaaacttctaagtatttatttttattagtcaaaatattatcaacacattgtgtctgtgtgtttaataatcatgtgcatgcaagaaaagtgacttttattttttttagcttttttcaagtcattggtgagaaygtgtccaagaacatagtcatagggctgacttctagtaaggtaacttcaagataatattgattcactaatcatcacactttagatatggttgtttaacaagctacaaattaacttaatgtcctattattcaactcagatgtttccatcttctccattaagatataacaagaggctgtgaaatgttttactgaaatccagttgcagtaaatctcagacagtccagtgaacaaatattctact

SEQ ID NO: 100865 - DNA, 580 bp, Homo sapiens
atcactgagacaacaagtattgccagggaagaaggttgtattcaggtgctgcagctgagcagatgggagatcagtctcaaatacatgtcagctggttaaaattttgggtttatatagcaatcaggtatgggaaaaaaggaattaggtaagggcaaggtagaggagttggtctataggaagcagctcgtcagttaagcaaccatgatgcctaaggggtctgcgtctcattttccasatgcaataatctggtaagtttcaattccttgatactatctggaaggccttatggttggtttcctgagaagagaactcacataagacaagtgtaactttcataaattttaagattggaaattttctatgtttattcaaaagaaatcataaacgtggttttatgggacaattaggccagttttactatcactatactcagtttcaaaaccctaaaaagaatgtgggagtttatatgtatgtgatggaatttagagccaattacttaccagtaattaacagcagactgccaactaccatcagttcatccttgcttacagttcattgtaaagtttacactataaaattc

SEQ ID NO: 100866 - DNA, 578 bp, Homo sapiens
gtggcccttcagggagcccagacctagaagctccccaagccaagactatgacactctctttggtgttctgcagtttctggcatctccaagcttctgggcatcactgcatttcctggtaccagccatgaaagctgcttgcagtatgcctggtccagatgcaactcacagggagctggtgcccaggccagtgcctaaagctgcctgccttctgccaccagcatgcgtrgctgtgcacaggggctggaccccatgctcactagctcacacaccacttgccactccacttggcctaggtgggcatgggatctaggccagtagcatgagctgagtgcagctgagtgggcagaatgagcccagtgcacctgagcaaaacttgggcaaaggcgcctctgcccacagaggtttccagctggaaaggaatcactccaaggatcctgtgacagtagtagtgggaagacaaggaagaaataaagcaatatgactttggaaatggcataaattgctagaatggaagaagattttacattggggaaaccacgaaataaaattatgtggatgagagaaagcaaaaaataaaa

SEQ ID NO: 100867 - DNA, 578 bp, Homo sapiens
gtggcccttcagggagcccagacctagaagctccccaagccaagactatgacactctctttggtgttctgcagtttctggcatctccaagcttctgggcatcactgcatttcctggtaccagccatgaaagctgcttgcagtatgcctggtccagatgcaactcacagggagctggtgcccaggccagtgcctaaagctgcctgccttctgccaccagcatgcgtagctgtgcacaggggctggaccccatgctcactagctcacacaccacttgccactccacttggcctaggtrggcatgggatctaggccagtagcatgagctgagtgcagctgagtgggcagaatgagcccagtgcacctgagcaaaacttgggcaaaggcgcctctgcccacagaggtttccagctggaaaggaatcactccaaggatcctgtgacagtagtagtgggaagacaaggaagaaataaagcaatatgactttggaaatggcataaattgctagaatggaagaagattttacattggggaaaccacgaaataaaattatgtggatgagagaaagcaaaaaataaaa

SEQ ID NO: 100868 - DNA, 543 bp, Homo sapiens
attctaatttgctctgaaaccttaatttaaaaatcacagagttgrcttttcttcacctataaagtaaaactttatctgacgaatatttttcctaatgggatagagatatcaaaacttaaaaacaatcagcaattatttcttagatgtaaggaaaatcagataacctattacaatctaatgagcttcctgttaaaaataatattaagtcaaaaataaatgttgagatacccttatatgacttataacatcaaacactatgtacagtgactatatttttcatttgcaatccatatatttcaatagtgatataagtgaaaaaaattaaatttcactatacattgcactcgtgtgtacaccagaacttgaaattctacaacttataatagttctgctgggcacggtgactcatgtctgtaatcccagcatctaccccatctctactaaaaatacaaacattagctgggagtggtggcgtgctattcgggatgctgatgcaggagaatagcttgaaccccgaaggcggaggttgcagtgagccaagat

SEQ ID NO: 100869 - DNA, 577 bp, Homo sapiens
acctgtaataaaatttattttgcaagagaagaaatagcctaagggtctataatactgcagaacagctttcttgatagtgaggttcatcttagtcttcaggaagagcttataaaatggattgttttcttcagtgagacactaggcatttattgtgcaactagactgtgtagaatgttgggaactagttctgagacaaatgctgaagaagaaactcacattacaaatacacaaagcacattacttatgtatttggagaatttttatttcttaaaataaacagtgrgatttcactttaatagtttttttgtttgccttcacacttgccagcaatgctgcactaaaaccagaaatatagccaaccatttttgactaaaatcagaagaaaactgagtctttggttagaaaaagatacacatagagaagactgtaaatcactagaaagaaacaataaaacctgcttatttacatctttgctgcaacaaaatacgtagattacaaatgacttattcttggaaagagtgcctcaaatccaaattgtagcatatcccacaatcaaaataaacatgaaaatgctgtc

SEQ ID NO: 100870 - DNA, 534 bp, Homo sapiens
caatatcaatatcagaaaatgtgggctgtcaaagataaaacacattattggcaatagaatgagtcattactgaatgacccttataattatcttttaagaaaaacctcatagtttttataatgatagtcctatgattatcattataagaataatgataactaaaaaatagctgatgtcaatatagcatacactatgtgcttgatattttcctmaaatcttggatacatcattttattttcaccacaattctatatctactatcattatcctcatttcaccaatgaagaaattaaggcactgaaaggctagctcatagccatacaactagttagtgaagaggcaaagagtcaaaccaggaagataaacaccagtctctatgttctcaattctaatccataaatttattaaaatattatatttactgaaaaaatgtagtgactaggccaagcatggtggctcacacctgtaatcccaacactttgggaggctgaggcgggtggattacttgagacaatggagttcaagaccaggctg

SEQ ID NO: 100871 - DNA, 604 bp, Homo sapiens
agataaataataatggaaatattcaaaaacttatggtagatagcaaaagtagcactaagataggtttgtagctaaaagctgtgatctcaagaaaggagaaaaacatctaataaacaacctaaaaatgcatcataaaaattggaaaagcaagatcaaatcaaacccaaaattagtagaggaaaactaataataaatgtaagaacagaaataaataaaaatgaagacaacaacacacatgatcaataaaacaaaaaaattgtattttgaaagtataaaacaaaatcgaaaaaagtttagccagtttaactaagaagaaaaaagagaagactaaaataaataaaatcagagagactttacaactgataccgcaaaaattcaaaggtccattagtgtctactaggagcaactacacagcaatgaattgaaatattgagaataaatagatcaatttctagacayattcaatataccaagatttaactatgaaaacatccaaaacctgaacagaccaataaatgtaagatgatcaaagctgtaataaaaaaaagtctcacagcaaagaaaagtatgggacccaatggcttcactgctgaattttaccaaa

SEQ ID NO: 100872 - DNA, 547 bp, Homo sapiens
ttagaagatatctgaaagtgctgatttatcatatattctctatcactgataatgatgagaatcataatacacttataccgttcattatatacacactctgctaagcagttttcatgcttagcaattttgaataatcctcagtaatcaaaaccctgtgatgttgaaatacgattatgtccaattaytgataaggaacatgaagtacagaaaataacttaagcgggatcacgtagctggaaagtagtaaaggcaaaatttgaacccaggaagcttgagctttagagcaagtgctttgaatttttacattctgctgcctctcatcaagagaactgctatcttcctagatcactgggcacaaaatattggattatagtaatttaggccaaaacttgaaccctaaaccaaagcttaagtcaaatactaatcccaattcttgattataaatgttttattttctaacaatttaccagcaaatcttagcattgctccttctaaatcaccaggaactctccactcctgcctttgtcagttctcccgagggcactgg

SEQ ID NO: 100873 - DNA, 547 bp, Homo sapiens
ttagaagatatctgaaagtgctgatttatcatatattctctatcactgataatgatgagaatcataatacacttataccgttcattatatacacactctgctaagcagttttcatgcttagcaattttgaataatcctcagtaatcaaaaccctgtgatgttgaaatacgattatgtccaattactgataaggaacatgaagtacagaaaataacttaagcgggatcacgtagctggaaagtagtaaaggcaaaatttgaacccaggaagcttgagctytagagcaagtgctttgaatttttacattctgctgcctctcatcaagagaactgctatcttcctagatcactgggcacaaaatattggattatagtaatttaggccaaaacttgaaccctaaaccaaagcttaagtcaaatactaatcccaattcttgattataaatgttttattttctaacaatttaccagcaaatcttagcattgctccttctaaatcaccaggaactctccactcctgcctttgtcagttctcccgagggcactgg

SEQ ID NO: 100874 - DNA, 591 bp, Homo sapiens
  misc_feature (1)...(591): n = A,T,C or G
tcacacttttaaaccatcagatctcgtaagaactcactgactatcaagagaacagcaaaagagaaatccacatccatgatccactcacctcccaccatgcccttcccctgacacatggggatgataatttgagatgagatttgggtgaggatacagagccaaaccatatcagtccatttaccaagtcaataccataagggtattttggtaatatcatcagcgaatgtggtgtcattctcaagataatatacaaacgctgaaggaaaacatgatcttacttggcacatcataagcttctctgaagatggartaagatacncgcaagcagaatcattgatccaaaactgtttccttcagaatactatctgaggttaactgtcatttcttataataataaggttgaaaaaaattttaattatttaattatttaattttggacctttatatagctgaggttctatttcccaatgaattttgactatgggcaacatatatttcctattgaaaatgtctgcattatattgcagggacagaagatattctctatttttctactagtccagtaatacaaatgcttttagacatccaatg

SEQ ID NO: 100875 - DNA, 604 bp, Homo sapiens
agatgtgcacagccaacatggaagtccattgatttcttggggccaaatgtaatgaattctcatcacaaattttatgttcatgaatggggagagagactaatagtaatgaacactgtcaaagaccacatttgacaaaatagcatacaagagattataatataataatgtcataatgctgcaaataaaggaaaaactaagtttagtatctggctccctctgtgatatatgcaaarctttgaacaagttgcagaaacactatgcctcagtagtcacagaagtatattacctatgtatttatataatctaatatattttataatataaggaatgtgtttaatgctatgacaaggcattaagaatctttaaaccagtgtgaatgagtcaagtcctgcctcctgtttcctacctcattcccctctcagagattagatactccttctaatctttttttttttttttttgagacagaggtctcactctgtcacctaggttgaagtgcaatggcacagtctccgcttactgcaacctccatctcccaggatcaagcgatggtcccacctcagcctcctgagtagctgggaccataggcatgtgtgaccatgcc

SEQ ID NO: 100876 - DNA, 604 bp, Homo sapiens
agatgtgcacagccaacatggaagtccattgatttcttggggccaaatgtaatgaattctcatcacaaattttatgttcatgaatggggagagagactaatagtaatgaacactgtcaaagaccacatttgacaaaatagcatacaagagattataatataataatgtcataatgctgcaaataaaggaaaaactaagtttagtatctggctccctctgtgatatatgcaaaactttgaacaagttgcagaaacactatgcctcagtagtcacagaagtatattacctatgtatttatataatctaatatattttataatataaggaatgtgtttaatgctatgacaaggcattaagaatctttaaaccagtgtgaatgagtcaagtcctgcctcctgyttcctacctcattcccctctcagagattagatactccttctaatctttttttttttttttttgagacagaggtctcactctgtcacctaggttgaagtgcaatggcacagtctccgcttactgcaacctccatctcccaggatcaagcgatggtcccacctcagcctcctgagtagctgggaccataggcatgtgtgaccatgcc

SEQ ID NO: 100877 - DNA, 500 bp, Homo sapiens
atatcatcatcagcttttacattttcagaagggtgcatatgcgttttgcttctcttttttatgaagctctttttactgctttctcttaagaaaatattatgaaaaatccaatwtccctacagatatgtcagaccgtgctgtttcttgagagctagaacaaaacctactttcaagatgacttatgtaatttggaaccaaataggtgggtgttcagcttaaaaaattccatagaattatcacttgcaatatttccgcaatctcgaacagttactcatttatcatttctcatctgttgtgcatccactaatgaggagtaaggcaccacactgagcagagattgaacaaactcatgaattgttctgcactaaacagctgagccaaagaggaaatcataaggagattaaacaaatggcgctataatggagatatggaagaggtaggaaagggacagtggttcagggagtcgtaagaaagttccaaagaaaatgacattatcatct

SEQ ID NO: 100878 - DNA, 517 bp, Homo sapiens
aaggacaatctgtgaacattttcctgctgcacacaatgtatgcctttgatcatttcagtgggaatattggagagaaagagaaatcaaacccatgtgcttaagcctttgcctttctgaaaagcttttatatttttctgtacaatttgtgttcatattttactttaccaattaatgcatatatgtacatttaaatatttatgaaaccacttaagaagacctgtttatgtacatataaattagtatatgattatatttacatagtgtatatgtaacgtttcagtagtgttttattttaataactttatctttagagaagttttasattcactataaaattggacagaagttacagagatttcccatatatccctctactccatctatgcatatgttccccttttttcaacatcctccacctaagtagtatatttgttacaacggacaaatgtatattgaaattcattatcacacaaagaaaatcattatcacgcaaagttcataatttacattagggtcc

SEQ ID NO: 100879 - DNA, 517 bp, Homo sapiens
aaggacaatctgtgaacattttcctgctgcacacaatgtatgcctttgatcatttcagtgggaatattggagagaaagagaaatcaaacccatgtgcttaagcctttgcctttctgaaaagcttttatatttttctgtacaatttgtgttcatattttactttaccaattaatgcatatatgtacatttaaatatttatgaaaccacttaagaagacctgtttatgtacatataaattagtatatgattatatttacatagtgtatatgtaacgtttcagtagtgttttattttaataactttatctttagagaagttttagattcactataaaattggacagaagttacagagatttcccatatatccctctactccatctatgcatatgttccccttttttcaacatcctccacctaagtagtatatttgttacaacggacaaatgtatattgaaawtcattatcacacaaagaaaatcattatcacgcaaagttcataatttacattagggtcc

SEQ ID NO: 100880 - DNA, 553 bp, Homo sapiens
agaattgtggtttaactcccattaataatttattttaaagacaattcacaagcttaccacataaaataaaatttttgcagtaattagatgaaagaaataataagaactctctgaaatctgaggtaagaaagaatgcctcatgttgcagaagtttccctgggaggggtgtagagaatgaaaaggaaaagaggggaaagaaagcattaaaaaaawccctgttgatgataaacattagcaaagtttactcctactacaagacaatttccaatggctatatttcaaaggaagtgaaagcatagagagtggtattaacttattttaatactattactaacttattttttctataacaagtgctaatagagtacttttgggaagggtacaaagtttttcaatgaacatttaacaaagtgatttattattgtggttctaaatctggttctagattagattgaatgtattatttgcattatggtaaattcacatttggtatagactttatgttttcacttaagcagcagatcaccacttgaagccaagtacaatatggata

SEQ ID NO: 100881 - DNA, 553 bp, Homo sapiens
agaattgtggtttaactcccattaataatttattttaaagacaattcacaagcttaccacataaaataaaatttttgcagtaattagatgaaagaaataataagaactctctgaaatctgaggtaagaaagaatgcctcatgttgcagaagtttccctgggaggggtgtagagaatgaaaaggaaaagaggggaaagaaagcattaaaaaaatccctgttgatgataaacattagcaaagtttactcctactacaagacaatttccaatggctatatttcaaaggaagtgaaagcatagagagtggtattaacttattttaatactattactaacttattttttctataacaagtgctaatagagtacttttgggaagggtacaaagtttttcaatgaacatttaacaaagtgatttattattgtggttctaaatctggttctagattagattgaaygtattatttgcattatggtaaattcacatttggtatagactttatgttttcacttaagcagcagatcaccacttgaagccaagtacaatatggata

SEQ ID NO: 100882 - DNA, 570 bp, Homo sapiens
tacaacaaaattaagtaagtcactatttagaatgactgaagaaaaaaaaaaaccctgcacccgtcaaactgtaaaattcacaatgtctggcattcaaataacacaggggaaaagtgggaaaaggatttgaacagatgcttctttacagaaggcatatagatgaccaacaggtaaatgaaaacttgttaaacatcactaattctcagagaaatgcaaatcaaaactacaatgagatatcatctcacatttgttaggacgggacggtagttaccaaaaaaatacaagataagtgttggtaaggatgtggaaaatttggaattattatacactgttggtgggaatgtgaaatggtgcagtagatatgaaaaatagtatggagtttcctcacaaaattaaaaatagaactaccagataatgtagcaatctctcttacggtatttatctcaaataattgaaatcaggatcttgaaaagaaaatgcacycccaggttcactgtagcattattcacaataaccaagatatggaaacaatttgtgtcattccacagatgaagaatgaagaaaatgtgg

SEQ ID NO: 100883 - DNA, 535 bp, Homo sapiens
gctaggcacacagcctgggggcctgactctaccccatcttctggctccaggtctgtctagggccaactgcattcctgttctctagctttattgaagaaggcggaggaggagggccttgaagaaaaagaggaggaggaggaggmggtggaggagaaggagatccgcttttgttgtttgtttgttttggctgtgtaactactaaataatgttacttgctatttgtaatcaaaagtcccaactaaatgagagtaattaattctgacttagaaggagctggaaaaggcttccctgaagaggtaatatttgcaatgggttttgaaggctgagtaggagttcatcaggcagacatagtaaggaaggacattatagtaggacaggaaagtaagcttgcccctaaagtttactgcagggcccaagcaggagaacaaaaagaggcccagatgccatatatctaaatacttaaaagtcataaatcaagctaataaagtgttacataaaatataacccacttctctatcttgacaaatttactttc

SEQ ID NO: 100884 - DNA, 643 bp, Homo sapiens
gctcatcaacagggtctacatagagctagtcaggaaggtttacaggttcaagggcagcctggtgagaccagcagcatctcccagagagcccatgcccgtgcagmgtcctaatgagccgcttttgtctagcttccatttgctcttccctcccaactgaatttaatgtctttccatcctctgcctctagttaagttgtaactgctgttattccactgcagccaggcagctgccagggcctgttggcactgaacccagagcccaacccaactgatgttctcactgagcttcttgtcagatgccaggaaagaggaggcacatcatatgccttttcttccccaatagtagctgcttccagtgtgatcatgatgagaggaaaaggctgtggggagagttaatttgatgcttgcttgtgcaatgaaatggcaatcaggcagatggccttactctatgcatagattcttctttgaggtttcttcttaggacccggacctcagagctgcttaagcaatagagaggatgatggatggccaaggaattgggatctctgggtcttttgggagggatggggaatattatcacagagttacagaatgccattgctgaagagggccttagggattacatttagtccaaggattttcag

SEQ ID NO: 100885 - DNA, 643 bp, Homo sapiens
gctcatcaacagggtctacatagagctagtcaggaaggtttacaggttcaagggcagcctggtgagaccagcagcatctcccagagagcccatgcccgtgcagcgtcctaatgagccgcttttgtctagcttccatttgctcttccctcccaactgaatttaatgtctttccatcctctgcctctagttaagttgtaactgctgttattccactgcagccaggcagctgccagggcctgttggcactgaacccagagcccaacccaactgatgttctcactgagcttcttgtcagatgccaggaaagaggaggcacatcatatgccttttcttccccaatagtagctgcttccartgtgatcatgatgagaggaaaaggctgtggggagagttaatttgatgcttgcttgtgcaatgaaatggcaatcaggcagatggccttactctatgcatagattcttctttgaggtttcttcttaggacccggacctcagagctgcttaagcaatagagaggatgatggatggccaaggaattgggatctctgggtcttttgggagggatggggaatattatcacagagttacagaatgccattgctgaagagggccttagggattacatttagtccaaggattttcag

SEQ ID NO: 100886 - DNA, 643 bp, Homo sapiens
gctcatcaacagggtctacatagagctagtcaggaaggtttacaggttcaagggcagcctggtgagaccagcagcatctcccagagagcccatgcccgtgcagcgtcctaatgagccgcttttgtctagcttccatttgctcttccctcccaactgaatttaatgtctttccatcctctgcctctagttaagttgtaactgctgttattccactgcagccaggcagctgccagggcctgttggcactgaacccagagcccaacccaactgatgttctcactgagcttcttgtcagatgccaggaaagaggaggcacatcatatgccttttcttccccaatagtagctgcttccagtgtgatcatgatgagaggaaaaggctgtggggagagttaatttgatgcttgcttgtgcaatgaaatggcaatcaggcagatggccttactctatgcatagattcttctttgaggtttcttcttaggacccggacctcagagctgcttaagcaatagagargatgatggatggccaaggaattgggatctctgggtcttttgggagggatggggaatattatcacagagttacagaatgccattgctgaagagggccttagggattacatttagtccaaggattttcag

SEQ ID NO: 100887 - DNA, 448 bp, Homo sapiens
gcaataaaataatcagttttttctttctacctattaaagwtgttaccttagttaattacaggggtttccttcagaatgataaatggtctttcaaaatgatgtaaagagatctaaatccgtgtgctccagaacttgaatgaagctctgtctagcacgggtgccagtgactctcccagagtgctccatgcagctggacccacagagtccctctgtgctgtcatatcacccactgccttctgtgaatgagatattctgattagaatcctggtggatgctatttgagccagtgcccccacaactcctacgaaagccgaggaccacaggcccctgaagacaatcacaggtctctagactcacagctcatgaccgtcctctgcagacacagcttctccccggatggctgagggttgtcattggctgtgtccttccttgtgcatgacaacaggag

SEQ ID NO: 100888 - DNA, 617 bp, Homo sapiens
ctgccttctgtgaatgagatattctgattagaatcctggtggatgctatttgagccagtgcccccacaactcctacgaaagccgaggaccacaggcccctgaagacaatcacaggtctctagactcacagctcatgaccgtcctctgcagacacagcttctccccggatggctgagggttgtcattggctgtgtccttccttgtgcatgacaacaggagacatagaaggtctgtaagcagccctgcaagccaggttctgagcaagccctcctgtgtggggccctcttacctggacataggtgtgtaaaccaaaaatgaaactctaagctccctaaccaactgaatgaactcctcctctcagccaagsacacaccaaaatcaacctgaaatacaatgcagcccatgatcggaacggatgattggatatgccttaacttaccctcttccctttaaaattcaggcacaactgaccagcttttaatatgaagacagagaccttgagactgacaaagaaaactctttatagcaataagataccaatgtgacagataccacgtcctaagagaaatcaaagtattttccccaagatattgttatttaatgtattgaaaaatgcc

SEQ ID NO: 100889 - DNA, 617 bp, Homo sapiens
ctgccttctgtgaatgagatattctgattagaatcctggtggatgctatttgagccagtgcccccacaactcctacgaaagccgaggaccacaggcccctgaagacaatcacaggtctctagactcacagctcatgaccgtcctctgcagacacagcttctccccggatggctgagggttgtcattggctgtgtccttccttgtgcatgacaacaggagacatagaaggtctgtaagcagccctgcaagccaggttctgagcaagccctcctgtgtggggccctcttacctggacataggtgtgtaaaccaaaaatgaaactctaagctccctaaccaactgaatgaactcctcctctcagccaagcacacaccaaaatcaacctgaaatacaatgcagyccatgatcggaacggatgattggatatgccttaacttaccctcttccctttaaaattcaggcacaactgaccagcttttaatatgaagacagagaccttgagactgacaaagaaaactctttatagcaataagataccaatgtgacagataccacgtcctaagagaaatcaaagtattttccccaagatattgttatttaatgtattgaaaaatgcc

SEQ ID NO: 100890 - DNA, 617 bp, Homo sapiens
ctgccttctgtgaatgagatattctgattagaatcctggtggatgctatttgagccagtgcccccacaactcctacgaaagccgaggaccacaggcccctgaagacaatcacaggtctctagactcacagctcatgaccgtcctctgcagacacagcttctccccggatggctgagggttgtcattggctgtgtccttccttgtgcatgacaacaggagacatagaaggtctgtaagcagccctgcaagccaggttctgagcaagccctcctgtgtggggccctcttacctggacataggtgtgtaaaccaaaaatgaaactctaagctccctaaccaactgaatgaactcctcctctcagccaagcacacaccaaaatcaacctgaaatacaatgcagcccatgatcrgaacggatgattggatatgccttaacttaccctcttccctttaaaattcaggcacaactgaccagcttttaatatgaagacagagaccttgagactgacaaagaaaactctttatagcaataagataccaatgtgacagataccacgtcctaagagaaatcaaagtattttccccaagatattgttatttaatgtattgaaaaatgcc

SEQ ID NO: 100891 - DNA, 540 bp, Homo sapiens
tttttgacttgttcataagtaatgatcatagattccagatattaggacaatgatgtctttagtgggtgtattattcattccacaaacaactctcatcatccacacaatggccttcccctaaggtagaataaaaatatcacaaggcagatttatgaggcgatcgacctagaaaaaacatgagactctaggactgtctgatgtgtggatgtcaaatcctgggagattctgagcctctgctctatgtggactctatattgtgtagccatttgtggaaggcttctgtgattttgtgacctagagaaaaygaatctctgctaaaatcaaatctaagaaagattggcaaagggaatttaaagatttcctaaatttttggaatttccctaggcattaaaacatgagaagtggcaataattcaaaccaacgatgccctccaagaatgaggatttttccaatgcattaggttgggtcccctcagtgagaaggatgccaaagattcgcatgcaggcagtatatttacaaagtgcgggaaacaagcaagtg

SEQ ID NO: 100892 - DNA, 406 bp, Homo sapiens
atgcttctgataaattctttttatattcatttcaaamaagaagcaatttcacactgacattgttattatagcactaaatacttttacactcatcaaattcctttgagactaactgaaatttctgacagccccacattctacaactttattgtaaattttctgccaaaaatgatgctttcctatacactcctaatacaagtataaatatattatttaatctagtcttaggttgatttaaaattttgaaaattcactccaaacatatgttctgtaaccatatggccaccaatgagaaatgcattctttcaaggtaaatctgtgctgccctggtttgacctgggactctggggatactgcgcccctgtgctgagttactgagatgagccagccctgcagctgtgctcag

SEQ ID NO: 100893 - DNA, 581 bp, Homo sapiens
gtcttaagtttgttagtaaattctattgaatttattaaagatgcttctgataaattctttttatattcatttcaaacaagaagcaatttcacactgacattgttattatagcactaaatacttttacactcatcaaattcctttgagactaactgaaatttctgacagccccacattctacaactttattgtaaattttctgccaaaaatgatgctttcctatacactcctaatacaagtataaatatattatttaatctagtcttaggttgatttaaaattttgaaaattcactccaaamatatgttctgtaaccatatggccaccaatgagaaatgcattctttcaaggtaaatctgtgctgccctggtttgacctgggactctggggatactgcgcccctgtgctgagttactgagatgagccagccctgcagctgtgctcagcctgccccatcccctgctgatttgcctgttcctagagcacagccccctgccctgaagactttttataggctggtcacacccggtgcaggagtcagccccagtcaggacacagcacagacatgagggcccccactc

SEQ ID NO: 100894 - DNA, 406 bp, Homo sapiens
atgcttctgataaattctttttatattcatttcaaacaagaagcaatttcacactgacattgttattatagcactaaatacttttacactcatcaaattcctttgagactaactgaaatttctgacagccccacattctacaactttattgtaaattttctgccaaaaatgatgctttcctatacactcctaatacaagtataaatatattatttaatctagtcttaggttgatttaaaattttgaaaattcactccaaacatatgttctgtaaccatatggccaccaatgagaaatgcattctttcaaggtaaatctgtgctgccctggtttgacctgggactctggggatactgcgcccstgtgctgagttactgagatgagccagccctgcagctgtgctcag

SEQ ID NO: 100895 - DNA, 581 bp, Homo sapiens
gtcttaagtttgttagtaaattctattgaatttattaaagatgcttctgataaattctttttatattcatttcaaacaagaagcaatttcacactgacattgttattatagcactaaatacttttacactcatcaaattcctttgagactaactgaaatttctgacagccccacattctacaactttattgtaaattttctgccaaaaatgatgctttcctatacactcctaatacaagtataaatatattatttaatctagtcttaggttgatttaaaattttgaaaattcactccaaacatatgttctgtaaccatatggccaccaatgagaaatgcattctttcaaggtaaatctgtgctgccctggtttgacctgggactctggggatactgcgcccctgtgctgagttactgagwtgagccagccctgcagctgtgctcagcctgccccatcccctgctgatttgcctgttcctagagcacagccccctgccctgaagactttttataggctggtcacacccggtgcaggagtcagccccagtcaggacacagcacagacatgagggcccccactc

SEQ ID NO: 100896 - DNA, 581 bp, Homo sapiens
gtcttaagtttgttagtaaattctattgaatttattaaagatgcttctgataaattctttttatattcatttcaaacaagaagcaatttcacactgacattgttattatagcactaaatacttttacactcatcaaattcctttgagactaactgaaatttctgacagccccacattctacaactttattgtaaattttctgccaaaaatgatgctttcctatacactcctaatacaagtataaatatattatttaatctagtcttaggttgatttaaaattttgaaaattcactccaaacatatgttctgtaaccatatggccaccaatgagaaatgcattctttcaaggtaaatctgtgctgccctggtttgacctgggactctggggatactgcgcccctgtgctgagttactgagatgagccagccctgcagctgtgctcagcctgccccatcccctgctgatttgcctgttcctagagcacagccccctgccctgaagactttttataggctggtcacacccggwgcaggagtcagccccagtcaggacacagcacagacatgagggcccccactc

SEQ ID NO: 100897 - DNA, 383 bp, Homo sapiens
acagccccctgccctgaagactttttataggctggtcacacccggtgcaggagtcagycccagtcaggacacagcacagacatgagggcccccactcagctcctggggctcctggtgctctggctgccaggtaaggaaggagaacactaggattatactcggtcagtgtgctcagtactgtctggaacttcagggaagtcctctgataacatgattaattgcgacaatatttgtttttatgtttccaacttcaggtgccagatgtgacatccagatgacccagtctccatcctccctgtctgcatctgtaggagacagagtcaccatcacttgccgggcgagtcagggcattagcaataatttaaattggtatcagcagaaac

SEQ ID NO: 100898 - DNA, 624 bp, Homo sapiens
tatgctgcatccagtctgcaaagtgggattccctctcggttcagtgacagtggatctggggcagactacactctcaccatccgcagcctgcagcctgaagattttgcaacttattactgtcaacagagtgacagtacccctcccacagcgttacaagtcataacataatccccaaggaagcagatgtgtgaggctgggctgccccaatgctccttcyggtgcctctatctgctgagggaagttctcaaactcagtcaggtttggaaagtcattgggagattttcctagaggaggccagggaggttcctctgaaccctaagcctctttcaccctcatccccagcagaaaagatgtgacaatgcctgtcctgactgaataaagaagagagataagtccaactgaggagtctgtgttatgggataatcggaatttgtacagcaaaagagaagctattctcagtatttcaaggagaaattattcaagttgaataaattagagcctaaaccacagtctttccgaagcctatggaatgttattcatgaagcaggtactagacacaggggattctcaggtgctacttcagaagccagggtgcacctgcccctggtggtatgtgctgaacac

SEQ ID NO: 100899 - DNA, 551 bp, Homo sapiens
gttcagtgacagtggatctggggcagactacactctcaccatccgcagcctgcagcctgaagattttgcaacttattactgtcaacagagtgacagtacccctcccacagcgttacaagtcataacataatccccaaggaagcagatgtgtgaggctgggctgccccaatgctccttccggtgcctctatctgctgagggaagttctcaaactcagtcaggtttggaaagtcattgggagattttcctagaggaggccagggaggttcctctgaaccctaagcctctttcaccctcatccccagcagaaaagatgtgacaatgcctgtcctgactgaataaagaagagagataagtccaactgaggagtctgtgttatgggataatyggaatttgtacagcaaaagagaagctattctcagtatttcaaggagaaattattcaagttgaataaattagagcctaaaccacagtctttccgaagcctatggaatgttattcatgaagcaggtactagacacaggggattctcaggtgctacttcagaagcca

SEQ ID NO: 100900 - DNA, 606 bp, Homo sapiens
ttaaaaacattttttcattagtttttcatgtaaaattgtgacaaccagcatgaaataactgtcatcacagaagcatggtatattcgattccaaaacatattctttgtaagttttaatatatttatgtattatttatacttwgattgtaacccataatgtacagatattatttttccttcaactcttaagaatattcttaaataataaaattaaaattaatgaattataatttttgttgcttgggaaaaagaatagacacacacgtgacagtgcatcacttcaccccatcatttcatctcatcatttcatcatttcatctcatcattttatctcatttcatctcatcccatctcatctcatcatttcatatcatctcatcatttcatcaaatctcatctcatttccatttcattttcattatttcatttcatcatttcatttcactatttcatttcatttcatctaatttcatttaattcattatgtcatttcatataatctcatttcatttcatctcatatttttgatatcatttttcatctcatttcatctcaattcatctcatcatttcatctcctcatctcatcatttcctcctttcattaca

SEQ ID NO: 100901 - DNA, 606 bp, Homo sapiens
ttaaaaacattttttcattagtttttcatgtaaaattgtgacaaccagcatgaaataactgtcatcacagaagcatggtatattcgattccaaaacatattctttgtaagttttaatatatttatgtattatttatacttagattgtaacccataatgtacagatattatttttccttcaactcttaagaatattcttaaataataaaattaaaattaatgaattataatttttgttgsttgggaaaaagaatagacacacacgtgacagtgcatcacttcaccccatcatttcatctcatcatttcatcatttcatctcatcattttatctcatttcatctcatcccatctcatctcatcatttcatatcatctcatcatttcatcaaatctcatctcatttccatttcattttcattatttcatttcatcatttcatttcactatttcatttcatttcatctaatttcatttaattcattatgtcatttcatataatctcatttcatttcatctcatatttttgatatcatttttcatctcatttcatctcaattcatctcatcatttcatctcctcatctcatcatttcctcctttcattaca

SEQ ID NO: 100902 - DNA, 606 bp, Homo sapiens
ttaaaaacattttttcattagtttttcatgtaaaattgtgacaaccagcatgaaataactgtcatcacagaagcatggtatattcgattccaaaacatattctttgtaagttttaatatatttatgtattatttatacttagattgtaacccataatgtacagatattatttttccttcaactcttaagaatattcttaaataataaaattaaaattaatgaattataatttttgttgcttgggaaaaagaatasacacacacgtgacagtgcatcacttcaccccatcatttcatctcatcatttcatcatttcatctcatcattttatctcatttcatctcatcccatctcatctcatcatttcatatcatctcatcatttcatcaaatctcatctcatttccatttcattttcattatttcatttcatcatttcatttcactatttcatttcatttcatctaatttcatttaattcattatgtcatttcatataatctcatttcatttcatctcatatttttgatatcatttttcatctcatttcatctcaattcatctcatcatttcatctcctcatctcatcatttcctcctttcattaca

SEQ ID NO: 100903 - DNA, 606 bp, Homo sapiens
ttaaaaacattttttcattagtttttcatgtaaaattgtgacaaccagcatgaaataactgtcatcacagaagcatggtatattcgattccaaaacatattctttgtaagttttaatatatttatgtattatttatacttagattgtaacccataatgtacagatattatttttccttcaactcttaagaatattcttaaataataaaattaaaattaatgaattataatttttgttgcttgggaaaaagaatagacacacacgtgacagtgcatcacttcaccycatcatttcatctcatcatttcatcatttcatctcatcattttatctcatttcatctcatcccatctcatctcatcatttcatatcatctcatcatttcatcaaatctcatctcatttccatttcattttcattatttcatttcatcatttcatttcactatttcatttcatttcatctaatttcatttaattcattatgtcatttcatataatctcatttcatttcatctcatatttttgatatcatttttcatctcatttcatctcaattcatctcatcatttcatctcctcatctcatcatttcctcctttcattaca

SEQ ID NO: 100904 - DNA, 586 bp, Homo sapiens
tgaagagagaaaagacagtagatagaggtaacaaacttaaatatgtgcgaagtctagaaacaagagaccgggggataaggacctttcaaaataaaatgcaagatttgaaaactgattggctggggcatgaggaaaaggcaggtctttaaggtcaatccctgttttgctttgttaggggttggttttatcacatattgtagaacatgtcatttcagttttgaacatcttgagttaaattgtcctaacatatcttatgaatttgattttcttccctgggaagctaatatttcaaaaactgaaagagtatatagatttccaacttgtatccaatttataaaactatctctaggctgctgatttcaggaggaggctcatgaatattctctttkcagagaatatatcaggagttaacaacagcttcaatatttgtggacgaccagttaactaaatcacctcttagtgtatttagatgggaaatcttagctgaagatattcaataatgaaccaacagtgactaaaaaattcaacatttaagtatatttcattgtaattaatttgaattgaagtagcagctagtatttactac

SEQ ID NO: 100905 - DNA, 637 bp, Homo sapiens
agaagccatctgagctcaacagaaagctggatcacccgcccttttgaaccgctttttgaaagcaaatacactgagcccagaagaaactcaccctttcctaagaggatggagatgtttgaagtgtcaaagtcaaaggcctctgtttgtttgaacatgctggaaaaagctaggcatgaggaggtggtttcagagacacaatattgttcacacagctgccaagtgccattttgattaaatgtgtagaggggaaaaaaagcatttcgcaaaagctcaaaatagagcacaacctttggcaatgcaagagcaacttcctggagttcaagggcaggatgtagcagagggggaaagtccaagcctacatttggctaggaaatgtttgcggccgcccggacattctctgcatgctccttccacctgctcccagacgggcagcagcaaaagtttcaacagggaaactaagagtgtggctttgagcctcctaaggaagaaactcacctcttcgttttcaatctttagagtggataagcgagactgcagttgttggcatctctgtascagctcactctggacaggctgctgggcacagagctgggaagcctaacaaaagaaagcaacaccaggtcagaaagaggataca

SEQ ID NO: 100906 - DNA, 558 bp, Homo sapiens
tttgagcctcctaaggaagaaactcacctcttcgttttcaatctttagagtggataagcgagactgcagttgttggcatctctgtagcagctcactctggacaggctgctgggcacagagctgggaagcctaacaaaagaaagcaacaccaggtcagaaagaggatacagtccctttggcagttccagagttcccattactggcaatgaaactacccatattcaaggtataaggctcgtggtttctatgttgaagcaaaacccaaagccaacttgtgtgagcctcttccaggaccaaacagtacatgaaaggaatgggtagggggatctgtttggagcccggcaggggtaggtctakgtagggtctgcagctccatggaaggctgaggaggctggagaagagtgcctcaggcagctccggctccagaaacacaatgctttggcacagtgaagatttcctgccaaaggtccaagtggccacctctctggcccctccctcatcccccttcatacaccagagtgaaagcaggagagaagtgggtcaggaggctaacttgcc

SEQ ID NO: 100907 - DNA, 588 bp, Homo sapiens
  misc_feature (1)...(588): n = A,T,C or G
nnnnnnnnnnnnnnnnnnnnnnnnnnnnnnnnnnnnnnaaatggccctggacctgcctgccatcgtctgtcctggccctgtatgtccccaccatgctctggtccagcgcttgccctggccctgttgctagtcctgccactgytatgccctgccctgtttttgccatgccctgtgctaccctagccctgccctgccttggccttggccctaccatggccttctcctaccctgcctggccctacactggccttttctactctggccttgcccttccctggtcttgccttgccctggccttgccctgccctggccttggctttgccttatcctggtcctggttctgccctgaccctggccttgctctggatcctctctggttctgctttctccctggccctgcccttgctctggccctgtccctggcccagccttgaccctgaccctggccctgacaatccccaggtctgacacntgccatgcttggccctggcccctccttttagccctgccctagccctgccttggccctgtgctatcttagtcctgccctggccctgaactcaccctggccctaccctcaccctacac

SEQ ID NO: 100908 - DNA, 588 bp, Homo sapiens
  misc_feature (1)...(588): n = A,T,C or G
nnnnnnnnnnnnnnnnnnnnnnnnnnnnnnnnnnnnnnaaatggccctggacctgcctgccatcgtctgtcctggccctgtatgtccccaccatgctctggtccagcgcttgccctggccctgttgctagtcctgccactgttatgccctgccctgtttttgccatgccctgtgctaccctagccctgccctgccttggccttggccctaccatggccttctcctaccctgcctggccctacmctggccttttctactctggccttgcccttccctggtcttgccttgccctggccttgccctgccctggccttggctttgccttatcctggtcctggttctgccctgaccctggccttgctctggatcctctctggttctgctttctccctggccctgcccttgctctggccctgtccctggcccagccttgaccctgaccctggccctgacaatccccaggtctgacacntgccatgcttggccctggcccctccttttagccctgccctagccctgccttggccctgtgctatcttagtcctgccctggccctgaactcaccctggccctaccctcaccctacac

SEQ ID NO: 100909 - DNA, 588 bp, Homo sapiens
  misc_feature (1)...(588): n = A,T,C or G
nnnnnnnnnnnnnnnnnnnnnnnnnnnnnnnnnnnnnnaaatggccctggacctgcctgccatcgtctgtcctggccctgtatgtccccaccatgctctggtccagcgcttgccctggccctgttgctagtcctgccactgttatgccctgccctgtttttgccatgccctgtgctaccctagccctgccctgccttggccttggccctaccatggccttctcctaccctgcctggccctacactggccttttctactctggccttgcccttccctggtcttgccytgccctggccttgccctgccctggccttggctttgccttatcctggtcctggttctgccctgaccctggccttgctctggatcctctctggttctgctttctccctggccctgcccttgctctggccctgtccctggcccagccttgaccctgaccctggccctgacaatccccaggtctgacacntgccatgcttggccctggcccctccttttagccctgccctagccctgccttggccctgtgctatcttagtcctgccctggccctgaactcaccctggccctaccctcaccctacac

SEQ ID NO: 100910 - DNA, 503 bp, Homo sapiens
tgttgatctaggccccgctttgaaaactactggtctagaccatctctgtggttgacatgccaagtgttcaataatatactctttcagtcctccctttcttcctrtgttcatccattcatccatggattcattcagccagttgtttatacaacaaacgaccttggggactcctactatgcatgagacattgtccaagggctcaaagacagacataggagattgctgtagaaacaaaaatatacgagtataatattgcataaattagggtgtgcacaaaatatcagagagatgagctggcaacagacttcctctgtgcagcctgggaaaccagaagacagtggacatatgtgccacaaggaaaggactgcacctcaaaaaccttattctcagctaagatgtcgcccatgtgtcagggcaaaaggcagaatgatgtttgaagtatacaaaatgtaattttttcaacagctatttattgagcagcaaccatgggccaggcattgtcc

SEQ ID NO: 100911 - DNA, 503 bp, Homo sapiens
tgttgatctaggccccgctttgaaaactactggtctagaccatctctgtggttgacatgccaagtgttcaataatatactctttcagtcctccctttcttcctgtgttcatccattcatccatggattcattcagccagttgtttatacaacaaacgaccttggggactcctactatgcatgagacattgtccaagggctcaaagacagacataggagattgctgtagaaacaaaaatatacgagtataatattgcataaattagggtgtgcacaaaatatcagagagatgagctggcaacagacttcctctgtgcagcctgggaaaccagaagacagtggacrtatgtgccacaaggaaaggactgcacctcaaaaaccttattctcagctaagatgtcgcccatgtgtcagggcaaaaggcagaatgatgtttgaagtatacaaaatgtaattttttcaacagctatttattgagcagcaaccatgggccaggcattgtcc

SEQ ID NO: 100912 - DNA, 503 bp, Homo sapiens
tgttgatctaggccccgctttgaaaactactggtctagaccatctctgtggttgacatgccaagtgttcaataatatactctttcagtcctccctttcttcctgtgttcatccattcatccatggattcattcagccagttgtttatacaacaaacgaccttggggactcctactatgcatgagacattgtccaagggctcaaagacagacataggagattgctgtagaaacaaaaatatacgagtataatattgcataaattagggtgtgcacaaaatatcagagagatgagctggcaacagacttcctctgtgcagcctgggaaaccagaagacagtggacatatgtgccacaaggaaargactgcacctcaaaaaccttattctcagctaagatgtcgcccatgtgtcagggcaaaaggcagaatgatgtttgaagtatacaaaatgtaattttttcaacagctatttattgagcagcaaccatgggccaggcattgtcc

SEQ ID NO: 100913 - DNA, 605 bp, Homo sapiens
agaatagcagcttataagtgataactgttttcattctgtttttaagagaaaatactttggtcttttttaccatgatagtttagtgtgtgatgtcataaaaatgggctgtagccatttaaattcttgttcaagtgcagaaactaagagactkcagtttctattaagccatgtcaactcctattaggagacctttagtggttccagttccagggccttcttgaagaaattgtgatacttgtgtaagtatatctagagttttctttccagcattggctaagtcacatagctgagaaatatgatacatggagaaggttgctgactggatgaacttttctacattgaatactttaaatctggattctagaataaaatatattgatgcatatttgagttgtcaactgtttatgtcttgttcttttcagcttcaacattgctttatggcatgtgtggtcgtttttcactccattgttgttgtttacccagtttatgggggttgtaatgtttatcacactccttggatgatttccgaaggtaagatatctggaatggtttttctaaaaatgaactcatttgaaaaatgtcttttatgacaattttcagtggat

SEQ ID NO: 100914 - DNA, 556 bp, Homo sapiens
agccctcctggatccacttgccagagcagccccggaccccgccagcccctcccactgactccagtgcaggtcagtgaaggtgactatgacagctctggtaatcctggaagaacccccaggattgaacacagctcttgggctctgattacagccaattaccataatggagagaatatctggattctcccctaatttcctctcctcttaaaattttcaattaagagcctaatcttgatggaaaatggctgctttctggagtaytctccgcagtgctgattcctcattgctaagtgctttttctagacagatagaggctctcgatgattccagataaaatcagagcaaaggagcttacccaaagaaaggaggagagcagagcagcaataggctatgccccggagccctccccactgctggagacaccaggtgggtgaggggtctcttgggcccttccagcctgcagagctgctgagagtcaggcctggctgccaacaaagcagctgaagtcttgagaaaacttcctgattgcattagcgaggttgcaacaccaggacat

SEQ ID NO: 100915 - DNA, 556 bp, Homo sapiens
agccctcctggatccacttgccagagcagccccggaccccgccagcccctcccactgactccagtgcaggtcagtgaaggtgactatgacagctctggtaatcctggaagaacccccaggattgaacacagctcttgggctctgattacagccaattaccataatggagagaatatctggattctcccctaatttcctctcctcttaaaattttcaattaagagcctaatcttgatggaaaatggctgctttctggagtactctccgcagtgctgattcctcattgctaagtgctttttctagacagatagaggctctcgatgattccagataaaatcagagcaaaggagcttacccaaagaaaggaggagagcagagcagcaataggctatgccccggagccctccccrctgctggagacaccaggtgggtgaggggtctcttgggcccttccagcctgcagagctgctgagagtcaggcctggctgccaacaaagcagctgaagtcttgagaaaacttcctgattgcattagcgaggttgcaacaccaggacat

SEQ ID NO: 100916 - DNA, 556 bp, Homo sapiens
agccctcctggatccacttgccagagcagccccggaccccgccagcccctcccactgactccagtgcaggtcagtgaaggtgactatgacagctctggtaatcctggaagaacccccaggattgaacacagctcttgggctctgattacagccaattaccataatggagagaatatctggattctcccctaatttcctctcctcttaaaattttcaattaagagcctaatcttgatggaaaatggctgctttctggagtactctccgcagtgctgattcctcattgctaagtgctttttctagacagatagaggctctcgatgattccagataaaatcagagcaaaggagcttacccaaagaaaggaggagagcagagcagcaataggctatgccccggagccctccccactgctggagacaccaggtgggtgaggggtctcttgggcccttccagcctgcagagctgctgagagtcaggcctggctgccarcaaagcagctgaagtcttgagaaaacttcctgattgcattagcgaggttgcaacaccaggacat

SEQ ID NO: 100917 - DNA, 616 bp, Homo sapiens
aaaggccatgtctcaatagaatatgatgttacaaccttaagaaaaaacaaggcagaaggtggtgattaaggtcattttcttgtgattggaatatgcaaacatacatatccttacaatatggtgcaagattaaaagctgtgttggcaaacataactgtgcctttaaataytttaagggctgtcaaggcagaaggactggatttattcagtgtggagctagtgccaaaggatgtgagtatggtagattccttcagaataaagaagaaactcctaacctaatgtactgagactaaggtctttgaggcaggcggactggggcgaattccaaatttaggacttacctgccttgccaccatggttaatttaatgtgttagatttgcagtttctggatttagaaaatggagtaataattaccttagagctgctatacattttgcattgcatatgtgacggatctggcgtagaatttctagaaaataacagaattctcatgattacctcaaatgaagtacgctgaaaacagattgcatttgaatgcattgctttttcccaattctttttcgtcttttcccttcaggtcttgtcttagatattagaactagattgggtctcctgt

SEQ ID NO: 100918 - DNA, 511 bp, Homo sapiens
aatgtagttctttgaggataatttagaccaatacyacagttatgaataattaatataaacattaattgaaattttaaaaattatatttataagcaacaaaatagctgatgattcatagaatgtatttctcagtattataataacaaattaccatttttttacgaatggaaatgatgggactatataagaaattgtatacgctaaacagatgttcttatactgataactttctattgttagagttgctgaattgcttcctacaaactcgtataaacataaataatttaaaaaagaatagtttccaattatgataaacaatacttctagacagctctatgttaatatagtacagccattgaaacttatagttctagatattaataactaatgaagaagagctaagaacatcttgtttgaaaatttccaagattagctcagacaaggctcctatgaaatactgctgaaatataaaatttaaatagccctttgtagcattctgcagaacagacta

SEQ ID NO: 100919 - DNA, 623 bp, Homo sapiens
aaaacttgttattatgtgtcttttttaattatagccatcctagtgcgtgtaaagttatgtttttctgattatttgaacttatctgatggctaatgatgagcattttacatatgctcacaagctatctttatatcttttttggagaaatgtttttgctcatttaaaaaattgagctatctttttatttttgagttgagtattttgatgaagtccaagtatatagtatttttggtagcttgtgatttaaatctcataactaaaaatccaaggtcatgaagatttacacctatatttttttctargagttttacagttgtaactcataattagatccctcgccaatttaaaggtggtaaatgtaatggactgaacgtttatgtccttcaaaaattcatatgttgaaatcctaacccctaacgtgaaggaagtggggcctttgggaggtaattatgtcatgagggtagagccctcatgaatggaattagtgctcttataaaaagagatcccagaggaattccttcccttttaccttgtaaaggcaaggcaagatgttttcagtctacaacctaggagagggctctcaccagaacctaaccttgctggcactctgatcttagacttcc

SEQ ID NO: 100920 - DNA, 554 bp, Homo sapiens
atgctaataaaaccctgagataaaacaggctatttaaattagatcatacagttattcaattgaggaagattttaaaataccctttataatagtatttttgcagccttaactcaatttaaagtcagcttcaaaaatttgtattctgaaagatattttaagaatttttaaatctaagattttattcctctgacattttcccctatgtgaagtgtcagtatacaagaaggcttttgtcctagcactcataaatagctaacaaagcaccttcaatgagccatgttaaagttgttttcccatgaggcttgtgcamtaattttgccattttgtagatgagaagactgggacaagaaacatttagcaacttgtctaaacctacaatataagaggtagatcccagactgaaacatacacagtctgactctaaagcctttgcaagtatcaaaaggcatctttctgatcctttagtgttcactccccagtacctttaatatttgccttcaaatttctttacttccatttttatcctacaataattaagtaggcatacttaaaga

SEQ ID NO: 100921 - DNA, 562 bp, Homo sapiens
tggctcgaacatgcaatcccagcactttgggaagctgaggcaagaggatcatttgagtccaggagttcgagaccagcctgggcaatatggtaagacccccctcatctttacaaaaaatacaaaaattaccaggtgtggtggcatgtgcctgtggtctgggctactcaagaggctgaggtgggagaattgcttaagcccgggaggcaaagattgcagcgagctgagattgagccattgcactctagcctaggtgacagagccagacactgtctccaaacaaacaaacaaacaaacaaacatacatttatcctaagatccagcaacactgctcgtagatattgacctgagagaaatgaagacataygtccacaaaaaaccctgcacacttatgtttataatggctgtatttataatagtcaaaaactggaaactacccaaattttggaaatttgagtttaatagattatgggaaattacaagaacttactgtccataaacattaaaattgaaaggtgaatgtttttgatttgggcctggaaggcaaattagatggatacatgtt

SEQ ID NO: 100922 - DNA, 522 bp, Homo sapiens
gtacagacgctcttcttcatgcattcgtcttattttatgaggaccataaattgttttaaagttagaccagagtgattgggcaaatttatatacctacctgatgcctaccctaaatcacagcaaaaggaaagggaaaccatcaggattaattagctggggctgggggaagagcatatttctgcctatgcctgcacaagttgaagctctttgagcaagaaataatgggaaatggctgtcaagaaggcaaccaactctgtctsccatgttcctcatgtaaggataccgcatgtaacatggcagactgttgatcagtggacaaccagtaggaaaaataagattttaaaaagtgttctaaatgcctcacaattatgtaatgtcatttaatccatcagtaggagagatgacgaggatgacattttatgagaatgaaatatctgacaggaattagcaaaagtttcagagtttggccttaggaataaagtgaagacaaaagaataagaatttgattaaattcacagttag

SEQ ID NO: 100923 - DNA, 596 bp, Homo sapiens
aaggtacaggttagtaacatcttgtactttggtttttgccaacaaatacgagaccttccagttttaggacttaccccgtctcctctcatcagtgtgactgttgttatttcttttgtgtaggctatttgtcatgacaacaactcagtttatttaaagtgttttatcatatttctgtgagctggttataccatcttgaattatttaattcagagtaaacactgaggtggtgtgtatgtgaaagagtctacaccatatgtgtttatggaaatgtgcttattgagatgtcgtttccaagcacggcatctgctcttgtgcatcttttatattattttgcatggagcctatacaatgattgatctccaccatctgatagttttccttttaagacagtttcccttcttatgttcttgataaatgataatgtttaatatttgggaagaaaaaaagcatctaaattaaaaataagaatgatsaataaaaatgtcttctgagttctttaatttccattatgcagtgcatgatttttagaaagagctgaaatctgtgcatttagaagagtaaggttttctgaatattatctcaaatggaaaagccca

SEQ ID NO: 100924 - DNA, 633 bp, Homo sapiens
cgctcttgtcacccagcctggagtgcagcggtgcaatctcgtctcactgcaacctccgcctcccaggttcaagtgattctcctgcctcaggctcccaaatatctgggactacaggcactggccaccacacccagctaatttttgtatttttagtagagatggtgtttcaccatgttggccaggctggtctcgaactcctgaccccaggtgatcctcccrcctcggcctcccaaggtgctcagattacagatgtgagccaccacgcatgactatggcacctttgatggtacttatacgccagttaaataataagtgatgtgcagtggttcttgtctgtacacattaattaggctgtgtggggagggacaagggctggttctgttctcattgtttcactagctatggatagttctaggttttggctcacagtccagtttttgttaaggtgctgatggaacacttgccaatggcccggttcagtgctgaataggaagaagagctggccaacttgagttattacatctctgccactcaaggtgatgtcaggtaagctgttgactccagctgatcctcagtttttctatctgtaaaatgggctcatgattagctaaaatagcgtgcagaaagtacaga

SEQ ID NO: 100925 - DNA, 583 bp, Homo sapiens
caagcatgctacctaagtccacgtcccaaaatgactcatgtgtgcatgctgaatcaccatacaaagaaaatgtaggttctgtgytcacaaatggcactgaccttcatggagctacagggtagatgatgggtcactcacagcacagatatgggaaaagatcttcctttacctcccccagtatccaggaaaataagtacacattcattaactgcagatttcatagaaagcaaggcaggcaagcatgagtggaggaggccaaactgaccttaccattttcaccgtggcattcctttactccacgtgactcggcactcccagcccccaccctatcctgcatcatccttgatgcctccttctccctcttcactcccaacctcccagaaacaggccctgggaagtccacatttcagacacccttagaatccctccatgtctccccatccctgcagcccccatgtgctgcaagccaccacagtctgtcctcaaggaacctggaacagcctcccacagtcttcctgcctccttcgtgtctcctccaacctattctccatctgcagcctgagcgacctttctaaacccaaat

SEQ ID NO: 100926 - DNA, 583 bp, Homo sapiens
caagcatgctacctaagtccacgtcccaaaatgactcatgtgtgcatgctgaatcaccatacaaagaaaatgtaggttctgtgctcacaaatggcactgaccttcatggagctacagggtagatgatgggtcactcacagcacagatatgggaaaagatcttcctttacctcccccagtatccaggaaaataagtacacattcattaactgcagatttcatagaaagcaaggcaggcaagcatgagtggaggaggccaaactgaccttaccattttcaccgtggcattcctttactccaygtgactcggcactcccagcccccaccctatcctgcatcatccttgatgcctccttctccctcttcactcccaacctcccagaaacaggccctgggaagtccacatttcagacacccttagaatccctccatgtctccccatccctgcagcccccatgtgctgcaagccaccacagtctgtcctcaaggaacctggaacagcctcccacagtcttcctgcctccttcgtgtctcctccaacctattctccatctgcagcctgagcgacctttctaaacccaaat

SEQ ID NO: 100927 - DNA, 583 bp, Homo sapiens
caagcatgctacctaagtccacgtcccaaaatgactcatgtgtgcatgctgaatcaccatacaaagaaaatgtaggttctgtgctcacaaatggcactgaccttcatggagctacagggtagatgatgggtcactcacagcacagatatgggaaaagatcttcctttacctcccccagtatccaggaaaataagtacacattcattaactgcagatttcatagaaagcaaggcaggcaagcatgagtggaggaggccaaactgaccttaccattttcaccgtggcattcctttactccacgtgactcrgcactcccagcccccaccctatcctgcatcatccttgatgcctccttctccctcttcactcccaacctcccagaaacaggccctgggaagtccacatttcagacacccttagaatccctccatgtctccccatccctgcagcccccatgtgctgcaagccaccacagtctgtcctcaaggaacctggaacagcctcccacagtcttcctgcctccttcgtgtctcctccaacctattctccatctgcagcctgagcgacctttctaaacccaaat

SEQ ID NO: 100928 - DNA, 583 bp, Homo sapiens
caagcatgctacctaagtccacgtcccaaaatgactcatgtgtgcatgctgaatcaccatacaaagaaaatgtaggttctgtgctcacaaatggcactgaccttcatggagctacagggtagatgatgggtcactcacagcacagatatgggaaaagatcttcctttacctcccccagtatccaggaaaataagtacacattcattaactgcagatttcatagaaagcaaggcaggcaagcatgagtggaggaggccaaactgaccttaccattttcaccgtggcattcctttactccacgtgactcggcactcccagcccccaccctatcctgcatcatccttgatgcctccttctccctcttcactcccaacctyccagaaacaggccctgggaagtccacatttcagacacccttagaatccctccatgtctccccatccctgcagcccccatgtgctgcaagccaccacagtctgtcctcaaggaacctggaacagcctcccacagtcttcctgcctccttcgtgtctcctccaacctattctccatctgcagcctgagcgacctttctaaacccaaat

SEQ ID NO: 100929 - DNA, 511 bp, Homo sapiens
ggaattcagggaagctgctacttaccaccatgtaaaaaggatttcaatattttcaccctggtagggatgcaccagtgtgtgcttctcagcctcagtcctggacgtatgccccattgccctaaggttgtcccaaagaggccaccattagacctcaccttttatggacaggtgggagatgtctgaacrcaaccacatgttgcccagtgacaggggctgggctgaccaggacacggagagtgacttgccttctggggctgagccagtcactcatactcccagcgtagccctggagcttcactgcaactgctatgttacaggaagttgtaccagcagctctacactaaggtgtatagtcggtgaccactttaaagaaagactcattagaaagaggcattgtttggggaggccaacaggccagctgttggggaccatgccagaggtactgtgtcaaggtacctggcttgatgcttacttcccattgtctgtttcttgagtttattttgcgccatct

SEQ ID NO: 100930 - DNA, 511 bp, Homo sapiens
ggaattcagggaagctgctacttaccaccatgtaaaaaggatttcaatattttcaccctggtagggatgcaccagtgtgtgcttctcagcctcagtcctggacgtatgccccattgccctaaggttgtcccaaagaggccaccattagacctcaccttttatggacaggtgggagatgtctgaacacaaccacatgttgcccrgtgacaggggctgggctgaccaggacacggagagtgacttgccttctggggctgagccagtcactcatactcccagcgtagccctggagcttcactgcaactgctatgttacaggaagttgtaccagcagctctacactaaggtgtatagtcggtgaccactttaaagaaagactcattagaaagaggcattgtttggggaggccaacaggccagctgttggggaccatgccagaggtactgtgtcaaggtacctggcttgatgcttacttcccattgtctgtttcttgagtttattttgcgccatct

SEQ ID NO: 100931 - DNA, 604 bp, Homo sapiens
gtatgacctcattttaacttgattacatctgcaaagaccttctttccaaataaggcttaccttcacaggaactggggattactattgaaacaaatcttttggaaaaaaacactgcaacccattacaggtgcctaagactagaaagatgggtcagagctgctactgccagtgtgagaaagtggacaagttggagttcacctgggaataagatccttggatggaggagcaaactccagctagaggaccgaagccttgaaatcatttattctgcagatcagtgtttctcaaaacggggttcccctagccatcagcattagcgtcagctgagaaacatgtaaggcatgtaaattcttatgctccaacctaagcctactgaattggaaactctgggctggggtggtttcttattttaataagccttcctggtgactctgctgyacactaaagtttgagacccattcctctaaattctgccgtctctcctcactgcatcacttttcagtggggctgcccttggacactggcagatattttgggttaaagaagaaagttatttggtcaaaatgagtgtgggcagcattgtattggtctatgttgaacaggt

SEQ ID NO: 100932 - DNA, 551 bp, Homo sapiens
acctgtttcatagacttgttagttaatacatgtaaagtgcttagaatgtgtctagcacatagcaggagytgaacaaggatcacctctcattaggggctgcagggggactggtggctgctgctgaagccttcagaacctcccttcacatgctcaccacagctcctccagcaggcagaaggcttactcggtggtgcagagaaattaccccaaaggaagcttttcatcagaggtggctgatgagtgcctgatggatgccttttcctccctagatggtcccaagatgactcttcctagatgaagggcctcctcctgagccttgttgtagctcagtggaaaataaataaagagggaacaaaaagtccacgaagaagaaacagtttgttgggtggcgcctctcagggccagtatgatttaattgacgtcaagcctgttatgagtactcatgtggctaggataagtggcattggaagccgggttgcccagcatccttgctctcagagccccacttgatgaccttcttaggggttagtgcctatcaggaggctgttttg

SEQ ID NO: 100933 - DNA, 596 bp, Homo sapiens
gataacacctgtttcatagacttgttagttaatacatgtaaagtgcttagaatgtgtctagcacatagcaggagttgaacaaggatcacctctcattaggggctgcagggggactggtggctgctgctgaagccttcagaacctcccttcacatgctcaccacagctcctccagcaggcagaaggcttactcggtggtgcagagaaattaccycaaaggaagcttttcatcagaggtggctgatgagtgcctgatggatgccttttcctccctagatggtcccaagatgactcttcctagatgaagggcctcctcctgagccttgttgtagctcagtggaaaataaataaagagggaacaaaaagtccacgaagaagaaacagtttgttgggtggcgcctctcagggccagtatgatttaattgacgtcaagcctgttatgagtactcatgtggctaggataagtggcattggaagccgggttgcccagcatccttgctctcagagccccacttgatgaccttcttaggggttagtgcctatcaggaggctgttttgagagtatctgtggggaagaagggctcagatttaaaactg

SEQ ID NO: 100934 - DNA, 580 bp, Homo sapiens
ccttctaaattcagtggccaataaagtctgctccgtgaattacactcattcaatcacagctgatatctctagatcaaggacaatgcccctctctacaggtgggaagacaaarccaggaggtcccaatgtggcttctccaaggttcccccaaagttactgtcagtgcagagctggggtgacagagcccctgctcatcactgcctatgttgccttccaagagagaagcaagttgctcaataaatagctcatcaccctaaaaataacgaggtctctgatgagacttagtctctaatgaaactaagcacaggactgagggggtgaagagcaagcagaaaatggatttccaccatgggctagactgttcacgtggcccagtggtggagagaatccttagggaaagcctaactccgaagcccagagaaggaaggaaaactaataaggagtgtgttttgcaggctgatttttctgaagttatccataggaaaattcatttatgtgagaggctaattagtcatgacagtgctttgctccagacataattgcattggtcccatgcagtctctgtgggtcagcctgtaat

SEQ ID NO: 100935 - DNA, 586 bp, Homo sapiens
ttatgtaaaatacaagatttactgagcaggagccgaatgcactattgagtgtccctctttttgctccttcccactctcctgcctttaaatactgaagttctcaaaaccctctttggaaaaagcacaggccacagagtctactgtagcctttatctctttttcctgggctcatcctcaaccttggcaaaatgaacctctaaaytgattgagaactctttcagacatgttttggtttataggctccaccaccaccatccagaatactcacctaggaacaacgcctagggaaacatcagcatttctgttccccaggagaacagacaaagcaggcactttttgcagacatagttgagaaggacctcacagtggtcataacaagggagggtgcaaggaggcgccatccacttacatcatgtccatgcacctgctaatctactataagtacaactcccatgagaatcactaaagctgattcgtctttgtatcaatgcaatacatctttgtattgtggcgagcacagagtgggcctccattaagttaggtggaaggaataaactgttaggcaacacatgctaaggacttgtcc

SEQ ID NO: 100936 - DNA, 586 bp, Homo sapiens
ttatgtaaaatacaagatttactgagcaggagccgaatgcactattgagtgtccctctttttgctccttcccactctcctgcctttaaatactgaagttctcaaaaccctctttggaaaaagcacaggccacagagtctactgtagcctttatctctttttcctgggctcatcctcaaccttggcaaaatgaacctctaaactgattgagaactctttcagacatgttttggtttataggctccaccaccaccatccagaatactcacctaggaacaacgcctagkgaaacatcagcatttctgttccccaggagaacagacaaagcaggcactttttgcagacatagttgagaaggacctcacagtggtcataacaagggagggtgcaaggaggcgccatccacttacatcatgtccatgcacctgctaatctactataagtacaactcccatgagaatcactaaagctgattcgtctttgtatcaatgcaatacatctttgtattgtggcgagcacagagtgggcctccattaagttaggtggaaggaataaactgttaggcaacacatgctaaggacttgtcc

SEQ ID NO: 100937 - DNA, 428 bp, Homo sapiens
ttggctcatagatggaaggagtagggacatcctgaggcctgcgaggctcaaagaccaggcagggacactggaaaacagtcattatctctgagtctcacagcaaaaactcagtgaagaggtgactgtagatggagggaggtggtgagaatttcacttctcagaatccttcttggggagaactcaatgttatgtctgggatcaatatcacacacacttttgtgggaaggagtgagagaatgaacgyggtgcttgagtaatcaaaggtgctggccacacagccttcaagaaagacaggttctgttcaccgagggatctgccgtgagctgtgtgctgaagggtctggttatgaaaccatggctgatgtcaattgatggcaaaatggaaagaggggacatttaaagttggagttttggaggaggagagagaaa

SEQ ID NO: 100938 - DNA, 559 bp, Homo sapiens
gatgactcggttgaatgaatgacacccaccccagtttctcaccccatctcccaacaccaggatccttttgcctagtgggtggttatcacttagatgtgcccatccccaaacctcacttgatatagtgatttctggagaccctaagaggactcagggaccaggcacggtggctcatgcctgtaatcccagcactttgggaggtcgaggcaggtagatcacctgaggtcaggagtttcagaccagcctggccaacatggcaaaacctatctctactaaaaatacaaaaattagccaggcgtggtggcaggtccctgtaatcccagctgctcaggaggctgaggcaggagaatcacttgaacccaggaggcggaggttgcagtgagccaagatcatgtcactgcactactccagcctgggtgacagagcaagactccatctcaaaataaataaataaataaataaataaataaataaataaataaataaataagactcaggggacttcctgcacattcccatgagcyatgagccatctccaacaccttggggcagagtaggg

SEQ ID NO: 100939 - DNA, 592 bp, Homo sapiens
tcccctcacctttcctttcccccttccttctcctttccttgtttgttttgtttttacagacaggatctctctcccaagctggagtgcagtggtgcaattatagctcactgcaccctcaaactcctgagctaaagcaatcctcccatttcagcctcctgaatagctagggctacaggtgcatgccaccaagcccagctaattaacaaaatatattttttggctaggtgtagtggctcacacctgtaatcccagcactttgggaggcygaggatggcagatcacctgagttcaggagttccaggccagcctggccaacgtggcgaaagcctgtctctactaaaaatacaaaaattagccaggcatgggggcgggagcctataattcagctactcaggaggctgaggagggagaattgcttgaacccaggaggcagtggttgcagtgagccaagatcataccactgcaatccagcctgggcaacaagagcaaaactccatctcaaaaaaaaaaaaaaattcttttatatagacaggatcttgatgagttgcccatgctggtcttgaactcttggcctcaagggatcctcaatcct

SEQ ID NO: 100940 - DNA, 592 bp, Homo sapiens
tcccctcacctttcctttcccccttccttctcctttccttgtttgttttgtttttacagacaggatctctctcccaagctggagtgcagtggtgcaattatagctcactgcaccctcaaactcctgagctaaagcaatcctcccatttcagcctcctgaatagctagggctacaggtgcatgccaccaagcccagctaattaacaaaatatattttttggctaggtgtagtggctcacacctgtaatcccagcactttgggaggctgaggatggcagatcacctgagttcaggagttccaggccagcctggccaacgtggcgaaagcctgtctctactaaaaatacaaaaattagccaggcatgggggcgggagcctataattcagctactcaggaggctgaggagggagaattgcttgaacccaggaggcagtggttgcagtgagccaagatcataccactgcaatccagcctgggcaacaagagcaaaactccatctcaaaaaaaaaaaaaaattcttttrtatagacaggatcttgatgagttgcccatgctggtcttgaactcttggcctcaagggatcctcaatcct

SEQ ID NO: 100941 - DNA, 551 bp, Homo sapiens
ctgatggtagtggctcacccttgtaatcccagtgctctgggaggcagagatgggtggatcacttgagcccaggagtttgagaycagcctaggcacacagggagaccccatctccacaaaaagtacaaaaattagctgggcatggtggcacgtatctgtagtcccagctatttcagaggctgaggtggtaggatcacttcaaccagggagattgaggctgcagagggctctgcgttcacaccactgcactccagcctgggctacaaagagaccctgtctcaaaaaataaaaattaaaaaaaaaaaaaaaagagaaagagcaaaaagagagggctggcaagggctggagcaagggcagcagtgattgggtgttgcgaagtgcttggatgtggctcagtagtgggtacagaagatcaggggcctggagtagggaggagcaccagagcaggctgagcccagtccagaggcagctgggtggggtcctgggaagaggcacctgttgaggctctctcccatcacttttatgggctcagtggactcaggaggaaggtcg

SEQ ID NO: 100942 - DNA, 560 bp, Homo sapiens
ttcttatcatttttgtgttcaccggagtagcacttttaatttccttcaagagctttattttgcattcacacattaactaaaccatttggcaaaagaggcctagctttcagcctgtctctgctttyaacatgccttcctcactaaggttagtcatttctagcttttgatttaaagtgagagacctgtgacacttcctttgactagaacacttagagaccattgtaaagttattattaactggcataattttaatattgtgtcttggggagtagggatgcccatgcagagaaagaaagacagggaaatggccagtggagcaatcagaacacacacatttattggttaagttcaccaagttatacgggcatggtttgtggcatcccaagacaattataatagtaacatcaaagatcactgatcacagatcaccataacagatataataatgaaaaagcttgcaatgtcacaagaattaccaaaatatgacactgagacatgaagggagcacacactgttagaaaaatggtgtcaatggacttgtgtgacacagttgccataga

SEQ ID NO: 100943 - DNA, 478 bp, Homo sapiens
gtttggccacattcaacctgggtcctcagctcactgaaaggaatgaagagctgcatcatccacctacacaatttaggccattctttatttttaatttattttgactgagcacatttagtccaagcgtttgaaagtgaaacattctgcatgcaacaatgccaccgtatttagatgatgccatttcctctctgactcactcattactgctcatgaagaaaacctgagaagttgagtcttctgaggaattccagaaactgaaaaaaaaaaaaaaaaaagaaaagaggaagtcttcttttatccctgttgttaggattaaaactctcctcttcactttcataagacttggkggaagtacctctgttagcttattctgacttagatttaatgatatttatctttatttctaattcttgttctttgggagttggaatcctatttctctattttctatatatatatatatatataaatgctaaaa

SEQ ID NO: 100944 - DNA, 597 bp, Homo sapiens
ctggctatgtcttatttattatcacactacaaccttctttgccttagaagtgcctcaaagaccctctgccagtgccccacctaggactgaacttgagaatgacttatttrtcctaaatcaaatgagaaacatgttttaaagcatgatttctcaagaaagacaaacaagctaacattggattccttggcctctgttgaaatttcaatttcacatactcacaatgttattttaggtgaaaagaatttcatttttatgccaatatttactaaacagaggtcttaattttctctttcccagtatgtgggagcttcacttcatgcagctctctgcacgttctattgtgttaaaacagcaagcttgtcaagaatggagacattgcagcaatatacacagtctatgggagacattttctctatgggttaaagtaagttgttggatcaaagtcaggacatagatgctacagctggtctgggaaaaaatggcaattaagagggaaaaaaagaacagaaagagagaatcacagacagtctttttttaggtggcaacaacagaaccagactgcttgaaactggtaactgactccaaatgtcacatttt

SEQ ID NO: 100945 - DNA, 540 bp, Homo sapiens
ggattggaagagtcaacataataaagatgacagttctccctaaatctgtaagtttaagacaatttctattaaaaatcttgtcagctttgtatatttttatttatttattattagctggttacttgaagctttttatagatgtagacaagtctagtctaaaatttatatgcaatgccaaagatgtacamcagcaaaaactattctatattgtatgaaaagaaataatgtgaaaaaatcactctacttgacattgaggcttactatataggtacaatattcaagacagtgtggtactggaggaggaatagataaaaagatcaacagaacagaagagagaaccaagatggagacccatacaaaagtgtcccagtgatttttttcaaaggtgaaaaagcaattcaacagaggaaggtacccttttcaagaaatggtacaggagcaataccattagataatacaggaagataccctttttaagaaatggtatgggagacactcatcagcagaagaagagaccttgacctaaacttcacacctcat

SEQ ID NO: 100946 - DNA, 453 bp, Homo sapiens
tctattttacggttgccccatactgcatctcaactgatacttctcactgtccaacatttgagaaattggatcaaagttttgctatttgtaccattaatattcttctagctatattttcaaacatttaaaaaattctgttttattaattctaatgtagamtaaatgtgtcaaagaatctgaacttaggtgcccttggagttccaccaggacctgcactcttccacccctcctgaaattggcttcacaacatatttctggtgtttttcagtgagtgtgatcacatttatcttgatactttggaaaattctatatattttagatatatttataagcttttaatcacatatggtacacctgtattctagtccatttggctttcaatatcttaaggtgtgctttaccacatgacattcataattctgcatacatgtgaaagtattagtataaagaaaa

SEQ ID NO: 100947 - DNA, 453 bp, Homo sapiens
tctattttacggttgccccatactgcatctcaactgatacttctcactgtccaacatttgagaaattggatcaaagttttgctatttgtaccattaatattcttctagctatattttcaaacatttaaaaaattctgttttattaattctaatgtagaataaatgtgtcaaagaatctgaacttaggtgcccttggagttccaccaggacctgcactcttccacccctcctgaaattggcttcacaacatatttctggtgtttttcagtgagtgtgatcacatttatcttgatactttggaaaattctatatattttagatatatttataagcttttaatcacatatrgtacacctgtattctagtccatttggctttcaatatcttaaggtgtgctttaccacatgacattcataattctgcatacatgtgaaagtattagtataaagaaaa

SEQ ID NO: 100948 - DNA, 453 bp, Homo sapiens
tctattttacggttgccccatactgcatctcaactgatacttctcactgtccaacatttgagaaattggatcaaagttttgctatttgtaccattaatattcttctagctatattttcaaacatttaaaaaattctgttttattaattctaatgtagaataaatgtgtcaaagaatctgaacttaggtgcccttggagttccaccaggacctgcactcttccacccctcctgaaattggcttcacaacatatttctggtgtttttcagtgagtgtgatcacatttatcttgatactttggaaaattctatatattttagatatatttataagcttttaatcacatatggtacacmtgtattctagtccatttggctttcaatatcttaaggtgtgctttaccacatgacattcataattctgcatacatgtgaaagtattagtataaagaaaa

SEQ ID NO: 100949 - DNA, 562 bp, Homo sapiens
tatgtagaaatcccttcagtatagcaatgttcatcctcgtaataagctaaagtcagtaaaatttccttgggtagggggtgagttaagtatgtaatggtgcatgtctctagtggaatatgaggctacaactcaaactcagaaaatcaatctgcctttaagatgaacattatcccatggtgcatacgtacctcattttctttaaccaatccacygttgagagtccacagccttataaaataatgaaattattatatattttgcagcaatatgggtgcagatagaggccataatgccataatcctaagggaattaatgcagaaacagaaaatcaaatactgcatgttctcatttgtaagtgggagctaaacattggttacacatggacataaagatgggaacaacagacaatggggactcctagaggagtaagaatggaagggggagtgtgggtagaaaaaccactcattgggtactatgcttagtgcctgggtaataggatccataccctaaaccccagcatcacgcaatacacccatgaaataaacctgcacatgcatcctct

SEQ ID NO: 100950 - DNA, 562 bp, Homo sapiens
tatgtagaaatcccttcagtatagcaatgttcatcctcgtaataagctaaagtcagtaaaatttccttgggtagggggtgagttaagtatgtaatggtgcatgtctctagtggaatatgaggctacaactcaaactcagaaaatcaatctgcctttaagatgaacattatcccatggtgcatacgtacctcattttctttaaccaatccactrttgagagtccacagccttataaaataatgaaattattatatattttgcagcaatatgggtgcagatagaggccataatgccataatcctaagggaattaatgcagaaacagaaaatcaaatactgcatgttctcatttgtaagtgggagctaaacattggttacacatggacataaagatgggaacaacagacaatggggactcctagaggagtaagaatggaagggggagtgtgggtagaaaaaccactcattgggtactatgcttagtgcctgggtaataggatccataccctaaaccccagcatcacgcaatacacccatgaaataaacctgcacatgcatcctct

SEQ ID NO: 100951 - DNA, 516 bp, Homo sapiens
ggcaaaacccacaaaggtaagactctagatagttatatttccctaaatcagattgaaaggtttccctccagtctttatccaatgtgaccagcagaacactgagagccctgttctctagtcttcacaggctgaattaggatgtaagctgtttacccacactatgcaatgaaacaatggagaaacccatgagaagacaggctcatggcatatgagtacatgttttaattttcaaatgatgggaggtgtaaaaacagcaacacattttaccccgagggggtacagagccaaaaattccaaggccatctgccatatacaaattcatagyaaaatgaacagctgtgggagttgcttaggtggaagttttctagaaagatataaacgttttggtcaatattctttgcaggtggaagtaagcattgttttagatgccaagattcttgtacctatagtcccagctactcaggagactgaggagagaggatcacttgaacccaggaggtggaggttgcagtgatc

SEQ ID NO: 100952 - DNA, 595 bp, Homo sapiens
ttcgaactttggcttctgccctttctacatgctatggagttgaagagacagccacagtgcttctagaaacaaaggccatttttctctagatcactggatttgtgattttcagatttatccttctccctggggaaagttttgttccaaatgaaatcatacttggaatcacaatatgtaaaagagaaatttgttctcctgagtgcaagggacaaagtttccacatgaactaatggcagtttatggacacacagggtgctcataagtctggcttgcccagagccattctggtttatgcttactgtcttgccattattattatacttaacagtagccccactcaccttaatggtatcctggaacagaaaatcaagtctatgatcccctagtgatgagggaattaacattcggaaacttgttcaaagtcacacactagtttgtaacacwgtcaaggatgaagcccaggtttctgatgtctcctctgaattatcagggttttctctactttaccctctttcttctctaagaatagaagaggatcaatatctcagtctacttttctggactagattagctccttggagtggaggaaatagta

SEQ ID NO: 100953 - DNA, 595 bp, Homo sapiens
ttcgaactttggcttctgccctttctacatgctatggagttgaagagacagccacagtgcttctagaaacaaaggccatttttctctagatcactggatttgtgattttcagatttatccttctccctggggaaagttttgttccaaatgaaatcatacttggaatcacaatatgtaaaagagaaatttgttctcctgagtgcaagggacaaagtttccacatgaactaatggcagtttatggacacacagggtgctcataagtctggcttgcccagagccattctggtttatgcttactgtcttgccattattattatacttaacagtagccccactcaccttaatggtatcctggaacagaaaatcaagtctatgatcccctagtgatgagggaattaacattcggaaacttgttcaaagtcacacactagtttgtaacacagtcaaggatgaagcccaggtttctgatgtctcctctgaattatcaggrttttctctactttaccctctttcttctctaagaatagaagaggatcaatatctcagtctacttttctggactagattagctccttggagtggaggaaatagta

SEQ ID NO: 100954 - DNA, 583 bp, Homo sapiens
tatgtcattgctttttgaatttgaaggagagttatctcctttgctgtgtctggttagttcagtttggtacaaaaattgccaaggtcccagttttgatttgctccccagtcatagttggtcctccctcatagttccaattactggtcttcaaaatgtgacctactactcacaatgaagttagacaggggcrataagagaacctgagaactaccaacagagctggaagaacaattaaaacatgtgctgtgcaattattgtatcagtagacattgagtcacaggtatgtactcagtaattatagtaataaatgaaaacagtatactatgatcaaatctatttttatacatattattgaataaattttcccagcttcttttctaatactttttttttttttggctcttggcataacagtatttaagacgtagttgcctatcattacacaacctgcacatggtagaaaagagacttgaaattttgttgttgttttaaatcaacatattggagaccttgtttatctgaaaaataataatgttttgccaaagatagacagataagtagacagataaataaaagttctttt

SEQ ID NO: 100955 - DNA, 615 bp, Homo sapiens
tatatgatgaatcacatttattgatttgcatatattgacccatccttgcatccctggaataaaacccacttgattgtactgtattatcttttcgatatgctgttgtgattgatttgctagtattttgttgaggacatttgcatctacattcatcagggatgttggtctatagtcttctttttctgttgcgtccttggctggtgttkgcattagtgtgaaagtggcttggtagaatgagttacggaggatcctctccttggctttttggaacagtttcagtaggactggtgtcagttcttctttgtgcagctgaactctttttgttgttggtaatttttttttatcactgattccatctcaatttcctttagattttgtagtctatgatcatagagatgttcatagtagtctctgatgatcttttggatttctgtgatttcaactgtaaagtctccattttcatttctgattgtgcttatttgaatcttcttttttctttccttggttagtctagctagtggtctatcgattttatcttttcaaggaactaacttttcctttcattgcaatctgctcctgagtgatctttaggtaaatgacaaaattaagacagaa

SEQ ID NO: 100956 - DNA, 565 bp, Homo sapiens
taggttgattctatgtctttactattatgaatagtgctgcaatgaatacatgtgtgcacgtgtcattagaaaagaatgatttatattactttgattatatatccagtaatgtaattgctgggtcaaatggtgtttctgttttaggtctttaaggaaccgtcacactgtcttccacaatggttgaactaatttgcgctcctgccaacagtgtataagcatttctttatctccacaaccttgccagagtctgttagtttttgactttttagtaagagccatcctgatgcatgtgagatggtatttmattgtggttttgatttgcatttctctaatgatcagtgagctttttatcatatgatttttggccacatatatgtcttcttttgaaaagtgtctcttcatgttctttacccactttttaatggggttgtttatttcttgtaaatttgcttaagttttttacagatgatggaaggaaacattgctgactagacacaagccaggtggaacaactcccactatgggaatgagatgactagcatgctcctaacagatcttcagaggg

SEQ ID NO: 100957 - DNA, 318 bp, Homo sapiens
caaactacttgctcttaataattgtaaaatatgttcaggtgcatcttcaaacacatctaatgaccgtgtccaataatctgcagattttggtaacaaaattcagcaaagccacatatcgtcastcattaaaagaatacagactatccagatgaggtaattgtccccctacaccatatttaagacaataaatgcaatttcagtgctacagtccatattatttgaactcctactatattcaaggaaatgtaattagtatgcagggagtacagtgataacagaatataaccattatcttcaagaaaataagtctatacagct

SEQ ID NO: 100958 - DNA, 582 bp, Homo sapiens
gggtgtagtgtacagagattataatcattgctgttttcatatctaataaagggtattgggatccagttgtacagagctaagagactaggaggtaggggaacaaccctgcctattttctgaaaatctgtctgttacacatttagaaaatgacacactaatgttcttaaaattaactttttagaatatacttaaagagccaaaaagaatactatattgcaatgaaagagagaaaattattcacaatataactgtttctgttaaaatgcacttgtatgcatagataaagttaggaaattaaacacagagtataagttgtctttacataagattcttgggtaatttttcatttcttaatttttgattaaccatkctttataaaatgtctacgtgaaaacctttatttttatgttaaacagtattatttcatatatactattaaaatgttatttcaacaaagttagaatcatatattgttgaaattgtaaacatgatatattgaagtgcaagcacaaaggaagaacaaaatgcaagaagcacagaaaaagatgatgattataacgataaacaaatccattatgtcag

SEQ ID NO: 100959 - DNA, 582 bp, Homo sapiens
gggtgtagtgtacagagattataatcattgctgttttcatatctaataaagggtattgggatccagttgtacagagctaagagactaggaggtaggggaacaaccctgcctattttctgaaaatctgtctgttacacatttagaaaatgacacactaatgttcttaaaattaactttttagaatatacttaaagagccaaaaagaatactatattgcaatgaaagagagaaaattattcacaatataactgtttctgttaaaatgcacttgtatgcatagataaagttaggaaattaaacacagagtataagttgtctttacataagattcttgggtaatttttcatttcttaatttttgattaaccattctttataaaatgtctacgtgaaaacctttatttttatgttaaacagtattatttcatatatmctattaaaatgttatttcaacaaagttagaatcatatattgttgaaattgtaaacatgatatattgaagtgcaagcacaaaggaagaacaaaatgcaagaagcacagaaaaagatgatgattataacgataaacaaatccattatgtcag

SEQ ID NO: 100960 - DNA, 595 bp, Homo sapiens
aggatttgtataattttaaatctaataagtctagaatttctgaaagattgtaggcaatcccacaggatttagatttatagtaaggaaagaaacaatcactcggtggctaaggcagcagattcaatatcactttctgtggaaactaatacaacaatttatgaagaactctgcagatacatatctctttacggtgggcacactcgttttctatgctcctttgataattatatcccccaaattcattccatccctgtctaatccttattcattaaacttctcaaagtttgaaaaagtaaaacagagaatagatttgaaaaagggttgtaaaattcctcacagtagaatggtttccacataatcataaatgtattttttacttatttctacatggtttataagatattgattcttttgtattagttgagggtttatctgtgataaatatatggtcaatttatttttaawgtttcatatgtgcttcaaagtatggtttcttctagaattgttgggtatagaatcctctaactactcattagaaaaaaaagtatgataatacagttctaattttctctttgtttactaattattgcctgtc

SEQ ID NO: 100961 - DNA, 602 bp, Homo sapiens
aataaaaatttggaaattctaaaatctttaaagwaaacattcataactttgagagacagaagtatttttgactttttattagtttaatggtttcaatttctcattcattttatcatctcttttattagcaattttaaacagaattgggattgcaattaataatgttttaaaacctgtcatttaacttcacatatgtataatgagaatttatagtgctaaagttctataaaataaaaaaaattcataatttaccatttcatgaatagagaaaaatatttaccaataccatattaatcatttgcatttttgacaattatgaggaaagctgtcatgaatatctgtgttcatataattgctatcattccacaaaataatcaattatatacattgattattatgactatgccatactttatttatctattctgtggtggaggggaaattgggtcgtttccagtttgggcttatgcccaaatattgtttctatgaagattttactgcctgttctttggtgaacatatgtgtacctagcagtgtaatttttggatcataaggtgttgctatttttagcccatctcacacttttatctggacctaccctt

SEQ ID NO: 100962 - DNA, 602 bp, Homo sapiens
aataaaaatttggaaattctaaaatctttaaagtaaacattcataactttgagagacagaagtatttttgactttttattagtttartggtttcaatttctcattcattttatcatctcttttattagcaattttaaacagaattgggattgcaattaataatgttttaaaacctgtcatttaacttcacatatgtataatgagaatttatagtgctaaagttctataaaataaaaaaaattcataatttaccatttcatgaatagagaaaaatatttaccaataccatattaatcatttgcatttttgacaattatgaggaaagctgtcatgaatatctgtgttcatataattgctatcattccacaaaataatcaattatatacattgattattatgactatgccatactttatttatctattctgtggtggaggggaaattgggtcgtttccagtttgggcttatgcccaaatattgtttctatgaagattttactgcctgttctttggtgaacatatgtgtacctagcagtgtaatttttggatcataaggtgttgctatttttagcccatctcacacttttatctggacctaccctt

SEQ ID NO: 100963 - DNA, 596 bp, Homo sapiens
cttctcggaagagttttaaaaatttataattgcacacacaaatcaaaacaaaacaaaatcacaaatgtagacatccatcaacagcgtgtaagactcaaatccctccatatttgccaatctagygcattatagtttttcttaaatttttataccattggaaggtaagaaaattaatcttgatatttaattgtatttatttggttatttttaggtttaaattttctacacacactactaatcattcaatacctattattttggaacatgtttatatatgtgtgttcatttgtttccaataggatcaaaaaaacatactttaggagaattatttttacagcaccatgtgttatcatcaattagaagagcatcacaatgttccatgaatgggtcatgattacatgaatttgggtgttgagggtacaaatatgaaacaaaggaaaatgagaaatagtgaatcacagatgaattcgtggacctcaggtcaagtgactcagaaaaaggtgaaacactaactgaagggaatattggtccgggataaagatcaagagtttatcattgaaggtgggaagttttgtacgagagccgtacctccaagc

SEQ ID NO: 100964 - DNA, 596 bp, Homo sapiens
cttctcggaagagttttaaaaatttataattgcacacacaaatcaaaacaaaacaaaatcacaaatgtagacatccatcaacagcgtgtaagactcaaatccctccatatttgccaatctagtgcattatagtttttcttaaatttttataccattggaaggtaagaaaattaatcttgatatttaattgtatttatttggttatttttaggtttaaattttctacacacactactaatcattcaatacctattattttggaacatgtttatatatgtgtgttcatttgtttccaataggatcaaaaaaacatactttaggagaattatttttacagcaccatgtgttatcatcaattagaagagcatcacaatgttccatgaatgggtcatgattacatgaatttgggtgttgagrgtacaaatatgaaacaaaggaaaatgagaaatagtgaatcacagatgaattcgtggacctcaggtcaagtgactcagaaaaaggtgaaacactaactgaagggaatattggtccgggataaagatcaagagtttatcattgaaggtgggaagttttgtacgagagccgtacctccaagc

SEQ ID NO: 100965 - DNA, 635 bp, Homo sapiens
gctatatccatgcaatggaataccaccctgcagtacaaagaagctacttggggatgaatcccaaagtcatgacgctaaatgaaagagtcagacatgaaggaggagataatgtatgccatacgaaattctagaaaatgaaagtaacttatagttacagaaagcaaatcagggcaggcatagaggctcacacctgtaatcccagcactttgagaggccacgtgggaagattgctagaactcaggagttcaagaccagcctgggcaacacagtgaaactccattctccacaaaaatgggaaaaaaagaaagcaaatcagtggttgtcctgtggggaggggaaggactgcaaagagggaagaagctctggtggggtgagggtggtgattcaggttctgtatcctgactgtggtagcagtttggggtgtttacatccaaaaatattcgtagaattatgcatcttaaatgggtggagtttactgtatgtaaattatacctcaatgtaagaaaaaataatgtgtaagaaaastttcaattctcttgccagcaaacgttattcaaattcctgagccctttacttcgcaaattctctgcacttctgccccgtaccattaggtgacagcactagctccacaaatt

SEQ ID NO: 100966 - DNA, 570 bp, Homo sapiens
gtaaatcagaaaacaagtcaccactagggtgtcgattccaagtatagaaaggatgcattgctttacattaactggcagaataggagtccacagcttgtttcctccaggggatattttgaattgtaaaatctgaaaaaaaatagatgtgatatgtaaagaaagttgtaagaaatgctccttttgtcacaaaagactgcttcctctttggtgagacggtacagtggtgtgacaagaaacgtaagctctggaggcagagtggcttaaaacttagtagctatattcccttggtcaagtcactcgaaccttctgtgcctcsgttttctgatctataaagtgaggataataatagtacttgcttggtgcggcagctgttaagatcatatgagttcacacatatgaacacttagtacctggcacatggtgaggaccctatatgtgttttctgtttttattatttctaccatctgactcagtacatataatcaagtatatataaaatttattgttcctgtttgtttagaagtctacctccactaattatactgagagttccttgtaggaataagcact

SEQ ID NO: 100967 - DNA, 543 bp, Homo sapiens
ctgatatgggagacaaagcaagctatctatacatgagttggtcatgaggacaatagatgctagctctggacaaaagaataattcccacccaatcaaattctctcctcttgaagagcaaaacaggtgaacatggagaatatggatcacgtggtttagaagtttgttgtgagtaatatattccaagtattcttgtgtagactgtgaagttagcctgcctcagtgttggaagtaccaggacttggtacctggtctgtgttgctgaggcagcttgcaatgctgcttcacacagcatggattattacaacaaacttccaccctgtctgcttggaaatcataaaaagccagatggatacatgtatgttctaaacaagaacacatgaaaatgtagcaatagctcttcacgattaatagtaagaaaaaaaaataaagtccctgcagatttcaaaggttactttagggmtaaaacttgaagtaattaaaacaagagctgaagctctttgacaagttttactttttatgcctgaaaggttcattgaccctata

SEQ ID NO: 100968 - DNA, 596 bp, Homo sapiens
ttgccttttccaacttctggtggcttcagttattttttggcttatggccatatgtttccaatatctgtctctgtacccatattgcttcttcctctgtggctgtcctctgtgcatcatttataaggacacttgccattggatttatggcccagccagataatgcagcatagtcttctcatttcaagatccttgtcttagttacatctgcaaagatcctttttctaagtaaggtaccattygcaggttctggggataaggacattgacatatcttttgagaaccaccattgagttcactatagtctaccctctgagccctaaaaatttacatctgcctcatgcacaaaacacatttatcccattccaacatcctacaaagcttcaacgtattaaagcagtaactctatgtccacaatctcacctaaatatcattagcttaaaagtcccagatgtcaccatctaaatcaggtatgggtgagacattgagtattactcatcctggggcaaagtttctcttcatctgtggacctctgaaagtagaaaacaagttatttttaaaaatacaatggcaggatagggataggataacagttttaa

SEQ ID NO: 100969 - DNA, 547 bp, Homo sapiens
ttaacattcgtatttctactaacatttagttcaagagtatatattaaaagtattaatggggaaatagtatttctttcttagcttgtttctcttgctttcatttactcattgaatagctgaggcaagaaatagcaatcaattctgtcttgtggacagtgtggaaatcttgggggcccaytgctgagggctattttctgttgtcattaaggattggctatgattttgcagagtacctagtagggagttggtggcaatgcagatctgttgaggggaagtgttaatatttacttagcgactaaattcgaacaaatcaatcctggtaatttgggtatagtacagtaaaatgtaattgactggccaatacttaatctctaggatataattcaaaataagtactgttgacagattcagaataaatgctatttactagctgattacatggaacgtctcatgagttaccttactcctctaaatcaggaaaaaacaatggttgctttactctgagagaaatgaatgaactaagaaggcttgctttcttctatatagg

SEQ ID NO: 100970 - DNA, 547 bp, Homo sapiens
ttaacattcgtatttctactaacatttagttcaagagtatatattaaaagtattaatggggaaatagtatttctttcttagcttgtttctcttgctttcatttactcattgaatagctgaggcaagaaatagcaatcaattctgtcttgtggacagtgtggaaatcttgggggcccactgctgagggctattttctgttgtcattaaggattggctatgattttgcagagtacctagtagggagttggtggcaatgcagatctgttgaggggaagtgttaatatttacttagmgactaaattcgaacaaatcaatcctggtaatttgggtatagtacagtaaaatgtaattgactggccaatacttaatctctaggatataattcaaaataagtactgttgacagattcagaataaatgctatttactagctgattacatggaacgtctcatgagttaccttactcctctaaatcaggaaaaaacaatggttgctttactctgagagaaatgaatgaactaagaaggcttgctttcttctatatagg

SEQ ID NO: 100971 - DNA, 465 bp, Homo sapiens
tagaaaggttttctgaaataggtgaaatgttagacactatttcaggaaggagaaagagactgagagagggaaaaagagactgagagagagagaaagataaagattcagggactctggttgtgtttacaggaacataaccccaggcatatgacattgttttggtatgggaaaaattcaaaatgagagtagagaaaaagtgacaataggyttcctggaaataggttcagaaaattgtttggaaatagaaagtaaaggggaagaaatacatatcatttggtagcaggactttgatcttaaaataagaagctggaactgaatgtatagtgaaatgggaagctagagataaacttccaggtgttagggtggttgtaatatgttaaaaataactcatgctagaatacttttgacagtagaaacgagggtatattgaaggggcatgtttaaaaagaacagtattgaaaaact

SEQ ID NO: 100972 - DNA, 339 bp, Homo sapiens
tccaaacaggttccctgtcaaaaggggttgtaaagacctccccactccaattgttttagcaggcaaaggacttgatctgcagactcaaaggcaggcagctagcaaggagaaagcacagtagcttaggaaaaagagagactgtagcatgtggtcaaatttgtttatgagtaaagcaggtaaccaggaatttgccaagcattttggaatgarttaaatccttcagtgaagataaaggtaccgtaataagaactattcatgttggaagagtgtctttaaagctagccaccaacaatttctcacctccctgtacacacgtttctcttgcatcaagaggtggat

SEQ ID NO: 100973 - DNA, 591 bp, Homo sapiens
aagggcctgtctgtccctcagatgggaaactgggcccagagaggaaacgggacttaccaagatcactcaggagagctgaggcagggtctctggactgtggctccagggctcttcagtggcaccacactggaagccatctgtccctggccatgacacgagacttttcctcttcctgtccctcactagcamtaaatgcagtatgtgcccaatatgttcctgtcaaactgggggaagttcacagcacccaaccaatgcctcatttaagggtttggccaaaggccctttctgctagggtagggggctggtcatctcagaccagagactctgaaagtcacaggtgtcaataccagctgcaactgttaccgagtgttactggtggtctgatgccagcttaaagcttacgagcatcatctcacataatctctaagcctcaaagtaagtaaaaggggggactggatttgaaccccattctgcctgaatttgtctgtttttattcattggatgatcctgcttctcattctcatgggggcatcttctacctcgaatctgatggggtcatcttctgcctctaatctgatggggtcctgtcct

SEQ ID NO: 100974 - DNA, 591 bp, Homo sapiens
aagggcctgtctgtccctcagatgggaaactgggcccagagaggaaacgggacttaccaagatcactcaggagagctgaggcagggtctctggactgtggctccagggctcttcagtggcaccacactggaagccatctgtccctggccatgacacgagacttttcctcttcctgtccctcactagcactaaatgcagtatgtgcccaatatgttcctgtyaaactgggggaagttcacagcacccaaccaatgcctcatttaagggtttggccaaaggccctttctgctagggtagggggctggtcatctcagaccagagactctgaaagtcacaggtgtcaataccagctgcaactgttaccgagtgttactggtggtctgatgccagcttaaagcttacgagcatcatctcacataatctctaagcctcaaagtaagtaaaaggggggactggatttgaaccccattctgcctgaatttgtctgtttttattcattggatgatcctgcttctcattctcatgggggcatcttctacctcgaatctgatggggtcatcttctgcctctaatctgatggggtcctgtcct

SEQ ID NO: 100975 - DNA, 591 bp, Homo sapiens
aagggcctgtctgtccctcagatgggaaactgggcccagagaggaaacgggacttaccaagatcactcaggagagctgaggcagggtctctggactgtggctccagggctcttcagtggcaccacactggaagccatctgtccctggccatgacacgagacttttcctcttcctgtccctcactagcactaaatgcagtatgtgcccaatatgttcctgtcaaactgggggaagttcacagcacccaaccaatgcctcatttaagggtttggccaaaggccctttctgmtagggtagggggctggtcatctcagaccagagactctgaaagtcacaggtgtcaataccagctgcaactgttaccgagtgttactggtggtctgatgccagcttaaagcttacgagcatcatctcacataatctctaagcctcaaagtaagtaaaaggggggactggatttgaaccccattctgcctgaatttgtctgtttttattcattggatgatcctgcttctcattctcatgggggcatcttctacctcgaatctgatggggtcatcttctgcctctaatctgatggggtcctgtcct

SEQ ID NO: 100976 - DNA, 643 bp, Homo sapiens
tcagctatttcttcttccgcccttgcttcacactttcaagtttcaacgtcctaaaagaaagcccccagtcagtctagattaggtcataagttcattccattgaaacatcagaatgaagagaaaaatgctgtggacctctcagctctataaatggaggcatgcagaaggaattaaccttgcacacgcacaaaaaatgcagaataagggaaaggtaacacccttgaaagaaactgaagtactattgaaattagatgttgggtattcaaccaaagaacgccaaatattctctccacacatgcagtgcttttttggatttatttaagagctgctgtagttgcaatcctggcaacctcagagatcagatttttctctactatcttctccacagtagagatttgttgtggcactctgccayctgttattttttgtctataacacaaagaaatagagacaaagtttttgcctcaaaaatgtttttcttgtggtaggaccttgtctttataaccctcaccccagtctcaatcaagtggcccagtttctgttttagaccgttatttaaaatcctgactgttccaatatactaatgaggcaccattatctgagggctgtttttcaactgccctggtttcttgtttgtattact

SEQ ID NO: 100977 - DNA, 609 bp, Homo sapiens
agttcaaacagatttagaatcaacattttaattgtagcaacacttcatagtcttctcattttctttgtttctacaaatgtattttctccccwgatccttatattttattttatttttctctatgatagtatttattttaagctgtactatcatgttgttactcctcagttctccacagcaacagagaggtatctggcagcatgagccaacagagttataggcagggccagaggtagagtgagcagccattactaagaacaagaggttttgtggaagaaaatgcagctctagaaattgatgaaaactcagaaagcaacaggtgatgtcatcccataaaagtcaaggccttgtgggatacaaagaagtactatcaggcaagcaatagtcataaaaataattgcattatttacttattttttaaaaataatgacaaagaggactaatttataacccaccaacgtattatgtaatgtcctctttatcacattaatcttcattctagaatcctctcacctcctacatctgtagccacatcttttttctctccattaattctcaggtcttcctctctgcccacccacgaacactcaaaagttcttgttaaatgat

SEQ ID NO: 100978 - DNA, 609 bp, Homo sapiens
agttcaaacagatttagaatcaacattttaattgtagcaacacttcatagtcttctcattttctttgtttctacaaatgtattttctcccctgatccttatattttattttatttttctctatgatagtatttattttaagctgtactatcatgttgttactcctcagttctccacagcaacagagaggtatctggcagcatgagccaacagagttataggcagggccagaggtagagtgagcagccattactaagaacaagaggytttgtggaagaaaatgcagctctagaaattgatgaaaactcagaaagcaacaggtgatgtcatcccataaaagtcaaggccttgtgggatacaaagaagtactatcaggcaagcaatagtcataaaaataattgcattatttacttattttttaaaaataatgacaaagaggactaatttataacccaccaacgtattatgtaatgtcctctttatcacattaatcttcattctagaatcctctcacctcctacatctgtagccacatcttttttctctccattaattctcaggtcttcctctctgcccacccacgaacactcaaaagttcttgttaaatgat

SEQ ID NO: 100979 - DNA, 598 bp, Homo sapiens
ttagtgctttgacaacctttgcataagatttctttctcttgatcccctgaacagtagatagacaaaaaaaacaactcacgctgaaattgaatttcataattagtcttcaggctataagaatgttcttagaagttttacataataactgataaatcagcaaatcaaatctattccattttgaagtgtcaggcttttaaattcttaggaaattgtcttgtgatatgaaacctgaagagatatgaagatataattaatacagtatttcccctagaaaaaatatttctaatatttattgtaacatcaattactagcaacttcaatgctggtgatctctagtatttgtgtttctcttcttttccagggagttaaaactaaataactttcacagcctcatttataattttagatgaggccacgaaacatatttctggctaatacaaggtaagctgaaatatgtatgcaacacaaaggaatagccyattaaaaaaattctgtgtgattttagttctatctttccacaactcccagtcagagagagaggcaccaataggggaattctggggctgcagggcatgacaaagccacaacgtggaaggtg

SEQ ID NO: 100980 - DNA, 523 bp, Homo sapiens
taaaatagaagctagctagaatgaaaaaaattcactctatatgttgtattaaaataaattgtaagacatttgcagaaaactacagttctcttacattgttcaataacgaaggacattcacttcaaaatcaagtttttatgttctttccgttagtcaattattgcaatttttgcgtgtaactataatgaataaatgtctcatatgtaaaagtgtccaacacatttccttccaaaccctaattgtcttaatttctcaaagctattcttggtcataagctctactccaaatgctgaaaacagtcaatattaataaaagaatacagaaaaaaacrtggacaatttaatttgtcaaatgaaaacattaatatgttttttgagttatgcacaaatgaataatttatccttttatggaaaacaactttgaaaaatttcaactattcactataaaactgaacttttatataccaagtatttctaacatttatattaaatattattttcatatttgcataaaatatttagtt

SEQ ID NO: 100981 - DNA, 569 bp, Homo sapiens
ctgaggataatgtctgaaaagttttaagaggcttagggaaaacagtaggatttaaaatatagcaaagagcaaattgttgtttaaaagaatgtagagtcagattacagaggctttgaatgccacacttttttttgtaagcgatagggaaccattaagagatcactgaagaggagtctcatgttgttattcatgactttggaagaggaatctgatgaaactgttaatgatatatttgagaatgtagctgctagaaaactggagatcrgttagcaatttgtagatttctatagaagagattataaaaacctgaactcaggtgtttttaatgaaaaaaaagataaattgaagcactgttccagtggcagaattaatgagttggagactgattggttgtggaaatgtgggagatgaatgactgtgacattttccttggtagcatgttgtcagtcaacaaaataaataggtaacacttatgcaggcacaattataagaactttatgaatatcatctcacataatcttcacaggaactaatgataaagttgttagtctttgaacctgggcagtttg

SEQ ID NO: 100982 - DNA, 608 bp, Homo sapiens
ttgagtgccttttctaagaagagagattcttctgtgtttgtagcagaaaagaagtagtaaaataaatgagttggctatttagtgatgatgggttgataagaaatcacaggtctgatttttctttagaatttcactaaggaatatgaagtgagaacatcaagtgaggggaggagtgggaacaaggtgttggttgtgaggttggaagagacagaacacttatcctggagagyagaaaagcaggcttgctagggaagctcattggcctacttagcaggactaaggggctaatttggaggtataaaatgtgaaagatacaccaatgtttttgattataggattttctccagctgtgtctacctgctcaattcaaatatttcaatccaaccccaagcacatttaacaaaagttttcattgaattttgtttacttaattttagttgagcatgtgaaactttgaatcgaaggaatatttctcacaagccttttcacctaaaagttatatttgaaaaagataattgttattttataatcttccaaaacttatcttccaacaaaatctagttactgattgggctgactgacaaattttaaccttttataattacatg

SEQ ID NO: 100983 - DNA, 634 bp, Homo sapiens
  misc_feature (1)...(634): n = A,T,C or G
acattggctagtggctaccttattggacagcatagaaataatggatttgtttcaaacatataaaacaatatcatctcttgtattgaaaagaggtgttcaaatgaaaactcgtacatgggtgttcatagcagcactattcataacatccaaaaggtggaagcaacccagtggccatcaacaaatgagtggataagcaatgtaatatgtatatgcaatggagtattattcagccataagaaaggaacaagtactaatgacaacatgaatgacccttgaacatactatgccaagtgaaagaagccatacacaaaagaccacatattatatgattctatttatatgaratgtccaacataggcacatctaactagaacgtagaatagtggttgctggggctggggaggaggaatagtggcatgaccgctaatgagtatggtgtgtcttctggggatggtgaaacatcttggaactggagagaggcaatgcccacacaacactgtaaatgtactaaatgtcactaatgagtaaattttatgctatgtgcatttaccacaataaaacaaaacgaaacaaaaacaaagaaacaaatattatctctctttattcctntggaaaggggaatgacgttctctgg

SEQ ID NO: 100984 - DNA, 539 bp, Homo sapiens
ctttgggaacatccccaattaatgccaatgtcccaccaggttgggaacccctgccctagcacaggaaggcaaggcccagggagaaatgccagcctgttgagttattctctgcaagtaatggcctccctgggagagctgggccatcaccacccaagctgagcccatttgcccagcttcagcccagcaggcccgcagcagtgaggctgaatgctggacaggccagagaaattcctaagcaattcagttttttgttaaccttagattaaaaatctcattcagcactttctttagaagtattccctaaggcccaggcaaggaggccctgccctggccctttgcctcaggagtccccactttggggtactttccttgaaattctctgagttccccttgggtacctgggcccagtcagggctaggagttctgttcagraagggcatcccaggtccaggccaggtcctgtgtacatctgggattctagaagcacccccaatgacatttccttaaggtccctctagtacctgaaaatccccagggct

SEQ ID NO: 100985 - DNA, 537 bp, Homo sapiens
gcaacatggtgaaaaatgggcaacatgggcaaaaaatacaaaaattagccaggcatggtggtatgcacctgtagtcccagctacttggggagctgagacaggaggatcacttgaacccaaggaggtggaggttgcagtgagccgagatcatgccactacactccagcytgggcgacagtgagaccctgtctccaaaaaaaaaaaaaaaaaaaaatcctttgaagttacatttcatggtttttgtatatttgtttatttatttttagtgattaagatattcacggttcaacattcaaaaaagtttttaaaatatatagtgaaaaatatctttcctggcagtatcgttttttctgtaccttcaaaaattacgtacatagacttccctttttaaaatacaaatagtgtcatactatacacattagctgttctgtatcttagtcactttttcacttaatgttctatggatgtcattctgtatcagtgcataaagagcatctttattctttttttatagctgtacaacttcttacagttgta

SEQ ID NO: 100986 - DNA, 551 bp, Homo sapiens
tgcatagatctcctcgtattacttctcacaactgcttgaaaacccacaattatctcaaaataaatgtttaatcaaaaattatattagataacattaatcatttaaataggaaaaaaccagtgatatttcatccaaacatggatcaaaagaaagcttgcatagctatattaatgctagagaagtatagaattcagaggaaggcatttcaaagaaaaggaaagatgttgcatagcaataaattagtcaattctccaagagaccataataacactaaatgtatctgtaacaagagagcttcaaaattcattaagcaaagttatggagaaaatatgtatatatgaatactaggtttataacagacctgtaaaacacttttgaacaatccaacttaattgacatttataaaatactctatscaaaatacccctatatacattcttttgaaatacacatgggcactcaacaagatagaagatattctaggccgtaaagtaaacctaaaagcattttaaaaattaaaattttacaaaatatacttttacaacacaaca

SEQ ID NO: 100987 - DNA, 594 bp, Homo sapiens
  misc_feature (1)...(594): n = A,T,C or G
gcggatacggccccttgatcttggacttcccagcttccaggactgtgagccaaataaatttatgttcattataaattacccagtctcaggtattctgttataacaanacaaagtgagccaggtgtggtggctcatgcctttaatccccagccctttgggaggccaagctgagaggatcacttgagcccaggagttcaagaccggcctgggccatgtagtgagaccctgtctctgaaaaatcccaacaaaaccaaaacggactgagacactctgcgttcttatttattttcaccacagttcctttcagaatctgaaatttttatagttatatgtttataacatttcrcctacagtacccaacacacagagagagagagagagacacacacacacacacccctacctagaatgtaaactccagaaaagcaaagaccctgtctgtctaattcatagctgtcatctttgtgtggtggcctgtatatcctaaatgttgaatgagttcagttaaggaataccaggggatgccaagacagccaactgagagtttcctggttgtactatttgtaacaatctccttttcgttaaaacctacta

SEQ ID NO: 100988 - DNA, 606 bp, Homo sapiens
gttctatttatctcaagtaatatttcttatctttgctgtattttgtctgaaatttaatatagttactccagctctctggtgcttactgtctgcatggcatatctttttctatcttcttacttttaacctatttgtatctttgaatctacgatatgtctcttgtagagagtacataattggatctggttattttttaatctgatctgacaatctctgccttttgattgaagtgtttagaacatctacatataatgtgattattgatacagctgggtttaaatttgccatgttttcttcatgtcccctgtccttcttagtctcctgttcckcctttattgtcctcttttgcaataaaaaattttaatctatcatttaaatccttgattgatttttattatatttatcgaatgactttcttagcagtagttcaagggatcataaaatgtatcttaatttagcacagtctacctcagtttaatactaatctaattacaataaaatatagaagattttctccaatataactccattccctcccttatcctttatgctattgttgtgatatattaatatatctacatacattttaaagttaacaaaagtgaa

SEQ ID NO: 100989 - DNA, 618 bp, Homo sapiens
tttcttgtttgactttgttttaatcaaagatttgccaagataaagatcaaagttatttgttgtaaaaccgattatagacctacaagctattcagtggattatacaaatatgagcataaagtattgaagatatgtgtctttctgtattttcatgtggcaaaactttctatgtgctgctttttagaaagcgtatttctgtcagttataaactgctgctccaaattatgtgataatttagatcaaggtcattaccaacttagttgaccaaacctgaaaaatattgttcttatgtcagagrccttgaagaaagaatgctctaatgggattaaaatgccttgcaaagaattacaacatgaatagctcaagaaatcttaatttataaaaggtcacagagttacaaaaaacatgtttcatttcagctaattaaatgaaattttagttaaacggcaccttgaaatattggtattgcagctgcgagtgcatttaaatagcatttacgcagatataattagcacaattaaacatgggtagaagtggaaacactattcttaattatattgatataatcagttttattaatgctttatagcaacaaaagtgacatctgacagtaacacac

SEQ ID NO: 100990 - DNA, 586 bp, Homo sapiens
ctgcactcctagtcactacactatactgaacccatccctttaacaccacrctacatatctgacaggggaggggaaaagcttacaaaaagcaactgaagacaaatgcttggcagaggtggaaaacagagaaaaactttaactctcctgggtggaggcaaggaggggctagggctttgaaggaagggtgttttaatgacaagaagcgcctgaggggcagggaaggggtagaaatgcatttcagctggagtccgaaaaagcacactgctcattcggagaggattcttccctctcttaaagctgatacacagcctacatggggtgcaaggggtggggagtcagccggaggagaagacgaaagctttgttgagggtgacttttgtaaagggactaaatgccatattaaggattagaagttttctataggtaatggagaaccaacaaaagtttctccatttttgtgcagaaatgacatgatctgatctgttttttcttctttttaaatttgaggtccatatgacagatgaatcagaaagggggaataaccagaggctgaaaggagtgataagtatgacttgaattaagggaa

SEQ ID NO: 100991 - DNA, 569 bp, Homo sapiens
tgttgttgttgttgtttgtctacatggtgacagaactattcttgtgacagggatttttcacgataaaggatttctaaggagtgactacatgcttgcaatacagtaaaactgaattttgcaattttttttgtgttttatagaatagctgtccattgaaaggggaggactgagtttctgtaaactcctgtattttacagcaaattagtaaatgcaaaatatttgcagaaatttgttatacaaacttgaaatacagagatgaggaatgtggcttctgccaccatggtgctcagttttagcataacatgcagagtagaggtattataaaatatgtaatakatattacatatatatgttcagtgctgtaataaataaaaacacacagggtgctctgataacacaaaggagagcattcagtccagtctatagcactatgttagtttgggttaatccaggaaactacacataatatgtaaccactaggctctgacttgaatggttcatagtatttaggtgcagagggagcaaatgcaatttgcagatggaagaaaggaaagttctattaagagaaa

SEQ ID NO: 100992 - DNA, 605 bp, Homo sapiens
agaaagaaatgaagacccaaggaattatcagatggtgatgagtattctacaaaggattaaagtaaggggatttgatagacttcgtagatgctactttagatcaggtacttaaggaagaaatcaaatctaaatgaccaggaattaaccaygcaaagttagaagaaattgcaggcaggaataaaattggcaaaatttggatccatagagaagactatctttcctagaggatagtaagtaagaaggaaaaacattataaattgaaaaatagagaagactgtgatctgatattatacgtatttgtaagctaggtaaggagcttagattctattgcaaatatattcagaaaccactgacaatgaattgaaattggaattttcttccaattccagtaccacttatttaaatagccctcatcttcattctttgaaaatgtggaagttaatatatacttgaagattacaatcttaagtaatttgcaaatgagataatggatttgaaggtatttgtagtcatgtaaaaatttatatttatgtattcttgtgtaaaagtcatataattttttatacttattttatatatgagaaaaatctagctcttgattttta

SEQ ID NO: 100993 - DNA, 605 bp, Homo sapiens
agaaagaaatgaagacccaaggaattatcagatggtgatgagtattctacaaaggattaaagtaaggggatttgatagacttcgtagatgctactttagatcaggtacttaaggaagaaatcaaatctaaatgaccaggaattaaccatgcaaagttagaagaaattgcaggcaggaataaaattggcaaaatttggatccatagagaagactatctttcctagaggatagtaagtaagaaggaaaaacaytataaattgaaaaatagagaagactgtgatctgatattatacgtatttgtaagctaggtaaggagcttagattctattgcaaatatattcagaaaccactgacaatgaattgaaattggaattttcttccaattccagtaccacttatttaaatagccctcatcttcattctttgaaaatgtggaagttaatatatacttgaagattacaatcttaagtaatttgcaaatgagataatggatttgaaggtatttgtagtcatgtaaaaatttatatttatgtattcttgtgtaaaagtcatataattttttatacttattttatatatgagaaaaatctagctcttgattttta

SEQ ID NO: 100994 - DNA, 554 bp, Homo sapiens
aacctcaaactcctaggctcaagcaaccctcctgcttcagtctcccaaagtgctgggattacatgcatgagccaccactcccagtctggacttccatttctgactgagattgcatagagactgcacttcccacagcctctggaagcctgcgctctattcctgctgtacaccttacccaccccagctggccaaatccctctgtcacaaatatccccaacctcccatcttcactagagctctctgctaccattcccatggcagctttgtacctgcccctcaccactacctgagcccttttctaggaactactcagcagataggaaatagggctcctctgtggtggaagcaggaaggtgtgcagctagcaatctgaaattccgggtgcccttgtcctaagaaatactgagcttaaataccatgtgctatttaagcccctcagtactattartgggaaaaactcaacttcaggatatactggaagagacatctgtggtgttgcagggacacccaacaacaatgtagataactgtttagatgttctgatgtctgtagca

SEQ ID NO: 100995 - DNA, 590 bp, Homo sapiens
aaaactatttagatttgatgctgaggtaaggcagtggaaagaaaggggcttggggaacttaaaaattctcaaaaaccgaggtcaatggcaaaccaagaatgctgatgcgaagagaacaagtactaaaagtgtgtgctaatcattggataacgactacaatgaacctgaagccyctctctggatcagatagagcatggatgtggtcagccagtgatttctctgatggtgatgccaaactagagcggttggcagcaaaatttaaaacaccagagctggctgaagaattcaagcagaaatttgaggaatgccagcggcttctgttagacataccacttcaaactccccataaacttgtagatactggcagagctgccaagttaatacagagagctgaagaaatgaagagtggactgaaagatttcaaaacatttttgacaaatgatcaaacaaaagtcactgaggaagaaaataagggttcaggtacaggtgcggccggtgcctcagacacaacaataaaacccaatcctgaaaacactgggcccacattagaatgggataactgtgatttaagggaagatgctttggatgat

SEQ ID NO: 100996 - DNA, 590 bp, Homo sapiens
aaaactatttagatttgatgctgaggtaaggcagtggaaagaaaggggcttggggaacttaaaaattctcaaaaaccgaggtcaatggcaaaccaagaatgctgatgcgaagagaacaagtactaaaagtgtgtgctaatcattggataacgactacaatgaacctgaagcctctstctggatcagatagagcatggatgtggtcagccagtgatttctctgatggtgatgccaaactagagcggttggcagcaaaatttaaaacaccagagctggctgaagaattcaagcagaaatttgaggaatgccagcggcttctgttagacataccacttcaaactccccataaacttgtagatactggcagagctgccaagttaatacagagagctgaagaaatgaagagtggactgaaagatttcaaaacatttttgacaaatgatcaaacaaaagtcactgaggaagaaaataagggttcaggtacaggtgcggccggtgcctcagacacaacaataaaacccaatcctgaaaacactgggcccacattagaatgggataactgtgatttaagggaagatgctttggatgat

SEQ ID NO: 100997 - DNA, 590 bp, Homo sapiens
aaaactatttagatttgatgctgaggtaaggcagtggaaagaaaggggcttggggaacttaaaaattctcaaaaaccgaggtcaatggcaaaccaagaatgctgatgcgaagagaacaagtactaaaagtgtgtgctaatcattggataacgactacaatgaacctgaagcctctctctggatcagatagagcatggatgtggtcagccagtgatttctctgatggtgatgccaaactagagcggttrgcagcaaaatttaaaacaccagagctggctgaagaattcaagcagaaatttgaggaatgccagcggcttctgttagacataccacttcaaactccccataaacttgtagatactggcagagctgccaagttaatacagagagctgaagaaatgaagagtggactgaaagatttcaaaacatttttgacaaatgatcaaacaaaagtcactgaggaagaaaataagggttcaggtacaggtgcggccggtgcctcagacacaacaataaaacccaatcctgaaaacactgggcccacattagaatgggataactgtgatttaagggaagatgctttggatgat

SEQ ID NO: 100998 - DNA, 604 bp, Homo sapiens
tgatgcagggctgaaaacaggaacagtaagaccccaagagatgccacatcatcrctatcttgcacagtaagatagagatgtaattgtaattgtccaaaacttaacatttgtggcctactttttcattatgcagttctaaatttctctcttttttttttaaattcaaacggagtctcgctctgtcacccatcttgcacagtcaaatgaatctccctccccctaaaatcctccaaaaaagctgctgttctcaacaaacccatctgatcagctccaaatctgtggagtcccaacaagggtgaaggccgcgattatacaggacaatgaggaaaagtctagatactgaaccatgagttccccaatcttcttcccctggaacataagggtaaggaaatctctcaagaggcagaacaaacaaaagaggagaataagagaaaaattagagaaactccagctttcaggtaaacatcattaaaaaaaagggtaagaaatggtcaaagaaataatacaagaaatgctacagaactgaaagaaatgagtttcccaattgaaaggacacttccagaaaacctttgttaccaagaacaagaatctcatcagactccta

SEQ ID NO: 100999 - DNA, 604 bp, Homo sapiens
tgatgcagggctgaaaacaggaacagtaagaccccaagagatgccacatcatcactatcttgcacagtaagatagagatgtaattgtaattgtccaaaacttaacatttgtggcctactttttcattatgcagttctaaatttctctcttttttttttaaattcaaacggagtctcgctctgtcacccatcttgcacagtcaaatgaatctccctccccctaaaatcctccaaaaaagctgctgttctcaacaaacccatctgatcagctccaaatctgtggagtcccaacaagggtgaaggccgygattatacaggacaatgaggaaaagtctagatactgaaccatgagttccccaatcttcttcccctggaacataagggtaaggaaatctctcaagaggcagaacaaacaaaagaggagaataagagaaaaattagagaaactccagctttcaggtaaacatcattaaaaaaaagggtaagaaatggtcaaagaaataatacaagaaatgctacagaactgaaagaaatgagtttcccaattgaaaggacacttccagaaaacctttgttaccaagaacaagaatctcatcagactccta

SEQ ID NO: 101000 - DNA, 616 bp, Homo sapiens
attctggtttctaactcagttatgagaccttgggcaaagtcattaaatttctctgaacttcagatttttgggagtcaataaaccaatacatgtcaaagggcctggtaaactttacagtttagaccaggtgtggtgtctcacccctgcaatctcagcactttgggaggccaaggcgggtggatcacatgaggccaggagtttgagaccagtctgaacaacrtggtgaaatcccatctctattaaaagtacaaaaattatctgggcgggatggcatgcacctggaagtcccagctacttgtggggctgaggtgggaggatggcttgagcctgggaggcagaggttgctgtgagccaagatcgtgccactgcactccaacctgtgtgacagagtgagaccctgtctcagaaaaaataacactttacagtttatcagcaaacaggaaagtcttgctaggcaatgtaattgattagttccgtgccctggattctgggctcttaactgtatgagcactgtaggtgtgagcagcaacaattaagaagctgcagaggtaaaggtataagggcagtgattgaggatgtctaccaagcagatttcagcaagtgtgtttcaagaagt

SEQ ID NO: 101001 - DNA, 485 bp, Homo sapiens
ccgaattcagttattttcagtaaattgtatatatcatgacattccaccattaaatacttcagtatgcatctctataaaataacattttcccactaataaaaacattatcatagctaacaaatcactaactagcccagtaaacctaaatgacttatttaaatgttatattttctttttttttttgagatagtctcgctctgtcactaggtttggagtgcagtggtgcaatctcagctcactgcaatctccgcctcccaggttcaagcgattcccctgcctcagcctcccgagtagctgagactgcaggcacgcaccaccatgcccggctaattttttttattttactagaggcatggtttcaccatgttggccaggatggtctraatctcctgacctcgtgatctgcctgcctcagcctcccaaagtgttgggattacaggcatgagccaccacgcctggccaaatgttatattttcataaattta

SEQ ID NO: 101002 - DNA, 550 bp, Homo sapiens
ctatctgcctgcattgttgtctccattaatcaacccctctttattcactcccccgctctaccattctcagcctctggtaaccaccaaaatatcctctaccttcatgagatccactttcttagctctcccgtattagtgagaacatacgatagttgtctttatgtkatttcatttaacataatgacctccagttccatccatgttgctgcaagtgacaagattttattcttttcctggctgaatagtactccataatgtatatataccatattttctttatctattcatccagtaatgggtactttaggttgattccaaatattggctattgtgaatttttggctacaataaacctgagaataaaaatatatcttcaaaatataaatttcctttctttggcatgtatatccagtagtgggcttgctgaatcatatggaagttctgtttttagctttttgaggagtttgtatcctgttttccatagtggttgtactaatttacattgccaccaacagtatatgagttctccttttctctccattcttgccag

SEQ ID NO: 101003 - DNA, 575 bp, Homo sapiens
cttcactaagctagaagaaacgattgcaagttaagagaagaaaattcaattcaacagtgttaacaggatggtttgtaatctgttcaaatacaygtagccatgcacacctctttatcgccttcccaattaaaatgagaacactgcactcaagtcctagcacactcaaaaacattctttgtttttgcttctttatttttgttttgctttgaaagacatccccaattttatttttcaccctagatcctacccattcaccaacatctactacaaatactattttcttcctcactccacttgccaaaattaatttcttccttctctgcttctaaggaactgtgtttcaataacattacttatcataactcaacttgtatcatagccttttttataattttataattttataattctgtcactaacaatatgcgacttgaaatgagggcaaaaatcaagtggatccttgtctccatttgcatcacgctctgcagtgcattggccagctataaacattgaaggacacgcccaatgagaaaaagtcattagattataatgaattagatcaaacatagataact

SEQ ID NO: 101004 - DNA, 365 bp, Homo sapiens
tatcctaccctcaagttctagattttatctgtccaagaagacccatgagtgcgactcacgatctttctccagctactcacaacactgtatcacaaatgaaaagcaagataagaaatgtgtttatataataaagtcttaactaagttgaatgtttggaaaataatgttgtacatattgattaactttgtttaactgtggttaatcagagccctttttaatgtttggttttgtggaaaattactgtattaaggcaggaagaatagacaaaattgctttctaaggacattgcaragcctcagattcaatcagtcactcatcaccatttgtggagtgtgtgcttcagcacccaatgctgtgtgccagcc

SEQ ID NO: 101005 - DNA, 548 bp, Homo sapiens
aacactagagttcttattatgtcttacaaggcccatcatgatctgaaggcagcggtggttgctggtggaggatgtgagctttggaactggagctctttgattcaaagctctgccgcttactcactggataagaccatgatcaagttatttcatctgaaaaattgaggtaataataatatctccctcttagggtggttatgaatattttatgagatagtacwttttaaaataggtagattccagaagaatatcagctattaggattatgattacctctccggtttcttctcttggttggatgtcctagtgccaaccataccagactacttcagaccatagtaacatcacggttttccatccttgaagcttcaaatgttcagttttctcaatatagtttctacccttttcctacatctttcccaccttcatctagctaactcctactgagactggagagctcagcttttacgtcaccattccaggaaagccaacctagccatggttgtatgtactttgccattaaaacactgatgtccacgtacatgttt

SEQ ID NO: 101006 - DNA, 601 bp, Homo sapiens
cggagtggcaaaattggcactgactcttagaaataacaccctggtggtaatgtgaggcatagatcaaaagaggataaacttggcccggttaggacaacggtaattaatcagaccagaaattatggttgcctgaacaaaagccatgtcagtggtgatgaggagaaaaggacgggtttgagaaattgttaggaagtttgcttgtaattgattagatttggaggccaagaaagaagcctgctttgatagtgatctatataataatattgatttctgacttgtaaaataaagcatatacagaaccttgcataacttcaatttgcttttataacaataaaagtaattgttaaagattattaactttgtctatcaagtgrtgcatgtaaatgaataaagtacatttttggattgtgtatgtaatacagacaagcttaaacactgttttttgttgtttcacttttgctaataaataagttgagaaagctggtctaatttgacagtctttatatttaaaggatagctttcacttccctatgggaatgagaaacagcacttatagaaaattccatacaaagctttgaggtctaacatgccacgatttgat

SEQ ID NO: 101007 - DNA, 560 bp, Homo sapiens
tagaatagcagtccccaacctttttggcacaagggactagtttcatgaagataatttttccacagactgggtgggggatgaggcggggatggttttgggatgactcaagcatattacatttcttgtccactttatttctattattattacattgtaatatataatgaaataattatayaacccatcataatgtagaatcagtgggagctcagcaactagatgatcccatctgggagtgatgggagacagtgacagataatcaggcattagattctcataagaagtgtgcaacctagatccctcacatgcacaattcacaatagggttcatgctcctatgagaacctaatgctgacattgacctgacaggaggcagagcttaggcggtaatgcaagcaatggagagcagctataaatacagatgaagcttgctcacctactactcacctcctgctgtgcagcccagttcctaacaggccacagactagtattggtccatggctcatgggttggagacccctggtctcgatcatcgaccattggcaatcaactcaaccttca

SEQ ID NO: 101008 - DNA, 605 bp, Homo sapiens
ttataccttgttattttctttaatcagttcctctgctgatgggcatttaggctgtatgcagacttcatttaatttttttaaaccacacacagcagtcctgtgacaatgagtaaggaggattttacatgcatgtgtctgtaaactgttaggataaattctcccacctcagcatttgatttctgggacaaagtgtgtattcatttaaaatgttagtagatcttaagaaactaccctcctaaaggtcacaccggtttctcatgctcacaaatagcctatgaaagtcactatttccctgcgtcctcactcacactgcattttttatcttggccaaactgagaggtaaaacaacaaaacaaacgctgtcactttggaatgagcctctgtaattaagtgagactgagcatgttttcttacttccataagaggttgtattacttttcggggaagtgtcggttgatgcttttgtccatttcctgtcagcaccccacccccgtgaggaaacgtgccccagaagtgaaaggacrtgtcctcatcacatgacgagtgaggggcagagcagaggccagagcaacatccgtgctgtggagtcagccctgggtttgact

SEQ ID NO: 101009 - DNA, 520 bp, Homo sapiens
acaaacatagagataaaattacattgagtcttaaaaaataggttatacataggtagaaaaaraaaagaaaggataaaacaggcaagtgcagtagcaagaacacaggcaaaagacagagatgtccgtggtgtattcagcagtgagtaaacagcctggactagcataaggtgcacataatatcaaatttcaaaaggccttgaatactagacaagcagcattcacttttatcctaaggctagtacagaattattaaatattgggataaagtgctaagaatataaatggtttaagtttaatttttaaaaattactgctgtaaacttaggtactacctctatctagattgccattcttcactttcttctgtcaacatttgcatgaattgcagcaaggtgacattggtagtgcagagattgatttaaaaagcaattgccctagtctaggtatgaggtattgaagaacaaattaacaagaattgatacagataatttggagggaaagaagactctctaggaatgaga

SEQ ID NO: 101010 - DNA, 573 bp, Homo sapiens
agctcatttctcaatttccagctcaaagttcctcctgcctcttggcaatattctctgatcccaaagaggaagctcgttgttcaatattttatgtgcctatagcaatgcgctcatagctgtgttatagtacttagatattaaattgaaagaaaggaaattgattaaaagaaagaacaaataaatgagaaaatataagaaaaaataggaagacagaaataccacaaaaagtgaagtgcagataaagaatttaatataacccagtaataaccaataattaagagccgggacaaaatgtcttatatgtgtgtgtatttttctagaaagagaatctacagcctgtcagattctcaaaggggtctgagaaayaaagtttttagaaaaatacttgttgtacacaaaatgaaaaagagttaacataaaacattttaaaagagagtgaaatactttcatgtatttctgttgagccttgttattcaatcacatttgtgtactgacaaagattaggaagagtgaatataaataaaaagcagtttttaactccagggagaataatagtagaattacccagtgagt

SEQ ID NO: 101011 - DNA, 584 bp, Homo sapiens
gactagcttatgtattcagggaactgcgttcggtagcagtattagagatgagactacccaagcagaaaaaagtcagggcatagtgcatcctatgatctctacgttctttatttagtggtttggacattgttgcatgaaaattagagaaatgtaagtggtttagattaggatgcatcatgatcagatttgcatattagaaagagtctacgggctgggtgaggtggctcacacttgtaatcccaagattttgggaggctgagtcaggcacatcacttgaggtcaggagttcgagaccagcatggccaacatggtgaaaccccttctctactaaaaatacaaaaattagccacacatcrtggcacacacctgtaatcccagctacttaggaggctgaaaccagagaattgtttgaatccaggaggcagaggtttcagtgagccaagattgcaccactgcactccagcctagatgacagagcaagactccatctaaaaaaataaataaataaataaaaatatccttctggctacagtaccagggataatgcaactggggttagaccagaggtggggaaactagtgagg

SEQ ID NO: 101012 - DNA, 317 bp, Homo sapiens
ccctcccaccccaacctacacatctacaagtagtatctggcctgtggacagccagcatgaaagcataagaatcattaaattaatgaagaacagagttcaggaacatattaatttttaccactgaggaagaatggggattagttaaatccscaagctttgagtgaccatgtaatgtagtgttcaaggtggaacattactgataatgaaaggaaatgctatgaataattacatgtagactagactcataccatgcaactgggatatataatcatgctatctacattgcatcttaatagagataaacttatttcaacctg

SEQ ID NO: 101013 - DNA, 603 bp, Homo sapiens
ttccgtgtctgtaacactcttcaacagttataaacctggctccccttattcagaatagagtcacttaaatcctcaatcttagaacacacagaaagacatttttttttttttttttttgagatggagtcttgctctgtcaccagkctggagtgcagtggcgccatctcggctcactgcaacccccacctcccgggttcaagcgattctcctgcctcagcctcccaagtagctgggattacaggcatgcaccaccatgtctggctaatttttgtatttttgtattttcaccatgttgtccaggctggtctcaaactcctgacctcaagtgatcctcccaccttggcttctcaaagtgctaggattacaggtgtgagccactgtgcctggccagaaagtcattgcagaattgctaaccatatcactgtggaaagtgaagatatgaactagaattcaatgtttgtttacagttcatttttgactttagcttgagggtatatggtcaaaattctgaattcaaaagttactccagtaagtgttcaacccccttcagtgtatttatataatttacttgaaaataggttagtttatttctgcttactttca

SEQ ID NO: 101014 - DNA, 603 bp, Homo sapiens
ttccgtgtctgtaacactcttcaacagttataaacctggctccccttattcagaatagagtcacttaaatcctcaatcttagaacacacagaaagacatttttttttttttttttttgagatggagtcttgctctgtcaccaggctggagtgcagtggcgccatctcggctcactgcaacccccacctcccgggttcaagcgattctcctgcctcagcctcccaagtagctgggattacaggcatgcaccaccatgtctggytaatttttgtatttttgtattttcaccatgttgtccaggctggtctcaaactcctgacctcaagtgatcctcccaccttggcttctcaaagtgctaggattacaggtgtgagccactgtgcctggccagaaagtcattgcagaattgctaaccatatcactgtggaaagtgaagatatgaactagaattcaatgtttgtttacagttcatttttgactttagcttgagggtatatggtcaaaattctgaattcaaaagttactccagtaagtgttcaacccccttcagtgtatttatataatttacttgaaaataggttagtttatttctgcttactttca

SEQ ID NO: 101015 - DNA, 589 bp, Homo sapiens
gtccttcctcttcccacacccccagccttagaaaaccactgatctgctttcaacactgtagactagatttgccttttctagagtttcatatatgtggactcatgccgtatgtactcttttgtgtctgacttttatcaatcagagtaacattcttgagattcatcaatgtagttgggcatatcagtcattctttccttttaactgctgattagtatttcattggatggaataccacaatttgtttatcctttcatgttcatggacatttgggctgtttctaattttaaagctgcggaaaacatacacgtacaagacttgatgtatacatatttttatttcttttgggcaaaaatacttaggagtgaaattgccgggtcatattgcaatgatatgttttaattttataagaaaatgtcaaactgttttccaaggtgatcataccattttgcactcccattagccatatgtaagagtttcagttgttcaacatccttgtttacctcgtatytttaattttagctactcaagtcagaatgtagtggtattacattggtgttttagtatgcatttccctaatgaataatgattt

SEQ ID NO: 101016 - DNA, 620 bp, Homo sapiens
ataatataattagcatatggtcaagtaattccattgctaagtatatatctgagagaaatgaaatacacatctacgctcaaaaactcttatatgtgaggccaggcacagtggctcatgcctataatcccagcactttggaaggctgaggtgggcagatccttgatgtcaggagttcgagaccagtctggccaacatggtaaaaccctgtctctactaaaaatacaaaaattagccaggcgtggtggcacatacctgtaatctcagctactcaagaggctgaggcacaakaattgcttgaaccccagaggcagaggttgcagtgagctgatagtgccactgcactctagcctgggcaacagagcaagactccatctcaaaaaaaataacaaaaactcttatatgtgaacctctcagaagcattattcagaatagctgaaaaggagaaacagcccaaatgtccatcaagtgactaatgaataaacaaaatgtgatatatccatgcaataaaatattattcagccaaaaaaaatgaagtactaatacgtgttacaacatagataaactttgaaaacatagtaagtgaaagaatctagtcacaaaagactatgtattatatgatt

SEQ ID NO: 101017 - DNA, 620 bp, Homo sapiens
ataatataattagcatatggtcaagtaattccattgctaagtatatatctgagagaaatgaaatacacatctacgctcaaaaactcttatatgtgaggccaggcacagtggctcatgcctataatcccagcactttggaaggctgaggtgggcagatccttgatgtcaggagttcgagaccagtctggccaacatggtaaaaccctgtctctactaaaaatacaaaaattagccaggcgtggtggcacatacctgtaatctcagctactcaagaggctgaggcacaataattgcttgaaccccagaggcagaggttgcagtgagctgatagtgccactgcactctagcctgggcaacagagcaagactccatctcaaaaaaaataacaaaaactcttatatgtgaacctctcagaagcattattcagaatagctgaaaaggagaaacagcccaaatgtccatcaagtgaytaatgaataaacaaaatgtgatatatccatgcaataaaatattattcagccaaaaaaaatgaagtactaatacgtgttacaacatagataaactttgaaaacatagtaagtgaaagaatctagtcacaaaagactatgtattatatgatt

SEQ ID NO: 101018 - DNA, 423 bp, Homo sapiens
tagatcaatctaattgcctagctgtatcctctgacaggataaagaagcaatgataattcagtagcaattagcataagtagtaccattatcttggtttctaaatactattcaccaacaaaaatcaaccaagtcttcttccttgctggggcaggaaaagaacaagataagcctggaacaggtgttgttttttgtttttgtttgtttgtttgtttttggtttttttccatttgaaagtaagagagtgagcaaagaatgatggggacatgtcaaaaggacacacgagccagctccaaggggctcctactagccaaatacaggacaatgtgaccataaaaataaatggtagtaacagatrgaataagaatccatgagtccatactgataagaacaaatagatgagcaactatgtaaaatggaaagtta

SEQ ID NO: 101019 - DNA, 594 bp, Homo sapiens
catcttaaagtttaggcttattagaaaggactgaaatgcattatagggcagcagtaactgtaatggttggtttgccaaccagtgttgtggaattaaaaatgcattaaaatttatacaaaagaaagtaaatagcagtgaatctctattggctttgacacagttaaatgaactgttctttttctttgtgtggctaatttaaaaaaaracctataaaaatagaagaaacattcccttttggaacttgattcatgtgaaactctattattaataaaatgaaaagcttctttctttaagcatctaattcatgtattccttaacatgcacagacacaaccagaagaggagaagaagggatcttctctccgaagggatggaactcctattgattctttttataactaaggtttgatcaagcagagcagacagaattagaaggagaaacaaaaccccacgaggagcggaataaacagctatggaaactacttacaaattctaattatacacataaatattaactcccatcatgaatttcaagacactttttgaaactctgtttatgaagattttaaactcctagtctgcccagccatgtatt

SEQ ID NO: 101020 - DNA, 594 bp, Homo sapiens
catcttaaagtttaggcttattagaaaggactgaaatgcattatagggcagcagtaactgtaatggttggtttgccaaccagtgttgtggaattaaaaatgcattaaaatttatacaaaagaaagtaaatagcagtgaatctctattggctttgacacagttaaatgaactgttctttttctttgtgtggctaatttaaaaaaagacctataaaaatagaagaaacattcccttttggaacttgattcatgtgaaactctattattaataaaatgaaaagcttctttctttaagcatctaattcatgtattccttaacatgcacagacacaaccagaagaggagaagaagggatcttctctccgaagggatggaactcctattgattctttttataactaaggtttgatcaagcagagcagacagaattagaaggagaaacaaaaccccacgaggagcggaataaacagctatggaaactacttacaaattctaattatayacataaatattaactcccatcatgaatttcaagacactttttgaaactctgtttatgaagattttaaactcctagtctgcccagccatgtatt

SEQ ID NO: 101021 - DNA, 597 bp, Homo sapiens
tgattttaataaaatataatttaaatataatatccaattaagcaggatgtttaatcattcagaaatattggcccaaatttttamctctgatacataatcttataatgtgaaaaagtaaacatgaatttataggatgtcgcagaatttaaggatagttttacagtcaggaagatgagattttgggtcctaaaactctccctttacatactagctacatgcaaagcccaggttctcttatcagaaaaaaaatggggttatcagttggctgtatctcacaaggctaaaaggagttaatgagatcctgtgtgcaaagcacttagcacagagcctatgctcagaggaccctcagtaactatagacattattattgttctcaactaggaataaacttcaacaatgccaagtagcaactcatggatttgcttatgcattcaaaacctatttatgaaggaaagacaaaccatcagactgtgatagatgctgtggaagacacagccatgaatgagataaggccccgtcacaaataattactatcatacaaagtaagaactggtatatgccaaaagaaaaggaagaaatagggaaatttacctgtga

SEQ ID NO: 101022 - DNA, 597 bp, Homo sapiens
ttctccctcaaaacaaggtcattcatggccgttgtcagtgaaaacaaattatgtttccttcattctgcagcccagagacattgtgttctgctcaactcaatccagctcagtaagstctttatgtgaacatcttccctgcgaaggtcacctgcctaaatgctagggctgtggggtgagggaaggagacacaagcaaaaacaaggggagcccttgtcttcagattgactggaatataaggatgaggaagggaattaggttagaaagaaagatgtaggaatctttagaagagtctctatgctaggacttgctctgcaggtagtgaaaagtgagggtgtgataggattagagttggttcttaggaagatcattccaggagcagtgggaggacaggcaagaagagtggagtcaggaaggtgagagagcccacagactggcccatgcttccaggggaggagagcaaggctggggaaggacagcagtaagtgcagccaaggagccccctcttattggccagcaggcttctcttaagtgtggcaggcagggaacaggctaactcaccctgtcttcatgcctgaaagaagaatgcaccctagggca

SEQ ID NO: 101023 - DNA, 597 bp, Homo sapiens
ttctccctcaaaacaaggtcattcatggccgttgtcagtgaaaacaaattatgtttccttcattctgcagcccagagacattgtgttctgctcaactcaatccagctcagtaaggtctttatgtgaacatcttccctgcgaaggtcacctgcctaaatgctagggctgtggggtgagggaaggagacacaagcaaaaacaaggggagcccttgtcttcagattgactggaatataaggatgaggaagggaattaggttagaaagaaagatgtaggaatctttagaagagtctctatgctaggacttgctctgcaggtagtgaaaagtgagggtgtgataggattagagttggttcttaggaagatcattccaggagcagtgggaggacaggcaagaagagtggagtcaggaaggtgasagagcccacagactggcccatgcttccaggggaggagagcaaggctggggaaggacagcagtaagtgcagccaaggagccccctcttattggccagcaggcttctcttaagtgtggcaggcagggaacaggctaactcaccctgtcttcatgcctgaaagaagaatgcaccctagggca

SEQ ID NO: 101024 - DNA, 597 bp, Homo sapiens
ttctccctcaaaacaaggtcattcatggccgttgtcagtgaaaacaaattatgtttccttcattctgcagcccagagacattgtgttctgctcaactcaatccagctcagtaaggtctttatgtgaacatcttccctgcgaaggtcacctgcctaaatgctagggctgtggggtgagggaaggagacacaagcaaaaacaaggggagcccttgtcttcagattgactggaatataaggatgaggaagggaattaggttagaaagaaagatgtaggaatctttagaagagtctctatgctaggacttgctctgcaggtagtgaaaagtgagggtgtgataggattagagttggttcttaggaagatcattccaggagcagtgggaggacaggcaagaagagtggagtcaggaaggtgagagagcccasagactggcccatgcttccaggggaggagagcaaggctggggaaggacagcagtaagtgcagccaaggagccccctcttattggccagcaggcttctcttaagtgtggcaggcagggaacaggctaactcaccctgtcttcatgcctgaaagaagaatgcaccctagggca

SEQ ID NO: 101025 - DNA, 597 bp, Homo sapiens
ttctccctcaaaacaaggtcattcatggccgttgtcagtgaaaacaaattatgtttccttcattctgcagcccagagacattgtgttctgctcaactcaatccagctcagtaaggtctttatgtgaacatcttccctgcgaaggtcacctgcctaaatgctagggctgtggggtgagggaaggagacacaagcaaaaacaaggggagcccttgtcttcagattgactggaatataaggatgaggaagggaattaggttagaaagaaagatgtaggaatctttagaagagtctctatgctaggacttgctctgcaggtagtgaaaagtgagggtgtgataggattagagttggttcttaggaagatcattccaggagcagtgggaggacaggcaagaagagtggagtcaggaaggtgagagagcccacagactggcccatgcttccaggggaggagagcraggctggggaaggacagcagtaagtgcagccaaggagccccctcttattggccagcaggcttctcttaagtgtggcaggcagggaacaggctaactcaccctgtcttcatgcctgaaagaagaatgcaccctagggca

SEQ ID NO: 101026 - DNA, 533 bp, Homo sapiens
tgtttgtagagctagcagccttgagagaaaaatatagcagcaaattttggtcatttatactctagtatgataaagatattgtgtctctctgtggcaaagaccaggcaagtttattacctttcacaaaactttcaggttccctaatcatgattctctctcataatgtaatctattatgtgtgtaggtgtctgctgaatatacttttattgccctacaggaattgagacttagactgtgggtggaaacatgatgawattccagctattactattactataagtaataagctcttttgtctctgacccaggagtttcatgacttctgccaatattcagaacactgtgtctggttaactttttagcttgcatgtggggtaaaatcttgaacttcacagttcttgacaaatcaccaccaccacaacaataatggtaaaaataataataacaatatttatgaacagaaaagaaagcacactatgcctgccatctttcaaggcattttaagtatattaatttatctttacaataaaacta

SEQ ID NO: 101027 - DNA, 533 bp, Homo sapiens
tgtttgtagagctagcagccttgagagaaaaatatagcagcaaattttggtcatttatactctagtatgataaagatattgtgtctctctgtggcaaagaccaggcaagtttattacctttcacaaaactttcaggttccctaatcatgattctctctcataatgtaatctattatgtgtgtaggtgtctgctgaatatacttttattgccctacaggaattgagacttagactgtgggtggaaacatgatgatattccagctattactattactrtaagtaataagctcttttgtctctgacccaggagtttcatgacttctgccaatattcagaacactgtgtctggttaactttttagcttgcatgtggggtaaaatcttgaacttcacagttcttgacaaatcaccaccaccacaacaataatggtaaaaataataataacaatatttatgaacagaaaagaaagcacactatgcctgccatctttcaaggcattttaagtatattaatttatctttacaataaaacta

SEQ ID NO: 101028 - DNA, 533 bp, Homo sapiens
tgtttgtagagctagcagccttgagagaaaaatatagcagcaaattttggtcatttatactctagtatgataaagatattgtgtctctctgtggcaaagaccaggcaagtttattacctttcacaaaactttcaggttccctaatcatgattctctctcataatgtaatctattatgtgtgtaggtgtctgctgaatatacttttattgccctacaggaattgagacttagactgtgggtggaaacatgatgatattccagctattactattactataagtaataagctcttttgtctctgacccaggagtttcatgacttctgccaatattcagaacactgtgtctggttaactttttagcttgcatgtggggtaaaatcttgaacttcacagttcttgacaartcaccaccaccacaacaataatggtaaaaataataataacaatatttatgaacagaaaagaaagcacactatgcctgccatctttcaaggcattttaagtatattaatttatctttacaataaaacta

SEQ ID NO: 101029 - DNA, 634 bp, Homo sapiens
caccctgctaattttgatatttttgggtaaacatggggtttcactatgttgctcaagctaatttcaaactcctgggattaagcagtcctcccacctcagcctcccaaattgctgcaattacatttgtgagccaccacaccaggcctgtctcattttaaagaaaaaataaataataccagttccatagaatccaagagtaccaacattctaatttttttaggttgatttatatatacctactatgtgtgcagattatacgtattgtatgtatgtagatagcataacaaggcaatcactttgctcaataccaatcaragggttttttgttgttgttgttgtttttaaatgtgatacactgaccatgacctaattctgtaagaagtctttatctgtgaaactatattcactttccttatggaagtccagaattctgccttaatcctcctagaaaatgtttcttcttaatacaattaattttatttaaataattgtttattacactgtagttaggtagacatgttttgaaaatgacgtaaaatacatagggctaatccaaacactgaagttggaaatggaaaccatagatccaaacatctttaactatccatgtatttgagtagactaaatagacatg

SEQ ID NO: 101030 - DNA, 608 bp, Homo sapiens
ttggaaaacattttggcagtttcttaaaagctaaatatacagctaccatatgatccagacattccactactggatatttttgcaagagaatgaaagcatatgtctacacaaagacttatacatgaatattcatagcagctaggtttccaatagccataaaaggatgaaaaaaatcaatcatctatcaagagtttaatagataaataaattgttggttattcacaaaatgctactcaccagtaaaaaggaatgagccattgatgatagtacagcataactgaatctcataataattatgtaaagtaaaagaagccaggcataagagtgtacacactgtatgagtctcttaatataaaatttgaaaatgtaaaatagtgtataatgacagataakcagatcagaatttgcttgggaatggagggaataacaggaaaggaataacaaggggtacaaggaaacctttgggggtgctgggtatgtccactattctgattgtagttgatggtttcacatatacttctacatggcaaaagttatgaaatcatacactttaactgtgtacagttcattgtatgtcaattgtagataataaagaatattgtgacaat

SEQ ID NO: 101031 - DNA, 607 bp, Homo sapiens
tgtatctagaagttaaagagaatagacaccggtgaatagtgatgcttaccaaaatatggcttcttgccaacactatcactggtatacagtggctgactacatcatccctaagagtcctggaactcagaaatcaaatgtggctaaaataaaaccttggtccartgctttttgtattgttttgaaagcagtgaagcatggaggacagggcttaaacagaaagtcaagaaatcttttagaataaaaatagactctctgaattgctgtgtattttagaatatatcttttatttctgagcccaacttttctcatatgaataatgaaaggatggaattgactatccaacaatatattccaacaatcagttatttctgataattaaaagtacattaatagcaatagaaatacaacatcgtctagcatatgtagagtaagctgctgaggaaagctcttcatttccactccacatggagagtattggttctaacactgaattctggggatcatcaatttctctcaaggtattcatgatattttgtgaataaaggactctttgggatgcctaggggagcatgcccagcatgcctaagacacatgcacatgatcctcg

SEQ ID NO: 101032 - DNA, 622 bp, Homo sapiens
atgaaatttaataaatgatttttgatctatctggggaggcattctttaacaatgcatttatttaatgaagtgtgaatatgttcttaacaaatcagactataatcagcagatttaaaattaattggatcttgttagatggtatatatccttctttagcatctgattataaagcaaggtataaatgctatataattcaatgcatagtaaaatctctacatgaaacaaagtttcaaaatatggttctagcttcaggagaagattgtattagcctttgttatagagggctagtatgcartgacttcttattgaaataggtgtatttcatttaaaatattgagcaattttccagagttagttaaaacagcacgcaatatctggactgaaaagaagctgtggattcctccaaataaagttaaagttgtttaaggtttatcacatgtgaatttgtcatgatactgtcacatataatagcaacaataataacccatacccaaataatattttgtttcttaaaatgatctttcctgctatttaccttcctactttcattaagatatgagaatactgaagggaaatgtgattcaaattcatttacatttttaactcaatgatacatgctaat

SEQ ID NO: 101033 - DNA, 621 bp, Homo sapiens
gtctcaaaattttattagagtccttttttgctcagtgatttaatattagttcgctgtccatggtcttgatccacatgaaaggacatgctagtgttaccttttgaaaaatgaaagtcacaatgcttctgcacaaattagactccctagcatttaaaatgatagcaaaagggggaaatgctataggctttaggttctcttcctcatcccagttgttctcatttttctatatttgccaccaaattgaatgtacaggaagcagatagtttgcatttcattatttttgagctcacaaaaccaccactccatttaaagatccaaataattgtagtaaacaggaaataatatctttcaacctgcaatacttttttggcggttttcaaaagagacatagacattgttgtacaggaatccttgtccacttttacatatggtttaacaagtgcagaaaaattacaaaaatgacaaattcaggggcaaaagctaaacaaccttttcaatcatctctctctccatatttacatcactatatagaggcatatagatagcrcacacacacacacacacacacacgctaagagcattaaactaaatccatctctaacaccttacactttttttgta

SEQ ID NO: 101034 - DNA, 653 bp, Homo sapiens
ttgtgaaagtgaggccaaacagactccattgtaaccctcagtgtactggggtgacgtttttcattgggagcccagatttttttttttaatttaccttcttggggattgcgtacacttctgtagaagatacttttcttctcscctctgccccagaagagaaatgccctttgaattttgtattgtattttctagactgggttgttttataatgtgaataatgtcgtcagtaaatagttatccatcttttgaaagatctaccttttaatgttttctcagattcttctttatagaaaataacgttaacagtgaaagaattccatacatgagtcttcacatttttgtcagtgaaaacaaaattatttttttaatttttaaaaattatgcaatattatttattttattttaatttccttattgttacatattatatgtatgtattttgggggcacatgttatagtttgatacattcatataatcacatcaggataattaggatatttgagtcttcacatatttgttaactagatttcagtttacacttgataataaaccttgttacaatgtctttgaggtaacatttgccgttcatgtaagtagatcattgtttatagtcacatcatttataagtctaaccacttcaagactaaagacc

SEQ ID NO: 101035 - DNA, 653 bp, Homo sapiens
ttgtgaaagtgaggccaaacagactccattgtaaccctcagtgtactggggtgacgtttttcattgggagcccagatttttttttttaatttaccttcttggggattgcgtacacttctgtagaagatacttttcttctcccctctgccccagaagagaaatgccctttgaattttgtattgtattttctagactgggttgttttataatgtgaataatgtcgtcagtaaatagttatccatcttttgaaagatctaccttttaatgttttctcagattcttctttatagaaaataacgttaacagtgaaagaattccatacatgagtcttcacatttttgtcagtgaaaacaaaattatttttttaatttttaaaaattatgcaatattatttattttattttaatttccttattgttacatattatatgtatgtattttgggggcacatgttatagtttgatacattcatataatcacatcaggataattaggatatttgagtcttcacatatttgttaactagatttcagtttacacttgataataaaccktgttacaatgtctttgaggtaacatttgccgttcatgtaagtagatcattgtttatagtcacatcatttataagtctaaccacttcaagactaaagacc

SEQ ID NO: 101036 - DNA, 544 bp, Homo sapiens
ggccgggagaagaaaaaaaatcacagtaagaggcagtgagcagaaccagatgatgaggtgggttcctgagtctcagcccacggggccacctgtgttgtggaaaagttaaaaatgtacctggaattgatctcaggtgctgtcaggcgaggagcctggacccagacacaggactggggaagagcccttacctcagctggtgatggagtcaggggacggggtccttctgaggtttctgcacagcccctcctccacatctaccttctttcgcctgctggtgagaggtgggagatgagtagtgaagctaagattgtcactgggaccagataatgacaatcttagcttcagatttctctaatcttggtcttatttgtgtttgtggccttgggcaaattatatcactaagttggatttcgcacctgtaaatggagaaaattcctacctaaargctgttttgagggttaaatgagatagggagtttagccatgtacctagcacatagtaaatatcaaagagggagtatttataatgatgatgatatttgtca

SEQ ID NO: 101037 - DNA, 552 bp, Homo sapiens
ataagctattaaattcacattaacatataataattgtgtaaagaatagctaagcaattagttaatatmtaatgtaattcatagtaaattagatggcaagacttattaaatgtcaattagccatattagctactgacacctaagcaattcaacatgctaatgctaattaatttcttatttcttacaagcttaatgacttaacacaatgtatttacatatttagaggttcttaaagtcaccagacatccagatatgagtggctgtctctatggtggtttgggaaggagattagggaaaattgattagtgttttatttggggcctcttctcagcatcctttcttactgtattcctcttggagaattttatagggaggaagagtatgtaaagagtgtattgggaggtgatcccaggagcactatgagggaatggggagtaagtcagagaagggatggagcccataaagcatgccttaatgggcaggttgctgctgtgggcaaccaaagctctctctttatagggaccccctagagatgaggtgaaatgagaggcag

SEQ ID NO: 101038 - DNA, 460 bp, Homo sapiens
catgtatcccagaacttaaagtaaaatttaaaaaaagaattaaataggttttggatggaaggtattggcacctgtaggcattcatgaagtctttgtctttccctgtacgtgaccctagcctcctgatatatcaaagtgaggcttattttctcacctagaaaaacttataagaagggaagyagacctggttctaataaaatgtatggtatatggtgatagatgtaagctcagggaatggtgagattggcatatagtaggttctcagtaagcatttgctgaaggaataaatatttcgccatcaagccaggtatcccaaatcttgtaattaggcaatggattttgaagaaatctaaaagcagggtttaacatttatctggttaagttgatctaatggttttgttgttacagcccatcaaaatatttttagtcttcattctatcatacaatacattagctattg

SEQ ID NO: 101039 - DNA, 523 bp, Homo sapiens
catcaacaaaaaggaagacttctgtgacaaaatttgtrgggggtttctccctaccaccaaatgactaatcagttctgcagcagacacccacagggtgttctccaattcaattccagcactatctacctgaagttagtgtcagatcccacaggtttggggctcagtccccaaaatttcccctgctcctgacaccaatcacaagtccacacctcccaaacttctcactcactggcatcaaattggagttcccacaatctcctctttgggtttggttaattttactggagtgtctcacagcactcaggggaacactcatatttatcagtttattgtaaagaacattgcaaaaaatacagacgaagagatgcctaggatgaggcatatgagaaggggcacagagcttccatgcactctctgggtgtgctacttttcggaagcctccatgagtccacctatctgggagctctccaggaccctgttcttttgggtttttacgaagtctttattatgtaggtctgattga

SEQ ID NO: 101040 - DNA, 523 bp, Homo sapiens
catcaacaaaaaggaagacttctgtgacaaaatttgtggggggtttctccctaccaccaaatgactaatcagttctgcagcagacacccacagggtgttctccaattcaattccagcactatctacctgaagttagtgtcagatcccacaggtttggggctcagtccccaaaayttcccctgctcctgacaccaatcacaagtccacacctcccaaacttctcactcactggcatcaaattggagttcccacaatctcctctttgggtttggttaattttactggagtgtctcacagcactcaggggaacactcatatttatcagtttattgtaaagaacattgcaaaaaatacagacgaagagatgcctaggatgaggcatatgagaaggggcacagagcttccatgcactctctgggtgtgctacttttcggaagcctccatgagtccacctatctgggagctctccaggaccctgttcttttgggtttttacgaagtctttattatgtaggtctgattga

SEQ ID NO: 101041 - DNA, 613 bp, Homo sapiens
gcctgtatactgctgtccttactatgtaagtgcacactttcaaaatcttttctattgatgggaaccaagaacacatttgccagatattagctatattcccagctgggttgatctaaccctatatagatacaacacctgacacatcagctacatttgggactactatttggttaagtttaggtaatatatgattatctgtcataatcaatcagattttctcagggccaagatagatcagttgaaaataggcatgatgtgaattactcctacaccatataaatttttgatgttggtggtgacacttatgcaattccctcagttgcaacattgtttctgatatacwattttggccagagctgagggtaaggagtgtcaggggcttctacatgattctttttgcctaccttaaaagtcttacctgacaggccagggaatcaacatatgggttctgccagatgccaaaaatgaccacaggatggcttgatacactcagagggacttactgtggatgggcttggcccaagctccatttaccatctggctttcataaacctccactctaaccagaggatcatgatcgcattttgagttccctggtatcagagtcagctca

SEQ ID NO: 101042 - DNA, 554 bp, Homo sapiens
ggtggctctgcccatgtgatgatttctgtgcacaagatacacattttcttacataggtgttctatgtcacctgcccctcttggcactgatgtcgggaagcgacagcatggctaccttggccccctgcctaagtctatcccccaacccctaaatgaaggctctcccttcgtttagtggccacctagacagccccacagaaactcctcctcctctgttccttgctctttctgatccatgaccttctgggtcttctttggggccctttgagagcagaggaggattaagattcaagggagactgccctatcttcttcccaggctcwctattctacagttctttgtggccttggtccaagctgtttcaacaagccactctgcttcttacttcctatcacccctactcccacttcagaaatctccaggaaaaaagcaagcagaagacacagagcaagcgttcccaagagcctgctcgccatcctcaaatccagtcaaagcactgcaatgtctcattttccggggagtgagatgtaaatctctcttcttataggtaccccc

SEQ ID NO: 101043 - DNA, 554 bp, Homo sapiens
ggtggctctgcccatgtgatgatttctgtgcacaagatacacattttcttacataggtgttctatgtcacctgcccctcttggcactgatgtcgggaagcgacagcatggctaccttggccccctgcctaagtctatcccccaacccctaaatgaaggctctcccttcgtttagtggccacctagacagccccacagaaactcctcctcctctgttccttgctctttctgatccatgaccttctgggtcttctttggggccctttgagagcagaggaggattaagattcaagggagactgccctatcttcttcccaggctcactattctacagttctttgtggccttggtccaagctgtttcaacaagccactctgcttcttacttcctatcacccctactcccacttcagaaatctccaggaaaaaagcaagcagaagacacagagcaagcgttcccaagagcctgctcgccatcctcaaatccagtcaaagcactgcaatgtytcattttccggggagtgagatgtaaatctctcttcttataggtaccccc

SEQ ID NO: 101044 - DNA, 618 bp, Homo sapiens
ttccctacatttgtaaccctatttttattaagagatgtttccaaagccacaaagttttgaaatattacagagaaagaaaatgaactagaagaaagtttgtttgctcacaagaaagttatagaaagcttgttgtggtaggtaaataggcattaaaaaaaagcataagaaatgtggatctcattctctgatgcttagcaggaggcttgtggtatatttttttataatctaggcctaagaaaaaatgcaatagtacaatacatcactgatacaacagtctgatagattataaaatgtttagtgagtgtatttcacttagacgagcaggaacacctgcttctattattccttcactgataaaatggtaaatagtttatgtcagacatgcagctttacctaaagccacatagtttacatgtggggttggtcatttgaatggaggtacatggggtttgtattcaatttcttctttaaatgattcagtaaaataatagggttataaatggacagtgacaycattttaatctttattcattttatcttctcacccactctttccttcttttgattgcacctcccccagtattaactgcaggacataccttcatgaatgaactatta

SEQ ID NO: 101045 - DNA, 536 bp, Homo sapiens
gtaatcttataatatgccccttatagcatactacagtccatagtttgttcctcttattattgctgagaagtatttcattgaatggatgtaccatgttttgtttatttatttaccagttgttggacwtttggattgtttctgttttgggttattttgaataatactgctgtaaacattcatgtagaaatctttgtgtgaaaaatgtgtttctgttactcttgaatagatttctagtagtgaaattgctgagctgtgtggtaaacgcatgtttaatttttaaagaaaatgcaaaactttctaaagtcatcagatcagaccattttacattctcaccagcaatgtgtgagggttccaggttttttgtcttttattatagccattctatttcatgtgtactgttatctcattatggttttaatttgtattttctattagtttttctgttgctgtgtaacaaattaccacaaacatagcagcttaaaacaacattctttttattcacagtttccatgggttaggaatctgattataggtta

SEQ ID NO: 101046 - DNA, 567 bp, Homo sapiens
tttattctgcaaatcaaagttagcaaggtaaacaaaaatccccgtggatacgtatctgccatatacagacatcattatgaacatccttctgagaagttctcccttctgaccctgacatgkaagggtgaactttttggccctggcagatgatggatttcgtgcaatgtgcacaaggagaagcatatgtgcattaaaccgtttcaccagcataatttatagcaatggtcgatggctggttctaccttctagctcttctggatttctgattgggtgtttatcctcattttttttctgagcaagttgaggaggtcacgtaataagataaggagagtaatggcatgtcacactttagtccaaaggagactttgattctggagtccctttataaactctctctttttcagtttcttctaagttgccaatgagagtattatgacaacttctttggtttttaagagaagaattttcattctcaaggtaaaaatacattgttatcaccaaatataaaattttttactctgaactaaacctgaactatcaaatggatacatcaatgtaagcaattta

SEQ ID NO: 101047 - DNA, 530 bp, Homo sapiens
gaattcacctaacaaccctatgaacaagcattttagagaggaggaaatcaagactcakcaagcctcagtaacttgccccatatcccatggttgctaaatagcaaaatcatgattgaaatctcaacctgcctgattgtagaacctgaactcttcttgtcatccagccgctctctcccttcccaccatggggacccctcagcaccagcaaaaatgagggtgaggaggcagggaggatggaaccttcttaagcataggtaatttgtcagttgaaaatcgcacatggataaatgtctttaaaccctatgtagatagggaaaactcttgatattactgaaaagtaatatcgacgtagcaaaccttctgaagagagggctagtcatggaacccctcatttggaaactattagaacaagtgaattatttttaaccatcttttagaccattcagaaacagagtgaattgtccaggacaagattgtttattttttgaaaatgtatccagttttgtctgttttttaaagatcttcttggt

SEQ ID NO: 101048 - DNA, 641 bp, Homo sapiens
agggccaactctataagtaaaagcagcactggaaagtgagtcagtaggagcctgtcttccaggaaggtccctgtttctcaagagttcttttcctgcagggggagagagggttggatgtcaaggcaggaatgtgtggagtatgctcacatgtggtatccttgaattcacctaacaaccctatgaacaagcattttagagaggaggaaatcaagactcagcaagcctcagtaacttgccccatatcccatggttgctaaatagcaaaatcatgattgaaatctcaacctgcctgattgtagaaccygaactcttcttgtcatccagccgctctctcccttcccaccatggggacccctcagcaccagcaaaaatgagggtgaggaggcagggaggatggaaccttcttaagcataggtaatttgtcagttgaaaatcgcacatggataaatgtctttaaaccctatgtagatagggaaaactcttgatattactgaaaagtaatatcgacgtagcaaaccttctgaagagagggctagtcatggaacccctcatttggaaactattagaacaagtgaattatttttaaccatcttttagaccattcagaaacagagtgaattgtccaggacaagattgtttat

SEQ ID NO: 101049 - DNA, 641 bp, Homo sapiens
agggccaactctataagtaaaagcagcactggaaagtgagtcagtaggagcctgtcttccaggaaggtccctgtttctcaagagttcttttcctgcagggggagagagggttggatgtcaaggcaggaatgtgtggagtatgctcacatgtggtatccttgaattcacctaacaaccctatgaacaagcattttagagaggaggaaatcaagactcagcaagcctcagtaacttgccccatatcccatggttgctaaatagcaaaatcatgattgaaatctcaacctgcctgattgtagaacctgaactcttcttgtcatccagccgctctctcccttcccaccatggggacccctcagcaccagcaaaaatgagggtgaggaggcagggaggatggaaccttcttragcataggtaatttgtcagttgaaaatcgcacatggataaatgtctttaaaccctatgtagatagggaaaactcttgatattactgaaaagtaatatcgacgtagcaaaccttctgaagagagggctagtcatggaacccctcatttggaaactattagaacaagtgaattatttttaaccatcttttagaccattcagaaacagagtgaattgtccaggacaagattgtttat

SEQ ID NO: 101050 - DNA, 561 bp, Homo sapiens
agttctggtgtcataatcactcttcattcattactctatagatattgaggatgttatataaaatatggatgcaaagactttagcacaattcctggtacttattcaaagatagtagctgttgttgcattaatattgttattattttaaaccatgaaaataactgtgcaaaatggcatcatccccactgtatctgttaaaagctaagacttggagaggttgtgtgtgtgtgcatatgtgtgtttgtctgtgtatgtgtgttttcacccaggttgcacaaaagtcagtccagaattttaacctgggcattctcgctctaaagcgtgaggtctttgcaatgtgtctataatgtgatgagggaaatcaagtcttccttaagtgcacacagaagggccacctatccctgactgggggaaaaatgwgtttccaatcttcttcccagcactaatagaatacgagttttctgttccagtctcaatggattagttatttctttctgaccttcatgtcttggctggtatttcttgtctcttttgttctttcccaccctgcaacagtccattt

SEQ ID NO: 101051 - DNA, 602 bp, Homo sapiens
aaggaaacatgaataaatgagaggatcactttcaactggttggctttgatttgagatccctatctctagagttggatttcccttacttatgtatcaatcatgccctaaatggtctactttgtccccaaagtctccactccctgagctgtccatctcatgtcacaatttctctgtaattmtgtgatttctatatatcttatccactcaacaccttggatacaaatctttctatgactgggtctgtgatgtttacagtgtgtgccctgataaccacctgcctacttgaacttctgctgattaccagttatcagctcattggtcaattatcttgtcaaataataaaagaaattgctaccatttattgagcatatgggtgccttgtactgtgctaagcactttacctgagttatcgtatttgcttcttaaaatatccctgtaaggaccatgtatctggatctctggatcttgaatgtcttttacccttggattaggaatgggcgaatgaaagagtgatttgtgaaaaaaaaaaaaatctgtcagacacagataccactgattccacttaaatacgggccagcaggatatgtcttcaaatatgtaaa

SEQ ID NO: 101052 - DNA, 602 bp, Homo sapiens
aaggaaacatgaataaatgagaggatcactttcaactggttggctttgatttgagatccctatctctagagttggatttcccttacttatgtatcaatcatgccctaaatggtctactttgtccccaaagtctccactccctgagctgtccatctcatgtcacaatttctctgtaattatgtgatttctatatatcttatccactcaacaccttggatacaaatctttctatgactgggtctgtgatgtttacagtgtgtgccctgataaccacctgcctacttgaacttctgctgattaccagttatcagctcattggtcaattatcttgtcaaataataaaagaaattgctaccatttattgagcatatgggtgccttgtactgtgctaagcactttacctgagttatcgtattkgcttcttaaaatatccctgtaaggaccatgtatctggatctctggatcttgaatgtcttttacccttggattaggaatgggcgaatgaaagagtgatttgtgaaaaaaaaaaaaatctgtcagacacagataccactgattccacttaaatacgggccagcaggatatgtcttcaaatatgtaaa

SEQ ID NO: 101053 - DNA, 556 bp, Homo sapiens
taagcagtgataggtaaactttttccattttggcaaaaatgaataagtacagattttcctctgcaggggccagagattcttgacacacccaaacttctatagacatataccagtaatgtgaaaatggaatccatccattattactttaatgttaaccttcagttaaaaaaaaaatcttctacaagggtttgacatcattgccttggcaattataaattaagcggggcagaattctgcctattctagggaatctaaattctcagaaatttcactatccaagcttatgatctctccaaacaatcaaatgtcagttttgaaggtcattccttttgcagatgtcttctcacaatagatgacaatgggtatggtgttaatggctcaatggttcaactagggtagtgactatatataawtgcacatcactgcaccctactctgtaacacagtacctggcacataataaaagttccatatttaatgactattccaggtcctaatatctgacactaattgcctgtgtgattttgggatagtcatttaatacattaagggatttg

SEQ ID NO: 101054 - DNA, 639 bp, Homo sapiens
ggaaggctgatcaaggattcaaaagaatgcaaccttttgtctcttacctacttctgacctggaaaaccccacttcaagttgtccccccttagtggaccaaacctatgtacatcttacacatattgattgatgtttcatgtctccctaaaatgtataaaagccagctgtaccatgaccatcttgggcacatgtcaccaggacctcatgaggctatgtcacaggtgcatccttaaccttggcaaaataagctttctaaattgactgagacctgtctcatatattttgggttcacactctcaagaagttcacagtctaaatggggagagagagacaattgcaatcattgtcagaagttacctaaaaaatgtattaaagtgagaagatccaagacttagatggcctaggcacacatctagatcckggcattaaattttttgttgttgttttttgtttttttgtttttgtttttttgagatggagttttgctcttgttgccgaggctggagtgcaatggcgccaccgcaacctccatctcccaggttcaagtcattctcctgcctcagccctcccaagtagctgggattataggcatgcaccaccaagcctagctaattttgtagttttagtagagatggggtt

SEQ ID NO: 101055 - DNA, 639 bp, Homo sapiens
ggaaggctgatcaaggattcaaaagaatgcaaccttttgtctcttacctacttctgacctggaaaaccccacttcaagttgtccccccttagtggaccaaacctatgtacatcttacacatattgattgatgtttcatgtctccctaaaatgtataaaagccagctgtaccatgaccatcttgggcacatgtcaccaggacctcatgaggctatgtcacaggtgcatccttaaccttggcaaaataagctttctaaattgactgagacctgtctcatatattttgggttcacactctcaagaagttcacagtctaaatggggagagagagacaattgcaatcattgtcagaagttacctaaaaaatgtattaaagtgagaagatccaagacttagatggcctaggcacacatctagatccgggcattaaattttttgttgttgttttttgtttttttgtttttgtttttttgagatggagytttgctcttgttgccgaggctggagtgcaatggcgccaccgcaacctccatctcccaggttcaagtcattctcctgcctcagccctcccaagtagctgggattataggcatgcaccaccaagcctagctaattttgtagttttagtagagatggggtt

SEQ ID NO: 101056 - DNA, 639 bp, Homo sapiens
ggaaggctgatcaaggattcaaaagaatgcaaccttttgtctcttacctacttctgacctggaaaaccccacttcaagttgtccccccttagtggaccaaacctatgtacatcttacacatattgattgatgtttcatgtctccctaaaatgtataaaagccagctgtaccatgaccatcttgggcacatgtcaccaggacctcatgaggctatgtcacaggtgcatccttaaccttggcaaaataagctttctaaattgactgagacctgtctcatatattttgggttcacactctcaagaagttcacagtctaaatggggagagagagacaattgcaatcattgtcagaagttacctaaaaaatgtattaaagtgagaagatccaagacttagatggcctaggcacacatctagatccgggcattaaattttttgttgttgttttttgtttttttgtttttgtttttttgagatggagttttgctcttgttgcygaggctggagtgcaatggcgccaccgcaacctccatctcccaggttcaagtcattctcctgcctcagccctcccaagtagctgggattataggcatgcaccaccaagcctagctaattttgtagttttagtagagatggggtt

SEQ ID NO: 101057 - DNA, 639 bp, Homo sapiens
ggaaggctgatcaaggattcaaaagaatgcaaccttttgtctcttacctacttctgacctggaaaaccccacttcaagttgtccccccttagtggaccaaacctatgtacatcttacacatattgattgatgtttcatgtctccctaaaatgtataaaagccagctgtaccatgaccatcttgggcacatgtcaccaggacctcatgaggctatgtcacaggtgcatccttaaccttggcaaaataagctttctaaattgactgagacctgtctcatatattttgggttcacactctcaagaagttcacagtctaaatggggagagagagacaattgcaatcattgtcagaagttacctaaaaaatgtattaaagtgagaagatccaagacttagatggcctaggcacacatctagatccgggcattaaattttttgttgttgttttttgtttttttgtttttgtttttttgagatggagttttgctcttgttgccgaggctggagtgcaatggcgccaccgcaacctccatctcccaggttcaagtcattctcctgcctcagccytcccaagtagctgggattataggcatgcaccaccaagcctagctaattttgtagttttagtagagatggggtt

SEQ ID NO: 101058 - DNA, 497 bp, Homo sapiens
ttttctataaactgtcagttctatcaaataattcatatatttctgtaaaattcaggaaactttarctgtgattccatagggaatgggatgtcaggcagtaagcagaggtcaggccaacaccaagattctcacctcaacacagaatgagcttatctgttgtcaacaaaaagtaaaaaactcacagaagtttccatatcattttaagatatgtaacatggattaagatctgaggatcaggaatgaatattgtatagaaacagaaacatatattcagattaaaaaataacatatatctatctttccccaaaacaattcatgatgtgtgttagtccattttgcattgctataaaggaatacttgagactggataatttgtaaaaaaacagagggcttatttgggtcatagttctgcaagctgtacaagcatggcaccagcatctgtgaggcttctgatgaggcctcaggaagcttacaatcaaggcggaaggcacagggga

SEQ ID NO: 101059 - DNA, 661 bp, Homo sapiens
gggaatgggatgtcaggcagtaagcagaggtcaggccaacaccaagattctcacctcaacacagaatgagcttatctgttgtcaacaaaaagtaaaaaactcacagaagtttccatatcattttaagatatgtaacatggattaagatctgaggatcaggaatgaatattgtatagaaacagaaacatatattcagattaaaaaataacatayatctatctttccccaaaacaattcatgatgtgtgttagtccattttgcattgctataaaggaatacttgagactggataatttgtaaaaaaacagagggcttatttgggtcatagttctgcaagctgtacaagcatggcaccagcatctgtgaggcttctgatgaggcctcaggaagcttacaatcaaggcggaaggcacaggggaagccgggcatatcacatgatgagagagggagcaagaagagagtgaggaggcagtgtcaagctcccttaaacaaccaactcttgcgggaacttacagcgagaactcaatcaatcattaccatgggaatagcgccaaactattcatgagggatccactcccatgacccagtcacctcccaccaggccccacctccaaccctggggattacatttcaacatgagatttggagggaacaaacattc

SEQ ID NO: 101060 - DNA, 465 bp, Homo sapiens
actaggacatatttgtactcttgtgatggcagtagttgaataaaatctagttgtcatactttggaagggtcatcccataaagaaaagtgactttgcaaattatgtaaaggtttccctggattatgttttgtgcagatatgatagcaattgtacaccttataagcaacaaatggagaaggttttcaataatattgtttgctctaatttgctccaagcaatcatcttatcaagcctccaatgagttaaatcacacacacacgttcagaaagacgacggtaattgggatggaagtatgggctgacctcttggttcataccatcacacagtttgagaggagaactttttgtttctcaattgtttctcccttttttktctcaattttcctgttctattttttagggctttggattgagttaaattatcaaaatcgagtgcttccttgaaagctaaaatggcttgattttc

SEQ ID NO: 101061 - DNA, 465 bp, Homo sapiens
actaggacatatttgtactcttgtgatggcagtagttgaataaaatctagttgtcatactttggaagggtcatcccataaagaaaagtgactttgcaaattatgtaaaggtttccctggattatgttttgtgcagatatgatagcaattgtacaccttataagcaacaaatggagaaggttttcaataatattgtttgctctaatttgctccaagcaatcatcttatcaagcctccaatgagttaaatcacacacacacgttcagaaagacgacggtaattgggatggaagtatgggctgacctcttggttcataccatcacacagtttgagaggagaactttttgtttctcaattgtttctcccttttttttctcaattttcctgttctattttttarggctttggattgagttaaattatcaaaatcgagtgcttccttgaaagctaaaatggcttgattttc

SEQ ID NO: 101062 - DNA, 632 bp, Homo sapiens
cattattttacaatgagcaatatatacaaatatatagtaaaggtatatgtatacataacttagaataaaaccatatggtagggtgaacagagagaaagagaaaagcatatataattaagaaattaaatggctataagttctttttactacttctttttcaatttagatgacttctatattcattgcttgccttattgccttggcttgaacctccagtaaaatgctgagtaaaaaaaggaggagagcaggcatcctggactttgtactgatctcagagaaaaagcatgtagtcctttatcattaactacaatgttagctttaatttttgatacatgmcctttatcagattgagaaagtttgtttttattcctagcgtgctagtttttattagaaataagtattaaattttataaaatgccttttctgcatctaatgagaaattacttctttaaaagttttatttttaatgaagaataacatttattgattttcaaatgttaaacaataaccttgcacttctaacatatatcctacttatccatgatgtattggcattttcagacacttgtgcttagcatttttgcattgaagttgataaggaatattgttctgttgttgttttttaaattgta

SEQ ID NO: 101063 - DNA, 632 bp, Homo sapiens
cattattttacaatgagcaatatatacaaatatatagtaaaggtatatgtatacataacttagaataaaaccatatggtagggtgaacagagagaaagagaaaagcatatataattaagaaattaaatggctataagttctttttactacttctttttcaatttagatgacttctatattcattgcttgccttattgccttggcttgaacctccagtaaaatgctgagtaaaaaaaggaggagagcaggcatcctggactttgtactgatctcagagaaaaagcatgtagtcctttatcattaactacaatgttagctttaatttttgatacatgccctttatcagattgagaaagtttgtttttattcctagcgtgctagtttttattagaaataagtattaaattttataaaatgccttttctgcatctaatgagaaattacttctttaaaagttttatttttaatgaagaataacatttattgattttcaaatgttaaacaataaccttgcacttctaacatatatcctacttatycatgatgtattggcattttcagacacttgtgcttagcatttttgcattgaagttgataaggaatattgttctgttgttgttttttaaattgta

SEQ ID NO: 101064 - DNA, 598 bp, Homo sapiens
atggttagttatgacaaagaacaagaagttcaatctctaaatcaaaggaccctaacccctgtgggggctctttccctacagagaaaatacgctgtgcattcaaattaactagaagacattatgtgggcagcctttcctttgttctgagacaaagttctacatatgttttcccaagaaccagggcattgtctagttgttcttcagagattcattctcaagctgttgtcagccaaatcagcctgcaggaggaccaagaaaagagaggtactcacaacattgagcagttgccacatcctgacagctgtgccagttactttatacccattaactcacagaaactttcattataaccatatattgtgagtatttgactgattttaaggtgaaacattgaagataaaagaaacaaataactttctaaaattacacagctggtaagtgatttttttaaatttgaaggcccattmgttttcctaagtgacttccagagacttctcttgcaaaaattaatatttctattggttcgtggcttgaagggaagacacattaagccactgaaccctctcatcctggaatattgagagtagaatagttgtcc

SEQ ID NO: 101065 - DNA, 627 bp, Homo sapiens
gactcctcagcctccagaactgactgtgaggaatatattggattgtttataagccatccagtttatgatattttgttatagcagcctaagtggaataagacagcactttttacagatgattaactataaggactttatctatatattctaaaaatatttttaaattgaattcattaattttttccaaattagtacagtttgaccactgtaggaaatttggaaaacacataattacatttttaaaaaacatcttttttagccatgccattatccacactggtactacttttacagatattaatgctaccaccatcatttattgatacttatagagtatcagtgacataaataaacaagttatatgcaataatgtagtaagatagagtttttaatccttatttcacagattaggaatctgcaactgagaaagttcacaaacctastaagtggcagagctagtatttaatcccctctgtattttaagaacaattttttacatgagttcactttgtcttatctactttcttaaagtttctaactccaaatacagtcatattttaaaatactaggggttaggagtttaacatgtgaatttagagggacacaattcagctcataatattaata

SEQ ID NO: 101066 - DNA, 509 bp, Homo sapiens
caggacttattttcaacatactcataagcaaaaatgtcaatagtgctcaagggactatgaggtcaaatcataagcatggagtccaaatatgcgattgctaaccaccaatatttttatcttatcttttccaaaaggtaggcaaaaatgttcaaatactatactaatgggcgaaagggtacatgatcaaaataggtttaaataatgagtgaagcacagtacaayttatcatgaaatataaagtgcagtttttaaaaaatccacacacacatataattatgtatgtatacatacatataggtacaatttatttatacaaataaaatatagaaataataatttactttttttgtaatttagcaaaaacaaaaaaaaaatgaagcaatgtcaaccaaaaaagtaaagtaaagaacttcaaattcttcccttccattaaaaaaatattaaaaagcagataaaaactgttggaatcaattttctttgttgttgttgaaattctaggtattacccaa

SEQ ID NO: 101067 - DNA, 578 bp, Homo sapiens
tatattacttaaacaaccaaaggtaagaacccagtgataacgataattagagttatatttttcacaaatgcttatacttctgttttgaytctttaaagtttcagcttttgctttgcttttcatgtgatgtgctctctagatacagctatgattgtatttttattaacttctctgtctttttgacagataagtgaatactctacctggcaatatgattctgctaatctgaatatcacaaaatagtaaatgctacctgcttttcacaaattttagttttatttttagaagtcaaaaacaatacctttgacaggtatgtttttccccaaaggaagtgtcatatactgatttttctttctaaaatttggagataggacactatcaaactcatgtaaatcttaaagaattcactcctaaaaataagagctccaactcactggaaacttaagtatcagatactttatcaacattattataacaacctgcatatcccctttcagagatgaataagtggtctgaagagattaagtgcctcgcccgaggatacaatactactctatgaaggagctagaatttaaatc

SEQ ID NO: 101068 - DNA, 563 bp, Homo sapiens
ttctcctgcatacaaggtaatgagtagaatggctgtgaatccagttaacattccagcattctgaatcatgaagaaggtgaaatcggtttttcttccagttaccttttctctcagcatatcattcatctctggaaactagaagacagatatattgttagataactgttgccatcttgtggcaaaccacaaaacagtcacttagaggcataccttggagacagtgtgggtttggttccagaccagtgtgataaagcaaacatctcaataaagcaagttacatgaattcccaggtttcccagtgcatataatagatatatttgcattatactgtagactattaagtgtgcaatagcataatatctaaaaaggcaatgtatataccataatttaaaaaaatactttattgctaaaaaatgctaccaatcattcgagctttsggtgagttgtaatctttttgctggtggagtcttgattccatcttgatggctgctgactgattagagtagtggttgctaaagatgggagtggctgtggaaatttcttaaaataagacaacaatgaca

SEQ ID NO: 101069 - DNA, 611 bp, Homo sapiens
acaagtgggaggagagaccaaagagktgagtttatgcttgagtactgcatactactgcatatgctgaacaagagtgtcacatctgagatagacacatcttaaagagctaagtggggccttcgtttctgcccctcacattactgccttacttgtggaatggggcgagggtgaagcatggtctgctgtgtgctgcctgagctgctgagatgctagcaagtgtggacacgttagctaggtagggctattgcctgccagggctctggaaaaccctctagacaatttttaaatgattattttcttgaggaagggttgcctttttctaatcaacagaaatttaccctctcagctagcagctatcattttttaaaaagcacagtttagctatggataggctttaaaatggtaaggaaaagtaaacagatgtgtactatcaataagctagtggtaactactggaagaatataaacagagcagcagcagaatagtctctccagtggaatatagaaaaggagaggggggaaataatcagaaaatgtggtaaatagaaatataaaatagtctgtcagaaataaatccaaaggtaccagtaattataataaatataaatgcat

SEQ ID NO: 101070 - DNA, 601 bp, Homo sapiens
tgatgtgatgagacttgagtgttgcctacatatgctatgggtgtgcactgtaggggaggaaacccgagattaggaaaccctgatctacgggagacgatggcaagcctgtcctttctcctctctgcagggagacatgaactttattatgtttaaatgtatcatatatctccaggaaaagaaatctttactacactctaatgtcctccagggagagggatatctccctgtttactctcagagaatgtaaataaatttgctccagagaaaaactctgtctctccttttccaaggatgccttaacatatattattgaaaatataattctggagtatgtgctgttaatgccaagatgtgtaaataggtgagaaatttttcaataatggtttcccaatacccaataaggcattagaaataacacatattattgtggttgttactgcacattatccaatgttctgaaacatactagaaggtatttttttaatatcgccaaatatacatccaaatagctagtcttcttaaggaaacaaatgctactagctcatattaactcagaakttaccattatcttgcccatgctcattctatcaatttgagatgt

SEQ ID NO: 101071 - DNA, 624 bp, Homo sapiens
aattgtctctgctatacttttacacgactggcagtgcagcagatttgtttacaccagcatcaccacaaacacttgagtaatgaattgcactaaggtgttaggaagtctaggaggtcactagttaataggaatttctcagttccatgacgatcttatggaaccacctttgtatatgtggtttgtgattgtctgaaacaccattatgaggcacatcagtgtagaattttaaatgtaagcaatctcccagattatttyttatcttctttgttctcttttgatcttacccctgctcctggaaaatcactgtgcaaatgctttttctcatgttgggtgatatttataaaatcagcaggctaactgagcctcttgaatgtatggaatttctttttttttttaatgtagttgtagagatagtgctttgcaaataagaggaaattggcaaaggaagttcaatatattgctatatgagacccaaggggtaaaatgtgttttaatgtagattgaagtcaattgtatttcttgatgtgtctttccacacattccttttgtgtatgataatgtcactgttgggcagtggaggcagagaggggaagtgaataggtaatgatgctaatttaccttgtc

SEQ ID NO: 101072 - DNA, 607 bp, Homo sapiens
cttcacctcactgaatcttctggcatcttgaactgaacttcccagcctccataaccatgagcaataattttctattatctgtaaattacccagtctaagggattttgttacggcagcctgaatggactgagacacttggataaggaagtgtgaattcagcagacaggcagtaacttttctcgagggagtgatatttgccagcctggagctcctcctctgatacactgtactatgttcttttcacttccttattctcctaacaccttttatgtccacctctgaacttctggcctctgtgaagcccttggtccctcagacctcaggctggtcttggcctttcaactttgcctttcactattagatgcaggtgtgtctgtccygcaacccagctctggctctggaaaaccagctgacatcaaccatgtggctggaaccttctccagaacaatggaggccagggcgagtgactcactgccattcagtctccatctttggggcagatccaccatgagacataacttaccagaaatccagttacaaggaggaataagtattgaagactaagaaatgcattttgcagcaggtcctcgctgtactggggcagcgt

SEQ ID NO: 101073 - DNA, 550 bp, Homo sapiens
agcaaagatacaaatatatacttataatacctagtgttagcaaggatgcagagtaatgagcactgacattgtcaatgggatagatattgattcagtctttttggagagcaatttgattaaaacaacaaaacccttaccaccatatatacaaacttcatgttaaaaatggcaaattaaataaactcattggtatcrttttccagccacaactctaataaaatgacagtaaaggaatgtaaaaatttaaatacacacataaaagaggatgaagaagagataacatgagaagagagatatcaacaaaatttcagaaaatggaaagcagtttcacacgtcattggatctatagagtggagcaaaactgaaattaaccatctgcagcgattgaagtcaatgatttggccttcaaaagccagaaaaagctcaggaactagaggcaccagatacctctgaaaataaaggtgagaggtggaactgaaaacaagaagggtgataaaaaggtagttagaaagcatttttgttccaacacactcttctctaccccacagct

SEQ ID NO: 101074 - DNA, 585 bp, Homo sapiens
ctttctctaacaaatctgcctttctttacctacaactgtcttggtaaattcctttactgcccttgccactgaccccaaatagttgctacccccaacaggtgtggtgcccagggatcagcaattataaaatatccaagaatatagagtaattatgacatcataaagtctgagctttttaaatttggttttttaattaaaatkttattctctagttttcactgtgacttcaactataaaagtctttcatgaggattacattggttaaatataaacatgagaataagttgagtgttgagcaggaaaacagtaacaggatcagaaagaagtttaagctgttcatttgggccttcaaatacacttagcctgaaaaaccaggaagagtaaaaggagagctgtcggcctgtgggaaagaacagcaactttggctttactggtaaggcaaaatcacctccagcctgtgggtctctctgacgtttccctagagataacaattttcctttacttaaaagtaatgaacaattatcaggtgatggggacttcctcttcttcattgtgtttgtgggtgtttataccacataagattac

SEQ ID NO: 101075 - DNA, 482 bp, Homo sapiens
actatatgagaaaccacatttaaagtttcaccaaatggaaattcatcttcaggtcctatttgtatctctcccatggaaaaacaaaagggtctttccatgttcgtcagaaaggcaaatatcaaaggaatcctgaaatatctcatttcagggagaagaaagtcaacattctaatgaggcaatggccactgtgaggtgtaaagtttcaatgggacattgccccgaaggagtcctgggtactttgagtccacactgggaatgcagaatgctcttaccttaagtcagtggcaaactggtctcagctgttgtggggacaactgctctgccaagcaaactgtgctgcaggtcatcaacctcataccagcttggcaggaacaagcccgaatgtcacctgattctccyacaaatgtaataatatccaacaagcaactgattggacagcacacgatgtcattttctctaattaaggaactctcaagaaaaac

SEQ ID NO: 101076 - DNA, 528 bp, Homo sapiens
attttttgtattttgatctgtactctatgaaagagcttgatataaagttgatgtagggctttgtaaaactgattggaaaacatattttctggttttgaacctgtacccattttcctctcaagctatagcgtcttcacatagtgtttcttcagcaacctcmttcttagcattcctcaaatctcttggtagttttaaggcttaacattgagcttaatgcactatttgattttccgcatttgcagtaattcctttgccagactttcataattgtgtatatgtgtgtttctacacactgtttccattaagcagggcagcaatgtcaaaaagctgtggtacattattcaatttttattgaatagccagcatcagttctgtggcagagattattataactgtcagtattatcataataatcaaataaaagaaagtctcggtttcaactaagcaacttgaccttttgcacatgtctgtctctttaacgtcactttagagaggatgactcagcttgttctaataccaaactaatgg

SEQ ID NO: 101077 - DNA, 573 bp, Homo sapiens
atctaactaaaagtatttttgttaaacttttgtctgttaaaattgaacatgcagtttctatcttctgagtggatatgggcagaaacaggcaaaggtagtcgtgggaaggatggagagtcaatttatctgtgtgttctctttttttttgggtgggctggtaggggtagtctgagtcttgctctctgtcattcaggctgaagtgcagaggcacaatctcagctcattgcaacctccatctcccaggttcaagtgatcctcccacctcagcctcccaagtagctaggattacaagtgtaygccaccacacccagctaacttttgtatttttagatggggtttcaccacgttggccaggctggtcttgaactcctgacctcaagtgatccaactgcctcagcctcccaaagtgctggaataacaggcatgagccactgtgcctggcctgtgtgttctcttttatgtttttcattggtcaaagttcttaacacttgaggattagttcatgggaagttatatctccacatgtctttgaagtatctcctatttcctacagaagcctttgggtaagcgata

SEQ ID NO: 101078 - DNA, 519 bp, Homo sapiens
agtttctatcttctgagtggatatgggcagaaacaggcaaaggtagtcgtgggaaggatggagagtcaatttatctgtgtgttctctttttttttgggtgggctggtaggggtagtctgagtcttgctctctgtcattcaggctgaagtgcagaggcacaatctcagctcattgcaacctccatctcccaggttcaagtgatcctcccacctcagcctcccaagtagctaggattacaagtgtatgccaccacacccagctaacttttgtatttttagatggggtttcaccacgttggccaggctggtcttgaactcctgacctcaagtgatccaactgcctcagcctcccaaagtgctggrataacaggcatgagccactgtgcctggcctgtgtgttctcttttatgtttttcattggtcaaagttcttaacacttgaggattagttcatgggaagttatatctccacatgtctttgaagtatctcctatttcctacagaagcctttgggtaagcga

SEQ ID NO: 101079 - DNA, 519 bp, Homo sapiens
agtttctatcttctgagtggatatgggcagaaacaggcaaaggtagtcgtgggaaggatggagagtcaatttatctgtgtgttctctttttttttgggtgggctggtaggggtagtctgagtcttgctctctgtcattcaggctgaagtgcagaggcacaatctcagctcattgcaacctccatctcccaggttcaagtgatcctcccacctcagcctcccaagtagctaggattacaagtgtatgccaccacacccagctaacttttgtatttttagatggggtttcaccacgttggccaggctggtcttgaactcctgacctcaagtgatccaactgcctcagcctcccaaagtgctggaataacaggcatgagccactgtgcctggcctgtgtgttctcttttatgtttttcattggtcaaagttcttaacacttgagrattagttcatgggaagttatatctccacatgtctttgaagtatctcctatttcctacagaagcctttgggtaagcga

SEQ ID NO: 101080 - DNA, 606 bp, Homo sapiens
tttacgttctctctaaaggggctttcttttgtccacctttgcatcccaacacatagaaaggtacctggcatacagtatagtggagagaggcagggagcgaaggaaggaaaacagaacccctggctccaagtgtgttctaacatggtatgcatcctcctctatctgcacactccgaggtaacactcgcttctgcagaagccacatcacaaacttactgtgatcgcacagtcaacaaaaatcacatagtactgatctcccattacaacacatgtttgtcactcttaggtattaactaaggggcagttcagaccatagttcttgyattcagctcagactatgtctctgttttcaacacagtagataaaattaaaaagcagatcaaaggtctcatttatgcattgtataaactatagttttctgcttaataaggttttcagagaaagaagcgaagctagcctggggtggctcgttcttggtgaacccatgctaggtcccagggaccaccgctagggaaaagccatacttctctgcccatattaaggggagttcaatgctcaagaatggtctgctgaatgcattcaaagccgtattttgcaagctgggaaa

SEQ ID NO: 101081 - DNA, 647 bp, Homo sapiens
aaagaggcagtagaaagttgcacactatagtcacaggaacaaccataaaatcaacagataattcatcaacataaataatcataaccagaaaacaatggaaatatatttcaaaagtgctgaaagtaaagggcagaaatggtagaataccctatgaaaacaytattcaaaattgatgcaaaatataaaatctctggaagaaaataggagaaaaatcttcatatataaaaatacttgtagctaggacacaaaaaatagaaaagcaataaatacatataataaaaactctatttttccaaagacccaacaacaataaataagcaaaaaatatatgtaagtaaatatataaagaccaggtgcagactcagagaatatacaatgcatttgtgttacaagagacttgcattcaaaataactaaggacaattatacctcaataaggagaaaatgaattaaatagaaatgaccataaaaaaatttaaacaacttttcaacaaggcaattcatgaatgtccagtaatcacctaaaaagacattaaacaatactaatcatcaggaaaatgttaattataaccacaaaggaaaaccactagacactaagaaaggaaaaaattgaaaatctgatcataccaatttctatatgttatggac

SEQ ID NO: 101082 - DNA, 618 bp, Homo sapiens
taatgacagaatcatgtggattcatagccatgtggaatgcatacctcagaacaattttgtcaacatttagaattcattctgtcatttaataaaaatttgtaaagtgtgtcatgaaataaagcatactgttttatgttgtaggacgctatgctggtgaagttctctgtggaatggaagactgaactagctagtgagtttatagattaatcattattatttccgtaaaacataatctgagtatggctaaggtaaaactatagtgacagcagtattagtagtatcagtaatggtaataataacagtaacaactctgattgctatcattcaataagcaaccatcataatccaagcattgggatactatacatatgtgtgtgtgtgtgtgtgtgtgygtgcgtgcacaacacatgtatgtgtctccagctcttaaagctttgagtacaatcaatgtcacttcacagtagtaccccaaatcccatattgccaagattatcatccagaccagtttctcatggttttatcctctaatatggtacaggatatcgcctgacatttcatcaggtatgcacgtaagtcctttttatcctcttacctccccaaggaaacaggaactcacaa

SEQ ID NO: 101083 - DNA, 618 bp, Homo sapiens
taatgacagaatcatgtggattcatagccatgtggaatgcatacctcagaacaattttgtcaacatttagaattcattctgtcatttaataaaaatttgtaaagtgtgtcatgaaataaagcatactgttttatgttgtaggacgctatgctggtgaagttctctgtggaatggaagactgaactagctagtgagtttatagattaatcattattatttccgtaaaacataatctgagtatggctaaggtaaaactatagtgacagcagtattagtagtatcagtaatggtaataataacagtaacaactctgattgctatcattcaataagcaaccatcataatccaagcattgggatactatacatatgtgtgtgtgtgtgtgtgtgtgtgygcgtgcacaacacatgtatgtgtctccagctcttaaagctttgagtacaatcaatgtcacttcacagtagtaccccaaatcccatattgccaagattatcatccagaccagtttctcatggttttatcctctaatatggtacaggatatcgcctgacatttcatcaggtatgcacgtaagtcctttttatcctcttacctccccaaggaaacaggaactcacaa

SEQ ID NO: 101084 - DNA, 583 bp, Homo sapiens
tttctattaaaaggtaaatatctccttgggttaacatttaaaataaaattgttaggaaaaaaaaatccaaagaagtacactcagaaataacaaagatgacattataactgatcccacagaaacacaaaacgtcctcagagaatacaaaaaacaamtctgttcactcaaattagaaaatatagatgaaagggataaattcctggaaacacataatattcaaagattgaatcagaaagagattgaaaccttgaataaatcaatattaagctctgaaattgaatcagtaaatgaaaaaaacctaccaaccagacaaaaaccctagaccagatggattcacatccaaattctaccagacgtacaaggaaaaattagtaccaatcctactgatagggttccaaaaactggaggaagagggctcctctgtaactcattctgtgaagtcagcatcagcttaatacaaaaatttggcagagacacaatgaaaaaagaaaatttcaggccaatatctctgataaacgtagatggaagaatcaatgaaacgctagcaaaccaaatcaagcaacacatcaaaaagttaatgcac

SEQ ID NO: 101085 - DNA, 439 bp, Homo sapiens
ctatctcttgctttctcatcaaaacaaaaattaattgaaagagcaattgacactcagtatgctcatcrcttccttataccctagttactctttattcattaaaatttaggttttctgtgtatcagtcctttgaagctgtttttgttcaggccatttagtgactttctaagttctgaattcagtgaactgttttcaactgttaatctctttgacctctatagtatttgatactactggtctttcctttcttttggaaatctctcctttgatttcagtaaaaccattatgttggtctcctgttacttcttagactgcatgggcttttcttcctgttgatgttgcaaaaggattcttttttcttttttttttttttattcttctcacttcaaaaacttttcctatacagtatcacccaagcccgtgtctttaatcactgact

SEQ ID NO: 101086 - DNA, 405 bp, Homo sapiens
tttagtctccctctcactggatctttgaatcatcattcaacatcactggcaagtaatcatgccacctctaccaagacagttccagtgaccaggagctcattcacccttgttccatgttaggatttcttaratcactgaatagctttttaaaacatttgcttaaaatgagtctttttatcactttgtttctttggttgtaactcttgagtgacatagaataaacggatataaccatccaagtgagacaaagctgtaggtgtagagaagcaaaaagtaggtaaatcataaggaggaaggtaacaaggcatatgaacagttttgtgcaccacacctttaaaaaacaacaaatacttttggaagagtttagaagggaccaacagaagatgtgtgggcttaaaaatggat

SEQ ID NO: 101087 - DNA, 392 bp, Homo sapiens
caggtggggagtttgactggggckgtacacctgtcaaacggtaacgcaggtgtcctaaggcgagctcagggaggacagaaacctcccgtggagcagaagggcaaaagctcgcttgatcttgattttcagtacgaatacagaccgtgaaagcggggcctcacgatccttctgaccttttgggttttaagcaggaggtgtcagaaaagttaccacagggataactggcttgtggcggccaagcgttcatagcgacgtcgctttttgatccttcgatgtcggctcttcctatcattgtgaagcagaattcaccaagcgttggattgttcacccactaatagggaacgtgagctggaggttctatttcatagacaagactgatgaaatcactggcc

SEQ ID NO: 101088 - DNA, 617 bp, Homo sapiens
actgtagcctcgacctcccaggctcaagcagtcctcccaccttagcctcccaaagtgctgggattacagacaatgaggcactgtgagtggtggggtcaactttggaagggttttgtaaaccattttaaggaatacctttgctctttctgtttaatcttcctagaatagttttcctctcaacatgcctgttaaaatcttatccgttctttgaagcaagctttaatctcaccttgagcataagatttttggtaagaatatttttgctcattgttctttttatttatmagtgcaatagtacttatagtgggttatcattagctgttgcccttacgtaacagaaaagttcttttttttttcttttgagacagagtctcactctttcacccaggctggagtgcagtggcatgacctcggctcactgcaacctctgcctcccatgttcaagcaattcttctgccttagcctcccgagtagctgggattacaggtgcccgccaccacgcccagttaatttttgtatttttcgtagagacggggtttctccatgttggccaggctggtcttgaactcctgacctcaggcgatccaccttagccccccaaagtgctgagattacag

SEQ ID NO: 101089 - DNA, 616 bp, Homo sapiens
cccctgtgattaacatcttgcataaaaaatatggtacatttgttccagttaatgaagcaatgttgatgcatcattattaactaaagtctacacttaattcagatttcctttcctttaacctaatgtcctttttctgtggcagcatcccatccaggataccacagtacctttagtcatcatgtctccttaggcctcttggctgtgacagttacttagacgtccctgtttttttgatgactgtaataattttaagatgtactggtcagttattttatagaacacccctcaattgaaatctgtttcatgtttttctaattaaatattagactgagattgtgggtttgggggaggaaggccacagaggaaaaatgccrttcccatcatatcttaccaagagtatcttctaccaactgttgatgttggccttgatcatctggctcaggtggtgtgtgtcaggcttctccattgtaaagttatccctccccctttccatagtgcactctttggaaggaagtcattatgcacaacctacactcaaggagtgggtagttctgctccctctccttgagggcggacttatataaatttcatggaattcttctgatttgctgatttt

SEQ ID NO: 101090 - DNA, 553 bp, Homo sapiens
tgaccatatcccataaaactacagctggttttagtttaattttgagggtggtgaggtataytatttctttctaaaataaaaatcattatttgtagatgaaattaaaatgcttgaaaacacaactacattctgcattaatgtgaagtctcaggaacatcctcaggatctgaaatactctgacaaagtggttttggtcagaatttgtcctgatgagcttctgttccacatgcatgctccatttgcttaatttccaccccctcagtaatgtataagctgagttactctacaaaggtaaaattgttgttggaacaggaggaatgagcctcactagaggaatattcactaaaggaatcaccctatccccttcctcctgctggttttccaatcattagcactggcactatttggagaaatcatttgccttatttgcctggttccacacagagtgacaaaaacaagaaggcgatactatatacatttcaggcatgacttccgaaattatactcaaagatggtgattggctttttttctgtatcttcgtagtaattatttc

SEQ ID NO: 101091 - DNA, 426 bp, Homo sapiens
  misc_feature (1)...(426): n = A,T,C or G
nnnnnnnnnnnnnnncccttggagtgtaaggaaaccccaatataatgttcgtgatggctttgtccccagcaaggggaatgccagtggctttttttcccttggcttatctctatgtgttaacattttgacaatggtctgactatacattgttatatagtaaaataacaataatagtaagtttccaaaattataaaacgaacagaagtactagctttgattcttgtcccagggcctaacagctttcttcctttaataaacagcctccctgtgacatggtgagacccctccctggccagcacagcaacacctcctcagtgaggccctacctgatgaccctgyggggatgagtgcccatagaggagaagggaggccataccaccagcatttgcacaccagcagcggcagaagagtctgtgccggtgtgca

SEQ ID NO: 101092 - DNA, 584 bp, Homo sapiens
aagaacagtctttattcatgaggagtgtacamtctagtgcttttctaataatgtaaaagtagcaaatgccttatggtttttagtcactgcttccatttaatagtcctacggggctcaccttaaaatagttttggtaaacaagtgaaatttactttttaaaattatttttattaagacactctattttatttcattttttagaaacagagtcttgctctgttgcccaggctggagtgcagtggagcaatcatagctcactgcagcctcaaattcttgggctcaagtgatcctcacacctcagtctctgtagtcagctgggactacaggcgcatcaccacatccagctgatttttaaatttttgtagaaatgatatcttgctatgttgcccaggctggtcttgaacacttggccccaagcagtcctcccactccagcctcccaaggtgctggggttacaggcatgagccaccgtacctggccaagacactcgagattacagtttatattccctaccaataggtgcagcaacagagaatagagagctgctagaaaagttttcaggttattgaaaatgtttggtagat

SEQ ID NO: 101093 - DNA, 681 bp, Homo sapiens
ttgggcttgtgcttatctgcatgtctgcattattatgcattttgctctatacagtcttttctgttcaaagacacaggctgtaaatcaaaagctagaattggaatccaaarcttgggcatagactatccgggatcagtgctatagaacagatttcaggtggaaccaaccagtaagggaaatattgtaataaatatacataaatggccaaatcccttgtttcctcttcggcttaactatatgcagcctgcattgcttaatgttgggagtatgttcagagaaatgcatcattaggtaatttcatccttgtctggacatcatagaatgtacttacacaaacctagatagtgtagcctaatacacacccaggctatatggtagagcctattattgctcctaggctacaaacctgtacagcatattactgtcctgaatactgtaggcaagcaattaaaacacaatgtaagtatttgtgtatctaaacatatacaaacatagaaaaagtgcagtaaaagtatagtatcataattttatccactgtcatatatgtgtggtccgtctttgaccaaaatgttgtcatgtgatatatgagtgtatattcaactacctgtaaattttgttgatattaacaactttattatggtaattattagaaagaggattagctttgtgctaagccacgta

SEQ ID NO: 101094 - DNA, 681 bp, Homo sapiens
ttgggcttgtgcttatctgcatgtctgcattattatgcattttgctctatacagtcttttctgttcaaagacacaggctgtaaatcaaaagctagaattggaatccaaaacttgggcatagactatccgggatcagtgctatagaacagatttcaggtggaaccaaccagtaagggaaatattgtaataaatatacataaatggccaaatcccttgtttcctcttcggcttaactatatgcagcctgcattgcttaatgttgggagtatgttcagagaaatgcatcattaggtaatttcatccttgtctggacatcatagaatgtacttacacaaacctagatagtgtagcctaatacacacccaggctatatggtagagcctattattgctcctaggctacaaacctgtacagcatattactgtcctgaatactgtaggcaagcaattaaaacacaatgtaagtatttgtgtatctaaacatatacaaacatagaaaaagtgcagtaaaagtatrgtatcataattttatccactgtcatatatgtgtggtccgtctttgaccaaaatgttgtcatgtgatatatgagtgtatattcaactacctgtaaattttgttgatattaacaactttattatggtaattattagaaagaggattagctttgtgctaagccacgta

SEQ ID NO: 101095 - DNA, 609 bp, Homo sapiens
acactctactacattttctgggtttttgtctgttacattgaaagcaggaatggttgggggatgggttgagtatggagggaatgaatatgaaaaaatatttaaaaatggagagcactttacaacttattaaattctgtgctgttggtaatacaaagatgaataaatcatctgcctcacactcaaatggagagcagcagactagcatttattaaacacgatgtggcacaaatcgtgtttggtattttatttatttatttttaaatttttattttactttaagttccaagatacatgtgcagaacatgcaggtttgttacataggtatacgtgtgccatggtggtttgctgcatctatcaacctgttacgtaggttttaagcctcgcatgcattaactatttgtcctggtgctttccttcgccttagctccctacccatgacaggccacggtgtgtgttgttcccctccctgtttccatgtgttcccattgttcaactcccacttatragtgagaacacgtggtgtttggtttggcttccagcttcatccatgtccctgcaaacgacatgatctcattactttttatgactgcatagtattccatggtgtat

SEQ ID NO: 101096 - DNA, 487 bp, Homo sapiens
tgctttcagtgcaggctatttgaagaactttgccatttcctgtcacaygaaggtaatatggctgtgtaattaaaaagtttagcaacactgacatttctgtgtttgcactagaattatcttgatattaccagggactgaagaacgctgccacctgctaggaacatatgcatatgtttgagcaaaggttaattagtttattcagaaaagtgattcaggtaagagcttaagagcaacttggcacattctaatgcaacagagaggtatgttataagaagaactaggtcagttttcggcaagacaatttgaaagtttccttttttggaagtgggtggaatagcagtttgattgattatttcaaccttaaatataagacaaattatctgtagcttgattaaatgttcctccttacaggtctgtgtccaggtattaattctgcattaaactagttgtacctattgtaggggagcaaatgtctccttatcttaat

SEQ ID NO: 101097 - DNA, 607 bp, Homo sapiens
tatttaaatttctgatttgctatcattaattgagagttcctcttgaactcaacactgttctaagctagacatctctggccttatagcctgttatttctacttcatcttggtcaatcactatcattcggtaaactaagctagaaaacaggaagtcggccgggcgcggtggctcacgcctgtaatcccagcactttgggaggctgaggcaggcggatcacgaggtcaggacatcaacaccatcctggctaaaatggtgaaaccccgtctctactaaaaatacaaaaaattagccgggcgcggtggcgggtgcctgtagtcccagctactcaggaggctgaggcaggagaatggcatgaacccgggaggcagagcttgcagtgagccaggattgcgccactgcactccagcctgggtgacagagcgcaactttgtatcaaaaaaaaaaaaaaaagaaaacaggaagtcttccttaactattacttttccttcatttatctctgttcctttacttcttccrtgtcactgtagacattgatgactgtgtcctattagattttatcttctgagattacagatttgccttttgttttatctcctgtcaaggcca

SEQ ID NO: 101098 - DNA, 548 bp, Homo sapiens
caattgcaattcctaagaccccaattaaaatgtgtctcttttgtttgctgccctgcagtgttggttttctttcttaatagttgacataaatattattttcttccctacaaagctcaacatgttctaagtagaaatgtttgttatcatttctttttctttttcctctttgtgtttatgtttttaattgactaataaaatttgtatatatttactgtgaacatgttttgaaatatgtacacattgtggaatggctaaatcaggctaaataacatgtgcattacatcatgcatttattattttttataatgagcacacttaaaatatactcttagcaattttcaagaatgcaatatattgattattaactatagtcatgatgttgtacaatagatctcttgaatttatttctcctgtctaactgaagttttgtatcttttgataaacatctcccaactccacctccccactctcagaccctggtaaccacmattctactctcttcttctatgagtttcacttttttagattccacatataagtgagatcat

SEQ ID NO: 101099 - DNA, 447 bp, Homo sapiens
ttcaagtttgtgaatattataatttccctyttattattctagtttgaaaaggatgccactggttcccagttttaaaagactatttttctaattactttactctatacaaagatacatactccaaaaatttaacttttaatatgatatcagtttaatacagataactcaataaaagctaaaaaaaaataaaataaaatgcctacttagaagaaaaaaagaatataacataaataacagacccctttcttacctcgacaaagtgaccacttattgataagaatctctgcacggtcaggacaggagtaggaaagcatctgcattcggtcatttttatttctccttagctttagggtcagctactggacaaagagcaagcctgtgtactcttatatcccgagcatttcaaatcctgaacaaagttgcacagcttctgaacataaacaaggc

SEQ ID NO: 101100 - DNA, 559 bp, Homo sapiens
agtatctgaattgtttttctatgttatcttgtaggtcactgagtttccttaaaattgctattttgaattcttagttataaagttcacatatcggttttctaatcccaaaatggcagcatagaagcaagcttgcttctctcccctccaccagaaaccaaaaagaaatacacagcagcaagatcttcaccagcagcaacccagagatcctgtatgaggatgagacagttcctgtaggtacagagaagtggaaacattctgagcagatggtaggagaaccagattctacatccatgaggcctcttccctgcattacaccaggcatcagcagtatgaaaaatctgccctcaactcatggtttctgcaytgaaaaacgtgaaattgagattgtcaaccagctttcccatcttcttcggtttcctgccaggagacctgcctttgccttaaaccacaggtagcactgtgactgcctggagggagaaatgtctgtgaaggctggcaaagacaaatagggaagccaggactaccatcctcagccgtaaaaactccttgtaacttgacc

SEQ ID NO: 101101 - DNA, 547 bp, Homo sapiens
ttatctgacaagggattaataactagagtatatagaaatctcaaacaattcaataggaaaaaaatgtaaaccttaatttaaaaatggacaacatgtctgaatagacacctctcaaaaggaaatatacaaatgactaacagctatattaaagtaatgctcaacagtactatatatcagagaaatgcaaattaaaaccacaatgagatatcatcycatcccagttaaaatggcttgtatcaaaaagatagataataacagatgccggcaaggatgtggagaaaggggaattctcatacacagttggtgggaattagtacagccagtacagaagattgtacagaggttcttcaaaaaactgaaaatagaactaccatatgatctagctatttcactactgggtatatacatttaaaaaatcaatatatcaagaagatatctgcattcccatgtttactgctgcattattcacaataggcaaaatatagaatcaatttaagtgcccataaatggaggaatggataaagaaaacgtggtacatatacacaat

SEQ ID NO: 101102 - DNA, 547 bp, Homo sapiens
ttatctgacaagggattaataactagagtatatagaaatctcaaacaattcaataggaaaaaaatgtaaaccttaatttaaaaatggacaacatgtctgaatagacacctctcaaaaggaaatatacaaatgactaacagctatattaaagtaatgctcaacagtactatatatcagagaaatgcaaattaaaaccacaatgagatatcatcccatcccagttaaaatggcttgtatcaaaaagatagataataacagatgccggcaaggatgtggagaaaggggaattctcatacacagttggtgggaattagtacagccagtacagaagattgtacagaggttcttcaaaaaactgaaaatagaactaccatatgatctagctatttcactactgggtatatayatttaaaaaatcaatatatcaagaagatatctgcattcccatgtttactgctgcattattcacaataggcaaaatatagaatcaatttaagtgcccataaatggaggaatggataaagaaaacgtggtacatatacacaat

SEQ ID NO: 101103 - DNA, 547 bp, Homo sapiens
ttatctgacaagggattaataactagagtatatagaaatctcaaacaattcaataggaaaaaaatgtaaaccttaatttaaaaatggacaacatgtctgaatagacacctctcaaaaggaaatatacaaatgactaacagctatattaaagtaatgctcaacagtactatatatcagagaaatgcaaattaaaaccacaatgagatatcatcccatcccagttaaaatggcttgtatcaaaaagatagataataacagatgccggcaaggatgtggagaaaggggaattctcatacacagttggtgggaattagtacagccagtacagaagattgtacagaggttcttcaaaaaactgaaaatagaactaccatatgatctagctatttcactactgggtatatacatttaaaaaatcaatatatcaagaagatatctgcaytcccatgtttactgctgcattattcacaataggcaaaatatagaatcaatttaagtgcccataaatggaggaatggataaagaaaacgtggtacatatacacaat

SEQ ID NO: 101104 - DNA, 540 bp, Homo sapiens
gctactaacttttaaaattgaatatgcacgtatcttatgaccctacaaatctacttacagagaaactcttgaataagtgcatcgagagtcataaacatgaatgctcacagccacatttttatttttactatcataaataaacggagaaatcactgggtctggcttgtttacatttagatttatcccattgcctttcccttacttagtcttttctgtatcccaaaaggctatatttcttaggcccctttgctttttggtttccaggtaggtttgaccaatgggaaacaatagccaaatwttggagtgtgagagaaggggaaacccagtgtatttttcttcttatctttctgctgtctcccttgtggacatagcttcctctgatcaatcattgcttagatagttccaggtcctgcaaggaagactttgccatgattccagctctcattagatagttttatcttctcaattctgatagtgccacttgctccatccagttgtctctccagatttagcagtttcagtggtttcctgctgttgggt

SEQ ID NO: 101105 - DNA, 395 bp, Homo sapiens
cacggaatggctggaccaatgtgtgtgtgtgtgtgtgtgtgtgtgtgtgtgtgtaaatacacaggcacrgaatggctggaccagtgtgtgtgtgtgtgtgtgtgtgtgtgtgtgtgtgtgtatttaacgttttaagatactgccaaactattttccagttttccaaaatgtaccattttgcatctccactacaggagaacatgatggttactatccctccacatcatcaccaacacatagtatagtcagttgatattttaatttcagccattctaatgggtttgcagtagtatcttgttaatacttttcatttgaatttccctaatgactaatgatgttgaacatctattcatatgcttatttaccatttgtatttcttctttgaagtgtctgtt

SEQ ID NO: 101106 - DNA, 558 bp, Homo sapiens
catgcaaaaaagctgcctttccttttgtccctaagcaaatagctacagttaaaaggattccacaggtagctactctatgttcaacttatcttatataaagtgccactttactgagttcaagactcaagatgaatatataattgattattcccyatctgctctttttctcttgcaacttgtatgtatttatccattttcaaatggctataaagaattacctgagactgggtaatttatagaggaaagaggtttaattgattcacatttctgcatggctggggaggcctcaggaaatttacaatcatggcagaaggtgaagagtaagtaaggcacgtcttacatggcagaaggagagagagagtggggtaactgccaaacacttaaaccatcagatttcatgagaactcactatcatgagaacaacatgggggataccacccccatgatccaatcatctcccaccaggtccctcccttgacatatggggattacaattcgagatgagatttgggtggggacacagagccaacccatattattacactcctggcccctcca

SEQ ID NO: 101107 - DNA, 499 bp, Homo sapiens
atatggtgcaaattagcatcattcattgaaaaaagtatccattgccttcccagacactagtgatttattaaaaagtcagctgtctcatgtttaaaagatggcaataaattttaaaaattcgacattgcaagttaggctaaaacataattatgtttttacctgagacacaagtaaaagtctgcaakggaatcttttccccatatctatgtcttaatgtcacaatgtactcaattttgttctgcaaggtcaagatatactcaaatatttatctgacagctgcatctaagaggtatttttatttaagaataacattttgtagcttattagaagtctaagatcaagacgttggcagatttaacttctgaggattttctccttggcctgcaagacggttgtcttctgagtgccctcacgtggtcatttctctggaagtgaccattctaggtgtttcttcaccttcttataaggacacaatcacattgaattaaggacccattct

SEQ ID NO: 101108 - DNA, 499 bp, Homo sapiens
atatggtgcaaattagcatcattcattgaaaaaagtatccattgccttcccagacactagtgatttattaaaaagtcagctgtctcatgtttaaaagatggcaataaattttaaaaattcgacattgcaagttaggctaaaacataattatgtttttacctgagacacaagtaaaagtctgcaagggaatcttttccccatatckatgtcttaatgtcacaatgtactcaattttgttctgcaaggtcaagatatactcaaatatttatctgacagctgcatctaagaggtatttttatttaagaataacattttgtagcttattagaagtctaagatcaagacgttggcagatttaacttctgaggattttctccttggcctgcaagacggttgtcttctgagtgccctcacgtggtcatttctctggaagtgaccattctaggtgtttcttcaccttcttataaggacacaatcacattgaattaaggacccattct

SEQ ID NO: 101109 - DNA, 499 bp, Homo sapiens
atatggtgcaaattagcatcattcattgaaaaaagtatccattgccttcccagacactagtgatttattaaaaagtcagctgtctcatgtttaaaagatggcaataaattttaaaaattcgacattgcaagttaggctaaaacataattatgtttttacctgagacacaagtaaaagtctgcaagggaatcttttccccatatctatgtcttaatgtcacaatgtactcaattttgttctgcaakgtcaagatatactcaaatatttatctgacagctgcatctaagaggtatttttatttaagaataacattttgtagcttattagaagtctaagatcaagacgttggcagatttaacttctgaggattttctccttggcctgcaagacggttgtcttctgagtgccctcacgtggtcatttctctggaagtgaccattctaggtgtttcttcaccttcttataaggacacaatcacattgaattaaggacccattct

SEQ ID NO: 101110 - DNA, 560 bp, Homo sapiens
caattgatatggtttggctctgtgtcccctcccaaatcttatctcaaattgtaatccacacatgttggaggaggggcctgatgggagataattagatcatggtggtggatttctcccttcttattctcatgatagtgaatgaattgtcatgagakctgatggccttaaagtgtggcactcccccttgctctctctctatcctgcagctatgtaagacatgctacgtttcccttttaacttctgccatcattgtaagtttcctgaggcctccccagccatatggaactgtaaatcgatgaaacctttttttctttataaattacccagtctcgggtaactgtgaaaacaggctaatatagaaaattggtaccaaattagtgggacatttctataaagataactgagaatgtggaaatgacattggaactaggtaaccagtagagtttgaaacagcttggagggttcagaacaagacagtaagatgagaaaaagtttggaacttcctagagactagttgaatggttttgaccaaaatgctgatagtgatattaacaatgaag

SEQ ID NO: 101111 - DNA, 560 bp, Homo sapiens
caattgatatggtttggctctgtgtcccctcccaaatcttatctcaaattgtaatccacacatgttggaggaggggcctgatgggagataattagatcatggtggtggatttctcccttcttattctcatgatagtgaatgaattgtcatgagagctgatggccttaaagtgtggcactcccccttgctctctctctatcctgcagctatgtaagacatgctacgtttcccttttaacttctgccatcattgtaagtttcctgaggcctccccagccatatggaactgtaartcgatgaaacctttttttctttataaattacccagtctcgggtaactgtgaaaacaggctaatatagaaaattggtaccaaattagtgggacatttctataaagataactgagaatgtggaaatgacattggaactaggtaaccagtagagtttgaaacagcttggagggttcagaacaagacagtaagatgagaaaaagtttggaacttcctagagactagttgaatggttttgaccaaaatgctgatagtgatattaacaatgaag

SEQ ID NO: 101112 - DNA, 560 bp, Homo sapiens
caattgatatggtttggctctgtgtcccctcccaaatcttatctcaaattgtaatccacacatgttggaggaggggcctgatgggagataattagatcatggtggtggatttctcccttcttattctcatgatagtgaatgaattgtcatgagagctgatggccttaaagtgtggcactcccccttgctctctctctatcctgcagctatgtaagacatgctacgtttcccttttaacttctgccatcattgtaagtttcctgaggcctccccagccatatggaactgtaaatcgatgaaacctttttttctttataaattacccagtctcgggtaactgtgaaaacaggctaatatagaaaattggtaccaaattagtgggacatttctataaagataactgagaatgtggaaatgacattggaactaggtaaccagtagagtttgaaacagcttggagggttcagaasaagacagtaagatgagaaaaagtttggaacttcctagagactagttgaatggttttgaccaaaatgctgatagtgatattaacaatgaag

SEQ ID NO: 101113 - DNA, 548 bp, Homo sapiens
atgataaactctgaaatgttgagaacttttttcccattaatgtcacacaggtgaggtaaattatggagggtgagacaaacaataatgtagactaagctgtctgctgattgatctggccaacttaatgcatttatcaaagcagggttcatttgcaatatgcatacaacagcatgcagatcccacaggctaaaacagatttttgaggtctttctgaacacacagatcagctgaaatttacttggctgcttatcataaaagccatcatcatagatcaaaatcacactgtgaattagcattaccatttccaactagaatacaaaataaaggtacttaaagattttttgttgttgttcgttaacctttcacccagtgytttagaatacagtttacgacatagtggattctcaataaatatttattgcataaatgaatatggctattgaaacagcaattctttgagcccgcctacttctggttcctctcagtttcatcactgttagtttagtttctttgcttcagtcgcagtctaaacctacatagtatttgga

SEQ ID NO: 101114 - DNA, 608 bp, Homo sapiens
tctatgttaaatctcagctatgtttttccagtaataccagaatgcatctctttccctgctgtcatgttctatacctcaaccactcacttacaaggctgtgtccaactcttctaattcaagatggttgtttctagggtttgtgtgaggtcatcatcgtaggcttcctttattcctttctgagatgaatcatcttctttcaggaatcctgttcccctcccactctttgttgtgttgttattagtcttctgttgctgctatagcaaattatctcataattggaggcttaaactaacacaatttattatctcacagttctggaggtcagaattccaaaatttgggcargaccatattcctctgaaggctccaggatagagtctgtgcccttgccttttccagctttcagtggtcacttgcattccttggttcatggccccttcctccatcttcaaagctagcagcatagcatcgttgaatctttccctttctcctgccttactcattctctaataacgatgcttttgactatattgggtccaccttaatattctccctatatcaagatccttaacctcatctgcaacatcccttttgccacgccatgtaaaa

SEQ ID NO: 101115 - DNA, 573 bp, Homo sapiens
ttgtgcctttaaatcataagtattatttattyacttcttattttagtcttagtacattggctagatcctcttgagtaatagaaaataaattttaaccaatttaatacttaggagaatatgtatttttaaaaagagttaaatttcattgccatctgtgaatttaaacatgataccaggcactgtaataattaatattgtgtggaatgaaaactaggaatagttggccatttcctaagtgaaacttgtacatccaatgtgcacttggcaatgtttcaggaaatcataagattgagaaaaaaatgcattaacttctttggcaaaataaacgattcccatctgacaactggagattatgattttttgttttgatttttattattttgtgtttgtctttcttggataaaaagaaaagttttaaaggaaaatagaaaaaaatggaaaagtaggcaaagtgagaactgaagctaatgaagaagccacagatagacagcctgaacggatctatgagttgttatcaaataataaaaatggaaaatgtgtaacttgaaggaagagatcacttcttgttttggt

SEQ ID NO: 101116 - DNA, 550 bp, Homo sapiens
tgaatctttgactcagaatagcgagaggaagctatgcttgtcagcagtctcccagagcagagcggaatgcccatcatccatgattcggggcagtgtggggttcagagactggaggacactcagagtagcagcaggctgacatcagctgcagaacggagtttactcagaatgaggctttctgttggatggggttttctgatggaatggggttttctgttggatggcgttttctgttggaatgggattttctgctggaatggggttttctgttggatgattggtgctcagaagtgtgtttattggggtgagtctgaccttaattggctgactttcagaagtgagggctgacacagattagttggtttacaagtgtatattcccaaactgcatcatccttgattgactgaagaggtttaaacaagaaaaacgtctgcttgttatcagttatagaacaatcagtcttgtcctaagtttgtggagggttttgaytcataccctcgtggaggcttccttgatgtgtaaggccatttttagcttaaacatttttatt

SEQ ID NO: 101117 - DNA, 421 bp, Homo sapiens
acaaaacaaaacaaagaaacaacaacaaaaaactttttgattgaggaaattcaattatttctccccccttcaggctttggttgtcctaygtaagaatctgtcaccaaatctaaggtcatgaagatttactcctatgttttcttttttttttttttttttttgagacggagtcttgctctctgtttccctctgagagtttcaaggttttagccaatatatttaggtcactgattcattttgagggttttttttttctttttttttgtatatggtatgaagtaagagtccaacttcattcttttgaatgtggaaatccagttgtctcatcactttgaggaaatgccagactgttttccatagcagctgcaccttttaaatattccctccaacaatgtatgaaggcttcatttttttaatgtcc

SEQ ID NO: 101118 - DNA, 534 bp, Homo sapiens
aggcaggggctcatcttcactccagcctcattgctcacctctgcatgggcataaccttctccatctctaccttccttgagcccttttgccatcagcaaggaattactccatactgtagtgactcyatagtttggctactgggttccaaactttatacctctaggcaataccctcaaacttaggacctgattttttttttttaactttcttttcttctggtcttgcactactgacctctgattatttcctggctcacttagtaggataatgcatatgatattccaaaccaagaacttattgctaagtgtaacatttaacaatagtgggcagatcatgaggtcaggagatcaagactatcctggctaatgctaacatggtgaaaccctgtctctactaaaaatacaaaacattagccgggtgtggtggtgggcacctgtagtcccagctacttggtaggctgaggcagcagaatggcctgaacccgggaggtggagcttgcagtgagccaagatcatgccactgcactccagcctg

SEQ ID NO: 101119 - DNA, 623 bp, Homo sapiens
atccatagttttcccagaatgttacccaaaaccatcttccaaggggaatcataagcacgcaggtgagtcatgtgtttcacctgacccaatcctctcactatcctgatcaccttgttttaatactaaaaaaaaggaagtcatttatcatctaataataaacataaataagaaaaaaagagttaacagaaattaaatgtgtacttctcaaatgctttctgtatttattattcccttcaagtacaaagaatttctgtcttgtatgtgctattttgggagtatgttaaatatttgtkatatggctaaaggctaccagggcatagtctccttcctcattacctattctgatagttacaaaaccctgaagctagaaggaatctcatacactatataggccaagccttcattctgcagaggcagaacagagctttaagaaacagctacttaggatttgagttaggacaagaactcagttatctgacctagtctaggaggtcagaacattctgctgaattcatctattataatctgtgagcaacaacttggaaaaggagttgcctgaaatttctctatctacttgcctgaaatttctccaaccagtttaatgacgctacctttcgccaata

SEQ ID NO: 101120 - DNA, 509 bp, Homo sapiens
ttaattcaattcttaagttgttgtcttgattatctaagttctgtctctagtctcctatggctatttttgtggctttgaccctagctgacccagcctattgtcagtagttaagaaggtagattccaagtgctcaatgtcatgttaagacttccttgctacctactaagggaagtcatttttttagccagctgttttaagttctcctaacctatttcatatgctatgttcccacaataaccattcccttctcttgccatttctttgtcctctctcctgcaatgtttcttctactgaaagaatacggcactactgaatctgtttctcctgggcagggcttgcattatcccacctgttccaaattctttttagaacygggccctttgggtgaatgatgaaccatttaatagccccatgtactatagaaatttaaccattttcaaccaaacctgtcatagataagaacaaaggtaagccatcatgtgtctagaaaaacatacaactgatttcct

SEQ ID NO: 101121 - DNA, 352 bp, Homo sapiens
ctgctggttgcttaggaaagagggaccatatctggttcacaaagactgggttgatttgagaagaaggaaggggatgaagaaagcaaatgccccagggtgttttgtagcaagaatccctctatgatgatttaacacctgacgtttatctgcccagtagtttgcaaaatacctatactttatctctttctatccccttctaacccagtaaggtaaaaatgattatctccactttgttgacagggaaacagaagcacagagaggtaaagtggcttagctaactgggcacagygaaggcctgtaatcaatgtttactgaatgaaaatgagccacagccctgtcttcactacacagc

SEQ ID NO: 101122 - DNA, 609 bp, Homo sapiens
ctgtgcaggctggccaatcatacaattgctggtggaattgtaaattggcctgacccaattattgggtcaatcatacaacaattgctgatgggactgtaaattagcccaatccttttgaatccaaactttagaacattgtccaaacaactggcctatacttccaagaacatcataaaagaaaaaattcacataggttagtaacaggctagagaactgttccagattaaaggagaaaaaagagacaagacagcaaaacataatctgagatctttaattggatcctgatctgctaaataattagctgtgaaggtcatcaaagggatagttagtgagtttttaatatggatcatatattagaggataacagtgtatcagtattcaatttcctcagtgtgataattatgttgtattcattcagaagaatgtccttgtacttaggagttacctgtagaaatatttggaagggggaggtttcataatttaggagaaaattaacctcaaagaggttagaataraaaacatattaatacttatataggcagctgaggcaaatgtggtaagggtaaataggtattgatttactgctcttatgaatattctgtagctctg

SEQ ID NO: 101123 - DNA, 558 bp, Homo sapiens
cattttgatattaatgactaatctgtcaagtttttgactgttttatttgagacataaatacaactaagttctaaattattaattcattatataaaatagagaaaattgatacacacagaaataatgctagtaattgtggtttggtttcccattctattaagcaaarcttatttaagcattattggtgctgaattaggagatgatagacatcataatcttatttgtatataaatatttaggcttggtctaggatggcaattctcaaacttaagctgtcatcaggatcacctggagggcttgtcaaaacacagatttcttggcccactctcagattctgcttcagtagttctgtggtgaggcctgagaaattgtgtttccaataagttcccaggtgaggctaaggctaatgttgcatttctgggactatactttgagactcgttggtctagtggaaggcagtagaccagagcaataaatcccatggactttggtgataggcccagatttcagccctgactttggcacttatgagctgtgtaacttggataagttagggat

SEQ ID NO: 101124 - DNA, 533 bp, Homo sapiens
caagtttttgactgttttatttgagacataaatacaactaagttctaaattattaattcattatataaaatagagaaaattgatacacacagaaataatgctagtaattgtggtttggtttcccattctattaagcaaaacttatttaagcattattggtgctgaattaggagatgatagacatcataatcttatttgtatataaatrtttaggcttggtctaggatggcaattctcaaacttaagctgtcatcaggatcacctggagggcttgtcaaaacacagatttcttggcccactctcagattctgcttcagtagttctgtggtgaggcctgagaaattgtgtttccaataagttcccaggtgaggctaaggctaatgttgcatttctgggactatactttgagactcgttggtctagtggaaggcagtagaccagagcaataaatcccatggactttggtgataggcccagatttcagccctgactttggcacttatgagctgtgtaacttggataagttagggatc

SEQ ID NO: 101125 - DNA, 506 bp, Homo sapiens
aagagaatagcaaaaggaattaaaagttggataaagggtggaatgagtaaaagcaggagaagcaaggtgaaggggcagatgagcaacaggcaagacaagaggcaaaagttaggcagccaaaacaaaaagtaagattaaaaaaaaaaagtgggaaaggacaccaaggtcagcaagatctagatcaaaccagtaaggggcagattttttggggatagttatgtgcattaragataaaaagtttccttaatataacactatgtgataatcagttcattatagcttatgcatcaggactgcatatcatgcatgcacttaaaattacgggatggaggtgaccatcctccacggtcgcaagggccaaagaaagcaacacatcttttaatcaaaaaggcagacaccggctagagattaggcagccatgggaagagaaggaaaaaaaccatcacatgaatagacccaaagcacaccaaactgaggctgatctcatctcgcagaggtgaggtcag

SEQ ID NO: 101126 - DNA, 506 bp, Homo sapiens
aagagaatagcaaaaggaattaaaagttggataaagggtggaatgagtaaaagcaggagaagcaaggtgaaggggcagatgagcaacaggcaagacaagaggcaaaagttaggcagccaaaacaaaaagtaagattaaaaaaaaaaagtgggaaaggacaccaaggtcagcaagatctagatcaaaccagtaaggggcagattttttggggatagttatgtgcattagagataaaaagtttccttaatataacactatgtgataatcagttcattatagcttatgcatcaggactgcatatcatgcatgcacttaaaattacgggatggaggtgaccatcctccacggtcgcaagggccaaagaaagcaacacatcttttaatcaaaaaggcagacaccggctagagattaggcagccatgggaagagaaggaaaaaaaccatcacatgaatagacccaaagyacaccaaactgaggctgatctcatctcgcagaggtgaggtcag

SEQ ID NO: 101127 - DNA, 612 bp, Homo sapiens
aataaatatgtatcaaaagagttttgaagcaggaatagtaaaattgagtaatatgttcaaatttaaaaatttgtatatgttccaaacaaagtcatgtgtcatcttcaacttaaacttttcctcacataaaagattaaacaattgctcctaatagtctttaatgtactttctgtatcttgagttctcagttattcccatcattaactttgataacatcagtactgtgtccaagatagtatttttgactctttaactgaccatgataaatataaggagaatgagacttaagtgcactgactatatctccattcctttgattaaaatwttttttaaaaattgaattgtaatggaacaatgcaaacctgcagaaaactttttgcatgctatttttcatctgaaagtaaaataatacctgaatactctttgtctcaccagctttttacagaatgaatggcacttacagggctattttttctctgtaattattgagaaagattttaaggcaaagcatttaggagctaaagcctgcatgattttgcttctgtgtggggagaaaagaaacccacatccttacttggtaaagaacttaagggacaaaataataataataga

SEQ ID NO: 101128 - DNA, 580 bp, Homo sapiens
tattaaatctacatgctgctactttggaatgtttacaaaatgttgttaaaaatggtctccgtttaaatatgtttattgtttctctaatttttaactagtcagcttaactgatactcaaaactctctacaaattttattcaacattatatttttatctttacaagtttttcttgtaaattaattgtggggtattttactacatcattaaaatcaaagtagacttttttagtwtttatctatgtttcaacaatcttagatcctatcgataaaaatcaactaacttctaatactacattatttgtgtgtatgtgtgtgtgcatgtatactaatagtataatacttaatataaattaaatattttaaatgttcattattattacttgtttagtacataagttgtttaaatatgtattctaacatttattatttgctaaaacacataacagaatatgtagcatcttaacaattattaattgtacagtccagtgataagttcataatgttgtctaatcatcaccattatccatttccagaactcctttaatctatttcctccttcttctaaatgttgggaaccacc

SEQ ID NO: 101129 - DNA, 504 bp, Homo sapiens
aacaaatatgtgaccacactttgattagtggtactgtatctgtatttgtaagacctatgtttgccagaggatgggacaaatatactctttataagttaagggatctgccatttcagtgaagtttttgggaatccakttgtatggggcatgtgaagatacccccattcaaagcaaaagacaatttgatatactttgtatttcctaaaacacacaaacacaagttcacacacatctgcaatacttgctacattttgtatattttgaatgcaatctaaatcatattttggtccttttctatgatccaataattccattatgttgcctgttttgagtgtgtcccagtgcaagaaatagttcttcagttgcttcaggctgcaaagtaatcagatttctgagactcttttccacttaaccttatgacctactaaacctactaaaccaatgacaggagaggattgtgtgttgagaatcatttgcagtcaccttggactttgaataaagtta

SEQ ID NO: 101130 - DNA, 674 bp, Homo sapiens
gcctatcatggtacccaacatactgtagatacttaatactatttaatatttaaatgaataaattcatataaaagataacttttccggagccatttactttttttatgattgaggaaattcagtggcagagtgagccttcctctgagtccctgatcagcgaaggagtcattgctccattatctttctcatcaggcyattcccattgagagatgcgcttcaggccagggcttctggattgcttgtcagcaagtcatcttactctgcacataacatgttttctagctccacataagtaaacaaacagcagaagaaaaaaggggagagtcaaaagatcaggaacaaatagattgctatcttttggaaacacttgcctcaaaggatttggcagcactactcataataattttgtctatgtttttttgaagcatcaacaaataatatcatttaaaaaaagcacaatgttttcaaaggatgcaaacgagaggaaataaaaaggatattatttccactagcatcaatacataccaatctggttaaactttgtggaagtcacgataaagggatgcctggctatagtcacaggagcactatacactgtatatttgttataagcgatccactgtaaactgactattttcttcctcatgtaattttagtgttgttttttagagcat

SEQ ID NO: 101131 - DNA, 674 bp, Homo sapiens
gcctatcatggtacccaacatactgtagatacttaatactatttaatatttaaatgaataaattcatataaaagataacttttccggagccatttactttttttatgattgaggaaattcagtggcagagtgagccttcctctgagtccctgatcagcgaaggagtcattgctccattatctttctcatcaggccattcccatygagagatgcgcttcaggccagggcttctggattgcttgtcagcaagtcatcttactctgcacataacatgttttctagctccacataagtaaacaaacagcagaagaaaaaaggggagagtcaaaagatcaggaacaaatagattgctatcttttggaaacacttgcctcaaaggatttggcagcactactcataataattttgtctatgtttttttgaagcatcaacaaataatatcatttaaaaaaagcacaatgttttcaaaggatgcaaacgagaggaaataaaaaggatattatttccactagcatcaatacataccaatctggttaaactttgtggaagtcacgataaagggatgcctggctatagtcacaggagcactatacactgtatatttgttataagcgatccactgtaaactgactattttcttcctcatgtaattttagtgttgttttttagagcat

SEQ ID NO: 101132 - DNA, 571 bp, Homo sapiens
gccaagcatcacagtaaggtttatggagaatccaatcaagagattgaagatctgggtttggatcgtatccttgtcactaagtagctgattaggactcccagacatccaactataagaagtttaatgtagggaatgtattagctcctataactaaaacgtccagggactggtcttcagacacagctaaatcaaggagatccaaccatgtggccaaggctctgtgtttctccctcctgtgcttggaccttctttacttttttttttttaatttaaaattatttgtgtatttatttttaaattttactttatgttctgggatacatgtacagaatgtgtaggttttttacataagtatacgtgtgccatggtggtttgctgcacctatcttaaaattcataaaatttacagaaaaccattaagaaattttattmtctctactctccattctgcagtttggactactggggccttgtgatttaaatgacttttctaaagtcatgattctgctaagtgccagaattgtaagacaaatctgttttctacctaattcataactagttctttccagaac

SEQ ID NO: 101133 - DNA, 628 bp, Homo sapiens
ctgtcttatctaagaaattctgaaatcagtttttttttttaagccacattatgaggaaaggttttttatttgtacttccatgtgtgcaggggtgttttgtacattatgaatttgtattgactccaaatttgtgctggcatttatatggaaagagggtggaaaaattaagtattcaggtagaagggaaattgagtgacggaatttaacgcaattcagaatacaataatctatcggctttccaggccatagcaagacatggccactagaggtcagtaaaaggcaagcgaatgagaaagctttaggcmggaagcttccccacacccaggtggttcctcagattcaaggctcgtattttgaaaggctttctttcaaaaatgactaaaaagtggtattcaaggtttcatgggagaggggaacaaaataaagaatgtcgcctctaaaaaaatgaaactgtgaaaaaaaatgtttgaagaggtttcactgtagaaaacctttcttttgtgattgctacctaagaatgaaaagggatatttacctttactggccctttgggcttagattttagctggtgtgacaaagcctattgcacagtttctgtgtcttcctgcagtatcggaaggcgactccc

SEQ ID NO: 101134 - DNA, 628 bp, Homo sapiens
ctgtcttatctaagaaattctgaaatcagtttttttttttaagccacattatgaggaaaggttttttatttgtacttccatgtgtgcaggggtgttttgtacattatgaatttgtattgactccaaatttgtgctggcatttatatggaaagagggtggaaaaattaagtattcaggtagaagggaaattgagtgacggaatttaacgcaattcagaatacaataatctatcggctttccaggccatagcaagacatggccactagaggtcagtaaaaggcaagcgaatgagaaagctttaggcaggaagcttccccacacccaggtggttcctcagattcaaggctcgtattttgaaaggctttctttcaaaaatgactaaaaagtggtattcaaggtttcatgggagaggggaacaaaataaagaatgtcgcctctaaaaaaawgaaactgtgaaaaaaaatgtttgaagaggtttcactgtagaaaacctttcttttgtgattgctacctaagaatgaaaagggatatttacctttactggccctttgggcttagattttagctggtgtgacaaagcctattgcacagtttctgtgtcttcctgcagtatcggaaggcgactccc

SEQ ID NO: 101135 - DNA, 628 bp, Homo sapiens
ctgtcttatctaagaaattctgaaatcagtttttttttttaagccacattatgaggaaaggttttttatttgtacttccatgtgtgcaggggtgttttgtacattatgaatttgtattgactccaaatttgtgctggcatttatatggaaagagggtggaaaaattaagtattcaggtagaagggaaattgagtgacggaatttaacgcaattcagaatacaataatctatcggctttccaggccatagcaagacatggccactagaggtcagtaaaaggcaagcgaatgagaaagctttaggcaggaagcttccccacacccaggtggttcctcagattcaaggctcgtattttgaaaggctttctttcaaaaatgactaaaaagtggtattcaaggtttcatgggagaggggaacaaaataaagaatgtcgcctctaaaaaaatgaaactgtgaaaaaaaatgtttgaagaggtttcactgtagaaaacctttcttttgtgattgctacctaagaatgaaaagggatatttacctttactggccctttgggcttagattttagctggtgtracaaagcctattgcacagtttctgtgtcttcctgcagtatcggaaggcgactccc

SEQ ID NO: 101136 - DNA, 422 bp, Homo sapiens
agatcttgtttgtgagtcacactgaagagactgctattaaaaacatttctggcatatgaggttcaaacaatatttgaggttcaaacaatatttgaatatttgaatcaggttgagaatctggttgagaacctggaataacaacaaatataagaaataaacccatagctattctagacatattgctaaagagttattcttgagatagggagycagataggtgaagccttcctcttaggtttagattttctaagtgcagtttcagagctgaagaatttatggaaggagattagccatacttctcattttttttttcattttgatgcaacctcacagagtttgtgagaagagattttggctgaaattgggtttttatatagattgagtaggcacctctcatgtgtataattttaaagacattgaaa

SEQ ID NO: 101137 - DNA, 548 bp, Homo sapiens
aactaattctcacagcttcctccactgtcaccctggttcatgccactgtgacatctgcttggattgctgtaacagcctcctgactagaattcctgcatatgctcttacctgtcttcagtctcttgtcaaaacatcagccagggtgattcctctgttcagaaccctcaaatgacttcccatcttgctcaaagtaaaatctaaagtcatcacaaagaccttatagccctatgaaatctgttgcctctttcttacctggcttcacctcacctactatactcacccttccttacactggcccgcttgctaccattcctcagagacaccaggcacactcctatctcaaggcctttgcccttgctggtggtcactcttyctaaaatgttcttcccacagaaatttgcacagcttgcttccttgcttcagatctttactcaaatgccatctccttagtgaggacttcctgaccactctatcagaaacttgcagtcatacacacaatttctatctccctcccctacttcagttttctccttggtgctttgtcacta

SEQ ID NO: 101138 - DNA, 516 bp, Homo sapiens
aattcattcccttcttccctcttccaagaccttactccttatgggccttaatattttttattttgaaataagtgatacttatcttaaacactttaaacagtctgtatcaaacacaaaactgtatttgactctctttgatgaaagaagtgctgagcatatttgctaatagtttctaactcagaattggcaaggtttatttaagtgttatcttatacttcttttccttttgaaatttggttctgtcccaaaataatcagcagaggagccaatgggttgacatccttggatctggtctaaacgttctgattaacagttcctcagcagatgtgtcagcattacttctcttgaaatgattctatgtggattgttttccaggtactttttattttgctatgaaaaaagtcccacacatctttggtttggtttttctgtttttaatyttagcctcgctaacaaatgtaaagaaaaattattctcatcttctggctaattttggattggtaaggaagagtgttt

SEQ ID NO: 101139 - DNA, 617 bp, Homo sapiens
gctcactgagcactttcataccacatcatttattgttgtgtgtttgtatgattaccatatactttatgaatatttattttataataacttgttttcacttatcttccaacctgcttattccagttcagggtcttgggtagctggaacctatctcagcagctcagggcgagaagtggaaatcaacgctggacaggcaggacaccattccatcacggggcacactcacacacacacccacactcagattaggacatttagacacatccactcacctaatgtgcacatctttggggtgtggaaaggaactgagtagccagaggaaacccacacagacgtggggagaatgtgtaaacttcacacaaacagtggcccagctgggaattgattttttttttccttatcaatgtcataacacaatgacattgraaaaaaatgttattcaaggacctgctatacttagttttataatttcactgtatgtaactctgaacaccgtatctttctttagagttcacttaagattcatcttattaggtagctaaaattggtgtcatttgctggatattacttatcaaaaagtgattgggctgtgggtgtttgacctttaatatgaaatg

SEQ ID NO: 101140 - DNA, 583 bp, Homo sapiens
gaggatgctgcggggtgggtgccgcgttgcctcccgggcgagggaaacgtggcgacaacgggctcggtacgcccagagggaggttgggaggcggagacctggcggcagaaggtgccgagggagcccagctatttgcgaggcttcgcaggcaggcgggcgtgtgttcttcccaccgtgtgtcaccctgaccacccgcctgtcagggccagcgagccgaggccaggatcytgagctgtacccaggtgagcttttcaggaggtccggcatcgtgaaggatgcacagccccggctggttttgatccgaagacttgggttttactttgcgcagggagcgctgtagtactcaaggcgttgtagctggtgatgtctttttcagcagccgctttctgtagatgagggaattcaccggatgtgacaaagaggctccaggtggaaatagccagggaatttgcagtctcaaaagctccacgggcttttctgagcctcccactgctaacgtgcagcaaggcctcatcggttctttccgtcagggcggaggaatgaggctgtccttcggtttcagaatgagcgactaaagtgacag

SEQ ID NO: 101141 - DNA, 618 bp, Homo sapiens
gattaaatagagcccaaataacattttccaaaatgttatagagggaattcttgcttagggtgtggagttgcagactaagtgaactaaaaatttcctaccttctctagaattccatttatgttagagatcataagtacagccaaaattcaaagagaaggagaattccatcaaatggtcaactcaacaaaaagaaaacaatcatgccagttatagtcacactataagggaataaaaaagaggaaaggaatcaaacaagcatacagcacatatgcaaaccattaggatatttccttttayatctaattgtttcaggattgtaccaatgcatccatattaaattataacgttaataggttgtccttttacctagagtaaaatagccaagaaaagatgtgttatctaaaactattaaactggaatgctagttaaagatattgaaccgtagaaagatgagccacctacagaatcaataacaacattttagttaggaccttgagggtgtttgccagccttattgactgtggccagttccattctgtttaacctatgacagctgatgaaactagaccctggggtggaattactgcccaattcatcagtgatgattattgagctgtt

SEQ ID NO: 101142 - DNA, 550 bp, Homo sapiens
gtttttgatcttaaatcagtatcagtataaaagtcctcaggtattgccctaagataagcaccctcacccacttgacacttgaggcatttgtgcctcatgtactrtgagtatacaggagaaaatcattgaagaactagaaaatgtgtcacattttagacataaagctagataactttatgcccccaggttctagttctctaggaaataggacactcttctgaacaggttagaacacatctactaccagtcctaggactgtttgcacatagatccatttccaaatttctttgcagaactctatataacctggggcatggaagtagaagactagctcttgaaatggagagatgccgcaacaaattgaagggaaaaaccagggtatttcttcccctccttctgcctggggcacgtttatgcctcctacatggttctaattcccaccagagaggtccatcctactcccagcctcttttggagtgatcttggccttggaatatcaggtagtagtgtcccctcctttgtcactctagcataagtaatagttgttgct

SEQ ID NO: 101143 - DNA, 550 bp, Homo sapiens
gtttttgatcttaaatcagtatcagtataaaagtcctcaggtattgccctaagataagcaccctcacccacttgacacttgaggcatttgtgcctcatgtactatgagtrtacaggagaaaatcattgaagaactagaaaatgtgtcacattttagacataaagctagataactttatgcccccaggttctagttctctaggaaataggacactcttctgaacaggttagaacacatctactaccagtcctaggactgtttgcacatagatccatttccaaatttctttgcagaactctatataacctggggcatggaagtagaagactagctcttgaaatggagagatgccgcaacaaattgaagggaaaaaccagggtatttcttcccctccttctgcctggggcacgtttatgcctcctacatggttctaattcccaccagagaggtccatcctactcccagcctcttttggagtgatcttggccttggaatatcaggtagtagtgtcccctcctttgtcactctagcataagtaatagttgttgct

SEQ ID NO: 101144 - DNA, 637 bp, Homo sapiens
gtaatacaaaagtctgttcagattatgcctcaaaaatggaaacaatgtcagatttcatgctaacagtgcacagatcgctgtgacaaccatatttctcaagttgttattgcttgtgatgcacatttaagtgcacagaacatttacctttatggcagttttattctcagcacagtaaatagcagaagggtttctgttcaattgactctcataaaaggtttaaatcccttttcattttggcatagkttatatcttaagtttcttactccagtttacatctatactctgagtagtatagatgttttgtatgagggaatgacctgatgccagggtgaaaggaaattgtacttgctttaagggatgttgtgaattgctgcagttagaaagccctttgtgagagaaatgactttaaggcagaactgtctcatcacaaaaatgaacagctaggcattttataaaaatagaatgttttatgttacgttgagcatcatcacaaagtatctgacgccaataaacaaatgctacaatattctatatccgattatagcctgttatttcataatcaaataaatgtgaataggaataaattagacaaatattatattcataggtatattgtttattttatctatagttctac

SEQ ID NO: 101145 - DNA, 637 bp, Homo sapiens
gtaatacaaaagtctgttcagattatgcctcaaaaatggaaacaatgtcagatttcatgctaacagtgcacagatcgctgtgacaaccatatttctcaagttgttattgcttgtgatgcacatttaagtgcacagaacatttacctttatggcagttttattctcagcacagtaaatagcagaagggtttctgttcaattgactctcataaaaggtttaaatcccttttcattttggcataggttatatcttaagtttcttactccagtttacatctatactctgagtagtatagatgttttgtatgagggaatgacctgatgccagggtgaaaggaaattgtacttgctttaagggatgttgtgaattgctgcagttagaaagccctttgtgagagaaatgactttaaggcagaactgtctcatcacaaaaatgaacagctaggcattttataaaaatagaatgttttatgttacgttgagcatcatcacaaagtatctgacgccaataaacaaatgctacaatattctatatcygattatagcctgttatttcataatcaaataaatgtgaataggaataaattagacaaatattatattcataggtatattgtttattttatctatagttctac

SEQ ID NO: 101146 - DNA, 438 bp, Homo sapiens
  misc_feature (1)...(438): n = A,T,C or G
ngaattcaaaataatcaactcaaagaagctcaatgtactagaaaagaatacagatagacaactaaatcgaaccaggaaaacaatgaaagaacacaatgacagcatcaactaggacatataaactatatttaaaataaaaccaaacaaattctggcacgcaaggacacaataactaaatttataaattaactagaaggaatcaacagcagacttccaagcaaaagaaagaattagaaagttcaaagtcagatcatttgaagtaatcaactcagaggaacaaaatgaaaaaataacaaaggaaagtgacggaagsctaaggattttatgagacaccagcaagagcctcaggacaaaaaaaaaaaaaaaaaaaagagggagagaatgaggcaaagagcttatttgaagaaataatggccaaaaactttccaaatctgagta

SEQ ID NO: 101147 - DNA, 617 bp, Homo sapiens
cgtaatttattgaaaaaaaaccttcagtttatattaaactgagatttctgatccacagttctaattttaaaaagtacatttagttctgcatcacatcacaataaagcaattacttatgcatttcaatcaatattaaggaaacaaatcaaaggtgttattaggcttaacagatgcaggcagaatgcaagggaagatggaacaaatacactatataaacatcttcaaactcaaatatacattggtttcatgtgaaagtttcacacagtagcaacaacaaacagaatgaacataggatactgtcttataacagttccatgaagaagccttggatcagagtttgccaaaagtactatcttgagatgtttcaagacaaacagcttttcacatttatgcagtgctgttcagaaataaacacrttttcacaattgtttttgtttgaagagaggctggtgaaatgactgaagcttgatttgtagctgttctgtaatcttcttgtgcaaagccttgtggtggggaagggagtggggtttcaggagttcagatgtggtcttcataagaaccagtgtgtacatgggacctaaaagtacagtttgtccagttaatggatcttgagatga

SEQ ID NO: 101148 - DNA, 617 bp, Homo sapiens
cgtaatttattgaaaaaaaaccttcagtttatattaaactgagatttctgatccacagttctaattttaaaaagtacatttagttctgcatcacatcacaataaagcaattacttatgcatttcaatcaatattaaggaaacaaatcaaaggtgttattaggcttaacagatgcaggcagaatgcaagggaagatggaacaaatacactatataaacatcttcaaactcaaatatacattggtttcatgtgaaagtttcacacagtagcaacaacaaacagaatgaacataggatactgtcttataacagttccatgaagaagccttggatcagagtttgccaaaagtactatcttgagatgtttcaagacaaacagcttttcacatttatgcagtgctgttcagaaataaacacattttcmcaattgtttttgtttgaagagaggctggtgaaatgactgaagcttgatttgtagctgttctgtaatcttcttgtgcaaagccttgtggtggggaagggagtggggtttcaggagttcagatgtggtcttcataagaaccagtgtgtacatgggacctaaaagtacagtttgtccagttaatggatcttgagatga

SEQ ID NO: 101149 - DNA, 618 bp, Homo sapiens
gtcattgaacacaactgggtgttgtagccaaaattggccttctaaaatgtgtagttcttcaygtcacctgcctgctgaaaatattttaatagtttccaatttctcaaaagttaagttcaaatctcttaactatgtgatacagtgatttagcatgcaggctttgtgcagagacacatctgcatttgaatactaattctacagtctcttagctgtgttaccttgggcaaattactcaatctaagactcagtttccttttctgtaaaatggggttaacagttggacctcccttggaggttgctgtgaggatgaaatgataaaatgcatccagagcccttgttctgtggtctagtgcaatggtaactatgcttgttctttttttttaacttatgagtcccattgatggccttacccctagtgccactccaaaatagcttcttaacactccccccagcccccagtattgccaatcaccatgaatttcattttatttcttcttgggcatagttttctctcttgtacccgtgtgcctttgcacatgttgttcccactgtctaggacattctaattcttcctcttggcatggctaattactagttatccttcagacttagattgaa

SEQ ID NO: 101150 - DNA, 586 bp, Homo sapiens
ttaatgtaatcttttttaaaaatatcaaaattaatacaaaaaaccccatggtggaccaaaacttaaatcttcacataaagaaagaatcaatatttctttgagatagggttttgttctgtggcacatgctggagtgcagtggcatgaccatagctcactgcaggtttgacttccagggttcaagccatcctcccacctcaatctccccagtagctgggaccacaggcatgccaccatgcctgaataattttttagtttcttctttcttcttcttcttttttttttttttggtagagacagggtcaccctatcttacctagtcttgtcttgaactcctgatctcaagggatctacscacctcagcctcccaaagtattggtattaccggcataagccattgcgcctggcctcagagaatgagtattggttcaaatttgtcattggcaatagctggtaataatttgccatgtaataaatattctaaagattttcaagaccaaacacattttccactatatgttttgagaaaagaaaagaggaaagggcattaggtcttctttattcggacgttagattactgttgctgt

SEQ ID NO: 101151 - DNA, 612 bp, Homo sapiens
aatcccattcatgaaggctccacaggaagaaagatgggggtagaaggaggaagacaagagggagaaggaggtgcgtaaagagaaaataactgaagacttttaaaaggaaataggattactagacaagtataagagaattagtaatggttaaatactgtatctccttgttctcacactacattctactctcagtctatacccttatactactgagtcctaggagaacttaatgtgaattttctctaatttttaactttaatttttcactaatttcatagtgaggagatttggaacatayagaaaagaaaggtcataccagaaaaaaaaaatgtagcgctttcacttccaattggttcttaattttgtctcaggacttgccttgaattcttttctcttccctggataattctggaacacttagtaatggttagctattatattctttatacctatttctacattctactcttatttctacattctttccatctaaaatctaaagaaacttaaacagaaatttgttctcttctaaatgctcaattcattacaaatgcttggaaacacggagatgagatcaaatcagatgaaaatttatagagattttgcttcaag

SEQ ID NO: 101152 - DNA, 612 bp, Homo sapiens
aatcccattcatgaaggctccacaggaagaaagatgggggtagaaggaggaagacaagagggagaaggaggtgcgtaaagagaaaataactgaagacttttaaaaggaaataggattactagacaagtataagagaattagtaatggttaaatactgtatctccttgttctcacactacattctactctcagtctatacccttatactactgagtcctaggagaacttaatgtgaattttctctaatttttaactttaatttttcactaatttcatagtgaggagatttggaacatatagaaaagaaaggtcataccagaaaaaaaaaatgtagcgctttcacttccaattggttcttaattttgtctcaggacttgccttgaattcttttctcttccctggataattctggaacacttagtaatggttagctattatattcyttatacctatttctacattctactcttatttctacattctttccatctaaaatctaaagaaacttaaacagaaatttgttctcttctaaatgctcaattcattacaaatgcttggaaacacggagatgagatcaaatcagatgaaaatttatagagattttgcttcaag

SEQ ID NO: 101153 - DNA, 626 bp, Homo sapiens
tgtttaatggttatagaaatattcagattttctatttctttggttattgctggcaaggacttttctccctgggggttgatatgtttcaaatggctttcaaatttacaaaaaaaaattgttcacaatatcctctagcatctttatgtttcctgtctcaggcctgaaatcaactgttcttccaaggagcccaatttccwttggtgaggaatagtatttacacaccaaaatcaaggtgcaagcagtgtttattggtactaaaatgttattgcctttaagcaatttcagggacacagctaagaaaaatgtgttttttgaaaacactgcaaaaattctgagttcaaactgatgattttaattccaacttaacacccagtatttttacttctttgactttttaaattgtatatttaaaatctcacagtgaaaattctggttcctaataatattaatataagtctttatttgatttatcctatagaagatattaattagtttcaaaataataatagcaaatattatattaaccataagactattggatgaggttaaagatttctttgcatccttatttatccttagaatatattctactaaataattacaatcaaatcagtgtattctaaagt

SEQ ID NO: 101154 - DNA, 599 bp, Homo sapiens
atccgtggcctatcctgaacccatcttaagggggatctttttacaatcaaaagccaatatgttacaaatgatccttctgttttaaaaggattctgccacctagtttttaaaacgatctttcttctccctccactcctccccatgtggtctttaatgattgtagatgagagcatgaagaaagagcaaggcacgaaaatctttattggaagttctgagactaaggtgtattggaaggaatcaggaatacaagtattttgaaatttagctatctttttaaaaatttatttttaaatggacaaatacaaattgtatatgctgatggtgtttaacaacagttcaagaaatttggctttcttggtagaaaaattattcaaagacatttataggattggtgaagccagcaaatgtattcatatttttcttctaactggtgttaaaatgttgcttatgaatacaatatataccatcaarttatacaattgctgttcacattgtgaagatctgtagttaaaatggcatgcttcacagtattgtatggctgaaacattctttcttagcaattcttttatttattgcatcaataaatcaaaaatttacag

SEQ ID NO: 101155 - DNA, 525 bp, Homo sapiens
gtaaattcttcctccacatgaaagccctttaaaagaaccaaagcattccctcaagtcttttcggaatgaacatctctgttcctcacaacagcagtagcagcaaacactgcattcctacgtttcactgtttgctatgacccaatcagtgttctaagccctttagaactattaacttacctaatccttacaaccactctatgaaatagcccctctgagacacagtgaggctgaayaactaacttgccaaggtcacacagcaaataagcaacggaaccagaattcaaactcaagcaataggctccagggccatgctttagccactgtgtgctagtccatgtccccaaggtgacagacctcagttcccagaccactctccccagtacgcacagtaatatgactgggcattgtccgactgtgcagggcatggaatgtcaaatcacttcttctgggtacttacttctctaatgtggctactcgaaaatttcaaattacagatgtggctcacagtatatttctattggacaa

SEQ ID NO: 101156 - DNA, 619 bp, Homo sapiens
actgaagagattgttatgggatacccccaactgtatttgtttctcatgctggggaagcttactcaacctctttctcacatcacacttaacagttttctgccaggcaacttacttccaatgagcttttcctaagagctacatctttttatttctctaatgctgcaatagccttaactctacaactctcctgccctttctttcagatgagacaccacatgcctgcttaactctgatcttttaactcaatgggagaatctacagggaaattccctggacaacgctgcattgtctttgtttacacatggctcatatttaaagaatgattctggtaagtattgtcaggctatgcaatgactacttcctttgagattgtggaagcagctcttttgtctttagccacttcagcccagcaggcagasctatttgtccttgcttgagtttatctccttgcataaggaaaaactgtgaatgtttttacagggagtagataaacttctggaattgttcatgattttggaattctgtagattcaagtaaatttcctcacttccaatggggacaaaatgaagaatgacccttatataaaataattattagattctatgaagttacttgctgc

SEQ ID NO: 101157 - DNA, 576 bp, Homo sapiens
acatcacacactggggcctgttgtagggtgggggaggggggawggaaagtattaggagatatacctaatgtaaatgacgagttaatgggtgcagcacactaacatggcacatgtatacatatgtaacaaagctgcacgttgtgcacatgtaccctagaacttaaagtataattaaaaaaaaaaagatttaaatatatgaggagggtctttccttctttctttctgcatctttctttctttctttctttctttctttctttctttctttctttctttctttctttcttgttgttttgttttgtttttagatggagtcttgctctgtcacacaggctggagtgcagtggcacgatctcggttcactgcaacttctgcctcccaggaggcctcagccttcctagtagctgggattacaggtgcctgccaccacacccggctaattttttaattatatttagtagagtcaggttttgtcatgttggccacacaagtctcaaacttctaacctcaagtgatctgcccactttggcctcccaaagtgctaggattacaggcgtgagccacgaagcccggcct

SEQ ID NO: 101158 - DNA, 576 bp, Homo sapiens
acatcacacactggggcctgttgtagggtgggggaggggggatggaaagtattaggagatatacctaatgtaaatgacgagttaatgggygcagcacactaacatggcacatgtatacatatgtaacaaagctgcacgttgtgcacatgtaccctagaacttaaagtataattaaaaaaaaaaagatttaaatatatgaggagggtctttccttctttctttctgcatctttctttctttctttctttctttctttctttctttctttctttctttctttctttcttgttgttttgttttgtttttagatggagtcttgctctgtcacacaggctggagtgcagtggcacgatctcggttcactgcaacttctgcctcccaggaggcctcagccttcctagtagctgggattacaggtgcctgccaccacacccggctaattttttaattatatttagtagagtcaggttttgtcatgttggccacacaagtctcaaacttctaacctcaagtgatctgcccactttggcctcccaaagtgctaggattacaggcgtgagccacgaagcccggcct

SEQ ID NO: 101159 - DNA, 576 bp, Homo sapiens
acatcacacactggggcctgttgtagggtgggggaggggggatggaaagtattaggagatatacctaatgtaaatgacgagttaatgggtgcagcacactaacatggcacatgtatacatatgtaacaaagctgcacgttgtgcacatgtaccctagaacttaaagtataattaaaaaaaaaaagatttaaatatatgaggagggtctttccttctttctttctgcwtctttctttctttctttctttctttctttctttctttctttctttctttctttctttcttgttgttttgttttgtttttagatggagtcttgctctgtcacacaggctggagtgcagtggcacgatctcggttcactgcaacttctgcctcccaggaggcctcagccttcctagtagctgggattacaggtgcctgccaccacacccggctaattttttaattatatttagtagagtcaggttttgtcatgttggccacacaagtctcaaacttctaacctcaagtgatctgcccactttggcctcccaaagtgctaggattacaggcgtgagccacgaagcccggcct

SEQ ID NO: 101160 - DNA, 576 bp, Homo sapiens
acatcacacactggggcctgttgtagggtgggggaggggggatggaaagtattaggagatatacctaatgtaaatgacgagttaatgggtgcagcacactaacatggcacatgtatacatatgtaacaaagctgcacgttgtgcacatgtaccctagaacttaaagtataattaaaaaaaaaaagatttaaatatatgaggagggtctttccttctttctttctgcatctttctttctttctttctttctttctttctttctttctttctttctttctttctttcttgttgttttgttttgtttttagatggagtcttgctctgtcacacaggctggagtgcagtggcacgatctcggttcactgcaacttctgcctcccaggaggcctcagccttcctagtagctgggattacaggtgcctgccaccacacccggctaattttttaattatatttagtagagtcaggttttgtcatgttggccacacaagtctcaaacttctaacctcaagtgatctgcccactttggcctcccaaagtgctaggattacaggcrtgagccacgaagcccggcct

SEQ ID NO: 101161 - DNA, 442 bp, Homo sapiens
catgtcaaatttaaatatatgcttatgataggattcattattctttgctaaatgttcaattttccttcctgtcttgctcttttttgaagcaagattacatagacctgccctggagacttcagggttgacttgtttggccaatgaaatgtgatcagaagtgccatatgccacttcttggcagaagctttaaagctattgcacaattttcccatgtatttttttctyacccacaatgattttgaatgcacccagatagaggatgagtactggaatgaagatgaagtgcagcaagatgagattgatatgcacagacttgctgtttgagtaagaaataaacatttgttggtataagccactaacagatctaggttatttatttttgcagcacattggtgaaaatttggccaatacaatattatctcttttaaaaatgtttatcaat

SEQ ID NO: 101162 - DNA, 442 bp, Homo sapiens
catgtcaaatttaaatatatgcttatgataggattcattattctttgctaaatgttcaattttccttcctgtcttgctcttttttgaagcaagattacatagacctgccctggagacttcagggttgacttgtttggccaatgaaatgtgatcagaagtgccatatgccacttcttggcagaagctttaaagctattgcacaattttcccatgtatttttttcttacccacaatgattttgaatgcacccagatagaggatgagtactggaatgaagatgaagtgcagcaagatgagattgatatgcacagacwtgctgtttgagtaagaaataaacatttgttggtataagccactaacagatctaggttatttatttttgcagcacattggtgaaaatttggccaatacaatattatctcttttaaaaatgtttatcaat

SEQ ID NO: 101163 - DNA, 564 bp, Homo sapiens
gtttcaaatacatgtcttgatataaaattttgcaccaaagtccataacattcataattatcaacgaatatctaaaaacgaaataataagtactawtcttattattaataggtgtgtctaaatacaactgtaaatacagctatgatgtacctaaatgaagaagaagaagaagaggaagaagcagaaaaagaagcagaagcagcagcagcagcagcagcggcagaagaagaagaagaagaagaggaaggaggaagaaattttaccaaaaatttgaaatattttaaaatattttccctcctttgttttgtcacaggcaagtcctggaaatgtgaacctctcatattttatcacacacttttgattattgtactagccagtcaagaacattagaaaaggcattaagaaattgatagaatattatgttcctgaataagatgacataatataaaaatgttaatttcctataaaactccatacaaatttaaatttattcaatttaaaactttgatgggaaaattgaaacttggcaaaattattctgacatcattttagagaataaatgagg

SEQ ID NO: 101164 - DNA, 564 bp, Homo sapiens
gtttcaaatacatgtcttgatataaaattttgcaccaaagtccataacattcataattatcaacgaatatctaaaaacgaaataataagtactaatcttattattaataggtgtgtctaaatacaactgtaaatacagctatgatgtacctaaatgaagaagaagaagaagaggaagaagcagaaaaagaagcagaagcagcagcagcagcagcagcggcagaagaagaagaagaagaagaggaargaggaagaaattttaccaaaaatttgaaatattttaaaatattttccctcctttgttttgtcacaggcaagtcctggaaatgtgaacctctcatattttatcacacacttttgattattgtactagccagtcaagaacattagaaaaggcattaagaaattgatagaatattatgttcctgaataagatgacataatataaaaatgttaatttcctataaaactccatacaaatttaaatttattcaatttaaaactttgatgggaaaattgaaacttggcaaaattattctgacatcattttagagaataaatgagg

SEQ ID NO: 101165 - DNA, 543 bp, Homo sapiens
ttataatactctggaaataatttattagtttctttaaaaactaaacatatatttataataagatccagcaactgcacccctggaaatttatctaagagaaatgaaaacctatatgcgatctttaatatctttcatagcacctttaattctaacagrgaaaaactggaaacatccaagatgttggacaggtgaatggttgaataaactgtggtatatccatatgattaaatactacccagaaataaaaaagaatatacttttgacacatgcaataacttgcatagatctgaagggcattatgcttagtgaaaaaaagcaaatatcaaaaggacacatggcatattatttcatgtatataactttaataaaataacatacatatagaaaacagattagtgatttccagaggttagtgatggtatgggaatgtgagatgaatatggctataaaatgtgaggaagacacttttagtgatggaagagttctgtaacttaattgtaataatggtcacattaatcaacatgtgataaagttggcatagac

SEQ ID NO: 101166 - DNA, 543 bp, Homo sapiens
ttataatactctggaaataatttattagtttctttaaaaactaaacatatatttataataagatccagcaactgcacccctggaaatttatctaagagaaatgaaaacctatatgcgatctttaatatctttcatagcacctttaattctaacagggaaaaactggaaacatccaagatgttggacaggtgaatggttgaataaactgtggtatatccatatgattaaatactacccagaaataaaaaagaatatactttygacacatgcaataacttgcatagatctgaagggcattatgcttagtgaaaaaaagcaaatatcaaaaggacacatggcatattatttcatgtatataactttaataaaataacatacatatagaaaacagattagtgatttccagaggttagtgatggtatgggaatgtgagatgaatatggctataaaatgtgaggaagacacttttagtgatggaagagttctgtaacttaattgtaataatggtcacattaatcaacatgtgataaagttggcatagac

SEQ ID NO: 101167 - DNA, 368 bp, Homo sapiens
gaattctaagttctgttagggtctgttgccaaggaagtgaggttgcttctttaaagttccatcccctcagcctcctccttccagaagacctackcaggaccccagtgggctgctgactgctcatcctccccacaggtcaactccttacctgtacacagttatgtccacccagggcctacttggacacctgcacctgatgttcaccaggggcctaggaatccacttggggcctgggatcctacaggggcctaatgttaccctgcagattgagtagccacctggggaccaggtatcaacctggggactgtggttgacctgtgggttaatgtccacctggggactggttattcagctgaggcctgatgcgt

SEQ ID NO: 101168 - DNA, 593 bp, Homo sapiens
tggccctgtggacccactgctttcctggtctctgtaatgtcctgtgtttacagcacctctgcttctttctgctccaatcagaacccaaggtcaaggagataattgtgtgtatgtgctgcagcccacattgtggagcggaggtgtgacagacttagctaattattgctcccattggagagcaccattmaggacagcctcttggggtactggctggccaacggatgagccactttggatgggatgttcacttcccagacaatcattggccacctggcactaagagcagcttatagctgcttccctcaacagaagtgcagatgggttggttttagacaagagagaatgtagaaacttggaggtcaccatagaagacacttctgaggcaggaatgcaactaggaagtcatcctaagaatgagatgaggaattaggggaaaaaggaagaagagagacatacgtagaaatggaaaaaggactttctgggaccacaaatgtcagagctgaaacatatgttaatgacaatctagttaaacgtctctaatttacaaatggagaaattgagcctcaagaccaacatttgggaccataaaccag

SEQ ID NO: 101169 - DNA, 604 bp, Homo sapiens
aaacaggccataaagaaacttgaagtcagactcaactagcatttattaaacagaactattaaatatcaagtattgtgctagacttttccacataaattgataattcttatgaccaaccagatttggaaaccaccctgcaatgctgggccacataactccacaatgctatgcccagtaccttcaatgataggacaggcaacctccaaaaaaaaagccatccatttcatcgtggcaaattcttctattagcaaattctaatattctctattagcaaattcttctataattaaaccaaaactgttttcyaaaaaagtctatcctagcaactcttctagtattacaaatgagccttcttctcccctatatgagaaaacagctattcacaaatatgaaaagttactatgtctccaacttcctgcaatttaaacttgtctgccccatccttgatctttctggtagcattccatctttttccttcttataatttacaactaatatatcatttgtttgttcactttttatagcttgggttcttcactaaactagggctctgtaagtccaaggatcatgtctattttgtgcaccattgcacagccagcatcta

SEQ ID NO: 101170 - DNA, 620 bp, Homo sapiens
gcatgaacttaaggcaactacagagctagtaataggaaataataaaagcacggtgttttttaatccactcaagatttttagggaaaacactaatttattttcaggggagggtagaacrctattatgtagcatttggaatttgtaatataaaaatataatttaaagttaattgcttgaaaaacaagagtcatctcattcatagtatggatttggttattctcaatatttttcttacctgtgtagttactaattaaaacacaaaacacacacacacacacacaaaatttggtattattgcttacagatatattgttggggtggacttgagctgacaagacaatatacttccatgggtaaggtgggcacagcaggtaatcagaatccttcatgtaactttgtccaaatgatgcttaattttatttttgtgagctgcttattacaatgttaaattcaatctcaatttggtgcaaaatgagaaactcatgtatgtgagtgatactaagcaacctcagtatttgaaactagaacagacaaaaaagtctctagctattacattaacacagatacttcgacttcgggaactttttctcataggaagtcctatttcagggttcattgac

SEQ ID NO: 101171 - DNA, 629 bp, Homo sapiens
gatctcatgccacatacctgtatgtattttatattataaatatttgcagacttgtttaatttgccatgttagactaagttccatgaagacagctccatatccattccatttttrtatatccacaacatttggtcgggttgatgcttaataaatgtttattgaaggaacaggagtctcccacttctgacataatgaacttatttcccccagtgttaaccctacatctggttcctgtccaagagtctcttcccaaatcattctgattcaactgttcattctgatctcattaaacatttaaatgatatatctaacttcgcttgctttattctatgctcatcctgcagtctcctcataacttggtttcaatgatgcttgcttctagagaaaaaaatgtattaaataagcttatgattcagtcctccagctgtgatggttctcactgaacattagctcagtggttttcgaagtatggtctctagcataacctagaaacttgttagaaatgcaaattcttgggctcaccaagacatactaaatcaaaaattctgacattggggcctagaaatctgtgttttaacaagcctgccagtgcagcctggtcccttttcttctcggagccccactcaaag

SEQ ID NO: 101172 - DNA, 642 bp, Homo sapiens
ttgagcggctgcaacaaaataccatagactgggtggcatatgcacgacaaaaatttatttctcacaggagaagtcaaagattaatgcaccagcagatctggtgtctgaggggccaccttctggtttgtagatgatgctttctagttaaaacacctatttaacacactattaaacactaagtgtgttaaatagtgcagttgatgtatttgtcatgtcacctttatcatacactaaatccttctttgtctttttttctgtactctaatctctttctgtaagtaatctttgcttgcagcagtaggatatttagagtactgtggcttgacaatatatttagtatttcaagatttccatgaaattcttctgatgtatgagttccctagttaatcttacatatgtatccctttgtaaaaacactttgaacatttaaaatgatacatgaatagtactctaatacaatgccataaaaattataaatcatttgtatagacyggtaagtaaagattgtgagattaagaaacgcatcaaaggccattgagctggaaagtggtataatgagaattcaaaccagggtctcttgactcaaaatctaaggatcataccatttctcatgataatatgagtattattgttatctctatc

SEQ ID NO: 101173 - DNA, 475 bp, Homo sapiens
tttgaattccttaacctctattaccaagtctctaactaaaagctggggataatcataatagcacctaactttttgggtactaagaaaagttaaatgaagactaaatatatcaggcacatggtaaacaacaaagaaatctcatctatttcactattattaatgtagaccatggtcactcgtgttaataactttaacctcaaccttttaactgctgtgaaggattaaataaaaaattaatcactatattataaaaattaattgatatataataaatgaattttaagaratacgtaataattcatggactccttgaagatagaaaatttatacaaaatcctagtaatttgagtcacaaaagctcctacaataatgaaacagtatgaatgaaaaagaaaagaaataactattatatttggatctagcccataatttttaaccaaatgcacaaaaacaaacaacaaatatgaaattctca

SEQ ID NO: 101174 - DNA, 473 bp, Homo sapiens
cctggctattttgcttttaaatgtccaaaagagccaattatcctgcaaatctgattcaagtgtaccagattgaattagagaagtgcatatttcaggaaacttcccttgcattccaaatctgtccagttgagrtagggttttttgatagaaaacatttccttttttttttttcaaactgtgtctcatttcagaatacttacaatatctctcacccttggtaacagaggggaggggttcatatgttgacatccaacttcctgagaggtggtgagagacaaaatctccccaacctccttacccaactgtaatgatgaaagatgtacaacaaaatgatgtcttgtttaatgtgggattttatgtgccactggaacataggcaacatctaatgtgaaacggcttctgcttcaaacagagggccactattttgccctctgtttactatgttgcccagggttgccacagtcttgctagag

SEQ ID NO: 101175 - DNA, 526 bp, Homo sapiens
tttattcttttccatgttagaagcaaagttttaaaaaatactctttatgcttttatgcaaatgttatgtgatttttaaaagtattatgcataaagacaataaaaaattaaaagtaaatacttyttttttcattagcaggtgttcagtaatgtgtcaaatcttgatatacctaatttgtcttctttcaactttacttttggatttcctgattccaatttttcaaaagttgacagacatcatgttattgtcactaattcctcccactcagctctcagaggttcattgttctgagggagaaattgtcatctccccttttccctccactggctcagtttaagaaagtgagtcagattacgggtcttttttttttttttttttgcttcagcacaggctggcatttgattctggagtatcccaagaccttttctagaaaattccaactcttcttcctcttctcctgctcttcagtcttcagagcctctttgtggttcaaggggtgtgggtaaaagggagagtttgctcggca

SEQ ID NO: 101176 - DNA, 494 bp, Homo sapiens
gcagttagttgacaagatttctggatttgagcttgaaacattttcttggtttagtttgaatgtctctggttatggcattggatgttttggtaaactcccttagtggcccacacatcaggcatgggggttgtctcctgaaatttacatcgagttgtccagttccagcttgtagggcttcaggaatataggagtttttgtccttagtgattccaagttagaaatctaggagaaaattggcaacatgagtttggagagacacagacagatattggaggaaattagaagatacaggatctagttctgtctacagctagataatagaaacctcaaaaacaatgaacagggctctattctmataacagatgtattttaattttcttctgaaacattttttttctctctacagctgttcccatttctatcaaatataatcacagtaagactaaatcatttgtgaagtaagtctagtctcattaaacttggcctaatttttt

SEQ ID NO: 101177 - DNA, 569 bp, Homo sapiens
cttaagctggtttcagtagcttctatagaggctgcacacaaactgtctctttatgtcccatagttaaccttttgatgtaaagaggcaaattccacctcattttgatgctaaagccctgccccaaagtaaatatggggtgtatgttacatacatgcccttgactcccctcataaatatgtatagcttttcccccaaacctgtcaaatttgtgtgattctgttgtataatacaggccctgtgaggcatagacaccaacctgctctctccctcctcaaaaacagagcacctgcagtacacaccagatactgcccttggtttgcaaacagatattaccaataaaggtctcckttctactatttagctatcctggtgtttttctggatgatactttttctcatacgattcataaatctttaaaagacctttatggttaagggaactctatggaagatgttttaaaactattctgtctattgtgcctagaagttactcaaaggaaattactttatgttcaattactttaaaattctgcaagcattgtacaagcaaattagcagtgatgttttaat

SEQ ID NO: 101178 - DNA, 595 bp, Homo sapiens
gcgatctcggctcactgcaacttccgcctaccgggttcaagcgattctcctgcctcagcctcccaagcagctggcattacaggtgcccaccaccacacccagctaatttttgtatttttagtagagatgaggtttcgctacctcaggtgatccacccgccgcgccctcccaaagtgcttggattacaggcgtgagccactgcacccggcagatttttcaaaaaacttaaaatataactaccacacgatctagcaataccattactacgtatttatccacaggaaaggcaaccagtatatcaaagaaatacatgcactcccatatttttgcagtgctattaatagccaagatatggaatcaacctgagtatccaccagcagattaacagataaagaaaatttggtgtatayatacccaatggaatactgttcagccatagaaaataatgaaatcctgtcatttctagtaacatggatgaaagtggaggtcattatgttaagcaaaataagctaggcacaaaaacacaaatataacatgttctcattcatatgtggggctaaaaatattaatttcatgaggtagagagtacagcaat

SEQ ID NO: 101179 - DNA, 456 bp, Homo sapiens
tctccatttttcttggatttgttctaaccatgctccgtgagtccgtgtgactccaggaagccaaatytacccccatatctgaggtggacctcggtgggtcatttatcctgttggtcattggttcagcattaggttatgctgcagttagggctaattagaccagtagagggccttccaagaaggatcatattagttcttctgtgaaagcttcaggggaccactcttctttggacaccacaggaaagcctggagccttagcaaatggctggatatgatcctgagagccgcaggcaaagtgacacgaaggatggcggtggaaagagtcaggaagaccctcatccttataccaggctgagctgctgggtgaatcagttctggaggtgctcctgcctctggaatcctgatttcatgagccaatggatacctttcatgtttaagccactttgagttgaattc

SEQ ID NO: 101180 - DNA, 453 bp, Homo sapiens
gaattctctgtgggtctgctctgcatccattcctgtctccatttttcttggatttgttctaaccatgctccgtgagtccgtgtgactccaggaagccaaatctacccccatatctgaggtggacctcggtgggtcatttatcctgttggtcattggttcagcattaggttatgctgcagttagggctaattagaccagtagagggccttccargaaggatcatattagttcttctgtgaaagcttcaggggaccactcttctttggacaccacaggaaagcctggagccttagcaaatggctggatatgatcctgagagccgcaggcaaagtgacacgaaggatggcggtggaaagagtcaggaagaccctcatccttataccaggctgagctgctgggtgaatcagttctggaggtgctcctgcctctggaatcctgatttcatgagccaat

SEQ ID NO: 101181 - DNA, 453 bp, Homo sapiens
gaattctctgtgggtctgctctgcatccattcctgtctccatttttcttggatttgttctaaccatgctccgtgagtccgtgtgactccaggaagccaaatctacccccatatctgaggtggacctcggtgggtcatttatcctgttggtcattggttcagcattaggttatgctgcagttagggctaattagaccagtagagggccttccaagaaggatcatattagttcttctgtgaaagcttcaggggaccactcttctttggacaccacaggaaagcctggagccttagcaaatggctggatatgatcctgagagccgcaggcaaagtgacacgaaggatggcggtggaaagagtcaggaagaccctcatccttataccargctgagctgctgggtgaatcagttctggaggtgctcctgcctctggaatcctgatttcatgagccaat

SEQ ID NO: 101182 - DNA, 632 bp, Homo sapiens
tgcatttttgtggtctggaacttgaacataattttaatagtcctttaaaaagaattcaagacaaaaaattcatggaaaacaatttttgcacaattctggaagcacctagagaaaatatcttgtttttctaattttctgcaatctaggaagatatccaacaggagatgaaaaagttaggacttgaaccggcatttcctcctaccatactggctgtgtgcttgagtccttaatggttaaatttatgggactacctttttgcrtacttccccacaatgaagtcttagataatataacaagattcaatcaactctttccatcattcatttaacaaatattgtttaagtaaattaacttggaaacctcaaaatgaatcagataggaatttgccaacaaggagataaaactgaacaaaaataataaatcacagtataaaaataattaataggctgggcatggtggctgctgcctataatcccagcactttgggaggccaaggcaggtggatcatttgagcccaggagctcaagaccagcctggacaatatggcaaaacccagtctctataaaaaaatacaaaaaattaaccagacatgctggcatgcacctgtagtcccagctacttgggaagctgaa

SEQ ID NO: 101183 - DNA, 612 bp, Homo sapiens
actagaggttttttaaataaataaataaataaggctccaaatatcaacaaacagttgatatttgactttggaattcaagggatacattaataagtgcttatgtacccacaggcttccttactctgtgcctgaactcagcacccaatctatgtaccctagctatcagcttttcagggtcctgatgagaaacaaacaagaggaaatcaaacacttgagtgttgacagtacagtccagaatctggaattactgtgactccttacaagtgctcagaactccttaattggttatgtgaatttgtcatcctctatcaaatgtatggggatactgcctgcaagtaaacctccactcagacctcagaaagcaaaggtcaatctttcaaggagaatttaggaaatatttagaaacaragaataattccacactaggaaagtcataggtgctcaaacagtaagaaatttaaatcctccactacatatatgtaagttcacacatgctggtcatcagctggcatctttagtgagtatcttctattgaactcactacaagtaagtaagctgaagggcaatttctgaaatactgtgaacatgtgtgtttttctatatagttggctg

SEQ ID NO: 101184 - DNA, 612 bp, Homo sapiens
actagaggttttttaaataaataaataaataaggctccaaatatcaacaaacagttgatatttgactttggaattcaagggatacattaataagtgcttatgtacccacaggcttccttactctgtgcctgaactcagcacccaatctatgtaccctagctatcagcttttcagggtcctgatgagaaacaaacaagaggaaatcaaacacttgagtgttgacagtacagtccagaatctggaattactgtgactccttacaagtgctcagaactccttaattggttatgtgaatttgtcatcctctatcaaatgtatggggatactgcctgcaagtaaacctccactcagacctcagaaagcaaaggtcaatctttcaaggagaatttaggaaatatttagaaacaaagaataattccacactaggaaaktcataggtgctcaaacagtaagaaatttaaatcctccactacatatatgtaagttcacacatgctggtcatcagctggcatctttagtgagtatcttctattgaactcactacaagtaagtaagctgaagggcaatttctgaaatactgtgaacatgtgtgtttttctatatagttggctg

SEQ ID NO: 101185 - DNA, 478 bp, Homo sapiens
ctatttgtagcctacacctgaggaatgggaagctatgctatccctccttgaaggtgaagtatccgtgtaaattatttggaattcttctgcacagatttgtctcttctcccccatttgttaatttacttcatcactttatttttaccmgtatggactcacagatacttattttatactttgaattacaatcaaatattgttttatttattttattgctcaaaatgtcccagttttggccactaggaactctttcagttggttcctgtgcatctttgacatatcctattattgtggggttttggtggggaagggaggaaagttccttgatttctaacgctgccagatgctctagcttcatctcgtatatttcttgccccagtcctagaatcagccagttctccaaagccttggttcctttcgtttgagaatgttattagaaaccaagttctggctgctggctatgctcgttgccactggg

SEQ ID NO: 101186 - DNA, 541 bp, Homo sapiens
agaaataagaagtcattggtagactttatgcacactcactttgaaaacattgcatgagaagttctgaggaagctgttttagcaaaatagaatgtttttccttcctaactcttcttttctctgggatgcttgcattataaaatatgttccattcttcaggattgcccatctctcctttattcctatatatttctttatttgtaggcttagtttaattggattgttttccactccttaatcatatttcagggagcaactgtaataaacaaagaacttcctgtgtagcaatgttgaatcctcattccctcattcattaaataaattttgtactcaatttttaaactaactgactagaattaattaatttgtctttttattcattcacttattgactaagtgcctatgatattgtgaatataccggacactctcctaggtaytgggtatacaaaaaaatgcattgattatgctctggaaaagctcattttctggcaatggattgtagtctctggttatgtaatgagtcagcgatgagatactatt

SEQ ID NO: 101187 - DNA, 646 bp, Homo sapiens
gatggtagaaatcccagtctgagagcaggagaagttgaaatgagatgtcctatctcaagtgtttaggcagaaaaaagggggcagattcgttgatcttccatcttttgtttttttcaggccctcaatagagtggatgatgacacccgcattgaggaggacaatctaccttacccagtcygccaattcaaatgtcaaccttatttggaaacactttcatagaaacacccagaaataatattcaatctgggcaccccatggcccagttaagttggtacctaaaattaactatcacacatggcaaaatgaattttggagatatgattgagttaaattttttgaaatggggagattttcctgcattatttggataagcccaatgtaatcacaattcattgtaaaaagggtgcaggaggatacagaatcaggaaagaacggtgacagtggaagtggaaattggagtgatatcctttaaagacagaagaagaagccacaagccaagaaatacaggtggtctctagaagctgtaaaaggcagggaaacaagtctctcctagaccttctagaaaagctgcagctctgttagcaccttgattttagcccagtttgatccatgtttgcaaaagcagtgtattaataatagaaaaggt

SEQ ID NO: 101188 - DNA, 510 bp, Homo sapiens
tgattaatgtcaactaactatgtagcgagaaaggattcatgtttgcttatccatcccctcagaaaaatagctgatagttttttattctttatctcagttggtcttgagcagcgttattaatgacaaaatgagtgaaagcattaagtgtaggtcttcccacttggctctgactttcctgttttccacttttgggaaaccgaatatcaaatctgtgttatttgagtggaagcaagtcattggccagaacaggaggaaatgsgcgtggttattgcttcatcatggcctaacaaagaaagatgagagttgctgggaggaatgggtgttaattcagtccatgatgatcttaccaattctgagttaaagataatgtaaacagttcatttatatactccctaaaatattagataatcttcagctcatttatcatatattaaaatagatatcttaactgtataactaaattaaagtctgacaaaatctaacaagctataaacccttctaatattcact

SEQ ID NO: 101189 - DNA, 510 bp, Homo sapiens
tgattaatgtcaactaactatgtagcgagaaaggattcatgtttgcttatccatcccctcagaaaaatagctgatagttttttattctttatctcagttggtcttgagcagcgttattaatgacaaaatgagtgaaagcattaagtgtaggtcttcccacttggctctgactttcctgttttccacttttgggaaaccgaatatcaaatctgtgttatttgagtggaagcaagtcattggccagaacaggaggaaatgcgcgtggttattgcttcatcatggyctaacaaagaaagatgagagttgctgggaggaatgggtgttaattcagtccatgatgatcttaccaattctgagttaaagataatgtaaacagttcatttatatactccctaaaatattagataatcttcagctcatttatcatatattaaaatagatatcttaactgtataactaaattaaagtctgacaaaatctaacaagctataaacccttctaatattcact

SEQ ID NO: 101190 - DNA, 510 bp, Homo sapiens
tgattaatgtcaactaactatgtagcgagaaaggattcatgtttgcttatccatcccctcagaaaaatagctgatagttttttattctttatctcagttggtcttgagcagcgttattaatgacaaaatgagtgaaagcattaagtgtaggtcttcccacttggctctgactttcctgttttccacttttgggaaaccgaatatcaaatctgtgttatttgagtggaagcaagtcattggccagaacaggaggaaatgcgcgtggttattgcttcatcatggcctaacaaagaaagatgagagttgctgggaggaatgggtgttaattcagyccatgatgatcttaccaattctgagttaaagataatgtaaacagttcatttatatactccctaaaatattagataatcttcagctcatttatcatatattaaaatagatatcttaactgtataactaaattaaagtctgacaaaatctaacaagctataaacccttctaatattcact

SEQ ID NO: 101191 - DNA, 510 bp, Homo sapiens
tgattaatgtcaactaactatgtagcgagaaaggattcatgtttgcttatccatcccctcagaaaaatagctgatagttttttattctttatctcagttggtcttgagcagcgttattaatgacaaaatgagtgaaagcattaagtgtaggtcttcccacttggctctgactttcctgttttccacttttgggaaaccgaatatcaaatctgtgttatttgagtggaagcaagtcattggccagaacaggaggaaatgcgcgtggttattgcttcatcatggcctaacaaagaaagatgagagttgctgggaggaatgggtgttaattcagtccatgatgatcttaccaattctgagttaaagataatgtaaacagttcatttatatactccctaaaatattagataatcttcagctcatttatcatayattaaaatagatatcttaactgtataactaaattaaagtctgacaaaatctaacaagctataaacccttctaatattcact

SEQ ID NO: 101192 - DNA, 505 bp, Homo sapiens
aacctgactattttaagattcactaattcttctgaagaaaaaaacagtatatgcattcagatttgtgaaaaaattttattttttattttcgtaatggttggttaatttcattgtttcagattgggatccctaggggtaaggcctgaaacatgaatttcttacacatgatttattgagggagaactctcaagaaagcagaagtgaaggtaraagagagctgtattagtacgttcttgcactgctataaagaaatacctgagactgggtaatttacaaagaagagatgtttaattggctcacagttctgcaggctatacaggaagcatagcagcttctgcttctggggaggcttcagggagtttttaatcatggtggaaggcaaaggagaaatgaggcatctgcgtggcaggagcaaaaggaagagagagagacgggaggtgctacacactttcaaaacaaccatgccttatcataactcactcactcactatcgcaagaacagcac

SEQ ID NO: 101193 - DNA, 557 bp, Homo sapiens
tcttagcaatatttgttgccagttgtattgattattggaacttttattctctgcatttcttctatgtctgctcctgatttcagcacaccctgtctctactaaaaatacaagagtagcagggcgtggtkgcgcatgcctgtaattccagctacttgggaggctgaggcagaagaatcgcttgaatccaggaggtggatgttgtggtgaaccgagatggtgccattgcactccagttcagcctgggctcgaaactccgtctcaaaaaaaaaaagaaaaagaaaaagactataagtaacacaataatgataaatacctttttgtttgcattgaggagaacagcttgaaatacaataataaaaataaaatataaaacaaaggacatgcaaaaaaggcagggggcagccttaataaacacacattgtggcacactgggcaacactattagattcctaactaacttttttcacatgtccatttctaatataaaccaaatatgtagaaccatatgcttaaataccactcctgacttaaattgtggacagcatatggtttgtgtt

SEQ ID NO: 101194 - DNA, 505 bp, Homo sapiens
aacctgactattttaagattcactaattcttctgaagaaaaaaacagtatatgcattcagatttgtgaaaaaattttattttttattttcgtaatggttggttaatttcattgtttcagattgggatccctaggggtaaggcctgaaacatgaatttcttacacatgatttattgagggagaactctcaagaaagcagaagtgaaggtagaagagagctgtattagtacgttcttgcactgctataaagaaatacctgagactgggtaatttacaaagaagagatgtttaattggctcacagttctgyaggctatacaggaagcatagcagcttctgcttctggggaggcttcagggagtttttaatcatggtggaaggcaaaggagaaatgaggcatctgcgtggcaggagcaaaaggaagagagagagacgggaggtgctacacactttcaaaacaaccatgccttatcataactcactcactcactatcgcaagaacagcac

SEQ ID NO: 101195 - DNA, 505 bp, Homo sapiens
aacctgactattttaagattcactaattcttctgaagaaaaaaacagtatatgcattcagatttgtgaaaaaattttattttttattttcgtaatggttggttaatttcattgtttcagattgggatccctaggggtaaggcctgaaacatgaatttcttacacatgatttattgagggagaactctcaagaaagcagaagtgaaggtagaagagagctgtattagtacgttcttgcactgctataaagaaatacctgagactgggtaatttacaaagaagagatgtttaattggctcacagttctgcrggctatacaggaagcatagcagcttctgcttctggggaggcttcagggagtttttaatcatggtggaaggcaaaggagaaatgaggcatctgcgtggcaggagcaaaaggaagagagagagacgggaggtgctacacactttcaaaacaaccatgccttatcataactcactcactcactatcgcaagaacagcac

SEQ ID NO: 101196 - DNA, 557 bp, Homo sapiens
tcttagcaatatttgttgccagttgtattgattattggaacttttattctctgcatttcttctatgtctgctcctgatttcagcacaccctgtctctactaaaaatacaagagtagcagggcgtggtggcgcatgcctgtaattccagctacttgggaggctgaggcagaagaatcgcttgaatccaggaggtggatgttgtggtgaaccgagatgstgccattgcactccagttcagcctgggctcgaaactccgtctcaaaaaaaaaaagaaaaagaaaaagactataagtaacacaataatgataaatacctttttgtttgcattgaggagaacagcttgaaatacaataataaaaataaaatataaaacaaaggacatgcaaaaaaggcagggggcagccttaataaacacacattgtggcacactgggcaacactattagattcctaactaacttttttcacatgtccatttctaatataaaccaaatatgtagaaccatatgcttaaataccactcctgacttaaattgtggacagcatatggtttgtgtt

SEQ ID NO: 101197 - DNA, 557 bp, Homo sapiens
tcttagcaatatttgttgccagttgtattgattattggaacttttattctctgcatttcttctatgtctgctcctgatttcagcacaccctgtctctactaaaaatacaagagtagcagggcgtggtggcgcatgcctgtaattccagctacttgggaggctgaggcagaagaatcgcttgaatccaggaggtggatgttgtggtgaaccgagatggtgccattgcactccagttcagcctgggctcgaaactccgtctcaaaaaaaaaaagaaaaagaaaaagactataagtaacacaataatgataaatacctttttgtttgcattgaggagaacagcttgaaatacaataataaaaataaaatataaaacaaaggacatgcaaaaaaggcagggggcagccttaataaacacacattgtggcacactgggcaacactattagattcctaactaacttttttcacatgtccatttctaatataaaccaaatatgtagaaccatatgcttaaataccactcctgacttaaattgtgracagcatatggtttgtgtt

SEQ ID NO: 101198 - DNA, 629 bp, Homo sapiens
cctgggagcctaatgtcccccttcagatatgccaagtcataatcttcatttcatcatgacatgacttttaggtgatttgtatgcacattaaaattttaaacatacaattctacttttcttttcttcccctttcctttcacattatatttctattgctacataacaaagcaccataaacttagyggtttaaaacaacatacatttattattaatatttcactgtttccatgccccaggaatctagaacagttaacctgagtcctccgcttatggtctcctaaaactgctgcctagctgtcagccatgttgtttctttctggacctctaggttcttctaaatcttatgtggttgttgccacaatgtattttcttggagctgcagaactcatggaagctactttttcaaagccaactggagaatttctctgattttaggaaaagaataacaccattgttgaaagtctcacctgattagatcaggtctaccctcacacctcttttgattaactcaaagtcaaagtgactaaaaaaccttaattggatctgcaaatatatttcccataaaatgtaacctatcaaggagacacatggatcatatccaaaggtctcacctatacacaagaagagat

SEQ ID NO: 101199 - DNA, 598 bp, Homo sapiens
ttttaggtgatttgtatgcacattaaaattttaaacatacaattctacttttcttttcttcccctttcctttcacattatatttctattgctacataacaaagcaccataaacttagtggtttaaaacaacatacatttattattaatatttcactgtttccatgccccaggaatctagaacagttaacctgagtcctccgcttatggtctcctaaaactgctgcctagctgtcagccatgttgtttctttctggacctctaggttcttctaaatcttatgtggttgttgccacaatgtattttcttggagctgcagaactcatggaagctactttttcaaagccaactggagaatttctctgattttaggaaaagaataacaccattgttgaaagtctcacctgattagatcaggtctaccctcacacctcttttgattaactcaaagtcaaagtgactaaaaawccttaattggatctgcaaatatatttcccataaaatgtaacctatcaaggagacacatggatcatatccaaaggtctcacctatacacaagaagagattataaagggtactttgctcatggggtgaagatct

SEQ ID NO: 101200 - DNA, 603 bp, Homo sapiens
aagttttgtagaaaacagtagagagcaagggttttctaagtgcctttaaagaagagtcaggacagaaaaactcaaataaaatataaatagcatttataataataaagatagatagaygatagagagataatatatgatatgcttttgacatatgaaggtgaccaaaagttgaaacataaagcctgactcttctgtctctagtgcattgccaggaaaagttagggatggaggcagagggggatcatttaattaggctctgtcttagtccatttagtgttgcaataaagtaatacctgaggcttggttatttataaagaaaataggcttatttggcttattgtgctacaggctgtacaagaagcatggcaccagaatcagcttttggtgagggctttgggctgcttccactcatcgtggaagatgaaagagcagctggtgtgtatggagatcatatgaccggagagaagaaaggagtgaaatcggggaagcatcaggctctttttaatagcaactttcccaggaacgaatagagtgagaaatcactcaactccctcccctcagggcgttaatctattcctgaagggtctgttcccgtcactcaaa

SEQ ID NO: 101201 - DNA, 603 bp, Homo sapiens
aagttttgtagaaaacagtagagagcaagggttttctaagtgcctttaaagaagagtcaggacagaaaaactcaaataaaatataaatagcatttataataataaagatagatagatgatagagagataatatatgatatgcttttgacatatgaaggtgaccaaaagttgaaacataaagcctgactcttctgtctctagtgcattgccaggaaaagttagggatggaggcagagggggatcatttaattaggctctgtcttagtccatttagtgttgcaataaagtaatacctgaggcttggttatttataaagaaaataggcttatttggcttattgtgctrcaggctgtacaagaagcatggcaccagaatcagcttttggtgagggctttgggctgcttccactcatcgtggaagatgaaagagcagctggtgtgtatggagatcatatgaccggagagaagaaaggagtgaaatcggggaagcatcaggctctttttaatagcaactttcccaggaacgaatagagtgagaaatcactcaactccctcccctcagggcgttaatctattcctgaagggtctgttcccgtcactcaaa

SEQ ID NO: 101202 - DNA, 614 bp, Homo sapiens
tcccttaatacctgggattacaattcaagatgagattttggtggtgacacaaaacctaaccatatcaacaagcaacctaactacaaatggaccaaagtaccaagcagtcacgttgccaaaaaagatataagaatgttcaataagctcatgaaaatttgcaccttattatccattagagatatgtaaattaaaactataatgcagtactgctgcatactcattataatggctaaaattaaacagactgacaataacaaattttaataagggtactgaggaaaagaaacttctgttttgcattactgggaatgcaaaatggcacagccacattgaaacagtttagatattccttattaataaggtaaatacatacttacttcatcacatagcrgccccattattaggtacttaccttagacaaatgaaaacattgattcacataaataatatgaatgttcttaatgactttattcatcatagctcctgaaaacagcccaaatgcccatcaactgttgaacggatacatgtattatggtatatctacatatatctacatatctatatcattaagaattactcagaaataagacgtaattactgatggtcacaacaac

SEQ ID NO: 101203 - DNA, 478 bp, Homo sapiens
ggtaatggtgtatgtttcctaaaaaatttctattgaattctgttttttggcattttgttaagcatttgtatgtctacggtcattargaatattgacctgtagttttattttcttgaagtgtctttgtctttgatattagcataatattggcctcattaaaataaagttggaatcattcacttctcttcaattttttggaagagcttgagaaggactaactttaattctttatatattttatagaattcaccagtgaaactatatggtttggggattttcttgttggaaagtttctaattacagattaaataacctttctagttataattgtgttcatatgttatatttctccatgattctgtcatggtaaattgtatgtttccaggagtttatccatttcttccagcttatcctgttagttgctgtatatttgattataacagtctcttatgatcctttttatttctgtggcatcagt

SEQ ID NO: 101204 - DNA, 478 bp, Homo sapiens
ggtaatggtgtatgtttcctaaaaaatttctattgaattctgttttttggcattttgttaagcatttgtatgtctacggtcattaggaatattgacctgtagttttattttcttgaagtgtctttgtctttgatattagcataatattggcctcattaaaataaagttggaatcattcacttctcttcaattttttggaagagcttgagaaggactaactttaattctttatatattttatagaattcaccagtgaaactatatggtttggggattttcttgttggaaagtttctaattacagattaaataacctttctagttataattgtgttcatatgttatatttctccatgattctgtcatggtaaattgtatgtttccaggagtttatccatttcttccagcttatccwgttagttgctgtatatttgattataacagtctcttatgatcctttttatttctgtggcatcagt

SEQ ID NO: 101205 - DNA, 438 bp, Homo sapiens
actccacattgttctgccggttgatgacctgccacactgctggtgcctgccagtgcctgtcagtatgctcttctgccagtgtgttccttgtgatatccagccgcttgtgtctctgccagctagggtcacagcacagggktgtggcaggccagggtagtcttgggaaatgcaacatttgggcacaaaaacaaaaatgcctgtcctcaactagatcccagggcacaggcctcagggtggagcccttaccaaggacccacccttctctaccaagcacttccctgccccactcccatatcataagcactaaacagataagctcaaaggtattttaactagaaatattatatgacttccaccttactgaattatatgcatagtatgtaaaaccttgagataaggagtccatctgtcaattaatgattcatctaaaagattgtt

SEQ ID NO: 101206 - DNA, 438 bp, Homo sapiens
actccacattgttctgccggttgatgacctgccacactgctggtgcctgccagtgcctgtcagtatgctcttctgccagtgtgttccttgtgatatccagccgcttgtgtctctgccagctagggtcacagcacagggttgtggcaggccagggtagtcttgggaaatgcaacatttgggcacaaaaacaaaaatgcctgtcctcaactagatcccagggcacaggcctcrgggtggagcccttaccaaggacccacccttctctaccaagcacttccctgccccactcccatatcataagcactaaacagataagctcaaaggtattttaactagaaatattatatgacttccaccttactgaattatatgcatagtatgtaaaaccttgagataaggagtccatctgtcaattaatgattcatctaaaagattgtt

SEQ ID NO: 101207 - DNA, 603 bp, Homo sapiens
cagctggcagttaaagacaggtttactttggataaaacctgagaggcgctcctggccaattttggtcaggagccctttctcttacaggctaagagtatatattggttttacggtgagggggcttatcagaagcttggaatgttcctgtttgagggagaaattatacggcagggttggaatgtctctgggaggaggggaggttatcttggggcaggcatcttcctggctggaggggggttatctcggggatagcatgtctctggttgaggagtttggagtttggaatgattttggttggagatgtyatctgtggtttatggtcatgctgactagccattaggctgatgccctttggatttaggtgtttttttattaatgtgaattttacaaatgaggggcttgtccaagatggtgatgctcctactctgtcacaacttacatgtaataattgatgtcccgtgtttcctgaaaatgtataaaatgaagctgtagctggaccacctcaggctcatgttcttaggatctcttggagctatgtcaccagccatggtcactgatatttggctcagcataaatctcttgaaatattttagatattaattc

SEQ ID NO: 101208 - DNA, 618 bp, Homo sapiens
aatgaagctgtagctggaccacctcaggctcatgttcttaggatctcttggagctatgtcaccagccatggtcactgatatttggctcagcataaatctcttgaaatattttagatattaattctttttatcaagaaagttgtttttcttttcagcctctctgtatggcaaattattcttaacataagaagtagctttgggcaatgtttacatccagactgttgccagtaaaaatgccctctcaggttaaagattatatgaaggctgtgcctgtaagatacctagttaaggaagggcctctagactctcttagccaaacaaaactaaatgaaaaattcttgttaagagtcataggatgtattccaacaacatctgactttcagccctaagtaaagaaaggcttatctccaggagatctgtgtggtggttttatcctaaaggagtggaaaataatttgttwtgtgaaaataaaccaaataattcaaaaaacttgccagtttaaactaaagggccagaagagaacaacatgaatataagcctctgagcccaaatttccacttgtaagaaaccaactgaaaaagctcttctactataaatgttaccagaagcaaatctgta

SEQ ID NO: 101209 - DNA, 563 bp, Homo sapiens
agtgggtcatgagttcttttcccgtatccaggaaaaatgaggtatgtggacaactggagggtgagggaaaactggatagtgagcaagtggagtgcagcttcattgagtggcacaacagttctcaggagacccaaagtgcggtctaagaatatctaagaatgaaacgaacttggcaatacaatgaagttgggaacagagacagatccatgcagctggaactttgtgagagagcggggaatgttgtacaaaatgaggttggatgatggacaagactaggtcagaaaagattatataatatgtgctaaggatcttactttttatggcagtatgagacaagaaggttttaggctgggctttttatgacaggtttatatttttcaagaccactctggattctgtatgcagaatgggttgatggagaaagtaaatagaaactattacrgaagtcaaaaaaagagatggtttccattgcgatgatagggaagataaggtgaataattcttgatttaaaatatattcggtagtgacaacaaaatttgattatgtattaaatatcagagata

SEQ ID NO: 101210 - DNA, 563 bp, Homo sapiens
agtgggtcatgagttcttttcccgtatccaggaaaaatgaggtatgtggacaactggagggtgagggaaaactggatagtgagcaagtggagtgcagcttcattgagtggcacaacagttctcaggagacccaaagtgcggtctaagaatatctaagaatgaaacgaacttggcaatacaatgaagttgggaacagagacagatccatgcagctggaactttgtgagagagcggggaatgttgtacaaaatgaggttggatgatggacaagactaggtcagaaaagattatataatatgtgctaaggatcttactttttatggcagtatgagacaagaaggttttaggctgggctttttatgacaggtttatatttttcaagaccactctggattctgtatgcagaatgggttgatggagaaagtaaatagaaactattacagaagtcaaaaaaagagatggtttccattgcgatgatagggaagataaggtgaataattmttgatttaaaatatattcggtagtgacaacaaaatttgattatgtattaaatatcagagata

SEQ ID NO: 101211 - DNA, 302 bp, Homo sapiens
gaattctttttttaggactcaaggacctcttacaccagttgctgagagggaaactttacactcaaatattctggggattttttgacatatgacctgtgttgatgtttatacctcaggactyaaggcatcatactgggtcccctctcaaagtggaagttcatgggggccagatgataaatggatttctaatgccaggtttagttcacagtggtcctagggcctactcactgttcattcttctgttctccaaatgtagaattggagcagatctctttgggagttggcacaagtcttacactggt

SEQ ID NO: 101212 - DNA, 602 bp, Homo sapiens
ttttttaaaaattaaaatgcaagcacagagttaataggggaaggtatgtgaagggggagcaaaggtcacagacacagtggctcctttgggcactctgacctggaacccaaggatatgggtcttccattgcccactgaatgtggaccttcatgccttatgtcttgatagttcgatgggagaggcctcgatgatcctctgatcatcatacttctattacatttatcaaaaatgtaattcacaatgtttcaggactgatgccgttttctcactttgttgataattttgtccataaattctacccaawaaatatttattgtgcacaaaaacctataaaatttcacaagtctacttgttataatttaattaaattataaaaattggaatactgatctatgatactctaaatttttaaagaaaattttcctcatttagaagaataatttgatatgtaaatatgtgtggtttgcttaataattaaactaattttgtaaaatatagaactaaattctcatgttgaataatatgaaggtaaagaagaaaacactaattggcaaactaataactgacaaaacataatgtaatgcgaactgtaaaatattgag

SEQ ID NO: 101213 - DNA, 587 bp, Homo sapiens
atgtgtgcattcagctgacagagtttaccctttctgcagattcagcagtttgggtaaactgttattgtagaatctgcaaagagatatgtggtagctcattgcagccaaaggtgaaaaggtgagtatcccaggttaaaaaaataaaaggaagatatgtgagaaacagctttgcgacgtgtgcattcaaatatcagaggtaaactattcttttcattcagcagtttggaaaaactgttgtagaatctgtgaagttatatttgggagcacgttgaggcccattctggaaaaggaataacttcagataaaaactagaaagaagctttctgagaaactgctttgtcatgtgtgcattcatcccacagagtgaaacctttctctggattcaacagtttgcaaagactgtttttgcacattctacgaatggacmtttgggagctcattgaggtcagtgaagaaaaagtgaatatccgaggataaaaactagaaggaaggtatctgaaaaagaattttctgatgtgtgcattcatgtctcagatttaaaccatccttttaattcagcaatttgtaaacactgttgtcatagaatc

SEQ ID NO: 101214 - DNA, 525 bp, Homo sapiens
aattttctgatgtgtgcattcatgtctcagatttaaaccatccttttaattcagcaatttgtaaacactgttgtcatagaatctgcaaagttatatttgggagttcattgaggcctatggtgaaaaaggaaatatcttcaaataaactataaacatttctttggattcarcattttggaaacactgttgttgtagaatctgggaaggatatttggaacctcattgaggccaaattcgaaaagttacatatcccaggaaaaaaactagaaggagactacctgagaatccactttgtgatgtgtgcattcaactctatgacttaaacaattcttttcattcagcagtatgtatacactgttgttgtagaaagtgcaaagttatatttgcaagtgcattgagttctgtggtgaaaaaggaaatatcttcagataaaaattagaaataagatttctgagaactgctttgttatatgtgcattcatctcagagagttcaaactttctgtggattcagcagtttgcaaaca

SEQ ID NO: 101215 - DNA, 525 bp, Homo sapiens
aattttctgatgtgtgcattcatgtctcagatttaaaccatccttttaattcagcaatttgtaaacactgttgtcatagaatctgcaaagttatatttgggagttcattgaggcctatggtgaaaaaggaaatatcttcaaataaactataaacatttctttggattcaacattttggaaacactgttgttgtagaatctgggaaggatatttggaacctcattgaggccaaattcgaaaagttacatatcccaggaaaaaaactagaaggagactacctgagaatccactttgtgatgtgtgcattcaactctatgacttaaacaattcttttcattcagmagtatgtatacactgttgttgtagaaagtgcaaagttatatttgcaagtgcattgagttctgtggtgaaaaaggaaatatcttcagataaaaattagaaataagatttctgagaactgctttgttatatgtgcattcatctcagagagttcaaactttctgtggattcagcagtttgcaaaca

SEQ ID NO: 101216 - DNA, 525 bp, Homo sapiens
aattttctgatgtgtgcattcatgtctcagatttaaaccatccttttaattcagcaatttgtaaacactgttgtcatagaatctgcaaagttatatttgggagttcattgaggcctatggtgaaaaaggaaatatcttcaaataaactataaacatttctttggattcaacattttggaaacactgttgttgtagaatctgggaaggatatttggaacctcattgaggccaaattcgaaaagttacatatcccaggaaaaaaactagaaggagactacctgagaatccactttgtgatgtgtgcattcaactctatgacttaaacaattcttttcattcagcagtatgtatacactgttgttgtagaaagtgcaaagttatatttgcaagtgcattgagttctgtggtgaaaaaggaaatatcttcagataaaaattagaaataagatttctgagaactgctttgttatatgtgyattcatctcagagagttcaaactttctgtggattcagcagtttgcaaaca

SEQ ID NO: 101217 - DNA, 364 bp, Homo sapiens
gccaatggtgaaaaagcaaatatcctaggataaaaactagaagaaaaacatctgacaaacccattgtgatgtgtgccttcatctagcagacgtaaaagtttcttttcattcatcagtttggaaacactgttttggtagaatctgtgaagggttatttgcaagcacattgaggcctataatgaaaaaggaaatatcttcatataaaaactagaaagaagctttctcagaaactgctttgtaatgtgtgcattcggctcatagagctaaacctttcctttgattgagcagtttggttaacactgtttttgtacattatgagagtcracatttggcagctccttgaggccaaagtcgaaaaagagaa

SEQ ID NO: 101218 - DNA, 631 bp, Homo sapiens
atcccagcataaaaacaggaaggaagttatctgagaaacmgctttgtgatgtgtgcattcatctcatagagttaaatctttcgtttcaatcagcagtttggaaacactgtttattggggaacctgccccaataggtaggttctttcctattttccctaagcatcagctggtttgagaaataaagggacagagtacaaacgagagaaattttaaagctgggcatccgggggagacatcacatatcagtaggttctatgatgcctcccaagctgcaaaaccagcaagttttagggagtttcaaaaggggaggaaatgtgtgaatatgtgtgggtcacaaacaacaagtacttcacaaggtaatagagtatcacaaggcaagtggaggcagggcgagatcacaggaccacaggactggggcaaaattaaaattgctaatgaagtttcaggcaccattgtcgttgataacatcttatcaggagacagggttttgagagcaaccagtctgaccaaaatttattaggcgggaaattcttctacctaatatgcctgggagcactatgggagactggggtctattgcacccctacagtctacagaccataaaagatggcctcacctggggggggcgtct

SEQ ID NO: 101219 - DNA, 525 bp, Homo sapiens
aactgctttgtgatgtgtacattcatctcagagagttaaacaattctttggattcagcagtttggaaacattatttttgtccattctgtgaattgacattatggagcacattgaggccaatggtgaaaaagagaatatcccaggataaaaactagaaggaagctatctgagaaaccacttggtgatgtgtgaattcatcttgcagagttaaacctttcttttcatttagcagyttggaaacactgttttggcagaatcttcaaagagatatttgggagcacaatgaggtcaaaggtgaaaaagcaaatatctcaggataaaaactacaagaaagctatctgagaaaccactttgtgatgtgtgcattcatctcacagagttaaaacttctttttcattcagcagtctggaaacactgttttggtagaaactgggaaatgttatttaggagcccattgaggcctactttaataaaggaaatatcttcagataaaaactagaaagaagctttctgagaacatgattt

SEQ ID NO: 101220 - DNA, 633 bp, Homo sapiens
ttgtgatgcattccatattcttgccacagtctgctgcctgttactttgctttgcttcccttccctggatcctgccataatgtcacagggcccgtgaggccatagccttcccgtgttcatctcccattgcaccactgaggttcgcgattggagaaaaatctggccaaccccactcaggtgtggcaccttgccacctgccccctygtgcaacaataaataaataaataaataaataaataaataaataaataaaagtacaacaattagccagacgtggtggtacatgcttttggtcccagctactagggaggctgaggtgggaggatcacttgagtccgggaggcagaggctgcagtgagctgagatcatgtcactgcacaccagcctgggcaacagagtgagactctgtcttaaaaaaagagggccaggcatggtggctcatgcttgtaatcccagctacttaggaggctgaggcaggagaatcgcttgaacctgggagggggaggctggagtgagctgatattgtgacagggcactccagcctgtgtgacaagagccaaactccgtctcaaaacctcaaaacaaaacaaaacaacaaaacaaggctgggtgcagtggctcatgcctgtaatcc

SEQ ID NO: 101221 - DNA, 633 bp, Homo sapiens
ttgtgatgcattccatattcttgccacagtctgctgcctgttactttgctttgcttcccttccctggatcctgccataatgtcacagggcccgtgaggccatagccttcccgtgttcatctcccattgcaccactgaggttcgcgattggagaaaaatctggccaaccccactcaggtgtggcaccttgccacctgccccctcgtgcaacaataaataaataaataaataaataaataaataaataaataaaagtacaacaattagccagacgtggtggtacatgcttttggtcccagctactagggaggctgaggtgggaggatcacttgagtccgggaggcagaggctgcagtgagctgagatcatgtcactgyacaccagcctgggcaacagagtgagactctgtcttaaaaaaagagggccaggcatggtggctcatgcttgtaatcccagctacttaggaggctgaggcaggagaatcgcttgaacctgggagggggaggctggagtgagctgatattgtgacagggcactccagcctgtgtgacaagagccaaactccgtctcaaaacctcaaaacaaaacaaaacaacaaaacaaggctgggtgcagtggctcatgcctgtaatcc

SEQ ID NO: 101222 - DNA, 467 bp, Homo sapiens
ttaatttcattcaacagtttggaaacactgttttcacagtatctgtgaagggataactgggtgcgcattgaggcctatggtgaaaaaggaattatcttcagataaaaactacaaagaaactttctgagaaacagctttgtgatgtgttcattgacttcacagagttaaacatttctgtggaattcagccgtttgcaaacactgtttttgtccattttgcaaatggacatttgggagctcaccgagaccaaaggccaaaaaaacaaatgtcccaggataaaaactggaaaaaatctatctgagaaactggtttgtgatgtgtgcattcacctcacagagacaaacatttcttttcattcagcaatcttggaaaccctgttttggcaggtatctgagaaaccaccttgtkaagcctacattcatcttacagaggcaaacctttctttttattcagcagtttggaaacac

SEQ ID NO: 101223 - DNA, 467 bp, Homo sapiens
ttaatttcattcaacagtttggaaacactgttttcacagtatctgtgaagggataactgggtgcgcattgaggcctatggtgaaaaaggaattatcttcagataaaaactacaaagaaactttctgagaaacagctttgtgatgtgttcattgacttcacagagttaaacatttctgtggaattcagccgtttgcaaacactgtttttgtccattttgcaaatggacatttgggagctcaccgagaccaaaggccaaaaaaacaaatgtcccaggataaaaactggaaaaaatctatctgagaaactggtttgtgatgtgtgcattcacctcacagagacaaacatttcttttcattcagcaatcttggaaaccctgttttggcaggtatctgagaaaccaccttgtgragcctacattcatcttacagaggcaaacctttctttttattcagcagtttggaaacac

SEQ ID NO: 101224 - DNA, 399 bp, Homo sapiens
acctttcctttcattcggcagtttggaaacactgttttgtcagaatccacaaagaaatatttgggaatgcattgaggcctatagtgaaaaaggaaatatcttctgataaaaactggaaagaagctttctgagaaaccgctttgtgatgtgtgcgttcatctcacagttaaacgtttcttttaattcagcaatttagaaacactgttttcacagtatctgtgaaggaatttctgggagcacttggagacctatgytgaaaagagaatatcttcagataaaaaaaagaaagaagttttctgataaactgctttgtgacgtgggcattcatctcactgtgttaaaactttctgttgattcagaagttcgcaaacactgtttttgtccattctgagaaaggac

SEQ ID NO: 101225 - DNA, 605 bp, Homo sapiens
ctgcacaccaggtaatgctcccgcgagcagtcagctggggaagcgtcgtgcctcatcctcactaagagctccggctgcagaccagtccatgctatttggacagccaattgcccatgactaggccagtgtccagagggtgcygagtaaccagggaatgcaatagggtcatttgttcacaacaactgtcttgcaaaactgcaaggactctccttattttccaaaccctgcccagcccacagatttgctggaacagcgaggttgctacgagtcacatagaaccccacatcactatctttcaaacaaatgaggacactgaggcctgtctctctagaagtaatgtccctaggccaaatgaaggctatagcctaagactctctctctagccaacttccttttttaactggtaagcctcagaaaaccttccccattctaaaccatggctcaattcatctatgtagtataaaagcagagagtctgctaaatgggcaatgcacaggcagaaaagccactgctcacctgacattctaaacaatgcatactactctaccatggaaacagccaggactcagctcttgaaactacactgtcctaattcatgggctaca

SEQ ID NO: 101226 - DNA, 582 bp, Homo sapiens
gctatatagtattctattataaggccacatcatatttcatttacaaaattgtctattaagcaacatttagcttatttccaatttttactgtcagccaatgctataataaacaatgtacaaaaaaatctttcgtgaatattaaaaaaacattttttacttatggcaggctgcttgcagtttcatcttcacacataggtacttgttttcttttctctgcccttaagggtgcttcggtggaaaaatttaagaagcagtgacctaatcaattttcctcattttgcaaatgagggaaatagagaagctaaaaagtcaactagcttgtctacatgtatacagtaagcatcagaagcagactcaaaccagagtgtcctgattgtaggttaaatacttccttcctcagccctattatatctctctttctactttttctcttcctggtaccagagaatacatttaaaaattatttccttctgctcstggccctaaacaaaaatacaaagtctttatatgttgtgcagtgtttcctgctagtgacatagagaacctgggtacaaggggaatgaagaaagtggaaccataatt

SEQ ID NO: 101227 - DNA, 484 bp, Homo sapiens
aataccctttcctcaaatcactgctcaggccttacctctcccaggaagcttcctcaagcctaaccttaaaaagaattacacttttcacacctgaggtttctagggctctgtctataatcctctccacccttctgtactctcacgacrcattgtatgtatccagctctactggaacatgaatcctccatggacagcaggagctgtgttcacaagcctcacagaatcaataaatcctctctcattcatttgtgcatttgctccaccagtaacactaagagtggcacttcatatgaattaagcatttcacacctgcagagagagtgttttactgatgtttaatttcaaccacaactctgtgagcagggcttattgttacttccattttgggggagcaaaagctgccccaagatatcatagctactaaaagaaagagaggattaaatactgtccaagtgcttagggcagttctttctttatcctctct

SEQ ID NO: 101228 - DNA, 515 bp, Homo sapiens
ataagccaggtttctccagaggaacagaatcaatagtagatatatgagaaacataaaggcactacatgaatctccagaggaacctggctcatataatctctctctctctctctctctctctctctctctatatatatatatatatacacacacacacacacacacatatgagaaacatatatatatatacacacgagaaacatatatatatatatgtttctctctctctctctctatatatatatatacatatatatatacacacacacacacataaacatatgtacagaaagccagagagagagattgattgagattttaagaaactgtctcatgtaagtgktggggctggcaagtccaaattaagcaggctggaaactcaggcagggtttctatgttacaatcttgaaaattccttcttccttaggaaaactctgtctcttttctaaaagctttcaattgattgaatgaggctcacccatattatggtgggtaatttgctttactcaaagtct

SEQ ID NO: 101229 - DNA, 353 bp, Homo sapiens
gacattgctcctcaagcctccctgtcccctgattacctgacactgctcctcaagcctccctgtcccacgcccttctccatcccaattcaagcaactatctgttttgattgggattattgcaactgtcctctaactgcccttgcttcctccagccagagtagtcctagtaaaatgatatatatatgtatatatgtgtgtgtgtrtatatatatatatatatatatatatatatatatatatatatttagggtattaactcacatgatcacaaggtcccataataggccgtctacaagctgaggagcaaggaagccggtccgagttccaaacctgaaaaacttggagtccgatgt

SEQ ID NO: 101230 - DNA, 660 bp, Homo sapiens
ctggggaacaaccaggaaaggcagtggggtgtcctgcagaacagcctctgactctcacctccaccagagcaccaggttgggaagagggtggcaatcaagtgctttcacctctctaaaggaaattagaaacctgataccccagtgagggggtggggatagggagggatgagggcagaattgagaggaatgggaggcctcatccataatgaggggttgttccatgaagtcaggaatcagctgggtggatgctgggagtctggtgctgaaacttggagaacattttaaaggcgctgaaaactcttggcaggagaggaggagtgtttgttggctaacttgactgctgggcatttttggactgtttgggagggctcagctttcttgyctgtctttgcaacacatttggttcagaatgccaattaatctccttggtcagcccactgaagggtcctcatttctacactatgcctttttattctgcatgaagaggtgtctggcatagtgtctcctgccctcccccactgaagtctctttaatgctgaaggaagcttcggcagcgttgctagaaccgggcctggccttggttcccactgccttgtattctgggcaggcggtctcctctcactcaccccctggtcaggaagtacaatcattcctccctgc

SEQ ID NO: 101231 - DNA, 639 bp, Homo sapiens
ttataattattttacacgccactatttgtagcttttgaaaatttataaagaaacgtacttttccactattaagyacatttttctatatacatttgtagtataaataagattttagggggattcatttgaggggaacttagaataactactttttattccaatggtgttggaatcaacacatgaatcacatcaaaacaaaatgtaagcaaatctgatttcaaaattggaattaaaaacaacctataatagagtttaaaaaataaagatttactaactgaagcagtgtaagcatttcatctgagttgctggatacactttaaagttcggaatatcatatctttcaacatattcgctaattattcactaattcagactttatatcatttcctctacttagatggacattatcaatcaattccaagtactgaagcttttgtccgaatttgtgcacatcagggaatcctctggcctcatgaacttggtgttcaccatttcatctggacactctgcagctttggtcatgagctgagctccatgggcttctgctctgtcgtttgctccacacttggtcaggccccaaaccctggcaaggttaccacagccggagcagggccaggctggcctctctcggagacaatc

SEQ ID NO: 101232 - DNA, 639 bp, Homo sapiens
ttataattattttacacgccactatttgtagcttttgaaaatttataaagaaacgtacttttccactattaagtacatttttctatatacatttgtagtataaataagattttagggggattcatttgaggggaacttagaataactactttytattccaatggtgttggaatcaacacatgaatcacatcaaaacaaaatgtaagcaaatctgatttcaaaattggaattaaaaacaacctataatagagtttaaaaaataaagatttactaactgaagcagtgtaagcatttcatctgagttgctggatacactttaaagttcggaatatcatatctttcaacatattcgctaattattcactaattcagactttatatcatttcctctacttagatggacattatcaatcaattccaagtactgaagcttttgtccgaatttgtgcacatcagggaatcctctggcctcatgaacttggtgttcaccatttcatctggacactctgcagctttggtcatgagctgagctccatgggcttctgctctgtcgtttgctccacacttggtcaggccccaaaccctggcaaggttaccacagccggagcagggccaggctggcctctctcggagacaatc

SEQ ID NO: 101233 - DNA, 639 bp, Homo sapiens
ttataattattttacacgccactatttgtagcttttgaaaatttataaagaaacgtacttttccactattaagtacatttttctatatacatttgtagtataaataagattttagggggattcatttgaggggaacttagaataactactttttattccaatggtgttggaatcaacacatgaatcacatcaaaacaaaatgtaagcaaatctgatttcaaaattggaattaaaaacaacctataatagagtttaaaaaataaagatttactaactgaagcagtgtaagcatttcatctgagttgctggatacactttaaagttcggaatatcatatctttcaayatattcgctaattattcactaattcagactttatatcatttcctctacttagatggacattatcaatcaattccaagtactgaagcttttgtccgaatttgtgcacatcagggaatcctctggcctcatgaacttggtgttcaccatttcatctggacactctgcagctttggtcatgagctgagctccatgggcttctgctctgtcgtttgctccacacttggtcaggccccaaaccctggcaaggttaccacagccggagcagggccaggctggcctctctcggagacaatc

SEQ ID NO: 101234 - DNA, 476 bp, Homo sapiens
gaattctgattccttcacttagtgagtgacaaagggtaagctttcttatgtatagaaaagcagagtagaacctactttattggattcttagtagcactacatgcaatagtccatggagcaccagtccaggtgaccttgctcaatgcctcattatcacccaaagcccctctaacacctagcatacagttaatgactttcttctcttccttggaagaaaatgaagacaaatactgccatttgtgacttttaactgttgttcttaagttaaaacatgatttttgtatttttttytgctcagaaaaataccatttcacaaattgtaacctaattgtcctaagagttgttttgaaatggagggggtttttgctgttgtttggcttgtttgttttaactctaggagaaaaaaggtaggagcaggggagacagttaaattggaatggctcaaatcttatactaatctttttggtactgttgtg

SEQ ID NO: 101235 - DNA, 324 bp, Homo sapiens
catgtgacattgcagtgcctccaactgggatatatattctcctcctattgattttaggcttgtctgagagacttactttcacgaatgaaatgttcaccagcacggtctgcgttaatcttcttggtcttcagcctttctaccatgagaagaagataagccacattgctkctggccccagaaagatgaggccttatggtgcagttctgaccctgcaccaaattagagcctggaccttaacctcacaggcccagcccaggaaagactcgctgagagcagctcagtcactgtcacatggatgggcccaagacactttcttggccaaaa

SEQ ID NO: 101236 - DNA, 603 bp, Homo sapiens
taaataaaaggcattcaaatagaaagaaagtcaaattatctctcttcacagatgatataattttatatctagaaaacgccatagtctctgctcaagagctcctacatttaataaacaacttcagcaawctttatgtacacaaaatcattgtataaaaatcacaagcattctatacaccaacaacatcaaagctgagagccaaatcaagagcacaatcccaattacaaaagccacacacacacacccaagtacacacacacacaaaatatctacgagcacagctaaccagggaggtgaaaaatccctgcaacataaattacaaaacactactgaaagaaatcagagatgacaaacaaaaatggaaaaacattccatgctcatggatagacagaatcagtattattataatggccatactgcccaaagtaatgtacagattcaatgctagtcctatccaactaccaatgatcgttttcacagaattagaaaaagctattctaaaatttatatggaaccaagaaagagtttgaatagccaaagtaatcctaagcaaaaagaacaaagctggaggcatcctgttacttgacttcaaaccatagtaca

SEQ ID NO: 101237 - DNA, 437 bp, Homo sapiens
atggtctaaataatgtttcccagtcctctctcaattctacccccatatccaacccttggcaataataaattgtcatactgtcatatattgaaataaatatctatattagtccattctcacattgctataaagaactacctgagacagggtaatttatgaagaaaggctcacagtctttaattgactcacagttctgcaggctgtacaggaagcatgaattggaggcctcaggaaacttacaatcatggaggaaggacgaggggagcaagtacatcttgatatggcagagcaggagagagagagaaggggaaatactacrcacttttaaacaaccagaactcacaagaactcactcatgatagtgaatcttaagaacagcaagaaagaaatctgcccccacgatccaatcacctcctaccagcccctcctcagcatga

SEQ ID NO: 101238 - DNA, 601 bp, Homo sapiens
gggtttttgagagaattaattgaagtcatgcaagtaaagcacagctttcaataattattagcaattttttttttggtattaacgtacagcataacaaaagtctagatttacttcaggagttgtgcccttgaagtagaatttggttgtttgctttacctgccttcataatgactgcacgaaagaaataaatatcaattcatttcattgtattcaatttgttttatttcaaaacaagttaaatgaatctttaatttttttttattccaatgatatgtattcatgtcaatattttattccagatgatgtttaagcaaatataagtgaaaatactgtgtgrgctgatttgatactgtttgtcattcctattgtatgtttgactccctacctccctttcgtgggttttctgtctctctatttaaactttttattatgggaaatggacacaaatagagagaatagtatgataaactcttatatacccatctcccaccttcagcagttatcagctcatggctaatattgtttcctctgcattcctatccacttatccccatcctgtgttattttaaagcaaattccagacaccgtattatccataaac

SEQ ID NO: 101239 - DNA, 485 bp, Homo sapiens
tccggtagctcacatgaaagccggttgtttaaaagagcctggcatctctctcttgccctcgctctcaccaggtaatgagcctgcttcccttttgccttccgccatgatcggaagctccctgaggcctctccagaggcagatgctggagccatgcttcctgtacagcctggagaactgtgagycaaataagcctctttataaattacccagcctcaggtattcctttatagcaacgcaaaatgactaacacaggtttaaaaaatagctacacacttctgaaacagacagagagagaatgtaaaataacaaattgtctaaagtaaatgctttaagaaaagggagaggggaatctcttacccctttttgtagtaggaaaaattaatttttaaatagtttttgttttgcatttacccttatacaagaaaggtagtgtcacagacaaacgcttagtgtctctaatatataaagatttcctgcatgcccta

SEQ ID NO: 101240 - DNA, 604 bp, Homo sapiens
cttttttcatttaatttgttaaagttttattttagatgcagaggtacacgtacaggtttattacatgggcataccgtgtggtgctgaggtttgggcttctaattgtcttgttgcccaagtagtgaaaatatgtttttcaacccttgccccactccttcccccactacgtaacttcttatgtgataaaatgtgaataacataacttatttttgtttccttaattttgtaggatggcttctggaaacttacaccagaactgggacttatattaaatcttaatacaaatggtttgcacagctttcttaaacaaaaaggcattcaatctctaggtaaggcactatgtttccatttattaagtcattattttcattcattaataagcatgctcctaattgttrtaaactgttttgtaagctagtgtattaatgtaataattatgaaagttatattcgaatggaattatatttaaccattaaaggaaatgggagatgggtttctagtcatatttttaccactaattagggtattatctgagcaaatttattagcataaatagcaccaagtgctgtaaaaaaaatctcagaagcttaacatggtaatcaaa

SEQ ID NO: 101241 - DNA, 552 bp, Homo sapiens
ggtctgacttcataaaaatctgaaatttctgctttaaaatgctataatgaataacaggggaaacgatttttcagaaaaattgactaaatggggactatgccgagtatgataaattaataattcattaacaacaacttaaatattactcactcaccttatagataaatgggccaaggacataaacaatccrtaaaagagaaaatctaactgatcaacaacctacacagataaatattcagtgtcaccaataacgaattcaaaacaacaataacgtgccatttgcacccatgaaattagccctttctcttttaatgagaaaatccaatgtcggcaaaataaggcatgaaatttaaaactttgatttattgttgatacaagaatacagttgctcttggatttggcaatatatattaagaacactaaaaatattcatactctttaactaggtaatttcacttctagcaatctattacagttaaaaagccttatgctcaaagatgtctgttgctgtattactgattatactgacacttacatgtccaacattagagg

SEQ ID NO: 101242 - DNA, 552 bp, Homo sapiens
ggtctgacttcataaaaatctgaaatttctgctttaaaatgctataatgaataacaggggaaacgatttttcagaaaaattgactaaatggggactatgccgagtatgataaattaataattcattaacaacaacttaaatattactcactcaccttatagataaatgggccaaggacataaacaatccgtaaaagagaaaatctaactgatcaacaacctacacagataaatatycagtgtcaccaataacgaattcaaaacaacaataacgtgccatttgcacccatgaaattagccctttctcttttaatgagaaaatccaatgtcggcaaaataaggcatgaaatttaaaactttgatttattgttgatacaagaatacagttgctcttggatttggcaatatatattaagaacactaaaaatattcatactctttaactaggtaatttcacttctagcaatctattacagttaaaaagccttatgctcaaagatgtctgttgctgtattactgattatactgacacttacatgtccaacattagagg

SEQ ID NO: 101243 - DNA, 552 bp, Homo sapiens
ggtctgacttcataaaaatctgaaatttctgctttaaaatgctataatgaataacaggggaaacgatttttcagaaaaattgactaaatggggactatgccgagtatgataaattaataattcattaacaacaacttaaatattactcactcaccttatagataaatgggccaaggacataaacaatccgtaaaagagaaaatctaactgatcaacaacctacacagataaatattcagtgtcaccaataacgaattcaaaacaacaataacgtgccatttgcacccatgaaattagccctttctcttttaatgagaaaatccaatgtcggcaaaataaggcatgaaatttaaaactttgatttattgttgatacaagaatacagttgctcttggatttggcaatatatattaagaacactaaaaatattcatactctttaactaggtaatttcacttctagcaatctattacagttaaaaagccttatgctcaaagatgtctgttgctrtattactgattatactgacacttacatgtccaacattagagg

SEQ ID NO: 101244 - DNA, 577 bp, Homo sapiens
tccatgggcatggaattttttatttgtttgtcatctatgatttctttcagcagtgttttgtagttctccttmtagagatctttcacctccttggttagatgtattcctagacattacttcttttgtggctattgtaaaggagattgtgttcctgattgggctctcaggtcatacattactgatgtatagaaatgctactgattttcattgattttctattgtgaaatttaatgaagttgtgtatcacttctagaagccttttggtgaggtctttagggttttaggtatagaattatatcatcaataaagagaaatagtttgacttcttctttttctacttggatgccttatatttctttctcttgcctgattgccctggctaggacttctagtatgacactgaataggaatggtgagaataggaatcctattttgttgtagttctcaaggggactgcttccagcttttgcccattccatataatgttggctgtgggtttgtcacagatggcccttattattttgaggtatgtttctttgatgcctactttgttgagggtttttaacatgaagggaag

SEQ ID NO: 101245 - DNA, 577 bp, Homo sapiens
tccatgggcatggaattttttatttgtttgtcatctatgatttctttcagcagtgttttgtagttctccttctagagatctttcacctccttggttagatgtattcctagacattacttcttttgtggctattgtaaaggagattgtgttcctgattgggctctcaggtcatacattactgatgtatagaaatgctactgattttcattgattttctattgtgaaatttaatgaagttgtgtatcacttctagaagccttttggtgaggtctttagggttttaggtatagaattatatcatcaataaagagaaatagtttgacttcttctttttctacttggatgccttatatttctttctcttgcctgattgccctggctaggacttctagtatgacactgaatrggaatggtgagaataggaatcctattttgttgtagttctcaaggggactgcttccagcttttgcccattccatataatgttggctgtgggtttgtcacagatggcccttattattttgaggtatgtttctttgatgcctactttgttgagggtttttaacatgaagggaag

SEQ ID NO: 101246 - DNA, 550 bp, Homo sapiens
ctagaagtttgaaattaaggtgtagtcagtgtcgtgctctaggcctctagggcaagaaccttccttgccttttccagcttcttgtaacccaggtgttccctggcttrtggcagcatcacttcagtctcagcctccaacatcatgtggagtgtgtaacttttggatatgagctgtctgtttagttgcttcctcctcctccttctttctttccttccttccttttttctttctttctttggcttaagcaagagaaatgtattgtctcacagttctggaggctgggagtccaagatcaaggtgttggtagggttggtttctcctgaggcctctctccttggcttgcagatggctgccttctcactgtgtcctcacatggtcttccttctgtgcatgcatgaccctgatgtctctctgtctgttctaatctgctcttcttataaggacaccagtcagataagaatagggcccacctccaccaatggcctcattttaactgaaatacctctttgggtatttaagctgaagtccttatcttcaaaaacagtcacat

SEQ ID NO: 101247 - DNA, 489 bp, Homo sapiens
cttaaattttatcgttcattgaaaatgggcccttgcaatatagagactcatttcctctagttctgggaaattatctcatgatttttgtttgttataaataatgttctccctccttttgtctattctttctttatgtacttcaatttgtcagatacccatttagattgactctatctcttttctccttctttctgtatctttttttttttttttttttggcagagtcttgctctgtcacccaggctggagtgcagtggtgtgatctcagctcactgttttgctttyctttttttgtttttgttgtacttcctgggaaattgtcctcaacctcattttccagttcttctattaaaattttcatttttgcaattatatttttaaattttgtagagttttccttgttctccattccttttttatagtctcctgctccagtgttatggtgaatattttgctcttagttctctggggatttttattatagatttt

SEQ ID NO: 101248 - DNA, 564 bp, Homo sapiens
cctcacaatgtaatactatgactgccattttatcttctgcatcccatacccaaggctgctcctctactcctgcaccctttgcagttaatatgcattagttaagaaacaaaacagctataacacaggaaaagctttagtcttaagagtaatatatcagccatctgagaatagagaccagcttgctggatctgtgaatgtcagtatttttttttttccagctaagactttctggatatgaaacgatcacatgacctcaggaacacatcagcaatttcctagtttccaagtaaaagtttttattccctccaagttgggttcccctcgaaatctcaagaaatcagaggtcacccaggagtaaatacagttagctaaaaaggmtacaagggtttatgctgatcagataattacacttctttctcccacaggaatggtcaccacaaatagctacatgtcagaattttctcatcattttttcaagcaccatttctaaggtggcttatttttttttatttcaggtgagctttgagttgggagtgatattttaatatactgattcccaagccc

SEQ ID NO: 101249 - DNA, 564 bp, Homo sapiens
cctcacaatgtaatactatgactgccattttatcttctgcatcccatacccaaggctgctcctctactcctgcaccctttgcagttaatatgcattagttaagaaacaaaacagctataacacaggaaaagctttagtcttaagagtaatatatcagccatctgagaatagagaccagcttgctggatctgtgaatgtcagtatttttttttttccagctaagactttctggatatgaaacgatcacatgacctcaggaacacatcagcaatttcctagtttccaagtaaaagtttttattccctccaagttgggttcccctcgaaatctcaagaaatcagaggtcacccaggagtaaatacagttagctaaaaaggctacaakggtttatgctgatcagataattacacttctttctcccacaggaatggtcaccacaaatagctacatgtcagaattttctcatcattttttcaagcaccatttctaaggtggcttatttttttttatttcaggtgagctttgagttgggagtgatattttaatatactgattcccaagccc

SEQ ID NO: 101250 - DNA, 615 bp, Homo sapiens
tttacaaattatccagtcttggccatttcttcatagcagtgtgagaacagactaatacaatgaccaagggagaaagacaaagcagcacggagtatttgaaggtgtgtcaytaaacataagcactcatgattcaaagaatgggacatgtgttttgtcttccagaagctccatttggtgaaggagacagacacatgaaaaacaagtgatgagtctcatgtgatgaggcaggaaggactgggtactagacgaccccagtagagataaaatgggaatacaggaaagaaagtttttttttattccttagagagcagaacgctaatagatggatcaaatctacaggtgggcagatttttactcattgtaagaaaggattctctaataatttaagtaatccagcattagagggcacatctcttggaaataagtgggagactatctttgctttccactaatcaaaaagatgctggatgcatttattagaatctgcaccaggtgggagttggattcggtgatctctagcttatctttagaaactcaaactttgtaagacaactttcagttgaccaaatagcttcctttcattggattcatcctataagaggccacagggtagat

SEQ ID NO: 101251 - DNA, 594 bp, Homo sapiens
tgcattacctatgagacctctgcattgagtttgcaacctattttaagcatggagatcttagtaaaggatttgtcatctccaaattcccatgtaccccagttgagcaaataatttgcattctgcatggcttgcattctttactycacatttgaaggcactatcaaggacttaaccattatttatgggagaatagaaaataagagggtggcctataaagacatgtggtataaactgagggcatgcatagcttaggaagaaaaaattgtttcttactttattctccaactgagagctggtctacctatgctatgttctcaaaaaaatttaaaaggtaggggaagaagaagaaagaaaaacatgcttactacagccagtgctgctattacactgaatgcatgagttcattctggggctcaaatattttgtagaatttgctggggtttctcgtgggaggaaaacaaagtacattaacttagccttttgttattagcaaaaagggtatgaataaatcagactcatccttgaatcctcaaagaataatgtcacccattagactacattaacaggaagatttttctctaataaagtcatgga

SEQ ID NO: 101252 - DNA, 594 bp, Homo sapiens
tgcattacctatgagacctctgcattgagtttgcaacctattttaagcatggagatcttagtaaaggatttgtcatctccaaattcccatgtaccccagttgagcaaataatttgcattctgcatggcttgcattctttactccacatttgaaggcactatcaaggacttaaccattatttatgggagaatagaaaataagagggtggcctataaagacatgtggtataaactgagggcatgcatagcttaggaagaaaaaattgtttcttactttattctccaactgagagctggtctacctatgctatgttctcaaaaaaatttaaaaggtaggggaagaagaagaaagaaaaacatgcttactacagccagtgctgctattacactgaatgcatgagttcattctggggctcaaatattttgtagaatttgctggggtttctcgtgggaggaaaacaaagtacattaacttagccttttgttattarcaaaaagggtatgaataaatcagactcatccttgaatcctcaaagaataatgtcacccattagactacattaacaggaagatttttctctaataaagtcatgga

SEQ ID NO: 101253 - DNA, 601 bp, Homo sapiens
gggaaacctaagtttacaaagacacctggtgtcttcccaaggcctaccctgacagcaggagcattgccatcttggacaactgccaccattttaagttccccttgattaagaaactgcctaaatccaacccaaaaacatcagcctaatggctaatgtcagcataaccagaaacattccaaccctaagataaacccacttccaaccagaaacatgccaacccrgagatagcctcccctccggccagagactttccaaccctgcaataaactttccctcatacagaaacattacgaacctgcaataagctcaccgcttcgtaaacccttaaacacccttagtgtgtaagagaaaacgctcctgaccaaaatcgacaagaagcccctctcaggtttattctccaaaataaacctgtctttgattgttaagctgcttttcgtgtttctttcttgtttcttaactcttacatacctgaagtcagggtgcgttgggaagagtgtcccactgaacttggaaacaggttttgtggtttgtttggggtttttgtttttgtttgcaatggagaagagaactggaaacgggagctaagaaagatgtgaattgt

SEQ ID NO: 101254 - DNA, 444 bp, Homo sapiens
gactaaagcacagaaaagttggaggacatgggactccttagcccacaaaagaaactctattttaattttccatgtgaaataggagtagggtacgttagggtagggcatcttggttatgagatgcctgcagcaagtgccatcagggtggctgccagctgagtcatctccctcaaagagctttcctggaaccactctccccggtgatgtcagctccttcacctccattgctgtctctagctgcaggggtggttggagacccagtattttagctaggccctgccagaggccattgggatagcaggtcaatggatgaaggaggttgtataggcaaatgggagtaattatctctgatcttgatttttgtaggaaataggcrtagattaaggcatagataaatttgaaaaggcatagatacattaattaattaattagagatgaggtttc

SEQ ID NO: 101255 - DNA, 604 bp, Homo sapiens
caataagagttcttgattgttgtgggtgctgtagagagcaacaagaaacaaattctctgaaaatctaatcattcaggrtgtagtgtgttgactaaagccagacttctattagttaagcattacatcagcgattaaaagtcttttggggtgtggaatcgggcagcgtcactggagctgagagccaatctgtgagggctcctagggcaggcacattcgtccctcactgctattgcaactttggcccatgctgccccatattagtgcctgctgcagttttaagaacatcagaacccatcggccaacctccagggaggcacccctctccctggttgcttagggccgaaaaccccgaccctcatgtttttaaagagaattggaatcctatgtgaataaggtgaggaaaagatgcaaatatataaatatatatatatttcaagcattgttttggttctgttttgcttggaggtttttcttttcatttgttttaataaattttattgtgtatatttaaggtatacaaaatgatgttttgagatgcatatatacagtaagatgattactatagtgaagcaaatgaacacattcatcatctcacagagttgcc

SEQ ID NO: 101256 - DNA, 548 bp, Homo sapiens
tcaaatggcacagcacccttgcagccatgacggaaggtggttttgctttattttgacaaatgtggccacagatgggaagcttaacatcatctccctcagacacacagtatcttttagcttctacaaaagggcagaaacaaggagtccaagtacatgccattagcaaacactttacactactgccatctacaatggggtcacagagtgccatttgttgtagctaattcatacatgggattgccagactgagaagcccatgctttagccaacagtgatgasggctttccttggatctgtccttgttgaatagtcactctaataaaatatgatttgaccatctgagccagcataatcgtcaccaaaaatcactgcagtcatggaaaagcccaaacctctactctttaaaagtgtatgtttgattgttacgctccctgccactcttcctctccattgctcctcaccaccacaggcaaaattctaggacaactgacacatactcacagtggtaacacaaataactatagtctctatgtgtcatctcagcaaat

SEQ ID NO: 101257 - DNA, 613 bp, Homo sapiens
ttagtagaaaaatgaagtacttttgtttattttactagtacgaatatgaagcactaatcaaaatcctttcaagaaaaattaagcatgacaattttcagccacagttatatttatttttcaattttgcctgtagtattttgccttttacattacacccttaagatttctaaaaccctggcttatgtacgagtatgaagagtacacaacccattaaattaagggctctcgacatactcatctacaaatcaaacaaatctaatgtcctcagttgatcaactttcattagtacactgttccctctgaaatcatgaacatcgtgaggacgaggaccaccaagtggtgatgaacttgactactttagacagaagtaggaaagtgtagcagaagaggtggtgaatgttgggcaaatctaccagaaactttactgattgtcatgttaattaattagccctgggcgcattttctttagaatgaagcaaatatttagcactacttcacarattcatccagtgatacctaaaactttagtagctgacattttaggtaatggatggattactcttacatgaacctagcaaaaatatcctcttaggggcaggtatagaactacaaa

SEQ ID NO: 101258 - DNA, 484 bp, Homo sapiens
cagttcactcatttttcattcaatatatatttattaagtacttatcatatgtcaaagtttggactaggctttggggatacagacataacaagttctaaaataatacctgcttaggtggagtttacatgtagctttaaatttatgttaggtaggtgtgtgaaataataaagtctcttccaaaaattcttttagatggagatgactaatgcttaacatatacgatttaaacaaaacagatgttttaaaaccacctatttgaaatcaatttctatgaaataaagaaaatggagcttaagaggaagacagtatcrgaagctaggacatactgccttcattctccgtattacactttctctacaatgttttcagttttaccagtgcttggatgatatcactaagaataagagacaatagaaagtcctttaacatttattctaaatctgttctgtataactctaaagtgtgcacacacaaaattatgcct

SEQ ID NO: 101259 - DNA, 523 bp, Homo sapiens
cgcagtggctcccatctataatcccaacactttgggaggctgaggcgggcagatcacttgaggttaggagttcaagaccagccttgacaacatggtaaaccccatttctactaaaaatacaaaaattagccaggcgtggtggcatgtgcctgctgtagtcccagctactcaggaggctgaggcaagagaatcacttgaacccagaggcagaggttgtactgaaccgagattgcrccactgccctccagcctgggcaacagaacaagaccccatctcaaaaaaaaaaaaaaacataaaaaacttgtcacatacctcagtagtgaagcagggattcaaatccagccagtctgaccaaagtccatgctctgaatcactatgctactgaattgcccatacttacaaataatttggtaactcttaattacatccaagcctataaacagacttctggaagtatcaggtttacaaagatacttgaaattcttagatgagataggctacacatgcatacaagcaatgctgc

SEQ ID NO: 101260 - DNA, 544 bp, Homo sapiens
ttggtttctgtgtaggggtcctggagccaatccccaatggatactgagggacaactgtgtattgtttgcccatttcttttttaggtttacagtctttttcttattgacttacacttttttttatatattaaggaaatttgtcctatggctgtgatatgtgttatacatattttcgccaatttgtcactgttctttttatttwttttttcccttttgagacacagtctcgctgtgttgccaggctgtagtgcagtggcacgatcttggctcactgcaacctccgactcccagattccacagattcttgtgcctcagcctcctgagtagctgggattacaggcacctgccaccacacccagataatttttgtatttttagcagagacggggtttcaccacgttggccaggatggtctcgatctcctgacctcgtgatgcgcccaccttggcctcccaaagggctaggattacaggtgtgagccactgtgcccggcccactgttcttttaattatatattttttcatgcagagtttttgatttttat

SEQ ID NO: 101261 - DNA, 458 bp, Homo sapiens
ctctgctgaaatcttcaaactagtgcaacacttgtatttctttggttttcaagtatgcacatgaaggctcatcagtgataaactgcttgggatcaaaaatcactagacagaatcacataytttttattactacttaatccaagtgaatgtcacttaattttaataatgactaacacacctaagttaatttcagagaaatttcaatcaatataacttccttaaggacaaggccaatctttcctgaacattaaaactttgtacccattttatagtttttcctcattacttaaaggattatatctgaaaccaactcaaattattgattgattgaattaccttggaaataaacaccatttaaacattttaattatcaccaatcttttcaaataacaaaataaataatgtactgtttctgcttaaaacttgtaaaaatagttcattttttttaaaaccaggaa

SEQ ID NO: 101262 - DNA, 500 bp, Homo sapiens
acaatttgaatataatatgttttggttaatatttcttgatgttgagcctattgaggtcctttgtgtatcatagatatggatgttcatttctttctccagatttgggaaattttcttttattatttctttaaataagcttcctccctgttctctttctttgctttttcttagatttccatagtgtataaaatgtttctgttgattgtatcccataaatcacataggcttctttcattcttttttgttcctttttaaattggtgttccctcctgaataatttcaaataacctgtcttcaagcttgctgatcatttcttctgctttattgagtctgctcttgaaactctccattgaaatttttagtctagtcattatattatttagctccagaatttctgtttggttcttttttatggtttctctctctttgttgaatgtttccttytgttcatgtattgttttactaatattgtttaggttttctctctgtgtttcctagat

SEQ ID NO: 101263 - DNA, 692 bp, Homo sapiens
tgacgagtaagctgtagagtgacaggggtcaagtctggccacaggagattcaagaaggaatgaaaaacagagtgaatgtataagttatctagctagaaagttggggggtggggtgagcaaaaaaaaaaaataaatgggaccaggtgctctacaaagattagttcagttaatcctcacaatagttctataaggtagaaatcacctcactttacatatgaaaatgtagaagacaaatggtatgccatgttttaaatgagaatgttagaatttgatagcaagtatacctcattatcaaagtttatcctcttatagtaccacacagcttcctaccaatttaccatataaataaacaaatattgagaaaatggcaycgtgttctcagaaaggacactggtgtaggaagagaaagccttagatttagtccccaactctgtcaccaatcttgagggaaatgctttcacttttgagcctgacgggtcattcctaaaacaagaggattagaatagatgcattcattcattcaacgaatatttgtttaatctctatgtgctggaaactattctaggagttagagaaacaggggcaaacaaaacagaaacttaccctgtggtaagaaaaatgatatttaatttaatctaaagtttctttcatgcctaaaacgctatattgtttaatagacaaaaattctgttc

SEQ ID NO: 101264 - DNA, 692 bp, Homo sapiens
tgacgagtaagctgtagagtgacaggggtcaagtctggccacaggagattcaagaaggaatgaaaaacagagtgaatgtataagttatctagctagaaagttggggggtggggtgagcaaaaaaaaaaaataaatgggaccaggtgctctacaaagattagttcagttaatcctcacaatagttctataaggtagaaatcacctcactttacatatgaaaatgtagaagacaaatggtatgccatgttttaaatgagaatgttagaatttgatagcaagtatacctcattatcaaagtttatcctcttatagtaccacacagcttcctaccaatttaccatataaataaacaaatattgagaaaatggcatcgtgttcycagaaaggacactggtgtaggaagagaaagccttagatttagtccccaactctgtcaccaatcttgagggaaatgctttcacttttgagcctgacgggtcattcctaaaacaagaggattagaatagatgcattcattcattcaacgaatatttgtttaatctctatgtgctggaaactattctaggagttagagaaacaggggcaaacaaaacagaaacttaccctgtggtaagaaaaatgatatttaatttaatctaaagtttctttcatgcctaaaacgctatattgtttaatagacaaaaattctgttc

SEQ ID NO: 101265 - DNA, 692 bp, Homo sapiens
tgacgagtaagctgtagagtgacaggggtcaagtctggccacaggagattcaagaaggaatgaaaaacagagtgaatgtataagttatctagctagaaagttggggggtggggtgagcaaaaaaaaaaaataaatgggaccaggtgctctacaaagattagttcagttaatcctcacaatagttctataaggtagaaatcacctcactttacatatgaaaatgtagaagacaaatggtatgccatgttttaaatgagaatgttagaatttgatagcaagtatacctcattatcaaagtttatcctcttatagtaccacacagcttcctaccaatttaccatataaataaacaaatattgagaaaatggcatcgtgttctcagaaaggacactggtgtaggaagagaaagccttagatttagtccccaactctgtcaccaatcttgagggaaatgctttcacttttgagcctgacgggtcattcctaaaacaagaggattagaatagatgcattcrttcattcaacgaatatttgtttaatctctatgtgctggaaactattctaggagttagagaaacaggggcaaacaaaacagaaacttaccctgtggtaagaaaaatgatatttaatttaatctaaagtttctttcatgcctaaaacgctatattgtttaatagacaaaaattctgttc

SEQ ID NO: 101266 - DNA, 505 bp, Homo sapiens
ttgaggatttgaggttgattaaatatggttctttccctgyagcagtttggtacaatggagaatggaaactaaccgtcacgtggaccttcaccaagttcttattttcaatttactgccttacaaaagggggcatcctgagtgcctcctaaagcaaactaggaaaccctcattagtaaaaaggttctactaagaaatttacaggatacattaagaggagaaacatagaaattgagagatacagaaaagaatgaaaagatatcattgaaataagagcaagaagaaaaaattaccaggagttgcctcatgtgatgctgctactcttgctgttcctagggaggaataaatcttttcccaaacattttggggaaatctatcaaattccatttgtactcatcctaaaaacttttaggtgtcctagtcacaatgcaaaattctttaccaattccaacccaggataggatgagtatttcttttgacgaaaactaataatcatgtagtggggaat

SEQ ID NO: 101267 - DNA, 405 bp, Homo sapiens
gaattcataaaagaagataatttaaaatgtttcttatggtttgaaaatgccttccaaatattcattaaacatttaagtgagtaaatttgtagaatatgtttctgacattggcactggttctgtggtatttctctgrtcagatggaagtgctatgtgttatgcagagtgcatgcagttcattcatgcataaacaatatcattttcataaattaaatcctcccctgcagaaggaacatctgtgcctgcctttgaataaaagatggtggcatgtgagttactccttgactgactgaaagaatccctatgttttagaatgaagttgtattggcaaaatgggaagaaaaaaaaaaaaaacctaacttttagtcttcatttctaccttacaaaagaacacagtctagattt

SEQ ID NO: 101268 - DNA, 659 bp, Homo sapiens
aatcaaaaacctagtctttttttttttggcattatcagttcagctacacagatcagtttgtatatacagttcatatatatcataccagatgatctttgcaccaattcctcctgagcctcagattatggtaattggccctttctccagcttctcagcaattcacttcaacaatatcttcatcattatcttcatctctaatctctgtatcccagcacctagcttaatgcttcaaacacaggctaggcttccaataaaagttttttattgactgtatttactatcaatcagaaaatcccttaatcacactgtatacatttccacctctggacctttgctccttcatttcctagcacatggaaggcyttcttgactctagtcttttcaaatattaaccaactgtcgaagcacattgagccactcttctaaacaataaccttcatttctcagtccctctgagctcttagggcccactactactcagttgacatttaatcgcatatcagaagttattaacttaccagagggtgaaggttcaaaggtctttgaaagcctttaataacttgttataaaatactaattaaatggtggttttaagatggtagtagtgggagaggttagagaaagaataaaactgtagtagttcaaggtaagtctgaaag

SEQ ID NO: 101269 - DNA, 630 bp, Homo sapiens
gatatcgcacagccctctaaattgtccaaagggttctgctacttagaaacactaaaagtctgacttttataccatgcccattcagttatcccctcaatgctctcaatatttgatcataagatgacaaaaaagtattcagaacaactgttgaaagttcagagtatttgaactcggcacaggcagatctgtgttgctggaagggagaagaaactttacctgagagattaaagtaattgttatttttacttgaagtgtccagtggtcctaggaccaggaaagaggtagaagagattcacctaacagcctctaggatacctgaactcctcagtctaccttcctgatgccagcaatgggaccactgtggtcagggatcactttggggtgcacagtggcagggaatagagggaagataaaaagaaactgtcagaagccttgttgaccgaacatccaaaagtaagcttcaaacacacatataattcaagatgttctaaaaagtatttgtaaaactttatttattcatatgatgagtatttttaggcccagacttactgragacaaagggaaggtgataagcaattttaatatagcttataattggtttgatttttaaaatccaagttaacaacattc

SEQ ID NO: 101270 - DNA, 583 bp, Homo sapiens
tacctaatctaagttttatgtaacaggagccttcagaaataaagactcaaagaaatagggaaatctgtgtattcctatggatggataagcagaagtatgattagaggacaaaagggtatgatctagtggttaataaactgaggagaacttagaaagtcctgtttgttcagatatttcctggcatctctatgtgacattccttctckctgggtatagagcaggatacctgttacatgaagttctttaagggagaagagagagggaaggtcggacagtgaccttcctgtgttgtttggcctgcttcagggaagaagggtgaggggaagatgagaatgaccttattgcttctgctgttgtctcaatttccagtgtgctttattttgtggtattttgctgaattctatcaagtctgatgcctaagatcactaatgatcacactgtatctgtcccttgcatgcttcattttaactgtgaaaccgcagagttttcaggaagagaaaggacaaccctgattctgatatgaaagtcaaataactttttctactaacttttcttcaactcttttttataataaaatcttcta

SEQ ID NO: 101271 - DNA, 553 bp, Homo sapiens
tgtggtattttgctgaattctatcaagtctgatgcctaagatcactaatgatcacactgtatctgtcccttgcatgcttcattttaactgtgaaaccgcagagttttcaggaagagaaaggacaaccctgattctgatatgaaagtcaaataactttttctactaacttttcttcaactcttttttataataaaatyttctatgactaataatgcacaaatctccatgaattaattctggaatgaaggatagaaagattgggcacacatcttgtgattcagaattacaacagtcacagcttggccaacatggtgaaacctcatctctactaaaaatacaaaaattaggcgggcgtggtggcacgcacctgtactcccagctactcgagagcctgaggcaggagaattgtttgaactgggaggcagaggttgcagtgagctgagatcacactgctgcactccagcctgggcgacagaaagactgtgtcaaaaaaaaaaaggaattacaacagacccactgggaaatggactttgagaaatcatgaactatgaat

SEQ ID NO: 101272 - DNA, 673 bp, Homo sapiens
atgagaagtatatatacatatatataatatgtataaaacttagagtttcttatttttaaattaagttatttcaatttgattttataactgttattatatttgctgtgtattttattcattcctagagaataagaagtgggacacttcaagatatacctaaatttatcttaaatatgtcatccactaatatccaaaaaaagaaatatagaatcatggttttcaaatacaattaygaactgagtcccacaatgacctctccaaatcttattcaaagagaattcttaatttctccagaaagtcaaaggacacatatattaacacacacaatcttatatatatttgaaccaaatgctaaaaataatcactttaagccagtattggaattggtattatccctaaactagtatgttttcacacaatctgaaaaaatatttatttctagggctctgtttagaaaatataatcaatagtcaataaataagaagcaaagactgaaaactatcttgtagaacacaaattacattagaaataaaattaaatcgctctattgttacaactttataaaattttagagaagagatgttccattaaaatctctggcactagcatcttctcttaccactgaggaaattgagaatggagaagcaaactgatctaggatcacacaactaag

SEQ ID NO: 101273 - DNA, 605 bp, Homo sapiens
taaattattaaccccttattttctcttttcccataattttgctgtatctctcattttgtttttctattctgttgccatttgagtattccttcaagttcacaagcagatatagaatactyatttgaatactctcctttcccctacaactttggtcccatacaaacataatttgtatggcactgctgtggttgggttggattttactttgcagtaagaaatgttgccagttctggtaattattctctcactgtgatagagcattaatgtgttattacaggtagcactatactacgggttatcaaataccagtaaggaacattagtcagacttagtcaaggagagaggaagaattgggaatgtgcactttagtgcccagtaatgcgaggtctcctaccctgggtagcccaaactagaaaataataatgataataggttgattctaagccaagtccttaagagaaattggaaaatcaagctgagaagacaaaaaacactaacaccaagttcagaaagaaaaaaggattttaccttggaaatatagccaaaaataaaccaaacaaaacaagggtaaaggaggtgttaatggatcgtaaagaatgggattg

SEQ ID NO: 101274 - DNA, 605 bp, Homo sapiens
taaattattaaccccttattttctcttttcccataattttgctgtatctctcattttgtttttctattctgttgccatttgagtattccttcaagttcacaagcagatatagaatactcatttgaatactctcctttcccctacaactttggtcccatacaaacataatttgtatggcactgctgtggttgggttggattttactttgcagtaagaaatgttgccagttctggtaattattctctcactgtgatagagcattaatgtgttattacaggtagcactatactacgggttatcaaataccartaaggaacattagtcagacttagtcaaggagagaggaagaattgggaatgtgcactttagtgcccagtaatgcgaggtctcctaccctgggtagcccaaactagaaaataataatgataataggttgattctaagccaagtccttaagagaaattggaaaatcaagctgagaagacaaaaaacactaacaccaagttcagaaagaaaaaaggattttaccttggaaatatagccaaaaataaaccaaacaaaacaagggtaaaggaggtgttaatggatcgtaaagaatgggattg

SEQ ID NO: 101275 - DNA, 631 bp, Homo sapiens
tacatcttcctcatagctagtagttttctagataaatgacctactttctagataagtagtttatggtaagcaagtatcataaactcaagtgccttaaccagcttcttggggtggggtgggagagtggtccaagtcactatggtacactgaaaagcacagaacccatctcacagaggcagtcaatatgaggctgcagtcattgttgccagatttctggaggtttctaaaaatacaaatgttcttgttaatgtgaaatggtctaagcctaccatgttagaaacagattccattaaaacaatttaagtgagcaaagtaaaacaattctgtaaataaggtaagccaagagggcgtctgcagtttttcttctgaatgggtcctctgattgttggtgaaaatcccacagcctggcaagccagcctgaagacagctctcagtgaaaagataaggtgctccatrgtatttgttgaatgaatgattgaataaagggtccttaacttttcttatagagagaacttcttaggctttgccaaataaactaaaatattctcttagtttttccacacagcttctgtaattgatgtattttatataatttgagattaggcaggactccaatttacctgtagaaacc

SEQ ID NO: 101276 - DNA, 610 bp, Homo sapiens
tcctgtgcttgttcaatgggaaatgtgtaacacaacagactggaaygtagtaggtactcaatcaacactggccatttttatgtcattgcaattaatatttaataatttggtcattattaatgagagctacaataaatagggctttcttggaaaaaaactcaatattccagaccacaggcatatctttttatatagaaggggcttagaagtcccacctggcttcggttaaactgtcattgatcttctaaagaatatgaatgaagtatctgagtgttactagaaccagacagtttatgaggactccgttctaagcagcctccctttcccctggaaacatatagaaaggagggtcttaggagccttgaggctgaatatctcttagtttgtgcacaattttcaccatagattgatactgccctggatctataggctaatgtttcttctctgagattaacatttagcaagaaatggaaaatagaggtgtggacagtataggatatattgaactacacacagtaatttgtgccagaatcagagccccaagtgccagtcaattagcaggtcactaccaagtctgtagtgtatgccatttgctggtgcactgaacctg

SEQ ID NO: 101277 - DNA, 610 bp, Homo sapiens
tcctgtgcttgttcaatgggaaatgtgtaacacaacagactggaatgtagtaggtactcaatcaacactggccatttttatgtcattgcaattaatatttaataatttggtcattattaatgagagctacaataaatagggctttcttggaaaaaarctcaatattccagaccacaggcatatctttttatatagaaggggcttagaagtcccacctggcttcggttaaactgtcattgatcttctaaagaatatgaatgaagtatctgagtgttactagaaccagacagtttatgaggactccgttctaagcagcctccctttcccctggaaacatatagaaaggagggtcttaggagccttgaggctgaatatctcttagtttgtgcacaattttcaccatagattgatactgccctggatctataggctaatgtttcttctctgagattaacatttagcaagaaatggaaaatagaggtgtggacagtataggatatattgaactacacacagtaatttgtgccagaatcagagccccaagtgccagtcaattagcaggtcactaccaagtctgtagtgtatgccatttgctggtgcactgaacctg

SEQ ID NO: 101278 - DNA, 590 bp, Homo sapiens
acttttcttatccattggatgaggaataatgataacacctatctcagggttgtcataagaattaagtattttatattctatgtaaagcacttagcacagtgcctggcatttaaaaattctcaaacgttaagtgttaaaataattacttataatactgctattagaagggatcacaactaagtcccatcaatgaaaaatattctactgcctgattaaaaagcaaactcctcttctgtgctcccactacccctacctttkccttactcagaaccactcccaaccacgcatgcaaacactttgtcatattaagttcaccttgagagcatctagagggacttttcctaacctccaagctgcagtggtctaggaggaccctaaacctcagagaatctcagcaggacttaacatctgtgcacatttttttcattctgaaagccaaaatacaatgaactattctaggacatgatgtcaaacggtttatgttcttcttggtagaactcacaggaatgaataagttggctttcctatcccctagaagtttacagtttagagggaaaaaataatgcctctataagtaattcaaatataag

SEQ ID NO: 101279 - DNA, 590 bp, Homo sapiens
acttttcttatccattggatgaggaataatgataacacctatctcagggttgtcataagaattaagtattttatattctatgtaaagcacttagcacagtgcctggcatttaaaaattctcaaacgttaagtgttaaaataattacttataatactgctattagaagggatcacaactaagtcccatcaatgaaaaatattctactgcctgattaaaaagcaaactcctcttctgtgctcccactacccctacctttgccttactcagaaccactcccaaccacgcatgcaaacactttgtcatattaagttcaccttgagagcatctagagggacttttcctaacctccaagctgcagtggtctaggaggaccctaaacctcagagaatctcagcaggacttaacatctgtgcacatttttttcattctgaaagccaaaatacaatgaactattctaggacatgatgtcaaacggtttatgttcttcttggtagaactcacaggaatgaataagttggctttcctatcycctagaagtttacagtttagagggaaaaaataatgcctctataagtaattcaaatataag

SEQ ID NO: 101280 - DNA, 590 bp, Homo sapiens
acttttcttatccattggatgaggaataatgataacacctatctcagggttgtcataagaattaagtattttatattctatgtaaagcacttagcacagtgcctggcatttaaaaattctcaaacgttaagtgttaaaataattacttataatactgctattagaagggatcacaactaagtcccatcaatgaaaaatattctactgcctgattaaaaagcaaactcctcttctgtgctcccactacccctacctttgccttactcagaaccactcccaaccacgcatgcaaacactttgtcatattaagttcaccttgagagcatctagagggacttttcctaacctccaagctgcagtggtctaggaggaccctaaacctcagagaatctcagcaggacttaacatctgtgcacatttttttcattctgaaagccaaaatacaatgaactattctaggacatgatgtcaaacggtttatgttcttcttggtagaactcacaggaatgaataagttggctttcctatcccctagaagtttasagtttagagggaaaaaataatgcctctataagtaattcaaatataag

SEQ ID NO: 101281 - DNA, 600 bp, Homo sapiens
atttcatcactgtaacatgagaaggttcaattagatacaaatttaccttctaattctatgcctgaaatcaacaatgatgcttactgaatacaaatcctttgggaaacaytaggactcttcttcactttttgctttgtaaagatcctgagtcagacaccttaagccatttttttgattcccaggttcattttctgatttggtttcagatgaaaaatggttgctctgtcctgcagaactggtttttgtaaagctccaaggtatacatccctttattccatttatagacatgttaattatctagtcaaataacacccaacccaggtccagctacccaagaggtcaaagaaagtacaataaaacattttcctagtgggaaattccaagaaacaaaaccagtctctggagctgctgagataacattaatgtggaaatgcatttcctgacttctgctcagagatagaactaccctggaagccagaagacaggtaccccaggaatttcgatagatgcctgacaggccagcattcatcattcagtccaccatgagaaatggtgcctggagactgatgttatcaaactgcttaatctcactctcatcac

SEQ ID NO: 101282 - DNA, 600 bp, Homo sapiens
atttcatcactgtaacatgagaaggttcaattagatacaaatttaccttctaattctatgcctgaaatcaacaatgatgcttactgaatacaaatcctttgggaaacactaggactcttcttcactttttgctttgtaaagatcctgagtcagacaccttaagccatttttttgattcccaggttcattttctgatttggtttcagatgaaaaatggttgctctgtcctgcagaactggtttttgtaaagctccaaggtatacatccctttattccatttatagacatgttaattatctagtcaaataacacccaacccaggtccagctacccaagaggtyaaagaaagtacaataaaacattttcctagtgggaaattccaagaaacaaaaccagtctctggagctgctgagataacattaatgtggaaatgcatttcctgacttctgctcagagatagaactaccctggaagccagaagacaggtaccccaggaatttcgatagatgcctgacaggccagcattcatcattcagtccaccatgagaaatggtgcctggagactgatgttatcaaactgcttaatctcactctcatcac

SEQ ID NO: 101283 - DNA, 519 bp, Homo sapiens
aattgttaaaatttactgcatccagatatagttggaacagcgttgggaggctacagactatgatgtgtaataaagaattatctatgctccatgcactccagggtatgcaaatgtcatctcttacacctttcctaatattgaattcttttctggttgcagaaaagaatttctttagtgaggagtttggggaaagagacgaaggtgaacaaaacaaacttttgtaggcattttcatgtacttgtaactcaatttcatattcgacacaattttatgatttacaatttctcaccaggcatatgagaaaatttacgctaagaaaacttcggtgacattcccgasttgtgtgaaattctgctacacctcagtttctacccactctcagattaatccattttctaccatgttcatgtgacagagagcaaggcagtggtgttaatggcttcagtagggccaggttctgatgacagaggcagagatgggaacactcatttccagtctgtggactttagccagggaagt

SEQ ID NO: 101284 - DNA, 602 bp, Homo sapiens
aaaggctcacttccaggggtgtaggtaggattatcaattattagagcttatttcatgtcacctctttataattcagtctagtggttaggagtccataattcttccatttcacaaatcagacaatgttgatattaggaaatgtcattatgctatgatcactataaaagagaaaagctaaaaccaatttaactgtgacagcccatagttatggctgcaggatgcatcttgactgcagagatgttaaaatgtgaaagacaatgcacttgaatatcaattaaaaatggcaatattagctgggtacagtggctcatgcctgtaatcccagcactttgggaggccgaggcgggtggatcacctraggtcaggagttcgagaccagcctgaccaacatggtgaaaccccgcctctactaaaaatacaaaattagttgggcatggtggtgcatgcctgtaatcccagctacttgggaagctgaggcaggagaatcacttgaaccagggaggcggaggttgtggtgagcagagattgtgccattgcactccaccctgggcaacgagcgaaactccatctcaaaagcaaacaaacgaacaaacaaacaacaa

SEQ ID NO: 101285 - DNA, 435 bp, Homo sapiens
atccaaggttctgaatcgcagcactgtaatctctagtttacagactcatttagactacaaatatgggaccgaggtagaaatctgatttaaagtcaaaataatataaaaacaggggctaaaacttatcccaattcatcactgctggaagtgccccagctaggattctcctctcattctcagtatcatccttttcttaactaactgagctgattgtgtagggctcccaagcaatccctccagatgccctggctcccaccagtccacacgtcaaaaggaaccaagacaacagtggatccccataggcactgttaagartacagctccaccactggggtccttgaaaatgcgaatctcgggccgggctcagtggctcatgcctgtaatcccggcactttgggaggccaaggtgggcaaatcacctgaggcggggaattc

SEQ ID NO: 101286 - DNA, 609 bp, Homo sapiens
tgttaaacagggatatttaatttgagcttgatgagatagagtaactatcaaaaacaatgcccaaaatctcatgtraagttgctaatattctgaaaactctcattgttatggacagaatttttaaaagtgaaagatggacaggtatattggtgactatcatgtttcacaatgtttttgatattttgatttaattatacagttatagaaatcttataagcatatacataaaaaccttaagtattcattttatcaataaaatttaattcaaataagtatctctaacagacctactgtgagctagataatgtgctacatactgtgaaagctataataaatgaaacttgaagtagaaatctaatacaggaaacacacacaagcaaatatattcatggcaatgtgataagtacaagaaaaggcatataaatttttgaggggtgttacaaaagaaggagccatcaattctgattcaaaacatcttacacagattcagagaggagagaatacttaggttcagggagtgtaagtgaaataagtaaaatgagctaacacatgatgctatctagtgccagagctggaaatagtacagaaacaccaagactcctaagtcaa

SEQ ID NO: 101287 - DNA, 609 bp, Homo sapiens
tgttaaacagggatatttaatttgagcttgatgagatagagtaactatcaaaaacaatgcccaaaatctcatgtgaagttgctaatattctgaaaactctcattgttatrgacagaatttttaaaagtgaaagatggacaggtatattggtgactatcatgtttcacaatgtttttgatattttgatttaattatacagttatagaaatcttataagcatatacataaaaaccttaagtattcattttatcaataaaatttaattcaaataagtatctctaacagacctactgtgagctagataatgtgctacatactgtgaaagctataataaatgaaacttgaagtagaaatctaatacaggaaacacacacaagcaaatatattcatggcaatgtgataagtacaagaaaaggcatataaatttttgaggggtgttacaaaagaaggagccatcaattctgattcaaaacatcttacacagattcagagaggagagaatacttaggttcagggagtgtaagtgaaataagtaaaatgagctaacacatgatgctatctagtgccagagctggaaatagtacagaaacaccaagactcctaagtcaa

SEQ ID NO: 101288 - DNA, 609 bp, Homo sapiens
tgttaaacagggatatttaatttgagcttgatgagatagagtaactatcaaaaacaatgcccaaaatctcatgtgaagttgctaatattctgaaaactctcattgttatggacagaatttttaaaagtgaaagatggacaggtatattggtgactatcatgtttcacaatgtttttgatattttgatttaattatacagttatagaaatcttataagcatatacataaaaaccttaagtattcattttatcaataaaatttaattcaaataagtatctctaacagacctactgtgagctagataatgtgctacatactgtgaaagctataataaatgaaayttgaagtagaaatctaatacaggaaacacacacaagcaaatatattcatggcaatgtgataagtacaagaaaaggcatataaatttttgaggggtgttacaaaagaaggagccatcaattctgattcaaaacatcttacacagattcagagaggagagaatacttaggttcagggagtgtaagtgaaataagtaaaatgagctaacacatgatgctatctagtgccagagctggaaatagtacagaaacaccaagactcctaagtcaa

SEQ ID NO: 101289 - DNA, 609 bp, Homo sapiens
tgttaaacagggatatttaatttgagcttgatgagatagagtaactatcaaaaacaatgcccaaaatctcatgtgaagttgctaatattctgaaaactctcattgttatggacagaatttttaaaagtgaaagatggacaggtatattggtgactatcatgtttcacaatgtttttgatattttgatttaattatacagttatagaaatcttataagcatatacataaaaaccttaagtattcattttatcaataaaatttaattcaaataagtatctctaacagacctactgtgagctagataatgtgctacatactgtgaaagctataataaatgaaacttgaagtagaratctaatacaggaaacacacacaagcaaatatattcatggcaatgtgataagtacaagaaaaggcatataaatttttgaggggtgttacaaaagaaggagccatcaattctgattcaaaacatcttacacagattcagagaggagagaatacttaggttcagggagtgtaagtgaaataagtaaaatgagctaacacatgatgctatctagtgccagagctggaaatagtacagaaacaccaagactcctaagtcaa

SEQ ID NO: 101290 - DNA, 597 bp, Homo sapiens
gagtcatgaactaaaagagaagcaataatataaaaacaatatgacttgaatgaaagccaacttctcatgaaaatactcgtgtttccccaacctgagcaagcctgacrtcatatataccacttccccttaacaatggaaaattacttagcacctctaattttgtattttatcaaatagatagtactcatttcaagtctcatgatcatgtagtcttccacaggtagtgatttagtttctgtcacctccccgtgtcaagccaagagttgtgtctcaaaaagaaagtattgatgtgtgtaaaagtccactttaggtgtaattacaggctcactgaaccgagtggttgactcatataccaatgtactaaattttaagggcattgtattgttataaacaccttggcctaaacacatatcttccattaagggggagtggctttgcaattaactttaccataatgatagaatggtatcattctatcattatgcaaagctcaagtggtacaaaatccatagtctatctgtttatacataatgaacacagaaaaaaccatatgtatctcatggtcttgaaatataccatggattataatattaaagt

SEQ ID NO: 101291 - DNA, 607 bp, Homo sapiens
tgtatatttccaggaatttatacatctcctctaggttttctagtttatgtgtgtaaagctgctcatagcagccttaagtgatcttttgtatttctgttgtatttgttgttacagctcccatttcatttctaatcgagcttattttgatcttctcttttattcttttggtgactctctaatggtctatcaattttattgaacttttcaaataacaagctttttatttcatttatctttttctttttctttttttttttttggtttatttgtttgttccaatttcatttagttcgctctgattttgtttatatcttttcttctgctgggcttgggtttggtttgttcttgtttctctagctccttgaggtgtgatcttagattgtctatttgtgctctttcaggctttttgatgtaggcacttarggccatgaactttcctcttagcacagcctgtgccatatcccagaggtttttataggttgtgtcactgatatcattctgttcaaataattgtttaattcctatctttatttcattgttaacccaatgattattcaggagcaggttatttaatttccatgtatttgcatggtttggagagttactt

SEQ ID NO: 101292 - DNA, 583 bp, Homo sapiens
cttggtgccctgtgtcccagctgctccagccatgtctaaaaggggccagrgtatagcttgggccatgacttcagaaggtgcaagtcccaaaccttggcagcatccatgtggtgttgagcctgcgggtgcacagaagtcaagaattgaggtttgggcaccttcacctagatttcagagggtgtgtggaaacccctggatgtacaggcagaagtttgctgcaggggtggggttctcatggagaacctcagataaggcagtgtggaagggaaatgtgggatcagagccccccacacagagtatctattggggcaccaccttgtggagctgtgagaagagggcctctgtcctccaacctcagaatggtagaaccacttacagctttcacagtgtgtctggaaaagccacagacactcaacatcagcttgtgaaagcagcagggagggaggctgtaccctgcagagccaaagggatggagttgcccaagaccaagggaacccacctctcgcatatcagtgtcacctggatgtgagacatggagtcaaaagagatcattttggagctttaagatttgactgcccctctg

SEQ ID NO: 101293 - DNA, 622 bp, Homo sapiens
tgagcatttaataaaacacacaacatattttagagatattgctcagcctgccctaaagagctcaaatatccactctcccctttagctgaatataagggcagaaaaaattcaatagtcacataacacaaaaaaactgtgtcagaactaaaaggttggttctgtccagttcatcgtacctcactggcccagcatggccactaaccaatatccctaggcagccatttggctataggccaaatcacaacaaaaatattgctgttacatgtatgagtcattgtatcattatggaaacagcctatatatttactaggcatgaattttaaaaagaaatgatgaaaattttccaagctcacaaataaacagctattccaattctgtgaatattttattgtttcaaaagattaattattatttccttttatccactaaagaaagtgtgacatgctaaccasgaataattacagaactggaacatctttatgccactgaaggaacacagctttataagtacttcccgtaagagtattggaaatactgcaaaagagataacaatttaaatgtgaaccagtaaatctgcaataaatcccaacaaggaggtccttcattttgcctcttcttggca

SEQ ID NO: 101294 - DNA, 592 bp, Homo sapiens
ttagtttctgctctgtttggaagatgggcagaagtgaacaccaagaggaatagagacatagagattaccatctgtatcagttagggttctccacagaaatagaaccaacaggatatatgcatatatagggaaataaatttattataaggaattgactcatgcgattatggaggctgagagtcccaagatctgcagtcagtaagctagagacccrggaaagccaatgatatagttccagtacacgtctgaaagcctgagaaccagaagagccaatgttataagttccagtccaaaaagccagcaaacttgagacccaaaaggaaacaatgtttcagtttgagtctgaagtcagaaaaagaccaatgtccaagcttaaacaatcaggcaggagtgccctctttctctcaggagagtcagcttctttgctctatgtaggctttcaactgactgaatgaggtttacccacattagggaaaccattctgctttgctcagtctactgattcaaatgttaatatcatccaaaatatcctcaaagacacaaccagaataatgtttggccaaatatctgggcacgttatggctcagtcaag

SEQ ID NO: 101295 - DNA, 632 bp, Homo sapiens
aacctggaaaacgtatttgaggatatagtccatgaaaattttcccaatcttgcttgagagggtgatatacaaattcaagaaaytcagagaacacctgtgagatactatgcaagatgatcatccccaaagcacagtcatcagattctccaaggtcaatgcaaaagaaaaaatcttaaaagcatctagagaaaaacttacaaagggaaccctatcaggttaacaatggaccttttagtagaaaccttataagccagaagagatttggggtctgttttcaatatccttgaagaaaagaaattccaaccaagaattccatatcattccaaactaaacctcatcagcaaaggagaaatgaaatccttttcaaacaagcaaagctaagagtattcattacccctagacctgccttacaagagcttctaaaggaagtgctaaacatggaaattaatgaatgatacctgccaccataaagacatacttaagcacatacttcattgatattataaagcaactatatgatcaagtctacataatagccagctaatagcatgatgacaggatcaaatcctcacagtccaataccgaccctgaatttaaatggactaaatgcccccacttaaaagggatagtgt

SEQ ID NO: 101296 - DNA, 514 bp, Homo sapiens
tcttggttaaccctaggtatcatcttttggcattttctctcaaacactcrtgcttcacttaggatattgtgaatttgttaattttattgaaatattaaggacttatggggaggactttggtagtaacttatagcctcccactctttctttctggtattccttttgtctatgctctcctgccttaaatccccaatccatgcttctccctgtcatgctcagcatccaggaaggtaggcctttccatgatttcctgaaattctggtaatagatattttgccactcaattatagttgagtaaatgaatgaatgaatgattgaatgaatggatggatgaaggtgtgaatgtgtcaataagtccaggctcaagatttgagattagacctaccttatatgattttaaaccaccacaaaaaactttctttgagggtgaatcattgaatatattgacatactacatctgatgaagctgtttatattttatatgtaactgtttagctatcttttaggtactgta

SEQ ID NO: 101297 - DNA, 514 bp, Homo sapiens
tcttggttaaccctaggtatcatcttttggcattttctctcaaacactcatgcttcacttaggatattgtgaatttgttaattttattgaaatattaaggacttatggggaggactttggtagtaacttatagcctcccactctttctttctggtattccttttgtctatgctctcctgccttaaatccccaatccatgcttctccctgtcatgctcagcatccaggaaggtaggcctttccatgatttcctgaaattctggtaatagatattttgccactcaattatagttgagtaaatgaatgaatgaatgattgaatgaatggatggatgaaggtgtgaatgtgtcaayaagtccaggctcaagatttgagattagacctaccttatatgattttaaaccaccacaaaaaactttctttgagggtgaatcattgaatatattgacatactacatctgatgaagctgtttatattttatatgtaactgtttagctatcttttaggtactgta

SEQ ID NO: 101298 - DNA, 628 bp, Homo sapiens
gtcttccaatggaatgaaggcaaataaaacacttgacccatggaagacatgccaaccaatggcaggagaaagcctggggaatgggcagtttacgggggcctcattcctaagggccttttatttatcaagattgtaatgaccctctgcatttttcctactagtaacactcaactagagattttcttgtgtctttttcccttacattgtatttctaaaaagcaagctgaggaaataatgactgtatatgagataagtgcactgattaagtatccaggaaaaccagccartgattccattgaattctttattatgaagacatattttaaacaggcaacaaatagcgcttgagaatataaattgcctggagtactaaagaagctagttgtgcgtttgcttaataaaagcatggaagacaagcaagtgattttccattagatatacctttcttttgcactcttaaatggacaatttgaataaccctcaacaacttttattcagtgatagataacccagatcatgcatattctgaagtcacaaaatagtgaagcttcagatgaaactctgtcaagtaccttgagttaagaagaacattcagtaaatcgatgaattaaagggaaagagggacatt

SEQ ID NO: 101299 - DNA, 582 bp, Homo sapiens
tgaatttatgaacaccttggtacatctgtacgatggaatactattcaacaataaaaagcaatgagccatcaagccacaaaaaaaaaaaaaacacagagtaatcagacatgtatattggtaagagacaggggccaatctgaaaaggtacactctgtattagtccaactgtatgtacttctggaacagccaaaactataggacagtaaaaagataagtggttgccatgracatggatggaggagggagaaatacatagttaggtcataggggatttttaagatagaggaactattttgtatgatactgtaacaccagatagatacattttttcaaaacacatagattatacaacacaaagaaaaaattaatgtaacctatggactttagttaataataatgtcaatactggtactgtcaacaaggtcaatattggctcatcaaatgtaacaaatatatcacactaatgcaagatattaataattggagaaactgtggagggaggggaggggtgcatgtgggaactctgcactttatgctcaaattttctgtaaacctaaagttactcaaaaataaagtcaatta

SEQ ID NO: 101300 - DNA, 613 bp, Homo sapiens
cttctggtggagtctctggtaaaatgcctttcctcttaaaaagaaacacatgagaagagacagttaygcacccttggtgagatgttgtcatatgagtatgacactggaactgtagtaaataatttctgaccatgagggagggcagcttgatgtacaagacaaacactatgaagctgaaaaagcatagatggaagaagcacatgctgggatgctgctgctaagcttctgcttaatgatccttgaactggcaaactcttcacatgataaaggtgttcactgtttaagccagttgacattaggttttctaatgttaacccaaagcatccttatgaatgaccacagagttagtttaaaaatgtggatttttttacatttaaacttttatttgtaattgatgaataataattgtatttctagggtacaatgtaatattttcattcatgtacacattgtggcacaaattatatcaagctaacatatccatctcctcatatacttactatttttttgtagtgagaatacttagaatctatctttttagcaatgttgaaatatacattactaactatggctaataataatcatcatcatactatgcaatagattttgagaa

SEQ ID NO: 101301 - DNA, 594 bp, Homo sapiens
ttttctttgtgtgtatgctgtaaatatatttagccaatactatagttgaagaggctcaattaacacatataagacaacagaaggaatgtaagatgattatatccacagtaactgccaaaatgtatagtctcgacaccaatttccctaagcatggattttcattaccccatgtagaattctcattccaaattaagatgagtttcaccaggtcttctactccctgatattgtgggcagtaatttaaaggtatgcacttttactttggtcaagtatgcagcttttattagattctcaatggaattcacaaataaaaatatttcaaaaaagcagactagtttcctcattttaaaattagctttcttgagataaaaaaaggatataataaaattcattcatctaaaatatacaatatgttgacttttgagaggtgyatacaactgtgaaaacatcatcatagttgtacacatcacgcaacatattcattaccccaaaaatgtctcttcacacccctttacctctaacctcaggcaaccattgatctcctttgcatcaccataaatatattttctttttccagaatgtaagcaaataccg

SEQ ID NO: 101302 - DNA, 586 bp, Homo sapiens
ccaacaaaatactagcaaaccaagttcaacaacacattaaaaagatcattcatcattaccaagttggatttatctctgggatgcatgaaaggttcaacatatgcaaatcaatcagtgtgatacatcatatcaacagaataaacaacaaaaaccatatgatcatttcaattgacgttgaaaaagcattttataaaattcaacacccttcgtggttaaaaaccctcaaaaaactaggtattgaaggaccatacttcaatataataaaagccatatatgacagactctcagctaatattatactggatagggaaaaactgaaagcttttctctaagatctggaacacaacaaggatactcactttcaccactgttactcaacatagtactggargtcctacttagagcaattggacaagaaaaagaaataaagggcatacaaatcggaaaggaagaagtcaaattatccttgtttacaggtgatatgattttatactgagaaaaatccaaagactccaccagaaaactcttagaactgataaattcagtaaagttgcaggacataaaatcaacatacaaaaaccagaag

SEQ ID NO: 101303 - DNA, 586 bp, Homo sapiens
ccaacaaaatactagcaaaccaagttcaacaacacattaaaaagatcattcatcattaccaagttggatttatctctgggatgcatgaaaggttcaacatatgcaaatcaatcagtgtgatacatcatatcaacagaataaacaacaaaaaccatatgatcatttcaattgacgttgaaaaagcattttataaaattcaacacccttcgtggttaaaaaccctcaaaaaactaggtattgaaggaccatacttcaatataataaaagccatatatgacagactctcagctaatattatactggatagggaaaaactgaaagcttttctctaagatctggaacacaacaaggatactcactttcaccactgttactcaacatagtactggaagtcctacttagagcaattggacaagaaaaagaaataaagggcayacaaatcggaaaggaagaagtcaaattatccttgtttacaggtgatatgattttatactgagaaaaatccaaagactccaccagaaaactcttagaactgataaattcagtaaagttgcaggacataaaatcaacatacaaaaaccagaag

SEQ ID NO: 101304 - DNA, 569 bp, Homo sapiens
tggaactcaacacagagctacatacagtcgtggagacaaggcaaaaggagatgtgaccagaggaaggcttgaacttttgggttcatttcacataccccagatactaagctattagcaacaggattaactccagaccctccctcattagtagctcagagcattttgatataatggcagccttgttctggatttgcgtgtaaggctagatctcagtgactcccaaagagctgtgctgccagggcagaaattaatgagcattgagatcctgtttgcaacctagataagcacaatggcctcccagccttcaggtttattccactccaattcatcactactaatgcttcctgaatgttctgtctaaagcatatttctcatcctcatggccccttgttatgattcttcaatgaatctccttcacctacagaataaaatctaagctccctaggctagtctggtgagtttcccatgcaatacgctttctgtctgtctatgaccctgtgcatctccatttctgtccttgcyttatgttccattcacatggaaccacttgaggacaccaaaagtcctga

SEQ ID NO: 101305 - DNA, 623 bp, Homo sapiens
tatagaaaggcactgacttaatgggagagaccctggttttttcttctgactctccttaatttgtacttgtcatttctaagggagaggatctgctaagatggtgcagaaacatggtctgcatgcacctggttattcctagatttgcaccatggattcaggcttcccagatgaatcaaactgaatttgatcagggtcttggctcttcccctgtccttggcataacaaccagcaaatacgtgtcagctcccaccttcctcgttacctcccattctcatatttctgatagatgtccaatcttttctctggtttgcttctggattttatcaacctgtgttcctgagtaagaattagtcttggaattcactctggactgtgatccttcccaattttgatatatyctcatgaaatgaattcaaataatgcaaaaaagtacttagaaaaaaggtactcctcaggtaggaggtacctgacctcctaccacccggagaaaaacactattaacttttgggtaaacattctttcaggcatctgcctaaatgtattatatctatttacagcctgctttcttctctcaaccatatgttcttgttgggagagagagttctctatgggtctcttgtgct

SEQ ID NO: 101306 - DNA, 516 bp, Homo sapiens
agtactttcatctccagcccagctagaatctttcccatttctaaaccagagggaggcaactatctttttcactcctccgtcttcctgtcaagtactggcatatttagcaagatgtaggtagaatttattgagataaattttcataygtatttcctgggtatgttgctctaacccctcttagtcacccaagccttataaaaagtgtctccataaaagagtctttcagcaactgtccaccaaagagaagtgatgtccaccaaactgaatagtacattgtgatgataataaacatggttctctaaaagcgcttacctggtttttttgatgcacaaactccagctgtctctttgcactctttttctgctgtgaccatgtaaacctaaagtaacaatagagagactctccaaagacaatgaatttatgcaggagtgggcattgcaatgcagaaggcatgtgccttggtaccctatgggcatattcagaaaggcaaggattttaaaggtaaaatgaggaagg

SEQ ID NO: 101307 - DNA, 516 bp, Homo sapiens
agtactttcatctccagcccagctagaatctttcccatttctaaaccagagggaggcaactatctttttcactcctccgtcttcctgtcaagtactggcatatttagcaagatgtaggtagaatttattgagataaattttcatatgtatttcctgggtatgttgctctaacccctcttagtcacccaagccttataaaaagtgtctccataaaagagtctttcagcaactgtccaccaaagagaagtgatgtccaccaaactgaatagtacattgtgatgataataaacatggttctctaaaagcgcttacctggtttttwtgatgcacaaactccagctgtctctttgcactctttttctgctgtgaccatgtaaacctaaagtaacaatagagagactctccaaagacaatgaatttatgcaggagtgggcattgcaatgcagaaggcatgtgccttggtaccctatgggcatattcagaaaggcaaggattttaaaggtaaaatgaggaagg

SEQ ID NO: 101308 - DNA, 516 bp, Homo sapiens
agtactttcatctccagcccagctagaatctttcccatttctaaaccagagggaggcaactatctttttcactcctccgtcttcctgtcaagtactggcatatttagcaagatgtaggtagaatttattgagataaattttcatatgtatttcctgggtatgttgctctaacccctcttagtcacccaagccttataaaaagtgtctccataaaagagtctttcagcaactgtccaccaaagagaagtgatgtccaccaaactgaatagtacattgtgatgataataaacatggttctctaaaagcgcttacctggtttttttgatgcacaaactccagctgtctctttgcactctttttctgctgtgaccatgtaaacctaaagtaacaatagagagactctccaaagayaatgaatttatgcaggagtgggcattgcaatgcagaaggcatgtgccttggtaccctatgggcatattcagaaaggcaaggattttaaaggtaaaatgaggaagg

SEQ ID NO: 101309 - DNA, 526 bp, Homo sapiens
aagctatactacaaggatacaataatcaaaacagcatggtcctgtacaaaaggaggcacatagaccaatggaacagaattgagacccctgaaataaggtctcacacctatgaccatctgacctttgaaaaagatgacaaaaacaagcaatgaggaaaagactccctattcattaaatgatgctgtgataactggctagccataggcagaagattgaagctggacacctttcttataccatatacaaaaatcaactcaaaattgattaaaaacttaaatgcaaaacacaaaactataaaaatcctggaaaacaacctagacagtaccatcccggacaaggaacaagcaaaggttttatggtaaagacacaaaaaacaatcacgacaaaagcataagttgacaaacagaatataattaaacttaagagcttttgcgtagcagaagaarctagcaacagagtaaacaggcaccctacagaatggaagaaaagtatttgcaaactatgcatctgacaaaagtctaatacc

SEQ ID NO: 101310 - DNA, 562 bp, Homo sapiens
ctatcgttgataataattcttgttcaggataatgtgtactctgcagccattagatgaaatgttctgtaaatctctattaggtccatttgttctgttgtgtgtaggaagtaaatgtttctttgttgatttcttgtctggaagttctgtccagtgcygaaagggtggtgttgatgtctccaactatttttgtattgaagtctatctctcactttagctctaataatatttgctttatttatttgggtactccagcattgagtgcaaaatattaacaattgacaatcctcttgctgaattgactcctttatcattgtataatgactttctttgtctcttcttacaagtttttttcttgaaatctatttgttttgtacaagaatagctacttctgctccttgttggtttccattggcatggcatgtacttttccatccctttattttcaatcaatctgtatccttgtaggtgaaatgtgtttcttgtaggcaacagatcattgggtcctgcttttttattcattcagctagtctatgtcttttgattagagtgtttagtccactta

SEQ ID NO: 101311 - DNA, 562 bp, Homo sapiens
ctatcgttgataataattcttgttcaggataatgtgtactctgcagccattagatgaaatgttctgtaaatctctattaggtccatttgttctgttgtgtgtaggaagtaaatgtttctttgttgatttcttgtctggaagttctgtccagtgctgaaagggtggtgttgatgtctccaactatttttgtattgaagtctatctctcactttagctctaataatatttgctttatwtatttgggtactccagcattgagtgcaaaatattaacaattgacaatcctcttgctgaattgactcctttatcattgtataatgactttctttgtctcttcttacaagtttttttcttgaaatctatttgttttgtacaagaatagctacttctgctccttgttggtttccattggcatggcatgtacttttccatccctttattttcaatcaatctgtatccttgtaggtgaaatgtgtttcttgtaggcaacagatcattgggtcctgcttttttattcattcagctagtctatgtcttttgattagagtgtttagtccactta

SEQ ID NO: 101312 - DNA, 621 bp, Homo sapiens
aagtaaatgtttctttgttgatttcttgtctggaagttctgtccagtgctgaaagggtggtgttgatgtctccaactatttttgtattgaagtctatctctcactttagctctaataatatttgctttatttatttgggtactccagcattgagtgcaaaatattaacaattgacaatcctcttgctgaattgactcctttatcattgtataatgactttctttgtctcttcttacaagtttttttcttgaaatctatttgttttgtacaagaatagctacttctgctccttgttggtttccattggcatggcatgtacttttccatccctttattttcaatcaatctgtatccttgtaggtgaaatgtgtttcttgtaggcaacagatcattgggtcctgcttttttattcattcagctagtctatgtcttttgattagagtgtttagtccacttaatgtcaagtcaatgttattattgataagtaagtactaacaattgccattttaaatttgctttctggttgttttgtggtctttgcttccttcttytctttcttccatcttacttttagtgaaggtgatgttttttctggtagtgtaatttaatttcttagtgttt

SEQ ID NO: 101313 - DNA, 526 bp, Homo sapiens
atataaatatcataaatatatatacacttctaaaaatatagactcaaaatatataaagcaacacatgctggaaatatgagatgaaataagcataagtgaaaaatataaaatcgagatcagatctatactgcattctctacttgcttttgattagacctgtggttctcaacatttgactacacattaaaactatcttcgaacttttacaaaatacagatgccaataggccatccccaggcattctgatttaattggtttggggtgcatcctggttatcagttatgtttaaaagcatcaatgtgactctaatgagcagttagaattgagaaccattgttacagcacataaaggactgataacaaaaatgtcttttaataatttacatagataactaagtcaagatgggagaatgaacragaatttagtttcagtgaaattctactaactttaggagctccataccattatcaaccttctgctgatagaatcagccttgctataaaggtagaactgatatggtctgaca

SEQ ID NO: 101314 - DNA, 579 bp, Homo sapiens
ctgtgttttttagccccatcaagtcattcatgttcctctctaaactggttatcctagttagcatttcctgtaaccttttatcaaggttcttagctyacttgcattgggttagaacatgcttctttagctcagaggagtttcttattacccaccttctgaagcctacttttgtcaattcatcaatctcattctctatccagttttgtgcccttgctggagaggagttgcgatcatttggaggagaagaggcattatggcttttggaattttcagtatttttgtgctggtttttcctcattttcatggatttatctgcctttgatctctgaggctgataacttttggatgggttttttgtatgggggttctttttgatgatattgatgttgctttctgtttgttagtttttcttctaacactcaggcccctcttctgcaggtctgctgcagtttactggaggtccactccagaccctgtttgtctggatatccccagtggaggctgcagaacgacaaagattgctggctgctccttcctcagaaagcttcatccagtggggcactggcctgatgccagcca

SEQ ID NO: 101315 - DNA, 579 bp, Homo sapiens
ctgtgttttttagccccatcaagtcattcatgttcctctctaaactggttatcctagttagcatttcctgtaaccttttatcaaggttcttagcttacttgcattgggttagaacatgcttctttagctcagaggagtttyttattacccaccttctgaagcctacttttgtcaattcatcaatctcattctctatccagttttgtgcccttgctggagaggagttgcgatcatttggaggagaagaggcattatggcttttggaattttcagtatttttgtgctggtttttcctcattttcatggatttatctgcctttgatctctgaggctgataacttttggatgggttttttgtatgggggttctttttgatgatattgatgttgctttctgtttgttagtttttcttctaacactcaggcccctcttctgcaggtctgctgcagtttactggaggtccactccagaccctgtttgtctggatatccccagtggaggctgcagaacgacaaagattgctggctgctccttcctcagaaagcttcatccagtggggcactggcctgatgccagcca

SEQ ID NO: 101316 - DNA, 579 bp, Homo sapiens
ctgtgttttttagccccatcaagtcattcatgttcctctctaaactggttatcctagttagcatttcctgtaaccttttatcaaggttcttagcttacttgcattgggttagaacatgcttctttagctcagaggagtttcttattacccaccttctgaagcctacttttgtcaattcmtcaatctcattctctatccagttttgtgcccttgctggagaggagttgcgatcatttggaggagaagaggcattatggcttttggaattttcagtatttttgtgctggtttttcctcattttcatggatttatctgcctttgatctctgaggctgataacttttggatgggttttttgtatgggggttctttttgatgatattgatgttgctttctgtttgttagtttttcttctaacactcaggcccctcttctgcaggtctgctgcagtttactggaggtccactccagaccctgtttgtctggatatccccagtggaggctgcagaacgacaaagattgctggctgctccttcctcagaaagcttcatccagtggggcactggcctgatgccagcca

SEQ ID NO: 101317 - DNA, 551 bp, Homo sapiens
gatactatgcacccataaagatgatgagttcatgtctttttcagggacrtggatgaagcaggaaaccatcattctcactaaactaacacaagaacagaaaacaaagcaccacatgttcttactcataattgggagttgaacaatgagaacacatggacacagggaggggaacatcacacactggggcctgtcaaggtgggggactaagggagggatagcattaggagaaatatctaatgtaggtgatggggtgataggtgcagcaacaccatggcacatgtattcctatgtaacaaaactacatgttatatatatatattatataacatatgtataatatatatattatatatagctaaaatggccagacccacatggctggcaggtggctttaggacagccaggaaaatctagatgacatggatacatatctctcatcaaccagaaggctgtgtctgtcatgttcacatggagttgctcagttttccaataatagcaagagagaccaagcctcaatgtataaacactttgaagtctctgtgtgcataaca

SEQ ID NO: 101318 - DNA, 551 bp, Homo sapiens
gatactatgcacccataaagatgatgagttcatgtctttttcagggacgtggatgaagcaggaaaccatcattctcactaaactaacacaagaacagaaaacaaagcaccacatgttcttactcataattgggagttgaacaatgagaacacatggacacagggaggggaacatcacacactggggcctgtcaaggtgggrgactaagggagggatagcattaggagaaatatctaatgtaggtgatggggtgataggtgcagcaacaccatggcacatgtattcctatgtaacaaaactacatgttatatatatatattatataacatatgtataatatatatattatatatagctaaaatggccagacccacatggctggcaggtggctttaggacagccaggaaaatctagatgacatggatacatatctctcatcaaccagaaggctgtgtctgtcatgttcacatggagttgctcagttttccaataatagcaagagagaccaagcctcaatgtataaacactttgaagtctctgtgtgcataaca

SEQ ID NO: 101319 - DNA, 570 bp, Homo sapiens
aggcatagccactcctggaggactgccgacttatgtggtgtgaagcctaaggagggtgcrctgctaagaaaagcctgcaccacgcaccacccttgcgtctatagtctggaggtggttttgtggtcagaacatgggtgggcaggagcctaagcacaggcacacatgcaacttaagcctgagggccagcagcagcccagagccacgaagtcaccctttgtggtataggagtgagattcactcagaatcagcatgttggtaatgttgttgcagctcattctcacacaaaagaaatgttgtgcaagccagctggaacaatcagattgccaggtcactttcctggaaagggggcatctggttgactccacgcatggggtagtggggtcagagagtgaccctgagggacgaagcaaggacagggcccacacaggtcccatctgggatcacagctctccacttaggtagcactgccagctctgtctgttccaagcaccagaaaggcacttagaacattttgagaaagtgactctaatgtgtgtttgtggtgaccaggggtggaggggcggggagttc

SEQ ID NO: 101320 - DNA, 570 bp, Homo sapiens
aggcatagccactcctggaggactgccgacttatgtggtgtgaagcctaaggagggtgcactgctaagaaaagcctgcaccacgcaccacccttgcgtctatagtctggaggtggttttgtggtcagaacatgggtgggcaggagcctaagcacaggcacacatgcaacttaagcctgagggccagcagcagcccagagccacgaagtcaccctttgtggtataggagtgagattcactcagaatcagcatgttggtamtgttgttgcagctcattctcacacaaaagaaatgttgtgcaagccagctggaacaatcagattgccaggtcactttcctggaaagggggcatctggttgactccacgcatggggtagtggggtcagagagtgaccctgagggacgaagcaaggacagggcccacacaggtcccatctgggatcacagctctccacttaggtagcactgccagctctgtctgttccaagcaccagaaaggcacttagaacattttgagaaagtgactctaatgtgtgtttgtggtgaccaggggtggaggggcggggagttc

SEQ ID NO: 101321 - DNA, 563 bp, Homo sapiens
ggaggggacacacatccaaaccatatcaggcaccaaaatagaagacgatggtttgtgacagaagtctgcccaggcattgacagcttgagtctttcttcctgcgatatgagttaatgaaaactcaaggaaaggaccagaggtaattgttttcttctttggcaggtgtggactttaggaagataagggaactccagagaacagctttgggagagacagaacattgagaggctaaagggaggtggaggtagggtaaggtcagagagaccttgaggtgcttacttcagtccagcatgttaaagtgctatattttggggtattggtttmtgagccccagcactgcaattaatatactggtacatgggtccctttacatgtttgcaataactgttggataaattcttaaaagggaggcaagaattcatatgtatttgtgattttgatagctagtgggtggcaaattgccctccgaagtggttgaaacaactaacacatccatcagcaatgtatgagagtggtttgctatccactatttggctatttgccagtctgataaggggaaagtg

SEQ ID NO: 101322 - DNA, 546 bp, Homo sapiens
tatatttcacgattttactataaaatttaagactttgcttttagttaatttataagtgacatttttctgctaccaattatttctgagtaataaaattaatgtatgagaatttactatcatagtgtgaatgcttaataaatgttaatcatttattattttaagtaaaattggtgttttagaacagctttagatttacagaaaaattatgaagataatacagaatagccatatatagtagtccccttttatctctggggatgcattctaagacccccatgaatgcctgaaactgcggatagtaccaagcccgatatatagttttttcctgtatatacatacctatgataaatttgaatttataaattagacacagtaggaaatcaccaaaaataataaaatagaacagttataacaatatrctgtcataaaagttatgtgaatgtggtctctctctctctctttctctctctgtcaaaatacttaatgttaatatttttgaaccacagttgactgtaggtaactgaaaccatagagagtgaaattgca

SEQ ID NO: 101323 - DNA, 492 bp, Homo sapiens
gaattccctagtattcataaatctatgtagggatacactacaaccaactcttagttggagggtacttaaggcttttctaatcttttgttattataaacaatgctgcattgaatagccttatasctatacctcatttaatacatatacactcatttatataaaagaaattcctagaatatataaatttttaacttactgcccttgtgagatgttataccaatgtatgctaccatcatcaccaatttaagtgtttaattcaactttttgctttttcatgtctagtttttttaaatggtgtatcactggttttaatttgatttctcttactatgagtgagattaaacattttgttcaagtttataaaccatttgtatttccttttctgtgatttttcttatttgtaggaccttttctatattaaaaatgatagtgctttgtcagttgttgggctgcatataattttctgaacttgacacttgtctttttaacatt

SEQ ID NO: 101324 - DNA, 572 bp, Homo sapiens
atcctgccccgagataggaccagttctaccagagcagccccctgtctgctggcctcacctggagtttcagtctggctgtgcctgcttacwgtgcagcctcagatgcccagccagagtgccttctgggggcccgtatcatagctcatatgctggcagactgcacctgaccatcggacagctccagcagagcagccatttgtgaagtgcaccaggtcactcgcacttaccccccaccatatccttccctgtgcaactttgccagcatacacttgcctatggctacccccctatcactttgccagcacacatgcatacaggtggacatcacctcccctccccaatggatgtacatgtgtgtatgcactccaccacgctatgagtgccggctggagcacaccctgccactccctgactgtgccaccattgctggtgcaaatgtgcccagagattccagcagacctgtccccaaccctgcactgccattgctactgaagtgaacgtgcacacaaatactgccagctctgtacctgcaagtaccatgtccccatgccaacactgctagcagtgtgatt

SEQ ID NO: 101325 - DNA, 572 bp, Homo sapiens
atcctgccccgagataggaccagttctaccagagcagccccctgtctgctggcctcacctggagtttcagtctggctgtgcctgcttacagtgcagcctcagatgcccagccagagtgccttctgggggcccgtatcatagctcatatgctggcagactgcacctgaccatcggasagctccagcagagcagccatttgtgaagtgcaccaggtcactcgcacttaccccccaccatatccttccctgtgcaactttgccagcatacacttgcctatggctacccccctatcactttgccagcacacatgcatacaggtggacatcacctcccctccccaatggatgtacatgtgtgtatgcactccaccacgctatgagtgccggctggagcacaccctgccactccctgactgtgccaccattgctggtgcaaatgtgcccagagattccagcagacctgtccccaaccctgcactgccattgctactgaagtgaacgtgcacacaaatactgccagctctgtacctgcaagtaccatgtccccatgccaacactgctagcagtgtgatt

SEQ ID NO: 101326 - DNA, 460 bp, Homo sapiens
  misc_feature (1)...(460): n = A,T,C or G
agctgaaacaaacctaaaattgatgttaatttcactangcttcctaacaattttcaccctctttgaaactgtgctgtaggcttcagtttacgtgccttcataatttcattgccccctatataatatagatttgtttcagcagataaatggcaatgtctgaatttgttttaaatgatgaactcatgaggggaaggtaggtgtcatggctgaaaataagtactgtgagaaaaggctaatctgtaaatctatcacctgaatttcattgtaaaaatttctaagtgtttcctcacaggacttatgctcggccataacacacaccttyccctcatgatgtcatcattttgaacaaatacagacatggccatttatctgttgtgtaacctagggcaaatttcttaacacctttgatctacttctttcttctgcataatggggagaacacccaccttatagagttgct

SEQ ID NO: 101327 - DNA, 546 bp, Homo sapiens
tgtcaaatggattttttcatgcctcattggtaattgtattataagtattttaggagtgcawtttttatataaaagcattgtaacatttccagatactgtcaaattgctttccaaagtgattgacacttctaccaacattattgtataggtgttcgtatttctccacattgtcaccaacataaaatttttttggcaatctcttgagtatagtataccattttattgtggtttagtttgcattttcttgactagtgaggttgaaatttcatgtaaatattggacattctggttttttctaatgcatatttcttattcatatatgttgactgttatttctgttagaatattttacttacatttaactgtaggaaatttacaaatcagttggtcactggttaaatgcattgcggatatattttctcagaatgtaacttaactttttactttgtcagtagtaccttttgttaaacagaattttttgattttgtgtaatgagatatagcaatattttcctttgtagtctgtgcttttcatgtcctaaaaaaa

SEQ ID NO: 101328 - DNA, 546 bp, Homo sapiens
tgtcaaatggattttttcatgcctcattggtaattgtattataagtattttaggagtgcaatttttatataaaagcattgtaacatttccagatactgtcaaattgctttccaaagtgattgacacttctaccaacattattgtataggtgttcgtatttctccacattgtcaccaayataaaatttttttggcaatctcttgagtatagtataccattttattgtggtttagtttgcattttcttgactagtgaggttgaaatttcatgtaaatattggacattctggttttttctaatgcatatttcttattcatatatgttgactgttatttctgttagaatattttacttacatttaactgtaggaaatttacaaatcagttggtcactggttaaatgcattgcggatatattttctcagaatgtaacttaactttttactttgtcagtagtaccttttgttaaacagaattttttgattttgtgtaatgagatatagcaatattttcctttgtagtctgtgcttttcatgtcctaaaaaaa

SEQ ID NO: 101329 - DNA, 573 bp, Homo sapiens
ttgggttattggttttctgtactcagaagtgcactagagagcaaaaccattygtgacaagtcacttggaaaacacccaaatagtctgtgagatcacatttcctcttattaaaaaattacatcctcagaacatttcagaagctagaaaactcatcctcacatgaccctggatgttgttaatgtgtgaaattactgaattatgcagtataacataaaaatcagtcacaaattctcgagaaaaacaagtgaattttttaaaaaatataaataacaacagtaatagttctactatggtatggtgtaggaaaataaaaactaaaaaacttgaatccatatggctagtgtcttaaatcatcaaaaaataattaaaacaagtgaaaccaaaccaggttacagctacttataagcctaaatttaatgagttgtggaaaatgcaataaacttaacaaatcacacattactattaattaatggcctgtaaaagagttgcatgtggcttaggcaataacactttttagtttatactttagaagaaacattttcagtaagtatgagataaatataatttatctca

SEQ ID NO: 101330 - DNA, 559 bp, Homo sapiens
ctgggcatctggtgaaaacctcagactgcttccacaaatggaagaaaacaaagacaaagatgagttggtgtgtgcagggatcacatggtgagagaggaagcaggagagagctggaagatgccaggctttttttaacaaccagatctgggaggaatggtagagtgagaacctgctcacttctaagggaggaaatttatctattcatgagggatctgcccctacaatccamacacctcccatttggcaccaccttcaacactggggatcaaatttcaatatgagattcagatagaagaaacattcaaacaatagcatgcatatatgtttataattgctatatcttcttgatttattgatgcatttatcattataacatgtctctttttgtctcaggcaacaattttgtgttaaaaatgtattttgtatgatattaatatagccactatagctctctaacctccttcaattattgtttgcatggtatattttcttctatctccttactttcaatatatttgtgtctatgaatctaaagtgttatctctttttttattattat

SEQ ID NO: 101331 - DNA, 489 bp, Homo sapiens
ataaaaacacttcttctgagcaacttttaatttaagcagttagaataaatatgttacacatcaggatgttctgattcatatattttgggattgaggaaaaatgactttggcaggttccctcttagagtcatcaaatagctgtctgttcttctaattaagtattttgacataaactttgaatgtaataagataatattaaagaattgtttacggaaagataactaataagtcaacatgatgaggcatactaggagagcacaatcggagcagccttcctcacagaaattaggtaatgaggcagctgcaaaaaatgctggtataatttttaactgatttaaaaayacatcacagagaggtgagagtgctgctgtacttcatattggtaggggcaaatgtagcatattgtcttcatcagcgagggatgtggccttgtgagaggggagaataaccagcaatgggagaagctttacaaccatgacagtgcagcca

SEQ ID NO: 101332 - DNA, 365 bp, Homo sapiens
caaaataacttgcagatgccaatcagtacacttcccctgaaagcacttcaacataatgatcactagaattcagtatttgattttttgagctacagtttatatacagtgaagttttcatgataccgctggtgaggatggaagtcagggagaccatgaggggaagcttgactccaacascactcaatcagcgttggcatactttaatctgcttttttgcctaatcatctgaggagcaattcacttgacaaaatagtttcacagctaaaaaaaagtttcaacttcactaatcttaaacattatgatttattttcaggaaacaggaagctctctttctgagattttagccagtcttgatattacagatt

SEQ ID NO: 101333 - DNA, 589 bp, Homo sapiens
gaaactaagatccacaggttggaaactactttagaataactaaactcataaaaatartaagtaattaaatcatctaaccattttgaatgtgtgccaaattaatggcaggaatctgaaaacagatgaaattaagtgttcccctacttttttaagatcaagtatattttgaatacaaatagtataaagaaactgaaaactaaatacttgactggcattgagacaaaagagacttcacatttaacacaggaaaggatgtcattaaaaattaatccttgcctgaaaaaaatgggttttttttcctccccttttctcttttattctggaagaaaaggaaaagataggaacatatagatgataaggtagcagaatcatgtggtggctaagagcccagttttcagagccggacaaagttgggttgggtttaaaaccaggcctcaactaaaccaatatataggaaggatcttgacaagtttcttcacacttctgagtctttttcaaaagtaaaataaaaatatctatatacaaaaatacctattgtattattttgttctcatgctgctgataaacacctaccagagactgggtaatt

SEQ ID NO: 101334 - DNA, 594 bp, Homo sapiens
ggttaagttcaagtgtgcaggtcctatgtctaattatataggcaatgctgaaaggatcaactgcagccctaggaagagctccctaatccattcattattatatcttgtttaagataaatgaaacaaaaatgcaaacacaacttcgctgttgcaacttttctttcataatttgctttcatttcaggagatgagttcaaatctctgctccactatttacaatttaaatgccttttgtgtatatgtgcatccatctataaaactgatctatacaatttaatgaattaatacacataaaaagtttatagcagtctccacttttaggaaatattaagactgtgattttggacttccaaaaggactcaaacttaatttaggattcagcaatatcatttgctgacgattgaactaatctgctataagccttttacaaatttctgggataaatatttttaagaaaagaaaacaaaaaacaaagaaycaaacaatgcttgatttttctcaaatatgttttagagttttttttttttagaaactgaaaagtagtatgtaatatgtataataaagacttcgcaaaaagttacacttttcttaaac

SEQ ID NO: 101335 - DNA, 571 bp, Homo sapiens
caaaatactcacttgcagcccaaaagattaaagtatacatttaaataaaaaaaccaccaactaagaaccagaataaataaagtaaatgattttttttaatgtagaaagcaggatttatcatgctacatttagttgaatctagtatgcaaacttatttacatgttaactcagaaatagaatagcatattacaatcaatgacatattttgatcggcagcatttttcttagtgaactataaaatattagtgtatsaatcaccatgtaatatcttaaacggtaacttttgtcttacaaaaatctacaccaaaggacatttgtgtatataaacgaaatacacacacacacacacacacacacacacacacacacacacgcatgtggtagagtaactgtccagaggcaaatgttgcctcattttccatttctgacattagtcgctgctgtcatacatcatttccataattatacctggtatatgtaaaacaaataatggcagagcttgacttcttaacaggaaaaaattaatgagcaattttaaaaatgcgtagattataaaatatgtaagatttga

SEQ ID NO: 101336 - DNA, 571 bp, Homo sapiens
caaaatactcacttgcagcccaaaagattaaagtatacatttaaataaaaaaaccaccaactaagaaccagaataaataaagtaaatgattttttttaatgtagaaagcaggatttatcatgctacatttagttgaatctagtatgcaaacttatttacatgttaactcagaaatagaatagcatattacaatcaatgacatattttgatcggcagcatttttcttagtgaactataaaatattagtgtatgaatcaccatgtaatatcttaaacggtaacttttgtcttacaaaaatctacaccaaaggacatttgtgtatataaacgaaatacacacacacacacacacacacacacacacacacacacaygcatgtggtagagtaactgtccagaggcaaatgttgcctcattttccatttctgacattagtcgctgctgtcatacatcatttccataattatacctggtatatgtaaaacaaataatggcagagcttgacttcttaacaggaaaaaattaatgagcaattttaaaaatgcgtagattataaaatatgtaagatttga

SEQ ID NO: 101337 - DNA, 571 bp, Homo sapiens
caaaatactcacttgcagcccaaaagattaaagtatacatttaaataaaaaaaccaccaactaagaaccagaataaataaagtaaatgattttttttaatgtagaaagcaggatttatcatgctacatttagttgaatctagtatgcaaacttatttacatgttaactcagaaatagaatagcatattacaatcaatgacatattttgatcggcagcatttttcttagtgaactataaaatattagtgtatgaatcaccatgtaatatcttaaacggtaacttttgtcttacaaaaatctacaccaaaggacatttgtgtatataaacgaaatacacacacacacacacacacacacacacacacacacacacgcatgtggtagagtaactgtccagaggcaaatgttgcctcattttccatttctgacattagtcgctgctgtcatacatcatttccataattatacctggtatatgtaaaacaaataatggcagagcttgacttcttaacaggaaaaaattaatgagcaattttaaaaatgcrtagattataaaatatgtaagatttga

SEQ ID NO: 101338 - DNA, 601 bp, Homo sapiens
taatgttgagacttctcttctctgccaagtttgtgccatttgtaggctagtagtctaagaaagatggagtcatcagcttctttccatctccttgttcaatctttgtactatttctcctcctccagctagccaaaggcagttttagaatgtttggctttgggacatggtgaaagaactgtatgaggagcactcaaatttttagttaactggcattggcttggactggtcgttatttaaagctggcactttctcatcagtacatttgtggtttctccagaaacaccatcaattgcaagagacatattagagcagcactggttatgcaagtggtgaactctactgagatccattgcttaacccttccttagccttgaagtatcctgagytaatctctagtttctctttcttgagatctgttcatgcctgcctggtcttcctttggttaggatcttttcttaccctttatatttctcaagtggtgaggttgaaatgttccgtgaactgtagcacaggtgtttatttaatcatccacatggtttcctcagagtctttcaatcttgacttgggatgaataggttacacctcaaatttctttaaagtc

SEQ ID NO: 101339 - DNA, 460 bp, Homo sapiens
gttttttttttttggtgaaatcttcaggttttcaatatatgatcatgtcatttgcaaagaagaataaattgactttttcctttcctatttggatgttctttatttctttctcttgactaattgctcaggccagaacttccagaagtatactgaataaatgtggtgaaagtgggcattcttctcttgttccatatcttagaaaaaaggctttcagtttttccccattcagtatatattagctgtgggtttgtaatacatggactttattatcttaaagtatgtttcccctgtactcagttttttgagtttttgwcatacaaggatgttgaattttgtcaaattatttttcagtctctattgaaatgatcatacggcttttgttcttgattttgttaatgtgatatattatgcttatttatttgcgtatattgaaccatccttgcatatctggaatgaattc

SEQ ID NO: 101340 - DNA, 553 bp, Homo sapiens
tgttacattgtactgaacttattttaagtctccaatttatttgaatataaatttttgggagctgagaacattttttatttatatgtgtattctgattgtttatctgtgtttggcatataataaaagttgattgagctgaaggacttaaaaacctgaagcacaccttccatgcttttcatttgctttacctctgcatggaacacttttaatctgtctctcctgtgtgaaacttctctgaaacccttaccagctgtctgtgctgctacttgtctgttgtacgcacratggatcacaaatgttggcaacattttttcttcattaactgagaaatctctgaggggcagggtcttatccagttgatctctccagtgcttagtgcaatgcctggcacattattcttcatttgtttttttacaacaaaaaaattgactggggaagatatttctgtttattatacaagaataatgaagcaaagtacttcctgtcctcccttctattctaaaaattttaatgacattaatatccatgccttgcatgtatattacctcatttt

SEQ ID NO: 101341 - DNA, 361 bp, Homo sapiens
acagaccccaggccccccaccctacccaccccacacagaccctaggctgcccaccccatccccaccgggtagctcctagggcttcctggaggaggctgctccactcgctggccacactcacctgtgtccgaggtggagacagccttgatcagcatgctgtcggtgaccacgttgagggtgcagaggctgaacaccaggccgggcaccaggaggcagaagtggaagacgctggacatccaggcctgggacggcaggcrggggccgagctgagtgggggcctcacgggaccaggctcctctctggggtcttacctgtccctccccaccctgactgctgtccctgctgaagagctggccccggg

SEQ ID NO: 101342 - DNA, 611 bp, Homo sapiens
gacctggtgatttttcaaaaatggaacaagaaactttcatgtcaccatgaatttaatactgtctcttgtgttttcctttgcaatctctttgattggattatgttcaaggatacacrgggctcttgtcttttgagtgcatttaagagttcattttccagctttgacattcagctcaggagtttcaacagcaattaatcagaactatccatatcagaaacattgttaatctttaccagacagaagtcgttatgtttgcaactaaacttcaatagactctttggacataggatttattattttgcaaatgttttgaaagggaagacatagctttgaagcagagtcggagaaacagttttaaagagttagaaccaaaatccaagagtcactcaaccagacctggaaggaaacatttgtttctgctgcaggttataagaatagtcacttcaaggttgaacatcatccaagcgtgcattagggtatatggttattcatcctccaaatttcagtcctcaacccttctctgccctctcccctgcatgagctcatttcttcctgatttcaattatcacctcagtgcctcagtgtagatgattcacagattcactggttac

SEQ ID NO: 101343 - DNA, 573 bp, Homo sapiens
agaattctaccaagcttttaaagaagaactaaaaccaattctattcaaagtattctaaaataatgaagaaaggaaagtcttccaagctaattttatgaggccagcattatcctaagatcgaaaccagaaagaggcacaacagaaacataaaactayagaacattattcctgataagcataggtataaaaatcctcaacaaaatgctggcaaaccaaatccaatagtacaataaaaagattatacatcatgatcaaatgggatttaacctagggctgcaaaaatggttcaacatacataaatcaaaaaatgtcataagtcacatcaacagaatgaaggacaaaaatcatataatcatctcaatgaatacagaaaaaacatttcataaaatttgacatccctttatgataaaaactttcaaaaaattagatatggtaggaacgtacctcaataaaataaagaccatatatcacaaaaccacagctaacatcctacggaaaggggaaagttgaaagctttacctctaaggactggaataagacaaggatgcccacttccaccttatttaacatatt

SEQ ID NO: 101344 - DNA, 648 bp, Homo sapiens
tcctagctgcctttttggaccagaagtactttaataatagaacttaaaatggacagtggcttagaaaaagcaatgaggatatgggtggcaagaactcaaatattacagacaaattgtttaccaattgtgagggttaataatgagtgtcgacttgattggattgaaggatgcaagttattgttcctggatgtgtctgcgagggtgttgaaagattaacatttgagttggtggactggaggcagacacaccctaatctgagtcagctgccagcatggagaggataaaagcaggcagaggaacgcagaaggactagattagcagagtcttttggcctccatttttcttctgtgctgaatgcttcctgccctcaaacrtcggtctccaagttcttgttcttcagcttttggactcttggacctacaccagtggtttgccagggactctcagaccttcagccacagactaagactgcactgtcagcttccctacttttgaggtttttggagtcagactggcttccttgctccttagcttgcagacagcctattgtgggatttcaccttgtgattgtgtgagtcaatactccttaataaagtccctttcacatatacagctatcctattagtcctatccctctagagaacctta

SEQ ID NO: 101345 - DNA, 662 bp, Homo sapiens
ctagtttccatagccatgatagggaaattgattctaatagcttggcagagaaataaaccactactcttgcagctatccacaggacttcagttcatagagaacatactttcatctcatcaccactgaagaacagcaatagccccttctggtctgcacattgtcttaaagacaggataagagcttaccaaatgggaaaggcagtgaagggtattattcatagggagtcacgtccattaaacactgktattcatccggctaggaaaacagtcgcaggtaaatccagttgcaaagtggtttggatgggtcctcacccaaatctcatcttgaattgtagctcccataatctccatgtgttgtaggagggacccagtcgggggtaattgaatcacagtggcaggtttttccatgctgttcccgtgatagtgaaaaagtctcacaaaatctaatgattttataaagagcagttccactgcacacaccctcttgcctgtcaccatgtaagatgtgcctttgctgttctttcactctccaccatgatcgtgaggcctccccagtcatgtggaactgtgagttgttgaacttccttttctctataaattacccagtctcgggtatgtctttattagcagcatgagaacagactaacacacaaatttagcaga

SEQ ID NO: 101346 - DNA, 662 bp, Homo sapiens
ctagtttccatagccatgatagggaaattgattctaatagcttggcagagaaataaaccactactcttgcagctatccacaggacttcagttcatagagaacatactttcatctcatcaccactgaagaacagcaatagccccttctggtctgcacattgtcttaaagacaggataagagcttaccaaatgggaaaggcagtgaagggtattattcatagggagtcacgtccattaaacactgttattcatccggctaggaaaacagtcgcaggtaaatccagttgcaaagtggtttggatgggtccwcacccaaatctcatcttgaattgtagctcccataatctccatgtgttgtaggagggacccagtcgggggtaattgaatcacagtggcaggtttttccatgctgttcccgtgatagtgaaaaagtctcacaaaatctaatgattttataaagagcagttccactgcacacaccctcttgcctgtcaccatgtaagatgtgcctttgctgttctttcactctccaccatgatcgtgaggcctccccagtcatgtggaactgtgagttgttgaacttccttttctctataaattacccagtctcgggtatgtctttattagcagcatgagaacagactaacacacaaatttagcaga

SEQ ID NO: 101347 - DNA, 648 bp, Homo sapiens
atgcatttaatgcaataaattttcctctaagaggcaacagattttgttgcatcccacatattttggtaagttatattgttatttttatttagctctaaatatttttgagctactcttgagtcttctcctttgactcgtgttacttagttgtgtgttgtttaatctccaaatatttgaggatttcagtttcctttttattggtgttagcatggtatatttttctccatctcatttaacctatctatgtttttatatttaatgtgggtttcttttttcttttctttttttttyttttttttgagactgaatctcattctgtcacccaggctggagtgcagtggcatgatctcggctcactgcaagctccgcctcccaggttagcaccattctcctgcctcagcctcccacgtagctgggactacaggtgcctgccatcacgccaggctaattttttgtatttttagtggagacagggtttcaccatgttatccaggatggtctcgatctcctgacctcatgacccacgcgcctcagcctcccaaaagtgctgggattacaggcgtgagccacgatgcccggcctaatgtggggttcttgtagacaacatataattgggtcttgtttttattttttaaatccaccatgaca

SEQ ID NO: 101348 - DNA, 619 bp, Homo sapiens
tttatttttaatgtttatcttctggatcccccttccagactgataaggccctaagtgtggaagctttaaaccttcctgggaaaggctgggtatggctacactccctttaatctatgactctttgtttcctttgaagctgccatatccagccaaggaagtgataatccactttctccactccgctgatatacctgggtctaaaagcctgatgcaataaacagccagactatttttgcatttaggagctttgagaagataagattattatttttgcttagctagtctgagccacctgaagagacagatcaagagttgtgttgtctggcggtatagactgctggagcagtaagaatgtgaaatgcacctatggaattggaaggcacatgggatagatagtgactgtaagagattctgtttctaaatatgtaggaaataatttaacagatcagaatttgtggtatacaagttagaacaaagactaaagtctttttaaaagatgaaagaaagcctcaactgaaaattattctattcctgcaagtagccatggtggtgtcagagtttaataaagggttatactctgcaacacgctccctyttaaataatgttgcctcccagcttg

SEQ ID NO: 101349 - DNA, 600 bp, Homo sapiens
gctcccttagttcttttaacagattattctggttgattataaatctatttctgataaatttctagaacagtctttatgagtaaatagtaatgtacttacatttagccyctctaaaaatgtttgatttattatcaccagaattagagaattatacattttaccttgttctggctagaactattagataattacagaagtttagtagcttagttgtttaaattttgctaaaagctttactgtgattctgattctgtttgtttcacacacatacctgcaaatcattccactaatctataattattttaaactatgcttagtacttaggaaacaaagtagaaaatatcttggaatatcattaaatttttttcttatgatttacttatatacacttctttattctactttataaaatgtatttttatatatcatttaatctttataacactcttatgacacaagctgagcaggtaattttttctttattttagaggtcaaatatcttaaaagcagacacaaagttggtacgtagatttataacgtgtatcttggaactctttctactgaattttgtatgccgcctcttcctttctttatcctcct

SEQ ID NO: 101350 - DNA, 630 bp, Homo sapiens
catttgtttctacatttgtctacctcatgtccttttcattcataggctggctgattcaaaccttctttaaaaactccccgagaaagtctgtgacattaaaatgtcctttgatgctctttcgctaagcagtgaatattaacagttatggtgaccctgttccctaatgtgtctcagcaggatcaatagcagttaagtgccactgttttacaattaaaaaggggatcattttaaatttaaaagctcgtagctaattttcttcttggcacttaatggcataattcatttttgaaaaayctcattgggagaacatagactttttttttttttggtggcagcacaggaagaggctagtttcgcaccccttgttgcctctgacatgatttgtagtgttccttcattaagctgtcagcagggcatccgtaaaattctctccaaaatagggacccggatggagagcatgagcaagcatggcgattctctgtaaaactgttcagcagccagttttcttggaactttctttctgaatgctgctgttttcagccaatcttgcatttttgttcacaattttttcctcattttcactattctttttggcgactgcctcctgttccctattaggaacctaggcac

SEQ ID NO: 101351 - DNA, 619 bp, Homo sapiens
cttttaaacagtcaaaggttaaggttcactccgtcattcatgtggtttcattctcttaygcatattgaaatagctcagaaagatttataaccgtgtttcatacagtcagagttccagtaaatgagtccctttttgaaggttaaatatttatgctcttattttcctgcctgatacagaaagcaagagtaaacccatgttagtcaaaaagccatggtgacaggctggcttagaacaagaaaagccagtgggcacaatattcagatcatcccccatgctcttatactcttatttatcggggaaatgaatgagtgaaagaatgaatgaaaactcttacatggcctgtctccggaagcagaagtaaatcactttggcaaatgtgattttaagtcaatctaaaatttcccacatatttagcctattgagtcagatctttgaaataataatcattatccatcaaggaacagcaattatagctagtgaaatactttcacatgtacttgagcttcataccactctatagagtgagcaggcagaaattaggttattttataaatgaacaagttgatgttttgagctgatgaatgatttgtcctgtttcagacaggcagtgagtgacagg

SEQ ID NO: 101352 - DNA, 537 bp, Homo sapiens
tgccctccactcttggcttggtggggagcgcgggggcagcaggaagaggaaagttcagttaaattttatttgtgagtagaaaagaggaggtatcacctacagacccttccacaagtcttctagccttctgaatgttaagatttagtattctttatgagacttttgagcatctcagtttctctccctgcattaaacaatcattgcaaaacaattacatctctattttgataatgtggacatacgtatatttattttactattktcccaagtatgatgttgcatagaagccacaggggctgcacttactccatagaggaagggggtttgtgctacagggtgaccagatggaaggcaaaataataataataataataataataataataataataataataaaggagtgactcagattcttcttcacccctctagaaagacaaaattgcaacaaatttagatctaaatggcttttatgcagaatttatgattcaggacagactccattctacaaaatagaatgagacctctcacggggca

SEQ ID NO: 101353 - DNA, 537 bp, Homo sapiens
tgccctccactcttggcttggtggggagcgcgggggcagcaggaagaggaaagttcagttaaattttatttgtgagtagaaaagaggaggtatcacctacagacccttccacaagtcttctagccttctgaatgttaagatttagtattctttatgagacttttgagcatctcagtttctctccctgcattaaacaatcattgcaaaacaattacatctctattttgataatgtggacatacgtatatttattttactattttcccaagtatgatgttgcatagaagccacaggggctgcacttactccatagaggaagggggtttgtgctacagggtgaccagatggaaggcaaaataataataataataataataataataataatrataataataaaggagtgactcagattcttcttcacccctctagaaagacaaaattgcaacaaatttagatctaaatggcttttatgcagaatttatgattcaggacagactccattctacaaaatagaatgagacctctcacggggca

SEQ ID NO: 101354 - DNA, 530 bp, Homo sapiens
tttatttatttatttatttatttgagctggagtgttgctctgcctcctaggctggggtgcagtagtgcgatctctgctcactgcaatctccacctcccaggctcaagcaattctcctgcctcagcctcctgaatagctaggactacaggcactcgccaccattcctgggtatttgtatttttagtagagatagggtttcaccatgttgcccggactggttttgaactcctgacctcaaataatcygcctgcctcggcctcccaaagtgctgggttacaggcatgagccatcacacccagccttcatatatacattttgaaaaaatgtacaaccttattacataaatggccatgcatgtggtagtaacatactagacaagggtttcagggatgactcccacccacccataatcaaaatgtttaacaaagtctataatcttcaccagaaaaccctcagttaaggagtgtaattaaggtttttccccctttaaaatgtaaaatatcttggaaaaaagaaagcacttcctaatg

SEQ ID NO: 101355 - DNA, 530 bp, Homo sapiens
tttatttatttatttatttatttgagctggagtgttgctctgcctcctaggctggggtgcagtagtgcgatctctgctcactgcaatctccacctcccaggctcaagcaattctcctgcctcagcctcctgaatagctaggactacaggcactcgccaccattcctgggtatttgtatttttagtagagatagggtttcaccatgttgcccggactggttttgaactcctgacctcaaataatctgcctgcctcggcctcccaaagtgctgggttacaggcatgagccatcacacccagccttcatatatacattttgaaaaaatgtacaaccttattacataaatggccatgcatgtggtagtaacatactagacaagggtttcagggatgactcccacccacccataatcaaaatrtttaacaaagtctataatcttcaccagaaaaccctcagttaaggagtgtaattaaggtttttccccctttaaaatgtaaaatatcttggaaaaaagaaagcacttcctaatg

SEQ ID NO: 101356 - DNA, 530 bp, Homo sapiens
tttatttatttatttatttatttgagctggagtgttgctctgcctcctaggctggggtgcagtagtgcgatctctgctcactgcaatctccacctcccaggctcaagcaattctcctgcctcagcctcctgaatagctaggactacaggcactcgccaccattcctgggtatttgtatttttagtagagatagggtttcaccatgttgcccggactggttttgaactcctgacctcaaataatctgcctgcctcggcctcccaaagtgctgggttacaggcatgagccatcacacccagccttcatatatacattttgaaaaaatgtacaaccttattacataaatggccatgcatgtggtagtaacatactagacaagggtttcagggatgactcccacccacccataatcaaaatgtttaacaaagtctataatcttcaccagaaaaccctcagttaaggagtgtaattaaggyttttccccctttaaaatgtaaaatatcttggaaaaaagaaagcacttcctaatg

SEQ ID NO: 101357 - DNA, 584 bp, Homo sapiens
gtggttgactagagagaaggggtttgggattctggcatttgtaaattcttaagctggaagttagttttacaggagtttatttcatagttatttattaaaccaaaattgtcttataaatttttctgtatgattatgttttgcaataaactgttttaggagtaaaagaaattatttagttggccaacactcagaagatgagttccaattatggccacgttggcttctgtgttaaacagtaatcacattccttcctctccacatcatgtttcctgcttctccattatttcttccctgttcccattgtgtctgggttataatctcaagtaataacaaacccaagcttttttaaattattatctcttagtgaattcttcttttttttctcctaattttgcttgaacctattttaactstctgacatcttacctttagtgatcaccttcgagatagaaatcatcttttgtctgtgggtcatcttttatttcaagttttctagtcttccagagtttcacactcctgttttattaaacaataatgattaacttgacttgggaaatcaccactgtagtccttaactatataaa

SEQ ID NO: 101358 - DNA, 667 bp, Homo sapiens
cctactgcatggaagattgaaagggatatattttaaatgactagtcttaataagtactcaataaaatatcactaatatwatttaatctgggtttctattagatcaaacagttactacttttcattctaattttttttttttttgcaaacttagatcctgtactggaaactgattttaaaattgtgtgcaaaaagagagagaaataatatgttcattttgggggttattataacagcttgttagtaatattttgaaattagaaaaatattgacaataaaaccaggggccctaaatcatttcctcaagctcacaccttgagctagtatcagaagcaaatagaaaccttgtcttttaacttccaatgactgtaccatatatttacatatcataatttgtgcaaagctttttaaatacattttcctctcaattagtacttaaaattataactctatgaatttaatttttaaaattctcaacttgttcaatattttggggctgcctttcctttaaaattttcaaaaaaatacgccagtatatcccaaactcctttacctacaataggaagatcagttagaataaatccaaaagcttaataaaaacgggacactgaagggagaattttttatgggattcattttaaacgtttatgtaactctttgagaagtcg

SEQ ID NO: 101359 - DNA, 624 bp, Homo sapiens
ttaatctgggtttctattagatcaaacagttactacttttcattctaattttttttttttttgcaaacttagatcctgtactggaaactgattttaaaattgtgtgcaaaaagagagagaaataatatgttcattttgggggttattataacagcttgttagtaatattttgaaattagaaaaatattgacaataaaaccaggggccctaaatcatttcctcaagctcacaccttgagctagtatcagaagcaaatagaaaccttgtcttttaacttccaatgactgtaccatatatttacatatcataatttgtgcaaagctttttaaatacattttcctctcaattagtacttaaaattataactctatgaatttaatttttaaaattctcaacttgttcaatattttggggctgcctttcctttaaaattttcaaaaaaatacgccagtatatcccaaactcctttacctacaataggaagatcagttagaataaatccaaaagcttaataaaaacgggacaytgaagggagaattttttatgggattcattttaaacgtttatgtaactctttgagaagtcgtaagctttccttttattttagattatgttactggatta

SEQ ID NO: 101360 - DNA, 635 bp, Homo sapiens
caatactggctgcacatttcctgagcacatgtatgtcctcctagattcatatttgatataatccagtccaaaaaccataaattgtgcccaagttatttwttctttaaacaattttttagagaaaggggtctcactgtctctaggctgcagtgcagtggtgcaatcctagctcactgtagtcctgaactcctgggctaaaagtgatcctcccacctcagcttcccaagtagctgggactataggtgtgtgccactatgtctgactaattatttttatttttttttaagagatgtgtgtgtgcggggggaggggggtctcactatgttgctcactctggtcttagacacctggcttgtacacaagtttttgtgtttcttttttttctgcccagtttccacctcttggacaggtagaacttgagcatcggtgttctgagacaaattagaagggcattcaacagagctagccctctctcattcctaagacactttggttcttccataataccttctccaggttttccatctctagctctgaccgtcccttggcagtcatttgaaagctttcctctctacctggcttttaccttttgaaatatgaacagatccatttcagggtcatcttctcacttgctt

SEQ ID NO: 101361 - DNA, 635 bp, Homo sapiens
caatactggctgcacatttcctgagcacatgtatgtcctcctagattcatatttgatataatccagtccaaaaaccataaattgtgcccaagttattttttctttaaacaattttttagagaaaggggtctcactgtctctaggctgcagtgcagtggtgcaatcctagctcactgtagtcctgaactcctgggctaaaagtgatcctcccacctcagcttcccaagtagctgggactataggtgtgtgccactatgtctgactaattatttttatttttttttaagagatgtgtgtstgcggggggaggggggtctcactatgttgctcactctggtcttagacacctggcttgtacacaagtttttgtgtttcttttttttctgcccagtttccacctcttggacaggtagaacttgagcatcggtgttctgagacaaattagaagggcattcaacagagctagccctctctcattcctaagacactttggttcttccataataccttctccaggttttccatctctagctctgaccgtcccttggcagtcatttgaaagctttcctctctacctggcttttaccttttgaaatatgaacagatccatttcagggtcatcttctcacttgctt

SEQ ID NO: 101362 - DNA, 635 bp, Homo sapiens
caatactggctgcacatttcctgagcacatgtatgtcctcctagattcatatttgatataatccagtccaaaaaccataaattgtgcccaagttattttttctttaaacaattttttagagaaaggggtctcactgtctctaggctgcagtgcagtggtgcaatcctagctcactgtagtcctgaactcctgggctaaaagtgatcctcccacctcagcttcccaagtagctgggactataggtgtgtgccactatgtctgactaattatttttatttttttttaagagatgtgtgtgtgcgggggsaggggggtctcactatgttgctcactctggtcttagacacctggcttgtacacaagtttttgtgtttcttttttttctgcccagtttccacctcttggacaggtagaacttgagcatcggtgttctgagacaaattagaagggcattcaacagagctagccctctctcattcctaagacactttggttcttccataataccttctccaggttttccatctctagctctgaccgtcccttggcagtcatttgaaagctttcctctctacctggcttttaccttttgaaatatgaacagatccatttcagggtcatcttctcacttgctt

SEQ ID NO: 101363 - DNA, 635 bp, Homo sapiens
caatactggctgcacatttcctgagcacatgtatgtcctcctagattcatatttgatataatccagtccaaaaaccataaattgtgcccaagttattttttctttaaacaattttttagagaaaggggtctcactgtctctaggctgcagtgcagtggtgcaatcctagctcactgtagtcctgaactcctgggctaaaagtgatcctcccacctcagcttcccaagtagctgggactataggtgtgtgccactatgtctgactaattatttttatttttttttaagagatgtgtgtgtgcggggggrggggggtctcactatgttgctcactctggtcttagacacctggcttgtacacaagtttttgtgtttcttttttttctgcccagtttccacctcttggacaggtagaacttgagcatcggtgttctgagacaaattagaagggcattcaacagagctagccctctctcattcctaagacactttggttcttccataataccttctccaggttttccatctctagctctgaccgtcccttggcagtcatttgaaagctttcctctctacctggcttttaccttttgaaatatgaacagatccatttcagggtcatcttctcacttgctt

SEQ ID NO: 101364 - DNA, 533 bp, Homo sapiens
atcaccacatgtatcacaaccccatgtatcttggcatgacacaagtattagctaggaaaaaagtctcttggcatgatgtaatccaagagctcaagccttcccattagcccagaggaattcaagaaaggaattcaagagacaaattcaagggaccaaacctcacagaactgacacaaaactttccccaagcaactggcatacagtatgtgttccatactagttgttcagaaatatgacctaatgtctagatcatctaggagttttttagaactacaattcctaggccccattttggacctactgaattggaattttgggggacaaggccaagaattttgtattttaaaaggcctatgagtgattctaatggttagctgggtttgggtctactttagaccacgcagggccaccaaagacacttccttctcctataaagtacctsactgtttaggcataaaggaaacaagtgatgtatgtgactcacactggcctggcagggaaagtgttgactacttccttggacatcctgatag

SEQ ID NO: 101365 - DNA, 622 bp, Homo sapiens
aaaatgtaattcattgtcattttagtttacattactgtacattacattacattgttaattacttctcattggctagcaagattgaacatctgtgtatgtttgtatgcataagattttctcatctgtcaattgcttacatgtgtccattatatatttgaaaggcttttcatattctctggatacaattctctkttttggtaaaaaaaatatattttttagtatattacttgtattttaatgttgattatactatgttttattatatgagttataaatgataatgtagccatatttatcaaatatttcctttattattcatacaaattttgtcttgtgaaataaattattctccatcccaaggtttgggatgctaggttttgtttgcataaattttattcaggattatatacatatatgagtatataaatattatatatacatatatgtacaaatacacatacatttcatacatattatatatcaatgaagacatgtaatgtactatgcatataaaatattgacaaatattacaataattatataattggtcatttaactcaaataactaaaaaactgacaaattattcccaactctttgtgttgctgttgtcttacatataaa

SEQ ID NO: 101366 - DNA, 592 bp, Homo sapiens
cttttgcaccacttccagaataaaatgttttacagtgattggcagagttttcaagaggaaatataatgatatgcaagaaagagagagattgttctatttagatccttaggactatcaggaattgactacataattgtggaacctattggaaaataaaattacatggaatcttayttaatgtcattaagagtttcaaaaatgacacactagaggattaaactaagtctgggattcatctatgtccctggcagtgagactgggccaattgcttgcccatgaagtcagtctggcaagaatatttaagtttttaattttaaattgttatggatacatgacagttgtacatatttatgaggtacatatgatactttaatacaagcatataatatgtaatgatcaaatcagggtaattgagatattcattacattaagcatttatcatttatttgtgttagaaacattccaattccactcttttagttattttgagaggacaataaattattgttaactatagtcatcccattgtgctatttaacacagcatcttattccttctatctaactgtatttttgtattgaataactgtccc

SEQ ID NO: 101367 - DNA, 569 bp, Homo sapiens
gtaaacatcatagaactaaatgaaaaaaaaatcaattcttttatgtaaaccaaacctaattcttttatttcttgttgtcttgaagttgaataaaaaataattaattagttcctgatcaaactacatttgtccttttaaaattttactacccacatttaaaaatacttaagtaacactttatgagatttcagagttcttctcacatgtrctacctgacgtcgatctgaattacaaagaaaaaacatcagcatgcttctaaatcagcccacaaagggactgcagctatttcacctgtgctcccatcatctggtgaagggtataattattatcaccataaacaagcatttataatttattacatactaatataggctatgtcctataaacttataatagtttatttacacagattttataatttatgatgcattttaatatacagtacattatcctattttaactccataataaacttagaagtaaaaagaaagggcattttggtggctattttttaatatgaggaaaatgaggccaagataaacaatgcggtgtttcgagaacatcatgtt

SEQ ID NO: 101368 - DNA, 487 bp, Homo sapiens
caaacttagtatttttcaaacttgttctggcttaccacaaaacaaaacaaaacaaaacaaaagatttacttctactcttctgacagaaaattaatattgccagcaatctagattattcccagatacatctaaaactgcaaaatattaaactaggagaaaaaaatgaaaaatgaatcagactaatagataatttatatagaaaaaacaaaaaattaataatgtaaaatacagaattaaaagaatcaatttactgccttaacattttttactgtaaaaatattgctacctttcattgattatttaaattgagcagatgacactataaaaaacaaacagccyctaattttataatattcatattagtaatttaattcactcaaagtttaacatttatttttgatactttatatgtcatcaaaaggaaaccttttgatcaaaactggctgtgttacataaaatagttacatatttctgacgccttcttcct

SEQ ID NO: 101369 - DNA, 623 bp, Homo sapiens
cttatctcaattctcttctctccactccaggttcttgcattytcaaattccttgctatcacagtttctctttttttgtgtgtttatttatttttggcttatcttttttaccttttatatttagttgacacataatcattgtacatatttattggctagagagtgatgttttgatatacgtatacaacatgtaatgatcaaatcagggtcatcagcatgtatatcaactcaaacatttttcacttcttcatgttatgaacattcaagatcttctcttctaggcttttgacaatgtacgataaagtaaagttagccatattcaccctgcagtgctgaagaacaccagaattcattcctcctgtctagttgtaattttgtattccttaaccagcctctccccatcttcctgtctccgttacctttcccatccgctaggtatctgattccagctactacaatacaatgggaagcacgcttgtattttctgaaacataacaaatttgaatggcagcagaaaattcatatagaattacctatcttgagctcatgagaaattttgagataaatatgaacaatttatatttgagatttatttatctgtatttaccagtatctgtatttaca

SEQ ID NO: 101370 - DNA, 623 bp, Homo sapiens
cttatctcaattctcttctctccactccaggttcttgcattctcaaattccttgctatcacagtttctctttttttgtgtgtttatttatttttggcttatcttttttaccttttatatttagttgacacataatcattgtacatatttattggctagagagtgatgttttgatatacgtatacaacatgtaatgatcaaatcagggtcatcagcatgtatatcaactcaaacatttttcacttcttcatgttatgaacattcaagatcttctcttctaggcttttgacaatgtacgataaagtaaagttagccatattcaccctgcagtgctgaagaacaccagaattcattcctcctgtctagttgtaattttgtattccttaaccagcctctccccatcttcctgtctccgttacctttcccatccgctaggtatctgattccagctactacaatacaatgggaagcacgcttgtattttytgaaacataacaaatttgaatggcagcagaaaattcatatagaattacctatcttgagctcatgagaaattttgagataaatatgaacaatttatatttgagatttatttatctgtatttaccagtatctgtatttaca

SEQ ID NO: 101371 - DNA, 595 bp, Homo sapiens
actgcactccttttttaaagggtttgttttctgatctccccagcatctagaactatatctagaacataagtatttgttgaataatgaataaatttgaatgctcattccatcatgtctgtctccattcattcagactgctataacacaatgccttatgctsggtatttatttcccacagttccagagaccaaaagtccaagatcaaggcccagtagatctggcatctggtgagggccctcttccctgtttgaagatggccatcttctttttgtgccttcacatggtggagagcagggagagagcaagcaagctctacatctcttcttgtgaagacaccaatcccaatcatcaaggccttcatgacctacttatctcccaaaggctctacctcctaatatcatcactttgggggtacacaaagattcaatccatagaagtggtctgtgtgtattaccttaaacgtggaacttgaactctctaaagtcacatttcttcattgataaaatggtgacattaaaaaaaaaaatctgtctcattctgttgttgctaaattaagtgacatgatatgtgtgaactatcttccattgtgccagaa

SEQ ID NO: 101372 - DNA, 572 bp, Homo sapiens
tcctttcatgaaagatttctctgtaccatgtgatgctgtttgacagtattttacccaaagtagagctttcaaaattggagtcaatcctttcacatcctgccactgcttgatcaactaagtttatggaatattctaaatcctttgtcatttcaacagtgtttatgacatcttcattaggagtggatttcctctaaagaaaacacttttttttyctcatccataagaagcaacttctcatctattacatttttatcatgaggttgtagcaattcagtcacatcttcaggctttatttttaacttgagttctcttggtatttctaccatacctgcagttactttctccactgaagaaagtagtggaagtcttgaagcccttaaagtcatccacaagggttggaattaacttatcccaaacttctgctaatgttgacattttgaccttctctgataaattataaatgttcttaatggcctctagaatggtaaatcatttacagaaatttttaaatttactgtgcccagatccatcagaggaaacactatctatggcagctatagccttacaaaatg

SEQ ID NO: 101373 - DNA, 626 bp, Homo sapiens
acaaggacaatgccggtgtgaggacactttttttagaagaaacgtcaaggtaaacataaacttcattgtatgttaaatggtacaatttatgtttctaatgattatatccaacttctgttgcaaaaagccttaggacacaaaatagattgaaacaaaatcatatatccacattcacaagtaatataggagacaaagatgtgtttcccttaagactcttaaaactctgttcttcttatcttttcaaggatggacaaagacagaaacgggcaactcaccagatatgttgcatttctcctttcagatataattgacaacattccagaaatagaaaactgttcaaaaaggaggaaaaaaaagccacaatgagtttcttgttttcaatgtgtcctttttaaccccatcttccaaacataggtaamatttggggtactcgataaagttacttattaatgtcacctgtgagcccaatattttcttattcttattttctatagagtgcttctcagaattaaatgtgtatacgaataaggctgggtgtggtagctcatgtctgtaatcccagcactttgggaaaccaaggcgggggaatcaccggaggtcatgagttcaagaccagcctgaccaaa

SEQ ID NO: 101374 - DNA, 626 bp, Homo sapiens
acaaggacaatgccggtgtgaggacactttttttagaagaaacgtcaaggtaaacataaacttcattgtatgttaaatggtacaatttatgtttctaatgattatatccaacttctgttgcaaaaagccttaggacacaaaatagattgaaacaaaatcatatatccacattcacaagtaatataggagacaaagatgtgtttcccttaagactcttaaaactctgttcttcttatcttttcaaggatggacaaagacagaaacgggcaactcaccagatatgttgcatttctcctttcagatataattgacaacattccagaaatagaaaactgttcaaaaaggaggaaaaaaaagccacaatgagtttcttgttttcaatgtgtcctttttaaccccatcttccaaacataggtaaaatttggggtactcgataaagttacttattaatgtcacctgtgagcccaatattttcttattcttattttctatagagtgcttctcagaattaaatgtgtatacgaataaggctgggtgtggtagctcatgtctgtaatcccagcactttgggaarccaaggcgggggaatcaccggaggtcatgagttcaagaccagcctgaccaaa

SEQ ID NO: 101375 - DNA, 626 bp, Homo sapiens
acaaggacaatgccggtgtgaggacactttttttagaagaaacgtcaaggtaaacataaacttcattgtatgttaaatggtacaatttatgtttctaatgattatatccaacttctgttgcaaaaagccttaggacacaaaatagattgaaacaaaatcatatatccacattcacaagtaatataggagacaaagatgtgtttcccttaagactcttaaaactctgttcttcttatcttttcaaggatggacaaagacagaaacgggcaactcaccagatatgttgcatttctcctttcagatataattgacaacattccagaaatagaaaactgttcaaaaaggaggaaaaaaaagccacaatgagtttcttgttttcaatgtgtcctttttaaccccatcttccaaacataggtaaaatttggggtactcgataaagttacttattaatgtcacctgtgagcccaatattttcttattcttattttctatagagtgcttctcagaattaaatgtgtatacgaataaggctgggtgtggtagctcatgtctgtaatcccagcactttgggaaaccraggcgggggaatcaccggaggtcatgagttcaagaccagcctgaccaaa

SEQ ID NO: 101376 - DNA, 491 bp, Homo sapiens
ctggcaatctcagtcatctctttctttcacctcgctcatctaaccattttctcattatcactgaattctgtaagacgatcacaaaccgaacaatgggtaactgctggcttacacatgtaaaagctcacaagtaggacagatcttaagaatagtttgctgcagaaattcaaggtatgacaagtgctccacatccaattccctacacttctgaattctgctcttctctgagtggtggcttcatcctcaggctgaatgcctttttaaaawcaccaaagatttcagaggtctagccctcagatgtgtgttccacataatagaggaaaagaaaacctcttgtccaagcatttcaaactctggtccatgtttgcctgaatcaatcaatatggtcagtgggacagacttaattgattatctcagcaattctcaaatggttcgatcttaaaagttttcactcttaaaaattattgaaggtccccaaaagcttttggttt

SEQ ID NO: 101377 - DNA, 593 bp, Homo sapiens
caggttgctgtttgcttctcatgtcagcactatggctcagaaggaagcaccatagccgcagtcaccccagggaagtatgaggcacagtctccaacaccactgaggcatcgccgctgcaagattgattctgccttaggggaggcaagacaaggctgaatgtrcaatgtgtaactaccattcgctgagcctccattgttaagcaatctttgtgtcaggtgctttacgcatgttatatgccttaccttcagagcaactctagacaggttttacaagccccactttgcccaggaggaaactgagacccagagagattgattattatatacaagctttcttaataagaaaattactgagttgaaatgaaactcagttatctgatgccatgctcttttcacaacactacttaaatgcaaacggtcccctctcctgaaacctggcatgcactggctcctggataagcttctccttgactatagactcttaggggctaaagaaatgagagcacaacagaatattgagtttcaagttactcagaactccctcaggaaaacttccttgttttacaaatgcagaaaataaaccccaaggggata

SEQ ID NO: 101378 - DNA, 608 bp, Homo sapiens
gtcttcacctctgggtactagaccatatcaacagttattcaacatcttctcacttgatacttcaaaatttaaaatttcaaagtcatctcacatagcatgtccagagccaaatttaaggattgcttcttccaaaattgaccttcttccagtgttcctgtgttagaaaactgagccactattcattcgttttgcaaatcagaagcctagaaattacccttggaacctcaatctctctcactattactagctcctgccaatttacctaccacatatctcttagcattgtctctttctcttcaacttctttgtcagcatccaattcaacctaccattatctctcactggatctctgcaaaagtcccctagctacttttgtgcttccactctcacatctttccaatttrtcctccatatggaagtgaagaagacttcctactactgagacatggattataaaacacctcccaccctcaaacaaagcttaaaatgaaaacctctcaacagtagaagaatcttcactgcttttaggataaaaaaaaaaacaaagcctttgataacaagacctcctaggctatgtgagctctgagccctagctcaccaggaaaacc

SEQ ID NO: 101379 - DNA, 608 bp, Homo sapiens
gtcttcacctctgggtactagaccatatcaacagttattcaacatcttctcacttgatacttcaaaatttaaaatttcaaagtcatctcacatagcatgtccagagccaaatttaaggattgcttcttccaaaattgaccttcttccagtgttcctgtgttagaaaactgagccactattcattcgttttgcaaatcagaagcctagaaattacccttggaacctcaatctctctcactattactagctcctgccaatttacctaccacatatctcttagcattgtctctttctcttcaacttctttgtcagcatccaattcaacctaccattatctctcactggatctctgcaaaagtcccctagctacttttgtgcttccactctcacatctttccaatttgtcctccatatggaagtgaagaagacttcctactactgagacatggattataaaacacctcccaccctcaaacaaagcttaaaatgaaaamctctcaacagtagaagaatcttcactgcttttaggataaaaaaaaaaacaaagcctttgataacaagacctcctaggctatgtgagctctgagccctagctcaccaggaaaacc

SEQ ID NO: 101380 - DNA, 603 bp, Homo sapiens
tggttttactccgctattgtgtccattgttatttgtggcaattgtcaaattcaattcataaattattatgtttctttatttctgaacaaatgagttatcaaatatcttcctggtgactctcataaggtatatttcttactgtaattcgtgcagtgtgatgatcaagagccagtaagatgcacattagataatttcaagattctctatagagactagtcattgggaagccaaagaaagataaggaggaagtatctccagttatacataaaaatatattttctattatgcttcttttccatttataaaaaagtatcttattcagtttattcaatgagacaatcagagagaaagacagggaaacagaacagaaaagggagagtgagggaaatgataaaaaaaaagtagcctgatgaataaaagaaagaatggtgggaaagagataggaaagaatgaagaaagagaacaagagggaaggaagggaggaaggcaaagaaggaggaaggrtgaaaagaagggaggaagatgggagaaagggagtgaggtttttctttcatttgggaaacatttcagtggctcttccttgccttaaatgatgaagagatt

SEQ ID NO: 101381 - DNA, 585 bp, Homo sapiens
gagaatcataatattatctatctcattgggtgattatgaggattaagtgagttagttcatttaaggaacttagaatagtgcctggaacatagcaagtgcttcttttttttctctttttttctttattcttttccactactctgcacactaagtgcttaatagacgtttacaatgactattctctcagaagtttatcatcatttatttatttaaggggcatgtattgagyttctactatgtacccaattaaggactttcagacccattcaatctcaggtacaaaggtagatggagattgtaggaagccaagatcccagaaattccagactcgacaacataaatatttgcagaactggaaggactttcagagacaccacattttacaaacaagaaaactgagattaagaaaggggaagggctcacccaagatctcaccgtggtcaagaagaaagataagaacttgaacccatgtgtttttctctctctgcccctctgtctctctacttttgggaaagcatctactgagcatccactgtgtgctgtgtgtattgggtgttatttctagtcaaagcagttaacataact

SEQ ID NO: 101382 - DNA, 511 bp, Homo sapiens
atttttaaaatgagattcaaataccagctttagtcaagtgggagtttttcaactttatccaaatattcaaatgccgttggatataaacaaacagtgtcaacttatttattgtataaattacctaagttcttaatggaatacttggggttctaaaaggagtaataaactgaacagtagtggcacaataaaaaatattttatcacaaaaacagcttttggagatcccaccatcacatccatgcatgtaccaacatccctgtccatgcagtctgctttggcaattttggttatgaacatgaactatttctttcttttctaaagtcatcttctgcacttgggtcttagatcctatcttctttcacctgttcacctattaaagaacatcactcccactatttcatcctctctcttctgttagattaawacagtcctccctactgcatcatcctccttagcaaagaaacatgttcttgtttcacccatactaaatgaaaacaaaaagaagaacaaga

SEQ ID NO: 101383 - DNA, 632 bp, Homo sapiens
agaatgctttcagttgcaagtaacagaaaccctgacttaggcccagaaataaggacagacactatttttgtaataaggaatctggaggtaggtgatcccatgctttgttttagctgctcacttatcaagcttccasattctttccatccttccagtccttcccctccaacatctttggatttggcaaagactttttgtcctcaaacttgtctcatgtccctgagatgactgcttctgttccaggcatcatatccccaaatacagtgtttaaaacaggaaagttaggaaagggagcaaacaaggacttctcccctagaaccctatctcttttactggggaggaaaatatttcctgaagcctcccaatggactttgctttctatctttttggccagaaatgagtcttcacccttagacaaattgctggcaaaggggactgttattgccatgactggcttgggctgaccaggactgtttccctgggaactgcaaggaagaaggaacattgctgttagataagcactcaccacacaattctaaggccaggggttcatcagactccatgaccaccattgctagaataccttggagaagggagaagtcaacatttattcatcgattcagacagcttgc

SEQ ID NO: 101384 - DNA, 534 bp, Homo sapiens
tttgcactgcatttatcataagcatcctgttaatattatgaaagaaatgcaagtttactgtcatgaactcagagatcctggagtgttgtgaacttcttgcaatatctgcaggcttaagttgatggtaatataagcatttaattgattatttctaatgtaatatttattagcaaatatttattaraaattcataaaatatttttcaaatgtttatgtgtattatgtctatatgtatgtatatgcatatgtacttgtgtgtatgtaattcaaaatattagaataaaaaatcttcacttttgttttctgcatattgtgctttctccgttccttttgatatgttttctttgaatcacagaaatttacaagctgggaaaaagacatttgtcatccagcctattcctcagccaagggaacaatattccccatcatttctctcgtagagctttaggatcccagacttgacatttttagccacagcacttttctattcttccccaaggagaaaatttaagtctgttagatagcagtgagtat

SEQ ID NO: 101385 - DNA, 549 bp, Homo sapiens
ggagtaaattttagtcttgactgctagtaacaagttctgataaaattggcaacttatttaatgtctttatatctcactttcctctctcgaaatagtaatgacttgctctttcattctctaaactacaaagtttttagataattaatttacatcaactcatttgccaaccaaaggcactggaccagataatgctactgatcaatttcagttttaaaattctgtgatcatttgtggattacatcggtccacaaatttggaatgaacatcatgaaatccttatctagctggaattgaagcaattatgagaaaatattttcaaactaaatgaacaattcatacagataaaaatcaaaagtctttaaatcctttttttaagttctattctgacattcctcattatcccttgatatgaccttggctgtcagagggattgtcagtctcaaaagcacayttgttctcatagcagttccaaaaatgattcaaacatattcagatatattaatagcttgatattgatatttcaaaaattgtattttttaaatacaatct

SEQ ID NO: 101386 - DNA, 612 bp, Homo sapiens
agcaaatgcagagtgtgtgaaaggagtggggagtgccacacacttttaaatgaccagatctcactcatgagaactcattatcatgaacaacatttgcctttgtggcaaaaatatttactatctggccatgtataagagaaagtttgccaacccacataaaatcacaatcctctaagcactggtttttatattttaaatgatttctgatagtttggcttttgttctttcttgtccccaaattagaaccatttacaaatcagctgataaatactggagataataggaacaatttacttggtatgttaaacaatagtatcaacacaacacatggcctctatctagccatcaacaggggatgatgtacaattactctggatggtattagtaaaattcattagatatatatttttaaggagtctcatagtataygaaagagtttctatctaaatgcagtatattaaaacctactgagttctgtatcacgttttcttctcacctattagatataagcctgcatgagtctgcatgtaggcttaaaccagctgacaaattctggtgttgcattaattatatgctggcaatgtaaatgtatagacctttaaaagaaattca

SEQ ID NO: 101387 - DNA, 612 bp, Homo sapiens
agcaaatgcagagtgtgtgaaaggagtggggagtgccacacacttttaaatgaccagatctcactcatgagaactcattatcatgaacaacatttgcctttgtggcaaaaatatttactatctggccatgtataagagaaagtttgccaacccacataaaatcacaatcctctaagcactggtttttatattttaaatgatttctgatagtttggcttttgttctttcttgtccccaaattagaaccatttacaaatcagctgataaatactggagataataggaacaatttacttggtatgttaaacaatagtatcaacacaacacatggcctctatctagccatcaacaggggatgatgtacaattactctggatggtattagtaaaattcattagatatatatttttaaggagtctcatagtatacgaaagagtttctatctaaatgcagtatattaaaamctactgagttctgtatcacgttttcttctcacctattagatataagcctgcatgagtctgcatgtaggcttaaaccagctgacaaattctggtgttgcattaattatatgctggcaatgtaaatgtatagacctttaaaagaaattca

SEQ ID NO: 101388 - DNA, 623 bp, Homo sapiens
cttcactgatttgaatgacctttcattttttggtatcctcatttttccaagacaaattctagattcttggattgagtcagtaaatatgtggtgatatattcactggagagtagaatgtttgccaaggaacaaaaatcaaaggttttattttggtgatgttatatttgagatatacactggacrtgcaagtaggagatgctaagtggtctgggagtcaaggagaggtaaagaataagataataaatttgggaattgcatatgtacgatcagtgtttatagctgggactggatgagcctacctaaaaagattgaggagagatgccataggagggaccagcattggtgtctggacactcaggattaagactgctgggtagcagaatccttccctgctttttttttcttgtttggtttatctgtattccacattattttaaaactataaataggtattatgcttaaagctattaaaaagtaattaaaaattgagggccatttacctagcttccaagtactttagttttcttagtctgttttctgttgcttataacaaaattcctgaaactggtaacttacaaagaaaagaaatttatttcttacagttatgaagaccaggaagtcca

SEQ ID NO: 101389 - DNA, 569 bp, Homo sapiens
ttattagtctatgtaccaactctattgctttctatttaaatacagaccacctcgttttggttgcaattggatccccagggaaatggaacctacctaattctaaaagatgtctatttctcctgtcaaaagataaatatgtaggaaaatgtattttgcatgaattccattatgataatagtcaaaagtgtcttttgttttgttttctactgtaaaacaattactgttttttttaggccatgattagtcttatgcatttataaagtttacttaataaattttatacaatcaactttatctaataaagtytatgaatacaataatgttaggcatttaagtttatatacaataaactttaagtatctctttttgaaaccaaagcatttgaaagcaaatcaagaaaatatctagcaaaatgtattaacatatagtacaataaaagatgagttagttttgagattacatttaacatgtattaaataaatataagtatatattattctttaaaatgagtttaatttaaaataattaaaaataaaatatcaatctgtaattttttgttttattggaat

SEQ ID NO: 101390 - DNA, 566 bp, Homo sapiens
gaatgcaagcatttaatttatagtccaatttgtcataatacttatttttgagagcttcaattattaagaatacttaagaatttaattatacttcatcatgtttcactgtgctataatgacattgacagttttatttttgttttttaaggtaaatctaagcaagagccacttttaagattttctagytcacaaagaagcagagtgaaagcatgcttaagaaatattaatgcagagagatcacgggtctcttcttttaaattaatcatcagtgaatgaatttatcatagttaaaagaggtcaagagaatcagagggaaattttaaaaaatcaaagctgaaataaaagctgttgatttcttcctcttgaaaaattgcagttacgtttttgtcacaatatattatttttaagggcagaaattagccatattagcattagttgaataatatattataaatttgacattgatagggatttttatgaataaacagataggctaaatatattaaatagggtttctttttttctttctttcttgttatgctttcagcctttctttctttacctga

SEQ ID NO: 101391 - DNA, 597 bp, Homo sapiens
ctgtttcaaacacctatttttccttctaagaagctgtatggaataacagccatcctgcgtgaggtggcattctcaaaacataactaaaggagattttattttttaaagactacttattagcagagatgtgtaagatgtaggtttaagggtattatataaaggaagagagtatccctaggctcagtagcatcttctgttaccagcccatgtccaaagggacaaaaggagggaaacttgttaaaacccagaggaacacagtcacagaagttaagcaactttgagagaaacagtacacttcggtgtaaggatagggatacaacctagtagagargggactaggacaataaatttctgacttcattctccccactcttttaacatcctatcaccaaacccaagtgagctaattagagaatataagaatcatgatgtgatctaggacagtgagcaggacagggaagggtcaaaaattaacctggagggacaaataaaaactattgagcacttttctctctctctactctacagcagaatctttcccgaggtcatttcaacaagcagcgtctccataaatgtgagagataactattcctttta

SEQ ID NO: 101392 - DNA, 605 bp, Homo sapiens
tattctcgccccatctactcatcatgggtcttttagttatttatttttaacagtaaagcaaaagcatacacaaaagctccttagaagacctaagtttctgctttcttgatgaaaactacaagaaaacttaggaaagtaagtatcctgaaaaagagatattcctatagctaacgtaaatcaatgactaggctgaccctctggagtggggcatattgccattctaattaagtcaaggtttacatattaagtaagtagagggagaatgtctttggggtaagcagataatgaattctttcatagctatgtaacctctgaamtcatggccttcatgtgccttgataattctcggacaactttaaggttatttccaatctccactgcctccttaggtaactcacttcatcagtgatgccatctctctccttaataaatcgtattccctttctactgcctctttgttcatggaattactagtctctcccattataaagataaataaatctcttctcatcccaatcactgattctaaccaccttgcaatttttctcctttcctcaatggccaagtatttctaaaatgtaattcttactcattgcatctgctca

SEQ ID NO: 101393 - DNA, 579 bp, Homo sapiens
tatagcctggtgacataagtgtccatagtgaattaggtacttgtatagtacttccgtgattagtttatmaggaatttcatccatttcactgttataactgagaagactgttctctgcagcttcagctaattcgacatcttcagtagcttctaaaatataagcatcttcaatgccattatcccagtcagtgtcagcagaagcatctgttgacaccttactagttgatggtttatgaggattctgggtttcattgctcttaatttcatctgcttcaaccccctcatcattcatgtccaaatgcccataccttttcccaaatgggccatgtgtattttgcacttgcttattcctcttccggtaacctcctctactcttctcaaccaagtgaagatgtccttcataaaactccagctcaagtgtcacatctcagggagttcctcctgttcccacagcctcccaagggctcccacagtggccatcttccctctgatctagctgcgatctcctctattggatgggttgtttgggggtcaatttcctttgttacacttgtcaaaagacaacattaccacaaatgta

SEQ ID NO: 101394 - DNA, 583 bp, Homo sapiens
ccctggaaaatatgaaggtgctattgccagaggtgagatggaggtgcaggctgaagtagtgaaactccattgtccaccacctactccagggaatgaatgcaatgtgccattggatcacaaatgaggctrtgaccaatattgctttcttatttagcaccttttagttatagtacaataataaaaacaataataaattttatttttgatttctataagtcggtactttactttctatagcagctttatatcacatcaatggcatgtgctttgttcaatcagatatgtgtatctggcatgaatttcttcactttttcctcaaggaattcctgacattccttgtcaaatacctcacttgcgtccagatacatttagaatatttgatttccataacagtcttcagctggaaattttctattggcccctgcagacctgctttccaccctgtccacactgctctgtgccccaggagctgactgcatggattacatcaatggctttttggccctctggttggattttcagttgagtttggtcaatggagacaaaggagattggaaggaaagagaaggatgagtttggaatt

SEQ ID NO: 101395 - DNA, 583 bp, Homo sapiens
ccctggaaaatatgaaggtgctattgccagaggtgagatggaggtgcaggctgaagtagtgaaactccattgtccaccacctactccagggaatgaatgcaatgtgccattggatcacaaatgaggctgtgaccaatattgctttcttatttagcaccttttagttatagtacaataataaaaacaataataaattttatttttgatttctataagtcggtactttactttctatagcagctttatatcacatcaatggcatgtgctttgttcaatcagatatgtgtatctggcatgaatttcttcactttttcctcaaggaattcctgacattccttgtcaaatacctcacttgcgtccagatacatttagaatatttgatttccataacagtcttcagctggaaattttctattggcccctgcagacctgctttccaccctgtccacactgctctgtgccccaggagctgacygcatggattacatcaatggctttttggccctctggttggattttcagttgagtttggtcaatggagacaaaggagattggaaggaaagagaaggatgagtttggaatt

SEQ ID NO: 101396 - DNA, 343 bp, Homo sapiens
tatatatatatatatatatatatatatatatacacayatgagttaattaagtattaacttacatgatcacaaggtcccaccataggcagtctgcaagcttaaagagcaaagagagccagtctgcgtctcagaactgaagaacttgtagttggatgtttaaaggtaggaagcatccagcctggcagaaagatgtaggctgggaggccatgccagtccatcctttcacgtttttctgcctgctggccactgattagattgtgcccacaagattaagggtgggtctgttttccccagcccactgactcaaatgttaatctcctttggcaacaccctcacagacaca

SEQ ID NO: 101397 - DNA, 548 bp, Homo sapiens
atatgcatgaatggaactgaaaggaaatttacactttggtcacagagtctggagacaaattaattctgggaacatggaaaacaactaagaaaataaacttgatcacacttttttgttgtacaccttttaattattctctaaaagtttaaaaagagtgatcaaaagttcattatactgcataactgtaaataatatttatatagtcattatataaacagttaagcccaagtagaaagaagctgctaacccagctcagctattttgccatgtagtaatgcagggccaagtattgccagaacttgccatgtggtgccaaattataacttctggctattctgattgagaaattaaaatggtcacattagctcacacagagaaaagctagaataagactatcaaatcaattgtgtaagacaaagatattttgggtcattcatgcccaactgggggagcccagatttcttctctgccraatagctcatgtatcaggagaatagcttgggattcaaatatcagaatgcttggacagtcatcttttgaacaaagca

SEQ ID NO: 101398 - DNA, 615 bp, Homo sapiens
gctatggaatcaaaatgttccttcaaaatgtgatctcaaccgtttgataaaggattactgaaacttgtaacacattaatttagagtttcttatgcaaaagaaatcaaatactcacatactctatgaaaaatcttagaagtaataaatgatacatrtaatctatgattccttttccagaacaggatggctagaagtgaatatagtggacttggcctcaaaacttgattctggccattggtagctgcataaatatgagccagtcagactcactataagccacagttttctcatctgtataaaatatgagattaataatccctaactcaaggttgttgtaaatatatgtctttctgtatatagatgttttgtttcatagtaggcataaacaaatcaaataatcccagtgcacccttttacgttggaaagccaatatgtggtacgatttttatagagtgttaattttttcctgaatatatgtgttcgtcaacataattaatgtttagctttgctacagtcagccaataagtcttggatcttgataacttaaaggaagcaatatttattttacaaagtcttacacaaacactttgagggatccaggctgcatccatcttg

SEQ ID NO: 101399 - DNA, 593 bp, Homo sapiens
tagtacctaccccacaggattgttgaccctgttaaaagtgttagtacacgtaaaggggttagactattttctggtacaacaaatactatctatatatttgaagatgctatgtgtgtgtgtattatatgtatgtggcagaattcttggaattttttttcttttctattttccaaatttcaaagtttttattttaaagactagaaaatcagttgggatcagttgaagcagtatttctcaatcttttttcattgtcccccaccaaggaatctttgtagactttttcttttaaattatccttcctccataaattttattaccrtatatatatactgtatatccatttatgtacttgaagggaaccagaatatgccattccaaaatatgctacattggtaaaaagataattttaagttgaagacatttgtgattgaacaaatttagaaaaggggaaaaagaaaaagcaactttgaagcttcccttttctgactaaaggagcaacttctgggaaacaagattgtcacaaatccttttcagggcatgtctactcccagaagagagagagaaaataaaacctaccccaaatctcttctcca

SEQ ID NO: 101400 - DNA, 569 bp, Homo sapiens
tttttatatttgggagtgatgctagggaatgggagatgagaagctggggatatgcatctgtagagttgaaagaagcctttggacttaaagatagctagtatccccttttctccccggccatgagttatgtgtcactgccatctgctaaacgttggaaaccaggccaggatgaatctgggcttggaggctgataactcggtgggcagaacttgtgagaggaggagagatagtgcagtgctgaagtgggatggagggtgtttcatgtctttactcctctttctacacacctggcaggtaacctcaggtaaaggaacttctaagtctcagtttcctcatgtgttaaatgagggatagtaattctcttgcatggcttttgggagaataaaatgagatgatgtaggtaaaatgtctggtacatagtaggtacatagaaaacagtagcttgaaataaagtaaaaattgtgggcattggctgaggattctagtcccagctccataccttgmtaatgtgtgaggtcaaccctcattttttttttttgagacggagtctcagtctgtcacccaggctg

SEQ ID NO: 101401 - DNA, 600 bp, Homo sapiens
tgtaaaaatatatacaaattatatgtataccttatttccaatgaatgcaacataagaagttctcaaacatacactgtgaagcagcagaaaaacaaaaaaggaatcaaagaatggcaactatgtcaactttcagaaatctggatctagatagaggccagcaactaggatatgagaaccaatagaaataaatttatacttcctgggatatgtaaatgggttaatggactaagtaacaacaacaataacaataataagcataatagctgatgcattacttgaatactatatgagagatacagtttcatcttttgtataagttatctctaattttcacatccccatgataaggattgtcattttccttaatagattatgacaccaaagcctgcggaaattagcagacttgatcaaggtcatgtaactggtagatggcacaacctgtatttgaactcaagtttagttagctctaaaatctcaacttgtgactaccttagaatctcaaaaatttaccaacrtagaaattatacaaactacactgttagtctaaaaatgcagtaatattagaaaaagaggaacaaacaaattatctattttggaatt

SEQ ID NO: 101402 - DNA, 605 bp, Homo sapiens
gacataaggccaaccatgccatgtgggagatagagtcattactcaaatcaatctccccacaaaattcagaggctagggtttctcaaggacaatttggcaggcaggggttgggggctgctgatcagctggggatgcaatcataggcatatggaaaatggttcttgtatgtgctaagtttgcttctgggtgtaaccattggttggcccaggtgcaaaaatgcaaaaacctgaaaagacatctcaaaggccaatcttaggttctacaaaaatgatgttacctgcaggagtaattagtgaagttgcaagtcttgtgacttccgaaataayggttggtaattgtttatgtctacacctagcagaattcagcctcctctcatcctcttaacctggtggtctttcactagctttacaaaggtgatacagtttcggggaagggctattattgtttaaactataaactaaatttcttccaaagtcagcttgctgtaagctcaggagagattaagggaagtttggagattagaggcaacatgggcgttggttagatcagatctctttcactgtcataattttctcacttgtataatttttgcaatggtggtttca

SEQ ID NO: 101403 - DNA, 527 bp, Homo sapiens
aagggcccttctggctttaaaactctgacttctcaaaggctaaacaaaacaaaataaaaccccaggaacagataaattcatcaaaatgaaaaaactataactcagttattagatgcaggcattggagggaagccagaaaaggctgacgcagctctcacttgcaaaggcaatctctccatcaacctccccgctccctctccggccccagctcactgctcactcaccatactcaggaagaaccaatcgaaagcataggccctccatggggaggccagactatgaggtctccaaagtagaaggggtgcctgtttaatgcattgctgagctgcagagttccaccatccatgacagttgtrggaaattttgtggcctacccacctgcaccaatgggttcctgagtggaaggattaacttgatccacatctaagatgcagcatattagaagaaagagccttgccttgcagttggagagggagccgtggagagtcagtttcaatacctcctaactgcacgactttgaacaagtt

SEQ ID NO: 101404 - DNA, 577 bp, Homo sapiens
ttggggggcagagggaggggagagagaggattagaaaaaaatagctaacgtatactgggcttaatagctaggtgatgtgttgataagtgcagcaaaccacagtggcacatcatgtttacctatgtaacaaacctgcacatcctgcacatataccctggaacataaaaataaagtcacagcaaacagatcagkgttgtctagagccaggagtggaaactgattgtgtaaaggcacaagaaaacattttgagataataaaaatatcctacacttttttaaaatttatttttatttttaatagagacaaggtctcactgtattgctgagtctggcctcaaactcctaggatcaagcaatcctcctacctcgatctcccaaagtgttaggattacagaggtgagccactgtacccagccctgatattttatatatcttgattgtagtggtggatgtaaagatatatacatttatgtgagtatacacatatatacatatatctgaatatatatttgtattatgtactcatcaaaatgaacatctgaagtgtgtgcattttattgtatgtaagctataactca

SEQ ID NO: 101405 - DNA, 577 bp, Homo sapiens
ttggggggcagagggaggggagagagaggattagaaaaaaatagctaacgtatactgggcttaatagctaggtgatgtgttgataagtgcagcaaaccacagtggcacatcatgtttacctatgtaacaaacctgcacatcctgcacatataccctggaacataaaaataaagtcacagcaaacagatcagtgttgtctagagccaggagtggaaactgattgtgtaaaggcacaagaaaacattttgagataataaaaatatcctacacttttttaaaatttatttttatttttaatagagacaaggtctcactgtattgctgagtctggcctcaaactcctaggatcaagcaatcctcctacctcgatctcccaaagtgttaggattacagaggtgagccactgtamccagccctgatattttatatatcttgattgtagtggtggatgtaaagatatatacatttatgtgagtatacacatatatacatatatctgaatatatatttgtattatgtactcatcaaaatgaacatctgaagtgtgtgcattttattgtatgtaagctataactca

SEQ ID NO: 101406 - DNA, 599 bp, Homo sapiens
ccatttcctaatgcactcccatttcacctttttcagctttgggttgctttcttcccttgatttctcatctcaatacagtggtctttactcttttatttactatgtaggaagatgttgctctctacatgaaagaatacgrattccattcactaatgcaagagacgataaacgtatgttggggaggaaaagaaaggagagaaagaaaagaatcaggtgggaatagtcactcaggttcaaagtaagaggatccagtgacagaggagtgtcctcactgccacctaagtgatgcccattttcctcagatggtatgaaggtttccatttagaaatcctaatttctttcctttagggtcatcagactgaaaacaggcatttgctatcaaaaggagggattatttgggacactaaaatgggcaatagggagtgaaagaactgagggggagcagtcatcaaaaaagacagaaaaggcgataaacatctctggttggggagacagaacgcttgtaaattagagaaatacaagacgattgaaagaaaccttaaactacctggtaatttgtatgaggctctgttggctggagcccagtgttaagagggctt

SEQ ID NO: 101407 - DNA, 621 bp, Homo sapiens
gaattcagtaaagtttcaagttacaaaatcaatgtacacaaataatgtatataaatcagcagcactgctatataccaataatgacaaaactgagaatcaaaccaataactcaatctcttttagaatagctacaaaaacatataagaatatacttaaccaagaaccaatagttctaaaaggagaactattatacaaaacatggctgaaagaaataatagatgatgcaaacacatggaaatacatcccatgctcatggattggaagaatcaatattgtgaaaatgagaccacaawgcccaaagcaatctacatattcagtgtaattcctatcaaaataccaacatcatctttcacagaattagaaaaaacaatcctaaaattcatatggaaccaaaaaagagtccaaacagccaaagcaatcctaaacaaaaagaacaatctggaggtatcacattatctaacttcaaattatactacaaggctatagtaaccaaaacagcatgttactggtttaaaaacatataaatttatgtataaagtaacaatgtcctattgagttcgcagcacgcagtgttgtgacatgtgtgctaataatagaacaaaaggagaaagggaacagagc

SEQ ID NO: 101408 - DNA, 616 bp, Homo sapiens
ccaacagcatatcaaaaagataatccaccatgatgaagtgtgtttcacaccagggatgcaaggatggcttaacatatgcaagccaataaatgtggtacactacataaacataattaaaaacaaaaatcccatgatcatctcaatggatgcagaaaaacatttaacaaagtgcagcatccctttatgattaaaaccctcagtgaaattggcatagaagggaaatactttgaggtaataaaatccrtctatgacaaacccacagccaacatcatactgcatggagaaaagttgaaaacattccccctgagaactggaacatgacaaggatgcccacttacaccacttctattaaacatggtacttgaaatcctagccggagcaatcagacaagagaaagaaagaaaggacatccatactggtaaagaggaattcaaactgtcacggtttgctgattatataattgcatgtcaagaaaaccctaacgactcatccaagaagctcctagaactggtaaaggaattcaacaaagtttcaggatacaaaattaatgcacacaaatcagtagctctgctatacaccaatgcgaccaagctgagaatcaaatcaagagctcaac

SEQ ID NO: 101409 - DNA, 596 bp, Homo sapiens
tcagtttggcctactaattctagtatatagtttaacttcaatgcttctctgtcgattttctgtctgaataatctgttctttactggggggcggtcttaaagtcccctactattatygcattgcggcctccctctctctttagatctattaatattttcttcatatacttgggagctgtcgtgttggatgaatggagatatttataattgttatatcctcttgctgaattgacctctttatcattatataatgaccgtgtctctttttatagcctttgacttgtagtctattttatctcatataggtacagctagtgctttttttttgggagggggggttccacttacaagaaatatccttggcgggggggttccacttacaagaaatatccttttccatacctttacttttagactatgtgtgtctttataggtgaagtgggtttcttgtaggcagaacatagttgggtctccttttatttttatccattcagccactctatgccttttacttggagaactgactcaatttcaattcagagttattagaagtaaggatttactactgccattttgttgcttgttttctggttgctt

SEQ ID NO: 101410 - DNA, 596 bp, Homo sapiens
tcagtttggcctactaattctagtatatagtttaacttcaatgcttctctgtcgattttctgtctgaataatctgttctttactggggggcggtcttaaagtcccctactattatcgcattgcggcctccctctctctttagatctattaatattttcttcatatacttgggagctgtcgtgttggatgaatggagatatttataattgttatatcctcttgctgaattgacctctttatcattatataatgaccgtgtctctttttatagcctttgacttgtagtctattttatctcatataggtacagctagtgctttttttttgggagggggggttccacttacaagaaatatccttggcgggggggttccacttacaagaaatatccttttccatacctttacttttagactatgtgtgtctttataggtgaagtgggtttcttgtaggcagaacatagttgggtctccttttatttttatccattcagccactctatgccttttacttggagaaytgactcaatttcaattcagagttattagaagtaaggatttactactgccattttgttgcttgttttctggttgctt

SEQ ID NO: 101411 - DNA, 523 bp, Homo sapiens
ttccttcatcatacgtccttctctgagattgttgttaggatagcgatgacaatgactttataattagctttacagctttcamattattttattatgactcatcttatttgagccccactgtaatcctaagagttaggaagagcatctttctcattgtacagatcagagagaggtgaggtgactttcccaagaatatacttatgactcaaaattctgtactctccctgtaccccaagtactatagcactgtagttaggagcactaacttggaaattctatggacttggaaatattatttaagttctacaagtctgaatattctcatcaataaaattaggagagaagtttgtatccttgaaaggcttatgtggattaaatgagataatatctaggaatgctcagtccatcatagctacaattccaaatcctttatgcctttcttaagaaaacagaaacaaaattcctggtcgttttcctgaattacaacagagactttgacattcataatttattatagtttaga

SEQ ID NO: 101412 - DNA, 523 bp, Homo sapiens
ttccttcatcatacgtccttctctgagattgttgttaggatagcgatgacaatgactttataattagctttacagctttcacattattttattatgactcatcttatttgagccccactgtaatcctaagagttaggaagagcatctttctcattgtacagatcagagagaggtgaggtgactttcccaagaatatacttatgacycaaaattctgtactctccctgtaccccaagtactatagcactgtagttaggagcactaacttggaaattctatggacttggaaatattatttaagttctacaagtctgaatattctcatcaataaaattaggagagaagtttgtatccttgaaaggcttatgtggattaaatgagataatatctaggaatgctcagtccatcatagctacaattccaaatcctttatgcctttcttaagaaaacagaaacaaaattcctggtcgttttcctgaattacaacagagactttgacattcataatttattatagtttaga

SEQ ID NO: 101413 - DNA, 523 bp, Homo sapiens
ttccttcatcatacgtccttctctgagattgttgttaggatagcgatgacaatgactttataattagctttacagctttcacattattttattatgactcatcttatttgagccccactgtaatcctaagagttaggaagagcatctttctcattgtacagatcagagagaggtgaggtgactttcccaagaatatacttatgactcaaaattctgtactctccctgtaccccaagtactatagcactgtagttaggagcactaacttggaaattctatggacttggaaatattatttaagttctacaagtctgaatattctcatcaataaaattaggagagaagtttgtatccttgaaaggcttatgtggattaaatgagataatatctaggaatgctcagtcyatcatagctacaattccaaatcctttatgcctttcttaagaaaacagaaacaaaattcctggtcgttttcctgaattacaacagagactttgacattcataatttattatagtttaga

SEQ ID NO: 101414 - DNA, 601 bp, Homo sapiens
cagtttcttcctggttctcgttcagtcttgggagggcatatgtgtcaaggaatttgtccatctcttctaggttttctagtttgtgcacagaagtggtgataatagtttctgatagttatttttrtttctgtgggggtcagtggtaccatttccttcatcatttctaattgggtttattttgctctctcttttctgctttattaatctagctagcagtctgtattcatctgttctcacactgctataaagaaataccagagactgggtaatttatttaaaaaagaggtttcattggctcatggttttgcaggctgtataggaagcattactggagaggattcaggcaacttacaatcatgacagatgttaaaggagcagcaggcacgttttacatggccagagcaggaggaagggagtgaaggaggaggtgcaatatacttttaaacaaccagatcttgtgagaactcaactcagtatcatgaaaacaacaagggggaaatctgaccccatgatccagtaacctcccaccagaccgttcctccaacactggggattacaattctatgtgagatttgagcagagacataaatccaaactatat

SEQ ID NO: 101415 - DNA, 601 bp, Homo sapiens
cagtttcttcctggttctcgttcagtcttgggagggcatatgtgtcaaggaatttgtccatctcttctaggttttctagtttgtgcacagaagtggtgataatagtttctgatagttatttttgtttctgtgggggtcagtggtaccatttccttcatcatttctaattgggtttattttgctctctcttttctgctttattaatctagctagcagtctgtattcatctgttctcacactgctataaagaaataccagagactgggtaatttatttaaaaaagaggtttcattggctcatggttttgcaggctgtataggaagcattactggagaggattcaggcaacttacaatcatgacagatgttaaaggagcagcaggcacgttttacatggccagagcaggaggaagggagtgaaggaggaggtgcaatayacttttaaacaaccagatcttgtgagaactcaactcagtatcatgaaaacaacaagggggaaatctgaccccatgatccagtaacctcccaccagaccgttcctccaacactggggattacaattctatgtgagatttgagcagagacataaatccaaactatat

SEQ ID NO: 101416 - DNA, 608 bp, Homo sapiens
tggtcacttgaatttttttgtgtgtgtgcctcttgatttccttcaattcaactctggttttggttatttcttgtcttctgctagctttggggttgattgctcttgcttctcaaattctttcagttgtaatgttaagttgttaatttgtgatctttctaactttttgatgtgggcatttagtgtgatgaatttccctcttaacactgacttagtagtttcccaaagattctgatatattatatctttgttctcattagtttcaaagaacttctagatttctgtctgaatttcattgtttatccaaaagtcattcaagaacatgtcgtttaatttccatgtaattgcatgattttgagtgatttttctgtcttgacttcatttttttattgcaccacggtccaggagtatgtttggtataatttcaggttttttgtgtttgctgaggrttgtttcatgtctaactatgtggtcaattttagagtatgtgccatgtggcaatgagaagaatgtatactctgttatttttgggtggagagttctgcagatatctatcagatccatttggtccaatgttgagttcaggtattgaatatctttgttaattttat

SEQ ID NO: 101417 - DNA, 344 bp, Homo sapiens
gggtctgggcagcccctccctcagcctgagggaggctgaagggtctgcagtcccagtcgctcccccatggccaagctggcacttccctccaacaggcacagaatcccggggcccagacacctgctccttcctggagctcagcaccaccttcctttcagaacrctgggcctgggcctgtcctcagctgctgctgccctgcagcccctgctgggggtcttccagccctgcctccctggggtctccctccataccctctgtctacactgttctcacacagtccagggcaccatcttctctccccagacactgcacagctgctccagtctcctggacccagaccctcc

SEQ ID NO: 101418 - DNA, 344 bp, Homo sapiens
gggtctgggcagcccctccctcagcctgagggaggctgaagggtctgcagtcccagtcgctcccccatggccaagctggcacttccctccaacaggcacagaatcccggggcccagacacctgctccttcctggagctcagcaccaccttcctttcagaacactgggcctgggcctgtcctcagctgctgctgccctgcagcccctgctgggggtcttccagccctgccyccctggggtctccctccataccctctgtctacactgttctcacacagtccagggcaccatcttctctccccagacactgcacagctgctccagtctcctggacccagaccctcc

SEQ ID NO: 101419 - DNA, 344 bp, Homo sapiens
gggtctgggcagcccctccctcagcctgagggaggctgaagggtctgcagtcccagtcgctcccccatggccaagctggcacttccctccaacaggcacagaatcccggggcccagacacctgctccttcctggagctcagcaccaccttcctttcagaacactgggcctgggcctgtcctcagctgctgctgccctgcagcccctgctgggggtcttccagccctgcctccytggggtctccctccataccctctgtctacactgttctcacacagtccagggcaccatcttctctccccagacactgcacagctgctccagtctcctggacccagaccctcc

SEQ ID NO: 101420 - DNA, 344 bp, Homo sapiens
gggtctgggcagcccctccctcagcctgagggaggctgaagggtctgcagtcccagtcgctcccccatggccaagctggcacttccctccaacaggcacagaatcccggggcccagacacctgctccttcctggagctcagcaccaccttcctttcagaacactgggcctgggcctgtcctcagctgctgctgccctgcagcccctgctgggggtcttccagccctgcctccctggggtctccctccataccctctgtctacactgttctcacmcagtccagggcaccatcttctctccccagacactgcacagctgctccagtctcctggacccagaccctcc

SEQ ID NO: 101421 - DNA, 614 bp, Homo sapiens
actctgtttaacctgaacaacaaccaagtgagggaagaaccacccctcccactcacaggtgagaggactgaggctcagccacagaggggctgccgagatctgcccagggccagccctgggtcttggtttctggtgggttctggcagatctgacgccagctccctccttggggagggacattgcctgctgtgatgcggtagtgcaggggattgtcagtttcygattagactcagaacctcccttcaggaggccatggagcacgctggggtcctttggtccagtcttgacctttcccacttactcccaccaggttctgagttcatccctactccagaaaggtcagacactgggtcacctaacaaggccagagcccctgccagtccctcctcactttgttagaaatcaggcgcatcacagacttctgctgacccttagatcacagcagaactttgggccccagaggcccctgactctgccaatggccctttccaacagcaagatttgttaactcatcagcagggaagcagctgcgctccaacaacccctgggcttatgcagcaccttctgcgcatcctgggtcccctgtggccgggccagtctctgctcctgccagc

SEQ ID NO: 101422 - DNA, 614 bp, Homo sapiens
actctgtttaacctgaacaacaaccaagtgagggaagaaccacccctcccactcacaggtgagaggactgaggctcagccacagaggggctgccgagatctgcccagggccagccctgggtcttggtttctggtgggttctggcagatctgacgccagctccctccttggggagggacattgcctgctgtgatgcggtagtgcaggggattgtcagtttctgattagactcagaacctcccttcaggaggccatggagcacgctggggtcctttggtccagtcttgaccyttcccacttactcccaccaggttctgagttcatccctactccagaaaggtcagacactgggtcacctaacaaggccagagcccctgccagtccctcctcactttgttagaaatcaggcgcatcacagacttctgctgacccttagatcacagcagaactttgggccccagaggcccctgactctgccaatggccctttccaacagcaagatttgttaactcatcagcagggaagcagctgcgctccaacaacccctgggcttatgcagcaccttctgcgcatcctgggtcccctgtggccgggccagtctctgctcctgccagc

SEQ ID NO: 101423 - DNA, 524 bp, Homo sapiens
ctttaacatataccagtttaatgtgagggaaaatgctcattttatccaacactgtttttgttgttgttgttgtttttgtttttttgtttgttccccaaaagggagataatccaatctggttcttcagaccatgtatcaktggttgggctattgctactagtggtcagggccactgtgcatcttttctttctactttcttttccttgtctctaggacttgtaagggaactgagttgaactcgtatatgggagggtcagttctccatcttatatctctctgcttcctattagaacattccctaaaccttaggaaatcatcctgattggattgcatctggtaagatagagaagccttcctagggcttgagtctgaagtgatgtgtttgatccaggttacgagaaagtcttgcatttgggtattcctactctcccactaagaattaaagcaacattttgggtttctgtttcatagtactgtatgtatttagcttcctcagcaatcatataagaaatatttgatgaaag

SEQ ID NO: 101424 - DNA, 567 bp, Homo sapiens
aaactccaccttctcactattgttgaaagctccgttatgaccttctattccactactccctgacctcgattctaccttctctcctcttaaactattctagacatattttgcagttttttgtacacataatgaaagcaygatcacgcctccagccttttgcacttggtcttccctctgcctacatcagtctcctcccagatagtcacgtcttactctctctttacattcaattgtcactccattcaagagtccttggtctcccaatctaaaataactgtaaccatactctctcaaaacctttattcatttttattcatctatatgatatgtattattgtctggcatatttttaattgttcattgttttcaatttcatctcctttccagcaagcatatactctgcataagcatgtctggtttattcacttctgaatttgtagtacctagatcagtgtctggcacacagtaggtattcaacaaatttattgaatcagtgaataactaggtgattgaataaatatgtgaatgaatacatggtgggtaagcatcaactaaaattggtctctc

SEQ ID NO: 101425 - DNA, 567 bp, Homo sapiens
aaactccaccttctcactattgttgaaagctccgttatgaccttctattccactactccctgacctcgattctaccttctctcctcttaaactattctagacatattttgcagttttttgtacacataatgaaagcacgatcacgcctccagccttttgcacttggtcttccctctgcctacatcagtctcctcccagatagtcacgtcttactctctctttacattcaattgtcactccattcaagagtccttggtctcccaatctaaaatarctgtaaccatactctctcaaaacctttattcatttttattcatctatatgatatgtattattgtctggcatatttttaattgttcattgttttcaatttcatctcctttccagcaagcatatactctgcataagcatgtctggtttattcacttctgaatttgtagtacctagatcagtgtctggcacacagtaggtattcaacaaatttattgaatcagtgaataactaggtgattgaataaatatgtgaatgaatacatggtgggtaagcatcaactaaaattggtctctc

SEQ ID NO: 101426 - DNA, 619 bp, Homo sapiens
  misc_feature (1)...(619): n = A,T,C or G
gtgacaatgattgcacaattttgtgaatatatgaaaaactgtatactttaaacagatnaattgtatgctatgtgagtccatctcaataaagctgttatttctaaaatgccaattgcttccattttacatttcttgtcaatatcatgttaaatgaaatgaaaaaacaggtgcgaaaatagaacggccattcctgatataaagtaatcaccaagataacccagattatgtatttattctttacaatttccatcaaaatcatggctcaatcttagcaaagtcagggaaggaatcacatttttctagttctcagaacaatgttctttmtagtacaccaccataacacttaataatttctcctgatttatcgcattcaccagatagtacagagaatatcactccgtggaatcctgcagtgcactacacaaacagcagtacacagtgaccctgattggatcaccactccaaaatgtaaaagaggtctattattaagtatttgaactctcaaatgttatatatgccctgatttgcttactgggactaaccatatatcttgcattctattatctttgcccaggaccataaaatcagcattaagaaaatcaaagcatttactgacagc

SEQ ID NO: 101427 - DNA, 553 bp, Homo sapiens
tctagggggagggggtgtagaaaagataatatagtcagctccagaaatatagaatcagtgtctttgaaaagaagtgtctcagtttattcatccatcaaatattgcttcagtatctatcatataagaagcactctactagttgctacaaacaacaattactggaagagaccatctttgtcttcttggagcttacagcctggtggggaggratactgtgggctatataacctcttcacatcacacaaatcatataaaatgatggaatattaaagctagaatgaaaagcatcaaatattctcaaacctaccatgaatttgaatctttcaaggttctataaaagtattgctgcttgagaaacactcaattaaaaattgattgctgaataaacagttttccaaagaaggtatacaaatggccaataagcacatcattagcaaccagggaaatgcaaaccaaaagcacattgagttactacttcgtatgcattaggttggctataatgaaaaggacaggtaataacaactgttcttgaggagaaaatggatccatcact

SEQ ID NO: 101428 - DNA, 382 bp, Homo sapiens
atggtgtggtgagtagaagcatgctactctagctgtatctcactgggttcaaatcctgactatacggcatatggtgcattaacagcccgctgaccacaagaatttctatgctggtaaaataggtttataataatgccagtyaatctaaagatgctttaagtgaagactatttggtgtttttcaaggactcaataatcattaactgtgatcacgatctttcccttacctactttcaataagtaaataatttacatttattaaacaaaagaaatttaatcttgcttttctgaaacaacacaattctatttcaattttctctacatagagggagcatctcaccgcagataaagatgtatgtatattttttctccactcgaaatta

SEQ ID NO: 101429 - DNA, 382 bp, Homo sapiens
atggtgtggtgagtagaagcatgctactctagctgtatctcactgggttcaaatcctgactatacggcatatggtgcattaacagcccgctgaccacaagaatttctatgctggtaaaataggtttataataatgccagtcaatctaaagatgctttaagtgaagactatttggtgtttttcaaggactcaataatcattaactgtgatcaygatctttcccttacctactttcaataagtaaataatttacatttattaaacaaaagaaatttaatcttgcttttctgaaacaacacaattctatttcaattttctctacatagagggagcatctcaccgcagataaagatgtatgtatattttttctccactcgaaatta

SEQ ID NO: 101430 - DNA, 382 bp, Homo sapiens
atggtgtggtgagtagaagcatgctactctagctgtatctcactgggttcaaatcctgactatacggcatatggtgcattaacagcccgctgaccacaagaatttctatgctggtaaaataggtttataataatgccagtcaatctaaagatgctttaagtgaagactatttggtgtttttcaaggactcaataatcattaactgtgatcacgatcttycccttacctactttcaataagtaaataatttacatttattaaacaaaagaaatttaatcttgcttttctgaaacaacacaattctatttcaattttctctacatagagggagcatctcaccgcagataaagatgtatgtatattttttctccactcgaaatta

SEQ ID NO: 101431 - DNA, 382 bp, Homo sapiens
atggtgtggtgagtagaagcatgctactctagctgtatctcactgggttcaaatcctgactatacggcatatggtgcattaacagcccgctgaccacaagaatttctatgctggtaaaataggtttataataatgccagtcaatctaaagatgctttaagtgaagactatttggtgtttttcaaggactcaataatcattaactgtgatcacgatctttcccttacctactttcaataagtaaataatttacatttattaaacaaaagaaatttaatcttgcttttctgaaacaacacaattctatttcaattttctytacatagagggagcatctcaccgcagataaagatgtatgtatattttttctccactcgaaatta

SEQ ID NO: 101432 - DNA, 481 bp, Homo sapiens
ataagtctatctggatagccatatcaggacagacatggctgagaacaaagcattgtctgtaatagaacatacaaattcttctttagaatgtagtaaagggactcctttattcatatgcagttcctgccacactctgaatgcatagattcttttgacttgacataaatgccacagatttgtttttattttaatgaagcccaatgacaggagatccaccaataaactggaggtagcaagtagctattgaaagttaagaagtttatgaaattattagaaaatgccttattgaaactttctgttacccatctcctagcattcaatatctaccctcatcaaattctattagtaaatttaataatcactttttgcacaatcaaatttttattaygctggttgttaagtgggacatacaccatggttccaaattttctatactttaaaattcattttcttcatttatacttcataccattctactaat

SEQ ID NO: 101433 - DNA, 594 bp, Homo sapiens
ttttccagttacacttaaacttttcagaattccaattcctattcctatgtatgtgtctgggttttcatgagttattacaagttatacagctaagtgtggaagattgggttaaaggggagagttgtcaaggagatgttcaaccaactgggatatctaaatacattaatttaagaaataaaatcgacaatttaaaaatgaatttgagcatttttgtgacactacagaaatccmgtctaaaagtctacagagacaaaatctaaaccaatttttctaaagtaaatgatagtaaaaattttttgaacatctgccacagaggaagataatttcacaaacttgatgactaaaaaagttagacacaaaagagtatacactgtattggtctatttaaatgaagttcaaaaatggcaaaactaaggtgtagaaaaacctcatagcagttatccttaaaggacaggaagtggtcatgggaaggggtttctgaagtgctggtaatattctatcttgatgtggttgatagttacatgggagtgtctactttatgaaaacttactgaaatatgaacttttgcttttttctcttttctatacataagtt

SEQ ID NO: 101434 - DNA, 594 bp, Homo sapiens
ttttccagttacacttaaacttttcagaattccaattcctattcctatgtatgtgtctgggttttcatgagttattacaagttatacagctaagtgtggaagattgggttaaaggggagagttgtcaaggagatgttcaaccaactgggatatctaaatacattaatttaagaaataaaatcgacaatttaaaaatgaatttgagcatttttgtgacactacagaaatccagtctaaaagtctacagagacaaaatctaaaccaatttttctaaagtaaatgatagtaaaaattttttgaacatctgccacagaggaagataatttcacaaacttgatgactaaaaaagttagacacaaaagagtatacactgtattggtctatttaaatgaagttcaaaaatggcaaaactaaggtgtagaaaaacctcatagcagttatccttaaaggacaggaagtggtcatgggaaggggtttctgaagtgctggtaatattctatcttgatgtggttgatagttacatgggagtgtytactttatgaaaacttactgaaatatgaacttttgcttttttctcttttctatacataagtt

SEQ ID NO: 101435 - DNA, 412 bp, Homo sapiens
taaagtgcagtcatccggttgcctgatgtcttctgaggtggttcacccagattcacaatacagataattaaattcagagctgcagagatagggaaaataagatgtggaaatagrcttcttctgaagtattattcaggtctcctccttttcttccaaatgccatcccccccatcagtatactcaaggcatctgatggcattgatgagcaactgaaaaatcatttaattaatcatcaggttctttatccttagttaaaaatgtagaggcacaaaagtcatgtgtcaaaatatgctcttttttaatagagtatggtccactacccactgtgtgtcctcttaacctttccagagtaggtgtccttacagcataaatttagcataaaattagacacgttccagtataaaataaaatg

SEQ ID NO: 101436 - DNA, 412 bp, Homo sapiens
taaagtgcagtcatccggttgcctgatgtcttctgaggtggttcacccagattcacaatacagataattaaattcagagctgcagagatagggaaaataagatgtggaaatagacttcttctgaagtattattcaggtctcctccttttcttccaaatgccatcccccccatcagtatactcaaggcatctgatggcattgatgagcaactgaaaaatcatttaattaatcatcaggttctttatccttagttaaaaatgtagaggcacaaaagtcatgtgtcaaaatatgctcttttttaatagagtrtggtccactacccactgtgtgtcctcttaacctttccagagtaggtgtccttacagcataaatttagcataaaattagacacgttccagtataaaataaaatg

SEQ ID NO: 101437 - DNA, 579 bp, Homo sapiens
gagtgaaaattgaggatggtttgggcttagtgtaaaggtagaagtgaattcatccaaagtgctgatggatatttaaatctaaagtttaagagtgaagccagttcatattgatataaatatctaaattatgaggatacatttctgagctagaaaatacatatcatgaaaatcaatgtggcaataataaagctttggaaaatatgcagtttgcagttttagtattatagtgggagagaggaaccatcaggaagccaaggaaagaaaaatcccagwggttacatttgtcttgaaaccaagaggaaatgacttcatcttaaaattaacaaaataaaagaatcatctaagagatttctgtttttgtttttttgttgttgtttgtttgtttgtttttcccagatgagaatgtataccagagaagtcttttataaacctcattttcctcaccttccatatttcatcagtcaccttcaatggtaccatatttctttcaggctccattttaatctcaacctggacttcacacccttttatctgttgtccagggccaagcttatagggtttcgctgtgtgcccacccag

SEQ ID NO: 101438 - DNA, 573 bp, Homo sapiens
ttgccttggggctctggggaatctgagacaactagggactgaagtggtcccctgtcacagtacagcagctctgtggagagatggccagactctagtcctagatcttggttctcttcactaggtgcagtctccagactgaggtgaggtctacaaccaccctcatcaattttttccagccagcagcakttccaaaccaccttggaatggagctcccagagagagtggccaagctccatctttgctgtttctcagccttaggtgctgttgctttcaggctttggagagtccgaagcaactaggggctggagtggaccctcagcacagcacagctgctctctaaaaagtgaccagactgcttttttatgcgagtccctaatcctgtttctcctcactgggtgggacctgccaactggggtccccaaccaccctgggcagtgggttcaggtgggtgacaggtttgtgcctccctggagtggagctcccagaggaaggggcaagctgccatttttgctgtttcgtagccatcactgttgatatagcctttaggtactggaaaatctgaggcgactatgg

SEQ ID NO: 101439 - DNA, 519 bp, Homo sapiens
ggaacttcactgttgcacttgctcagaagaaaaaccttggagtcctctgtgatcctctctttcttttgcacatcacaggaaatcctaaggcctctaccttcaaactgtgcctagctttaattatttcttgtcatttccactgctaccactctgggcaagtcactaccaactctcacattattacacatttttcacagttggtctcttacttstgcctcccttctcccacccacacgttctattctctacccaacactggtggtcatttcaatattgacgttaagtcctaccttctgctcaaaagcctccaatgtctttctgtatgactgcagacagaagccaaggccttacagtggcccatgtgccctggaataatctggttcctccctgtacccttctgctaccattcttttccattccactgccaccacgctggcctcctgggctagtgctcaaatccaccaagcactctcaaacctcagaggctttgacttgctctgcctgctgcctaaagaattc

SEQ ID NO: 101440 - DNA, 421 bp, Homo sapiens
cccagtgctgaaggatgagtagacggagcagaagcagtaaagaggatgcacgttggaagaaatgaaagcgaatggaattgtagcaaacacgttgcgtttactatgtgccaggcactcttctagacattttacataatttaatcagctatcttatgaggtgggttgctgctatctccaatttataaaagaggaaacaggtaccaaagggtcaggctgtttacagagtaaatactcctaaccacagctctaaggggagcactgaaaaagaggggaagagtgggccccctctrttgtacttgtaatataatttaatcctcagaataaataaatagagaagattctgtaactgtattttgcaggtgagatgagagaattgaggtttggagttgttaagcagcttgcccaaagtcaccttgcaggt

SEQ ID NO: 101441 - DNA, 538 bp, Homo sapiens
caggcttgatctttgggctgctaccctatccctgagcgatgtgtgacacagtcatgctgtcttcccaggttctgatgatgttgggggaatgtaattaaaaataaaatctcctgccaaaccaggagacctccccacaaacacagaagggaaagacaatttattattgaataggtattaaaccagaatgtgacgtgcatcacaggcaatctgctgaagagattgcagattgcaaagtcagaaagaaatcttaccctttcctatatctaggcagatacagtccattacatacatgttttcaggtagaagacttgacagcaccattgtcacacatagttcatccgaaattcaygggataattgggctggccatctgtgttaattgcctttatccgaaggaaaaataaaacttctcatatctttatgacaggaggtagttttgcaacttagagccaggcaccttagagttaggctcctgccctcccacagaaatggagagaggaggggctgtctttcttgatgattacacttcaaagggttca

SEQ ID NO: 101442 - DNA, 656 bp, Homo sapiens
ccatcatgctcaatgctactgaccaagtgagaaatgctcctgttgactattggtgtcatgcctttacccccattgttatttggtttgcaggtgtagtctacactgagggcagttttcaagaagccacttaaaacactatgcaggaaaatctctagrgagattctgtgggtgagggagaaggttgacagtaagctggtaagcaaggtttaggactataatggttgtcaaaacactgtgttggttggtaaatagccactgctctgagcaattctgagtgactgctgtgctctggtggctccagccactctctacaagatcagcaactaaaggaaggtattgccattatgattaggggactctaggactccgttgttgcaatctggctggccatcttcctgattggttagtgtatatgctttactggttgttaaatattttaaatatccttcccctggatgagtaccacaaaataaggaatgtttaggggaaagtctgcagactttagggtgccctagggctcccaggaagcttgtttctttatgtgataatggggtagagatttctctaggattattttcctgatggaaaatgctgcattttttgcttttctcttattgaataacttacatagtaaaatgcacaaatctgatgtgtat

SEQ ID NO: 101443 - DNA, 656 bp, Homo sapiens
ccatcatgctcaatgctactgaccaagtgagaaatgctcctgttgactattggtgtcatgcctttacccccattgttatttggtttgcaggtgtagtctacactgagggcagttttcaagaagccacttaaaacactatgcaggaaaatctctagagagattctgtgggtgagggagaaggttgacagtaagctggtaagcaaggtttaggactataatggttgtcaaaacactgtgttggttggtaaatagccactgctctgagcaattctgagtgactgctgtgctctggtggctccagccactctctacaagatcagcaactaaaggaaggtattgccattatgattaggggactctaggactccgttgttgcaatctggctggccatcttcctgattggttagtgtatwtgctttactggttgttaaatattttaaatatccttcccctggatgagtaccacaaaataaggaatgtttaggggaaagtctgcagactttagggtgccctagggctcccaggaagcttgtttctttatgtgataatggggtagagatttctctaggattattttcctgatggaaaatgctgcattttttgcttttctcttattgaataacttacatagtaaaatgcacaaatctgatgtgtat

SEQ ID NO: 101444 - DNA, 656 bp, Homo sapiens
ccatcatgctcaatgctactgaccaagtgagaaatgctcctgttgactattggtgtcatgcctttacccccattgttatttggtttgcaggtgtagtctacactgagggcagttttcaagaagccacttaaaacactatgcaggaaaatctctagagagattctgtgggtgagggagaaggttgacagtaagctggtaagcaaggtttaggactataatggttgtcaaaacactgtgttggttggtaaatagccactgctctgagcaattctgagtgactgctgtgctctggtggctccagccactctctacaagatcagcaactaaaggaaggtattgccattatgattaggggactctaggactccgttgttgcaatctggctggccatcttcctgattggttagtgtatatgctttactggttgttaaatattttaaatatccttcccctggatgagtaccacaaaataaggaatgtttaggggaaagtctgcagactttagggtgccctagggctcccaggaagcttgtttctttatgtgataatggggkagagatttctctaggattattttcctgatggaaaatgctgcattttttgcttttctcttattgaataacttacatagtaaaatgcacaaatctgatgtgtat

SEQ ID NO: 101445 - DNA, 626 bp, Homo sapiens
gctttgtagactgggccaagtctcagcgtgttgtgttttgaagtgcagcggtttcctcctgagttggcagactgtgattattaaaccatgaagggttactccttaccctgacccttttaaggttgccccttgatattcttattttattttattttatttttttaagagacaaggtctggctttgttgcccaggctggagtgcagtagagcagtcatagctcactgccacctccaactcctgggctcaagtgatcctcctgcctcaacctccctagtagctrggattgcaagtgttcaccaccacacccagataattttttttgtagagatgaggtcttgctatattgcccaggctggtcttgaactcctgggctcaggtgattctcccgcctcagcctcccacagtgttgggattacaggcgtgagcaccaccatgcctggctactgcttgatattcttaagtgacttttagggcctccctccatttccattccccacataactagttttaaagcagttccagaatttacttttgtctgagacagatctttctgtttcttacccgctccttttctccacctatcctgcgtataagcaataagcaagtagcagaggctgttagagtc

SEQ ID NO: 101446 - DNA, 626 bp, Homo sapiens
gctttgtagactgggccaagtctcagcgtgttgtgttttgaagtgcagcggtttcctcctgagttggcagactgtgattattaaaccatgaagggttactccttaccctgacccttttaaggttgccccttgatattcttattttattttattttatttttttaagagacaaggtctggctttgttgcccaggctggagtgcagtagagcagtcatagctcactgccacctccaactcctgggctcaagtgatcctcctgcctcaacctccctagtagctgggattgcaagtgttcaccaccacacccagataattttttttgtagagatgaggtcttgctatattgcccaggctggtcttgaactcctgggctcaggtgattctcccgcctcagcctcccacagtgttgggattacaggcgtgagcaccaccatgccyggctactgcttgatattcttaagtgacttttagggcctccctccatttccattccccacataactagttttaaagcagttccagaatttacttttgtctgagacagatctttctgtttcttacccgctccttttctccacctatcctgcgtataagcaataagcaagtagcagaggctgttagagtc

SEQ ID NO: 101447 - DNA, 626 bp, Homo sapiens
gctttgtagactgggccaagtctcagcgtgttgtgttttgaagtgcagcggtttcctcctgagttggcagactgtgattattaaaccatgaagggttactccttaccctgacccttttaaggttgccccttgatattcttattttattttattttatttttttaagagacaaggtctggctttgttgcccaggctggagtgcagtagagcagtcatagctcactgccacctccaactcctgggctcaagtgatcctcctgcctcaacctccctagtagctgggattgcaagtgttcaccaccacacccagataattttttttgtagagatgaggtcttgctatattgcccaggctggtcttgaactcctgggctcaggtgattctcccgcctcagcctcccacagtgttgggattacaggcgtgagcaccaccatgcctggctactgcttgatattcttaagtgacttttagggcctccctccatttccattccccacataactagttttaaagcagttccagaatttacttttgtctgrgacagatctttctgtttcttacccgctccttttctccacctatcctgcgtataagcaataagcaagtagcagaggctgttagagtc

SEQ ID NO: 101448 - DNA, 474 bp, Homo sapiens
tcaccagatatctacaaataaagatttccagatctccactgaagacctacttattttaaataatctggcatatgaaaagagggtgatttaagttatattttgatatttgcaagcatttgctatttttactacagatctgaccaatagaggctctatagatataatatcaaaaagagtaaacaatgtagagtagaaatacaaaaaaattaacctagaagatctccaaatccatccagataatcacaccacaacctctggaaatcaattatcccatcaattcttttctgtatcacagtccrtccacctcctctgtaatccatgtcacacattacctaaaataagcacagagaagaccaaaataatacactattattttcattatttgataatataacactcatgcttcatccttaggcttagaaaaagagacggtactgccactgagttttcaatgcaatcatatgccattaattt

SEQ ID NO: 101449 - DNA, 426 bp, Homo sapiens
catcaaatatttgacagaagggaaagatgattttacatattagtttttgcttataaaagaatcaatttgggctgggtgcagtggctcatgcctctaatcccagcaccttggaaggctgaggcaggtgaatcacttgaggtcaggagttcaagaccagcatggccaacatggtgaaacctsgtctgtactaaaaatacaaaaattagccaggtgttattgtgggtgcttataatcccagctacttgggaggctcaggcaggagaatcacttgaacccaggaggtggaggttgcagtgagctgagattgtgctactgtgctccagcctggagctctgtctcaaaaaaaaaaaaaaaaaaaagaaatcaattcagagttttacttcccactgtttgtttaaacaaattcgtaagaaattaaagacaaac

SEQ ID NO: 101450 - DNA, 577 bp, Homo sapiens
ggaaataaaaagaatgaaggcagattatcagagagttgtcaacttctctagcagctgtcacaagacttatcttccagccaagatgcttgggaatcttagaacaagattttgttcccccaatctcagacatcytgctgccttgtatatgagctcatttctgagaccatgcagtgaaaacaactatctaactcataccaatgggtggcctagtcaacctgataaggtaacaattcttgaactctgacatatggatgtcagacaacatagtgaaaatgtcatatttgttatctctcttagtttggatttatcgaaaagtaaacccaaaaacaagaatttgagtacaggtaacttacttaggtgcaaaaagattgataatccttagaaatgagctcttaaatcatgccattaacttataagattatctcctgcatagagagacgatagtctagcaaatagcaagacaatttcttgtatatcgagaaagaaccaacccttgcaattaacttaaaatgaactcccaggcccacctatactagttgtctaactgcctggccacccagctttattcattcgagga

SEQ ID NO: 101451 - DNA, 599 bp, Homo sapiens
taaatatatatttcagattgctggacaatgatttttctggtttctaaagttgctttagtttagctccaagttaaacttttgtatttaaccagtcacaatattaaataaagagtaaatgggtaatgaaaaaatacaatttataaattgtattaaagatcacattataaaagctataaaacacacctaatttctaaatacaatccaaattttaaaattatagaaatttagcatgagacaaaatgcttttccagaaaaattgttaatttctgagctaacttaatacaaattgcatgttttctgcrtttagcatatgtgtgggggggtataatcatgacatattatatcctaatctctaaatatagccagataaacttcagattcagaagcccacagctttaaatcagcacaagtatgttgtgcacaaagactaagccagtagacactaattcacccagacagctgatcttgtatttgaagaaaatgagacacaatcagggacagattgaattacacttctagaaatgaaagtagtgtgaacacatgtctcctcatccactatggggtagaaaggtagatcaaatatctgggtaatcgtgaaa

SEQ ID NO: 101452 - DNA, 523 bp, Homo sapiens
aaccttgatatggacaatcattgagcccatttctggccacctttaagtttcagggctctcctgatcacctgttatctcttccctttccttgtccgtattattttccttctagaactgtactactgcttctctctatttgtgcaccacaacagaaagacctgctgctgatgagggcttcctgttacagatgaggttaaagtagctgaggartagctgaacaagaccttacgtaaaggccttttctcccctagggttccatgacattgcatccatactctggtctcaccatgctcctccatcttcctttcttctttcttggaacgttgggtagtgatgaactttggaccaggaagacttctgtataaatccctgatctactaattcttgcggtgtgatcttgggcaaatcctttaatcttgtctaatccttagttttgtcatccataaaataatgataataattatccacattggaagattgttgtgagaaggaaattaagtgatttatgtaagggtcacaatgc

SEQ ID NO: 101453 - DNA, 582 bp, Homo sapiens
tgtttaccttagttttatttcctgaccaattttcaatccttctttcgttacctcccagacacttgctttttaaaaaactatatttttacaaaaacaaaaggacaaaaggtttttttagacagtgttagtgcattcaatacagaaagtttccagttagacaagaattttactgtctstatatgaagacttcactttgcactaaatataagaaaaaatataaggaagaagtaatgtaagaaaaaaaaaaccaccagaaatagtcttagaaatgcgtatgtttgtacattcatccctcagtatctgtgaggaatttgttccaggacctcccatggatgctcaagtctctgatataaaataacatattatttgcctatcacctatgtgcatccttctatatactttaaatcagatgtccccaacattttaggcaccagggactggttgtgtggaagatgatatttccatggatggtgcaggggaaggaaggatggtttcaggatgaaactgtttcacctcggtcatcaggtgttcaagcagtagattctcataaggagcaggcaacctagattcctcacatacgca

SEQ ID NO: 101454 - DNA, 540 bp, Homo sapiens
tgacactagaatcctgatgttgcagactgtagagctttctactactaaagtagggatttcttccagaattcttacagcagggtgctgtcaggaggagagcacttagtagggagacccaatcctccaattgataattggttgtatgtcttaggcaagagacataaactcttcrtgcatcgtgtggaagatgagggtgtgggatgggattaggcattctcaagtggcagcacagggagggtgtacttaaatagcatatcttcaagacccatgtcataattttatacttaagacgatagcctacagaataaaaaccgtagtgagcagaatgcagtgaaatcagctaatgaagcatatattaaatgcactgaaaaacacaggaataaaatgccaaaatatttcccagagctgatagccttggtggtccctaatgacggatgctaattccttcttgttcatacattgttgccttagtctctacttcctcatcattgttggtttgttactgcatcaagtccccttccagggtcttgggaaaactgt

SEQ ID NO: 101455 - DNA, 690 bp, Homo sapiens
tggttttcaaggtcatttgtagaaaggggaactaatggccagccctttctctgggggaacattcacaagacagaggatagatgaagatgtcaattttccagcctgtctgaaagaagcaagagcagtgttcrgaaatgagggcttttcccattgggtaagaaagaccagagttcaaactctgcctctgttagcgcttagctgtgtgactttgggcacatagcttaacctctctaagccttagttttctcatttgcaacatgaggacgataatacccatattgtaggtattttgtgagtatgaaatgagatactcaggtaggatttactcccatctccttttcagaaactaagtcaactagtttatctagaagtctccatctaacataaccaacatctaggacaacaggcgttgtccttttcttttgaaatcattcccattaaatacattttggaaatgatgttttctggttatcacagccactataacaaatgagaccaaagatcttttaaatacctcaccttaaaaaatgaatcaaaatgaataaatcacttttcagaaacaaaactcattaaagacatattttattgcatagctgttcctttgatccaaaccaattaataagccatctcaacctataaatgttattaactaaccttgagcttagtcttatggttcaaacttgttctggg

SEQ ID NO: 101456 - DNA, 690 bp, Homo sapiens
tggttttcaaggtcatttgtagaaaggggaactaatggccagccctttctctgggggaacattcacaagacagaggatagatgaagatgtcaattttccagcctgtctgaaagaagcaagagcagtgttcagaaatgagggcttttcccattgggtaagaaagaccagagttcaaactctgcctctgttagcgcttagctgtgtgactttgggcacatagcktaacctctctaagccttagttttctcatttgcaacatgaggacgataatacccatattgtaggtattttgtgagtatgaaatgagatactcaggtaggatttactcccatctccttttcagaaactaagtcaactagtttatctagaagtctccatctaacataaccaacatctaggacaacaggcgttgtccttttcttttgaaatcattcccattaaatacattttggaaatgatgttttctggttatcacagccactataacaaatgagaccaaagatcttttaaatacctcaccttaaaaaatgaatcaaaatgaataaatcacttttcagaaacaaaactcattaaagacatattttattgcatagctgttcctttgatccaaaccaattaataagccatctcaacctataaatgttattaactaaccttgagcttagtcttatggttcaaacttgttctggg

SEQ ID NO: 101457 - DNA, 491 bp, Homo sapiens
gttttgaaatcaagaagtgtgatactctgtagtttttttcaagattgtttttgtctattctgggccttttgcaattccatatgaattttagaatcaactcatcaatttatctgaagaaatcagctgagactcwaataaggcctgcactgaatctgtagaccacattgggggtattgtcatctcaacaatattcagtttttaaagtcatgaacattggatgccttttcaattatttaagttgtctataatttctttcaacagtggtttttttgtattcagagtatatattttgcacttatcttgctgcattaatttttacatactggattctttttgatgctattgtaaattgaattttttgctaattttatttttgtatcatttattctaagtatataaaaatacaatagatttttgcccattgattttgtagcttgcaaccttgatgaactcatttattagttccaatagcttttttagtggatttgttg

SEQ ID NO: 101458 - DNA, 487 bp, Homo sapiens
ggaattgaatggcctgttggtacattattagtattctcttgtgaggcaaatgtgtccacatacctgaagtgtcyattaatgcccataatgagtacaacggattttaatgtgcctgtaatatacttaagggtcaaatattttaaccacgtctaaaaattcattttaaaatttttggccatgtttccaaactatttagacagtatcttttggaaaagaataaaactttattttatgaagcaaaaacttcataaaagtatgaagattctgttttagggatatacactgttaatttttaatatatttgcaaaacttaatgagaagaatttgatttaaagatcttggcataattctttctcttgtatttgtcctccttctgtagttctcgtctttcctgcaggttctcaccacggcaaagtgattgagaacatgtgctgggctttctttcttagtacttttgttcaacacctgttcatttttgctactttcc

SEQ ID NO: 101459 - DNA, 630 bp, Homo sapiens
tggttaataaagtttccttttatgtattacttgggaccagaattagttgcttgttagaactgagatttatcctattaaattgagatgatctaagacagaggtcaacaaactatggcctctgggctttgttccactgtctgctttgtatgagcaaagaatagttcttacagtttcaartggtgggaaaaaaaagaatatttcatgtgaacattatgtggaattcaagtttcaatgtctataaataaagttttattggaacacaaccatgcttacttgtttacgtattgtctatggctactttcacactacattggcagagatgaggagtagcaacagagaccatatggcctacaccgaaaatacttactgtttgaccctttccagaaaaatttgctgacccctggtctagaacgtggaagcagcatgaaatgaagaggaatttaaggagacagcattgtttttagaattttctttacgttgtctacaggtaagagcaaagcggcctcacagtggaggtgttgatcttgtggaaagcgggtggaaaaagttgtgcttccatcaaccagtgcatggtgctgtgtcagctccacccctcatttgtggttcttaaagtctgctgttattttatgc

SEQ ID NO: 101460 - DNA, 562 bp, Homo sapiens
agatgtcagcagaatggcacttatttctggaggctctaggagagaatcagttttcttgccatttctggcttctagaggctgcccaccttccttggctcatggcctcttcctccatcttcaaagtcagcagtagtgggttgagttctcatgctgccatttctctggtccttcttatctgattccctctgccagttttaagaacccttgtgattccattggacccatctggataattcagtataatttccctattttaaggtcatctgattagcaaccttaattccatctgcactcttcccctttgccatgtaacctctcatatccatgggttccagggattaggacatagacatatgaagaraaagggcattattttgcttcccataggcatcatccagatagctgcaagggcattattttgcttcccataggcatcatccagatagctgctagaaaaagctatctgatatgcacacttggccagaactctgtcgtggtgaaaacctcctcaaacctctgagatgatttagtcatctcaaatccttgatacacattttatcac

SEQ ID NO: 101461 - DNA, 539 bp, Homo sapiens
caactaccattcaactttttatctctatgagtttgacttctctaaatacctcatttaagtagaatcatataatatttgtccttttgtgagtggtttatttcacttagcataatgtccttaagattcatccatgttgtacatgggtcaaaattttactttttcaatgctgaataatattccattttatatgtatgccacattttgttgacttatmcatcgatggatgcttggtttgcttctatcttttagtgattatgcacaatgctgctatgaatatgggtgtacaaatatgggttaggatcccttttgtgggaagcacaaataaaataattgcaacagacatttgcatttaaaaaggagaagagcaggaagcagttattcctcactagtccatggcaattctgaatccagttggatatttgtggccaggttcccctactttaagtgcaaggaacgttacttgagtgaggtatagttctggttcctaacagtggcttcacagtccatttatttcttcagataccttgacttcatttcag

SEQ ID NO: 101462 - DNA, 605 bp, Homo sapiens
ccattaaacctctttcttttgtaagttacccagtctgatgtatgtctttatcagcagcatgaaaatggactaatacacagaccaaccccaaatcttattgaaatgtcaaccaaaattttaaatgtgcatactcaacacttataaaactcaacatttgtaagctcaacacttgtaaaactcaaaagaataaaatttgtatacttacataccaggacattcaagtattgtttgtattaccaaaagattgaaaaataactggaaatgacacaaataacatcaacaagaaaatggcaaagattgattttcacyctttaaatcattggttaatgtattgttggtatgtatgcagtaaatgactaactcagtaactgtttgttgtccctgcctatctcaaagaaaggtatgacacttgttcctcactcctgaaaggaaatctctaaatccctggaatatcctgtttctgaagaatgtctttgttttcatagagactttgggccatgacagaaagggcttggaacacttgacatcagcttgacctaccttggagcttccctggtttggaatatagtctcgcaccacataacaacgttttagtcaaagagact

SEQ ID NO: 101463 - DNA, 526 bp, Homo sapiens
ggacctgctacagtgcctgatacacagaagaaaaagtctcaattcactcttactagattaatatattaagtcataatatttgaactatgttctttactgctatggaagatggaaatctagagaaaagctcaagagtttattaaagraagtgactgattcttcacatgtcttttgaaaaagcagttactgcacttcattatttagataagaatatagttttgagattttgtgtctggtgaaaataatgcagcagaaatttatgcaaagcagattaaagcctctcccgaagagggggagttatatacattaacacacatataagccgagaggtcataataatgtttctcaataaagtatcaaaggagagaaagttttacaaaattcattataaattccacttgtaaattaagctgccattaaataatcttgtttgtgttaattaacccatttttgagtcctatgttgcattaagcagatgtataccaactgattcttaatatttggttaccaggaaaaatacttcaaa

SEQ ID NO: 101464 - DNA, 526 bp, Homo sapiens
ggacctgctacagtgcctgatacacagaagaaaaagtctcaattcactcttactagattaatatattaagtcataatatttgaactatgttctttactgctatggaagatggaaatctagagaaaagctcaagagtttattaaaggaagtgactgattcttcacatgtcttttgaaaaagcagttactgcacttcattatttagataagaatatagttttgagattttgtgtctggtgaaaataatgcagcagaaatttatgcaaagcagattaaagcctctcccgaagagggsgagttatatacattaacacacatataagccgagaggtcataataatgtttctcaataaagtatcaaaggagagaaagttttacaaaattcattataaattccacttgtaaattaagctgccattaaataatcttgtttgtgttaattaacccatttttgagtcctatgttgcattaagcagatgtataccaactgattcttaatatttggttaccaggaaaaatacttcaaa

SEQ ID NO: 101465 - DNA, 578 bp, Homo sapiens
tgttgtgggtgttaaggttgcaaaggcaatagagaaaagacattttttgacaattgcttgaagtaagcatgaaattggaaaaattttactgctatataagcatacgtcttggggaaatgtcagccaaagtttctccagagaaaaaccaataatgtgcatctctaggtgggtccaagagtccmcatttaccacttaaagggaggctgctgttcatgaatcttagcagaggaacttggctcctatccaaacaaaatgttctgggaaatcaaagccctgattattattattatcatcattttaaacaacagattcattaaccagcaaaatgaactaaatcaattcaaatttgtcatttagaccaaatctgaggtcatgttttgatattttgatgtacataattgttgttatgagagtccttttaatcaccaagcacattgtgtcaaagtatgcagaaacattttagaatcagtgactcttctctatgttttttttgttttgttttgtttttttggttggttggttgttttgggccctgggtttatttgttcaaatagcacagaaggacatcaactccatgc

SEQ ID NO: 101466 - DNA, 631 bp, Homo sapiens
aacaacctgctgattctaccttcattgatttttggctttggctgtccacagggagtaattgtgagaatcccttagagaacagggaaasattgcaaccccagtgttcaggctgcttctgtcgtcaagtaactttcagaacatttccataacctaattgtgctcagattcaaggaaaacagaatatttagtttggtcaaaaaggaaaatatacctaagtaggttctaaaattgcagcctcataacgtttatatattattttagtttagtatatttttaactggaaagcactatactaacatcataaacaattcaagcaatataactatacatacaatgaaaaatcaagtcttccttctattttggaacctctactctccttccttggggccaacactctaagtgcctttttatataccaccagaaagagtttttatgcatgtacacatttaacaatacatattataggtattatacgtacatttaaaaacaaaacacaaagggaagaataattatgaattatgaagaataattatgaataacttcataatgtgtttttaaaacttatttttaatttacacatgatgaaattcactttctgttagacagttctatgagttttgataaatgcata

SEQ ID NO: 101467 - DNA, 616 bp, Homo sapiens
agaattctcttcttcctctggaacactggttagtgttaggtttggtcatttaacataatcccagacttcttggaggctttgttcatattttcttattcttttctctttatctttgttggattggattaactttaaaacctcgtcttagagctctgaatttcttcattctacttgtttaaatctattgctgagaatttccagagcattttgcatttctgtgtgtccaatgtttcctgaatttttgaatcttttttaagctatctatttccttgaatgtttctcccttcacttcttgtatcattttgtgtatttccccttgcattgcgcttcacatttctctggtgcctccctaattagcttagtaactaacctcctcattctttttcaggtaaatcargtatttcttggtttggatccattgctggtgaactagtattatttcttgggggggtgttaaagagttttgttttgtcatattaccagagctggttttctggttccttctcatttgggtaggctgtgtgagagggaaggtctagggctgaaggccgttattcagattcctttgtcccatagggtgttcccttgatgcagcactctcccccttttcctatgg

SEQ ID NO: 101468 - DNA, 580 bp, Homo sapiens
acatattggaaacttaggtaatcatatccaaagactggcttccaccaacatccatccttttaattttagttctatagcaacatggagttataatatacatcctaatccatttaatcagcctcacactyggaacccaaatccctttttgcagcattccagacatgtgcctgtactagcctaaacagagtttaacaaacattcctagtgatggagaggttggaatgagagaaaaaacaaacagaaacatgaaaaaaaaaaaaaaaaaaccactgttcttatttcacacataatagttctcataggaatttgaaagatggatatcattacagccactttataagtgaggaaactgaggctcagagaagttgaggagtcagttttaggtcattctaccaaaaataatggaactggttctcatttgattccaaatctgaagttctttcttttttaccaggttacctacctctgaagagacactagtaacaagtcattggttccatttttgaatagttatgcagcaaaatttctttagagtgaacatttttcacattagggtcactaaggtaagcaagtagaacta

SEQ ID NO: 101469 - DNA, 593 bp, Homo sapiens
tttaccacgggtggtgggactccctttgtttacagtgarcatgatttgtgctcaatcattcctcagccctctgaaccctcttctcatttccttgcagtctctacctctcagctccagagtgggctttgtagctggatctgctggtttggaaatatttccctacttacatgcaaattacagttgtggtgttctctgtatcctagtcatgatataggcatgggtattgagtggtcttctccactctccttgtgactttgtagggcttatgagagaatgtgtggagaaactcagatttagaaaaataccctatgggaaatgtgaacttcaattgtattttcaacaaataaataccaataatttctcatatgcaaaatatggttataaaagtgttcaagtatattatattaaataaactcatctttttattatcaatcgaaaaatgcttctccccaaattgatatcaacttcaagttcagccacatcaaccatagtatcctcccatctcccacttttgtttctaaagccataagccaacagaatttctccatgagagtacaaggctaacgaatgttgtggcagatattggtagaaat

SEQ ID NO: 101470 - DNA, 661 bp, Homo sapiens
ggatatggcttttggaacattcaagaagaggcatgtaggctttggaaatcagggctgtttatgagaatattcccatggtctgagatgctggggttctagacccacaagatgatgattttcctgtttaaaaatatatgttccatatgtttagactatgacattagaaaataagtccttgcagagaaatgaagaagataaaaattctagacaagaaaaaattgagaaatctgtcttcagttgaagactctctcttccactaaagctagaagtaacatctcaaccatgagaagtttctyataaatctctcctttccaatcactaccctctacttttgagtggaaaatatgacttattttttattttccatacaattgctccacaaataagttattattgtataaatctctgaaactcagtactactgacagctgaattattgtggcaagagtttaaagactttatgaactgaaaacattgaactttacctgagctctgtgctcccagaaaatagaaaagaatgaaaagccctctcaccactattttgtttctcaagctccctctcaagctgtgtgttccaactgcaaagaacccttccacatttgactcaaataagactcaaatgtccattcttcctcatgactctcaaaaggctacaggtgac

SEQ ID NO: 101471 - DNA, 618 bp, Homo sapiens
atcaattcacctgacatacacatctttggggtgtgggaggaaactggagtacccaagagaaaaccatgcagacataggggaaatgtgcaaattccacacagatggtagaacctgccaggatcccattatttttctcatcaaccttgtaagaaaatgatattgaaacaaccttattcaattatctgctatacactgaaatttttcctgctatattcagatcrtgatagagttgagtcagaggaaacagtataattgtatgacagactaaaaaaaatgaagaggaaattaattttagaaataggttgcaatcactgtgatgatttggctgtctgttacttcaaggtatcacctctatagaaaggggatagtagcaaagaaagaatctggagaactcataaaataaggtttcaaggctgaaagattaacctgaaaacgtgcaactaacctaaattagtaaagtaattacgggtttctaaaatgtgaatatgtccaaaaaatcattacaggaaaaattaaatcttcacttggttagaaaatttactgttgctgacaccatttcttaatccttgatatgttattgaagaaaatttattctaacagaaaattcggtgagtgtaa

SEQ ID NO: 101472 - DNA, 618 bp, Homo sapiens
atcaattcacctgacatacacatctttggggtgtgggaggaaactggagtacccaagagaaaaccatgcagacataggggaaatgtgcaaattccacacagatggtagaacctgccaggatcccattatttttctcatcaaccttgtaagaaaatgatattgaaacaaccttattcaattatctgctatacactgaaatttttcctgctatattcagatcatgatagagttgagtcagaggaaacagtataattgtatgacagactaaaaaaaatgaagaggaaattaattttagaaataggttgcaatcactgtgatgatttggctgtctgttacttcaaggtatcacctctatagaaaggggatagtagcaaagaaagaatctggagaactcataaaataaggtttcaaggctgaaagattaacctgaaaasgtgcaactaacctaaattagtaaagtaattacgggtttctaaaatgtgaatatgtccaaaaaatcattacaggaaaaattaaatcttcacttggttagaaaatttactgttgctgacaccatttcttaatccttgatatgttattgaagaaaatttattctaacagaaaattcggtgagtgtaa

SEQ ID NO: 101473 - DNA, 608 bp, Homo sapiens
ctctggagctccttgtaatgccaaaaagtagtaaggarttgctaaaaacacaaaaacacaatgatagggctctgtatcagagggaaacagagctgactaaaagagctcccaatggcaaaagctggaacaatctgagaacgaaaatgaattagtattggattgtaacaatacaatactaattgttataataatatataaataaaaataaatacccatgattccacacttattttaataaatgattgaaagaataaaaagtggagcagagagacaaacctacatagaaaaattcccaaaacatttacatggataatctactcttcaagacatcactactattctttaaatgtgagctgcatataaggccttcttttgaaagactagtatatgatcaaggacagaagagtaactttacagtgaagaatcctgacaaacactatctcactcatgtgattaattttcacatcaataaaactgagcaggaggcaggacttgactgtggaggtggggcttggacactagaccaaattgagaactagctaaaacagggatagggtggaagtacttttccataagacatgcccactagtgtgccatgacagtttacc

SEQ ID NO: 101474 - DNA, 497 bp, Homo sapiens
acattctatgaaatatatgcttaacctagactttgtttacccccatagaacaactgaatttttaggtatggtatgtggtaaacttgtgctatagcaaagacagcagagtagaatggcatgaaaataaagatgctgcccattaacaattrattaaagagaggactgatttaatgtgtttaagttaagaaaatacaacgtttattatctttggataatattccgtatttgttgtgaacacaaggggtgatgtaatgttgatgctggagccacctgcttcttattctctatctgcaccttcctctcaccttctgtaaacctgtgagagagacgaggtagtgagattgcgataggcttcttgtgtaatttcatagtgggtagagtagagaaagcctaatgcatactgttgggagatcattatgtatgattttggaaagggggtgagcatgagatgggggaatagggttactctgaagaaatgggaagagcaatcaaggaga

SEQ ID NO: 101475 - DNA, 489 bp, Homo sapiens
gagccactgaacccatcctgagaaaattttgaaccwtgttcgtgaggggtgagcagaaggaggagctgctctctccatatggattgtattgtcgattgagacaggcacataattgcacaaattttcttttcactttgcctaagaagacattttcaatgtaagtctataaggaatcaaacgtggttatcaaaccagtccacttccagaagggactccatatccaaaggaatcctgacatataataagaacaaaaatgttcaaagtataacattagccttgatttctagcaatgttgccaagttcatctgaaagctctgttactataaatcacttagataagctaaaatataataagcatgcttttaaatgctacaaagaaagtaaggaaaataccctgcaaactgatcttttgatggctatgggtttttttttttgtcagtataattaacaatgggtttggattttaatggccatgaaagtacaagagac

SEQ ID NO: 101476 - DNA, 634 bp, Homo sapiens
acatctcctttccttgggacgaagatgcaatgtttttgtaaacttttatttaaaattacagacaaaattgatcttagtggggaagccaagcttctctcagcccctgaatctagctaatgaaagtgttaatggtttcaatagacattgtaaaataaatactcataaaagtttgcacagcacaccgttatatggccccataaaatccacaaggcaattatggagttacgagctccctgcccacctctccaagcaccaaggttagcacaagyggaggtgacagaggaccctggcaatagggaggggaaacgttggaggtgcaccatgtgctaacccaggggagaccagacatctcccccagcactcagcttccttgtctgtgaaatgagtatttgatcttaagtccaaattccctttgctactcttaatttctctgtacttcacaccagaggagaatgttggcatgcaaagtacaagcattagcccttctagtcacactcaatgccaacatttattcagtgttcatggtggaccaggcatggtgctaagcaccttatactcaatatcccatttactcctcacatcatgcctatgaaccatgcattatcattatccgcattttacagatgaagaaact

SEQ ID NO: 101477 - DNA, 617 bp, Homo sapiens
gtgaactgtatttttccaaaaaaaaaaaaamaaagaaccctccatttcacctaaactgtcaaagtttttagcctaaagttatccatagtagtttctaattattcttttaatgtatgtaggattggtggtgataaacactttttttcctagtattagtgatatgtgttctttctcttttttgcttagtctatttagctagagtttatcaattttgttgaactttcccatagccagagctagaaaaatagtttcctatactaattttctatactttttattctaaactagttttattctaaactaattttctatactttttgcctgcattttatttcattgatttctgctcagagctctattatccctatctttctacttactttgggtttaccttgctcttcctattctagtgtcttaagttgaaagttttaggtaattgattttaggtctttctttagaagtacagctttgcctgcacatgacaaattttgatgtgctgtaactgttgttttttaaaaaggtattttacccattggatattgtggctctcctgcctcctcaagagaattctttaaaaactggaatatgaaaaatgaggatatttctgtaccccaaag

SEQ ID NO: 101478 - DNA, 596 bp, Homo sapiens
catccatatatctacttttttcattgttccgtcttcctgaaactacattatttttccattttcttgccgttcgaagtattttctttagccaatctttaaggatttatatgcaaataatgaattctttcagtttttctgtgtctgagaatgttttcattttcccttcattcctgaagaatagttgcacaggatacagaatttgtgtttttacaattattttctgtcagtatcaaaaaaatattgtgccacttctttctggcctccatggtttcaaatgagaaaccatcattccaatgggtattcccatacaggtaactcattggctattttcaagatgttttctttatctttagttttcagaagtttaattgtgatgtgccttggcatggatttatttgggtttattttcaggggtgttcacttagatccttagttctatacatttgtgtcttttaccagatttgggaagttttcagccattatttyttcaaatactctttctgccctactctttctcctctacatctggaatggcagtcacatgtttaggtttagaaagcaggtcttggactactttgtaggctgtggtttcaaaa

SEQ ID NO: 101479 - DNA, 624 bp, Homo sapiens
gtgttattgagtcccaacttactaagatcttttagattttattatttcttgagataatagcttctatttcttttctttatttttatttctaatgtatttcctttctctctgggcataagatcttcaccaccataaataaaaataattatcccaatggaagttttttatttattagaactaggaggccrtttgaatgctaagttttctctatacaaagatcattaagattttaatttggatgaaaatttgtaatttgtaagtaaaatttcaaagcaaagcttctaatccagtctgttaaacgggattacagaggattacatccttggtagatgggagcagagattcaggttgagtcagtacttatgtggttcaacctgaatctgaacccagaatgccagaggaacagtcgctataataatttctataaagtctacaaaagggtaattaaggatgctgaaaactgacctcagcagtagcattcctttactcttcacttccacggacctaactcccctgctctctgcgttagcctcccggaactactttcacctccttaaaaattgccctctttgctcctcttgatgcttctgcacctgctccctctgggtgataggttgccattga

SEQ ID NO: 101480 - DNA, 578 bp, Homo sapiens
tcttgtgactgcatcctaagtggaagtgaaaaatattttctgcaacaaatacagaaataaaaatcatatggtttttatttataatgtgaccactaggaaacaaaggtacaggattaaattcagcttcatgaaggtaaatacttaagatatgaaataaatatgtttcaaagatatcaattttcagtgttccaaagattaaatttagaataatgagatgaagaaatagactatgtacttttaaggcaatctattgtaaattttacttctcttggactgtttttagcagatggacagcagacagcttgatgctgttcctggagttgtacaagatgctcaggtcgttgttagaaaattgtgtttgattctatgctgttgttttcagmggacaaatgatagaatattgttagtgatggtgtgtgtgtatgtaagaagatgttggccagaacatgaagaggcatagtaaccatgctatgagaaatagttaagagaacctggaatagattatgcaacatgaagaaaatatgtttatatttaaatttctgtgttatgtaagactgagttgattattaaaatttttc

SEQ ID NO: 101481 - DNA, 585 bp, Homo sapiens
cttgacaagagggtctagcatgtcaaatctcagaaagcatcaacaaaaatacacttcctaagtatgaggttcatgatccaaagtgcaaaagctatcaccctcctttattgcaagtaagagcaccaagtgagcaagtttggtggagaagtagagaaggctcaactcacaaagaatcacacggaccattcatatttgcagagatcatgctaacaacagacaataattcaaaatatattaataaagttattgctgttattaaagaagaccacaaacaaaaagtatcttagaaaagatataataacagaggttaaagataagctaaaatagctaagcaaagacgtaaaagaaaaaagcaaagccatcttatgcacaaagataaaattgaagagaaaaaagggaatagatattgcaaagaatataatgagtcataaaggataaaaagaaggaaagcaaaaggaacygaagggaaggaagaaaaagtggagagaaaaaacaaaaagagacagagggaggagagggagagagataaaggatggaaggcaggcaggcaggcaaaagaaagaaagaaaaagagtgagtgacaaa

SEQ ID NO: 101482 - DNA, 679 bp, Homo sapiens
acttcttccctttgtgtatccagccctaagggttaagccttctacatttgctatgtccatgttacctctatgctccctttttatttattcagccttccaaccccaggaaaaccagttctctatactgaattactgctgttgaaatatttagtgtaatttctttcttctaaatcttccaactgatgcagattgatattatccacatttttcagatgacaratctaaagtatggagaattaaagtaactttcccaatgccacacaaccagttagtaaagatgcaaggtttgaacccaggtgcatacttacttctctccttaaatatgtaaagggaaactttactgaactataagactgctgtgatggagtattaggagatgttgaagtctaccttgatcaagtaagcattcttcttaggctaaagttctgttaatattttctgccccacaatattcccctcaaagcctgttttagcatgtcctcttaatgaccttaattcaagatatcactttgagttttgaaccttataataggagatggctcctacaggcttccttgcatgagagatgtgatatgagtgtgtgggtcttaagcaatggatcacgcagcatacagtgaaatcaaagaagtataaaaacaaaccttccctcaaagagcttatgatccagtttggaggagat

SEQ ID NO: 101483 - DNA, 620 bp, Homo sapiens
acacaaaacgccctagccttaaaggaaaagaatgataaattgaactgcagaacttcttttttatcaaaagaccttattataaatgtgaagagagaagctacaggataggagaagatattttcaaatgtttatctgacaaaggactctcatctactatatataaagaactgttaaatcaataagaaaaaaatcaatcaacgccctgaaatgggcaaaagcttgaaaaaaacacctcagaagtagatttccaatacctgagtagatgacaaacatatacaaaggtgctcaaygtcattaatcagtaacatgcaaattaaaaccaaaattagataccatttttgttcaccaaaatgatatgtttaaaaacactgcaaccctaagtgtttgagaggataatgaaacaccttgacctcctctcctatactgttgatgggcatgtcagtcgatacaactttgtcaacatctaccatatctgaatatacctctactctgtgattcaacaattccacttctgaatatataaccaatggaaatgcatacatatatacttcaggttatatacacagatgtctataaaagcatttttgtaagaatctcaaactgggaatgtccattaatag

SEQ ID NO: 101484 - DNA, 620 bp, Homo sapiens
acacaaaacgccctagccttaaaggaaaagaatgataaattgaactgcagaacttcttttttatcaaaagaccttattataaatgtgaagagagaagctacaggataggagaagatattttcaaatgtttatctgacaaaggactctcatctactatatataaagaactgttaaatcaataagaaaaaaatcaatcaacgccctgaaatgggcaaaagcttgaaaaaaacacctcagaagtagatttccaatacctgagtagatgacaaacatatacaaaggtgctcaatgtcattaatcagtaacatgcaaattaaaaccaaaattagataccatttttgttcaccaaaatgatatgtttaaaaacactgcaaccctaagtgtttgagaggataatgaaacaccttgacctcctctcctatactgttgatgggcatgtcagtcgatacaactttgtcaacatctaccatatctgaatatacctctactctgtgattyaacaattccacttctgaatatataaccaatggaaatgcatacatatatacttcaggttatatacacagatgtctataaaagcatttttgtaagaatctcaaactgggaatgtccattaatag

SEQ ID NO: 101485 - DNA, 482 bp, Homo sapiens
accttgcatgttttcttatatctcagttaatatatgtatatattattttagctactatcacttctaaggtttaatcaatgatattgaattagtctctgaagaactccattagcatcctaatgtgagttctgatttgcagctcaaaagcttcaggtctgaatcctgcttcaggaatgtgattttgaatcaggcatgtgattttgaccaaaatgacctcaatgtgtggtttttcattaaacaatctcagatttgttgtctatgagtgtggcaatactgactctcatgagtactcacttcacatartatctggtacatagtgtgtgcttgcagttggtaactgccagcattatcaccaccacctctgctcttattgttaattgaagccctctgaaactccagccacctgttcaaacttatatcgatgagcaatgtagaactgaaatagcaatactcttaaagtctagtgaagaggtgatattttt

SEQ ID NO: 101486 - DNA, 604 bp, Homo sapiens
attagtgatgctgagtactttcttcatatacctgttgtccatttttatgtattcttgtgataaatgtctcattttataaaatcacattgttctcttactattatttgagttcctcacatattttagatattaactacttatcagatgatggtttgaaaatattttttcccatttagtaggttgtgtcttcactttgttgattgttggctttgaagaagcttttaaaagtgtaatgtaatctcacttgtatactttttcttttctagcctttgcttttcgggtcatatgaaaaaaatctttgcctagaccaatgccatagagttcgtccctatgtttctgtctagtagttttgaaatttcatggattatatttaagtatttattytgaatttttttgatatatggtgtgagatgaagttcttatttcatttttctgcttgtaaatatctagttttcacagcaccatctattgaagagactgtcatttcactattgtgtgttgttggcatttttgctaaaatccattgactataaatatttgaatatatttctgggctcactattctcttccaattgtgtcagtttttatgccagtagctccaagc

SEQ ID NO: 101487 - DNA, 513 bp, Homo sapiens
agttgtattttggagactgatttagtttgatagttggttttttcagyttagcttgtttcttaattgaatcactggcttcagggtggagccatttaatgaatagcacaaaaaaaaatttgctgtttttagagtttaatatctaatatatgagaagcagacacaaccggaaggcagagcatctagatctttaaaaattaaggatttcacatttacattgaattctgggtccccaaaatagggaaatgccatgggacttgcccatgcaacagttctgcagtgctcctcactacaagggtattcccccaaggctggttagaaatccaataccaaccagtccactctgtaattaactcaacccctataagagtcttctctctttttggcaagtatttccacagcctcgaattgttcaaaccacttttcttatctacaagtgcaaataaatagctttttgcagaaataaccacccattgcaaccacagttggcctgtaagcagcagcaaagctgtatgg

SEQ ID NO: 101488 - DNA, 518 bp, Homo sapiens
attcaacattttgatttgcttattttaaggacacttggagataaagccctagaaattggtgtggatttacttgacattataattcctgagatcataacaagaggtctactttgtaaaacatattatgctgactgaatcttccaagtggctgccaggacattttccttcttcctagcttggagttaattaggtgttaacttgagtgttcagaggaaaacggctaattttcagaggaaaaaaaaatggaactcaaaatatgttagactcatcaattgaattatcatttgatatatgctgatttttatgacctacaaatactttaraacacatctattttggagaaggtgtctatgttcaaaatacctggtcagaattggccaaatttacatttaagttctccctccttgatatgacatctgtgtaaagccatgggaaatcctctgtccaaggggccagacacaccttacagctgaccccggctaagcacagcagacagtagcctcacttgactcatgccc

SEQ ID NO: 101489 - DNA, 590 bp, Homo sapiens
aaaaaaatgggttttgcagagaaggccaagttgtatttcaagagggaaaaaaaaaagacagtagagaatgattgacaaataaatactttggtgacaaatacttgcatgtgtcttctctacrgtgtcatccaactctataaacacagttgagtctatccacatttaatcaattcacaggtgacttcctacctggaagagaactaagcctggcagccagcaagaggctcactgtgaaaccaaggtcttttagttttgtacacaaaccattgtgtcgtagctccttattggctgtgttttcaattcttcaaatctagccggtttgcataagcaaacaatatttccactccaccatttgatgaactaatgtcttgtgctaccaaaatagagaactttaagatggaaaacctctatggaggcctctaagccatcttcctgccaaagtggcattgttgcatggcatgtgttttctagtactttacttaatcccattttaaatataccaagcaaagagcctttcactgcataagcactcttcaccatccaagagctttccttccttatactaaacgtacactgaactaagttcaaac

SEQ ID NO: 101490 - DNA, 590 bp, Homo sapiens
aaaaaaatgggttttgcagagaaggccaagttgtatttcaagagggaaaaaaaaaagacagtagagaatgattgacaaataaatactttggtgacaaatacttgcatgtgtcttctctacggtgtcatccaactctataaacamagttgagtctatccacatttaatcaattcacaggtgacttcctacctggaagagaactaagcctggcagccagcaagaggctcactgtgaaaccaaggtcttttagttttgtacacaaaccattgtgtcgtagctccttattggctgtgttttcaattcttcaaatctagccggtttgcataagcaaacaatatttccactccaccatttgatgaactaatgtcttgtgctaccaaaatagagaactttaagatggaaaacctctatggaggcctctaagccatcttcctgccaaagtggcattgttgcatggcatgtgttttctagtactttacttaatcccattttaaatataccaagcaaagagcctttcactgcataagcactcttcaccatccaagagctttccttccttatactaaacgtacactgaactaagttcaaac

SEQ ID NO: 101491 - DNA, 606 bp, Homo sapiens
cacatatacacagaagagcttgttaatgtctataaataataggttagcattatttattaaatgaagattctatacacattttctcctaaaaatattaccacatttttgacatagagtcttcctctttgatggaagaaaaaagttagaaggccacagaaaacttatttgtacataagtttgctttgtcaatatgtagcggcagtcaactgacrgagcaactattacccaaccctcctatttttcatatcaccactcagagttccttcaaatctgctttgagctccccaggcccttttaaattacatcataccaagtggagggatggggaaaatggtcaggaatatatggtccattagcaattccctgctggccttctattacaaggtgtttctcaaactattctgctattttgaaagataaatctttcttattgatttcagtctttaacactctactcatgaagaagtgagcttgtaaacggtccaaggcatgggattgcaatttgctgggttcaaatgatgctgccccatcattttccaggtaggcttgcatttctctcttcagtcctttatttttaacctttcctgtttccttcctttcctcacc

SEQ ID NO: 101492 - DNA, 521 bp, Homo sapiens
acagtttttccaatggaacataggcagagggcaaactttggtctttatttagctgaagttgtcaaatatccaaagattaggtgttggaggtgccctgaattcacttcatgagggcaatcccaagagtcactcgatgtcacagagtaaaaacagcccatcacattagcagttctttatctttggrgagaaatttctctcttcaaggttctgatgaaagctagggagaaaaatgcagtaacatgcaaaattctgcatccaattttaagaattaagctcttacttaatgccaagcatgctttggcagatgaagaaaagataaaagatgtattaggcaaaagcagctttgcttttctgcatttaagttctgcagtgaagtggagttttgatcccagttattctccctgctgacttgctgcttcagagtgtgggcatcacctctaacctatttaaacgggaagggtgcacatgagtattaggtcagaagaggagaaataggacagaagtgggggggaggagatata

SEQ ID NO: 101493 - DNA, 572 bp, Homo sapiens
gctcctggccaatagaatattattaatatgtagcagctgttgtaaacaggtattgtaaaattaagtttagccyaaagttgcctccttacatatttgaagtgtggcctaaaggtttctccatgcatagtgaactgtaacctaactgaatgtataaacagactataaactccagtcagcgagtttgtgccaaaggcctccaactgttcaaactgttcgaataaggcaaatgctgacctatacccaatctggctgtttctgcacctcactagcattttctgtttgtcattttcttttttctctccataaatcctttttgactacatggcggtggcaatttgcaaattgttctttgcttcattaaactcttaaatttaatttgtctaaggtttttcttttcacactattatatatcatgcatctcttctcattccctaaaagtaaggatataaaatttcccacaaatgtactatctttacacaattatgctgatttctaaggacagatagcagaaatatatgagaaaggagaagtgaaaggcatcaaattctgttttggccagaataaagatggac

SEQ ID NO: 101494 - DNA, 571 bp, Homo sapiens
actcctgggctcaaatgatcctcctacctcagcttcccaaagtactgggattacaggtgtgagccaccacgcctggattgaatatgtttatattggtaaatatcctttacccaggggccctgcagtgctgcmttggtcactcagcccctttcctgagattccctggatttctccatcattcagtcagtaaaggcttattgcctccctgccagcccccggtcaggcagtttccatgcagaaagatttccaaatattttgagcatcacctgtgctctgggcttaagatttcttacttctggaatgaaagtttagaatagataaccctaactctggaatgctgaggttttatgttgtacgtttattatttagaggaaaaggcagatttgacttggggccagaaccctgcctttgcctctggaattggctttttggaaaggtgtaaaactatttgcattgaaagccaggaaggacctgaaagcagttctctgccaaattgatctgtacactttggccatcaataacttcaagtataagattacttatggggccatcattgaatcataaagatgaa

SEQ ID NO: 101495 - DNA, 571 bp, Homo sapiens
actcctgggctcaaatgatcctcctacctcagcttcccaaagtactgggattacaggtgtgagccaccacgcctggattgaatatgtttatattggtaaatatcctttacccaggggccctgcagtgctgccttggtcactcagcccctttcctgagattccctggatttctccatcattcagtcagtaaaggcttattgcctccctgccagcccccggtcaggcagtttccatgcagaaagatttccaaatattttgagcatcacctgtgctctgggcttaagatttcttacttctggaatgaaagtttagaatagataaccctaactctggaatgctgaggttttatgttgtacgtttattatttagaggaaaaggcagatttgamttggggccagaaccctgcctttgcctctggaattggctttttggaaaggtgtaaaactatttgcattgaaagccaggaaggacctgaaagcagttctctgccaaattgatctgtacactttggccatcaataacttcaagtataagattacttatggggccatcattgaatcataaagatgaa

SEQ ID NO: 101496 - DNA, 607 bp, Homo sapiens
ggtttgtcacattatcttcagaaaaactgggaatatgatgaaaatctgtcaatatcattttatgactgctggatcaaacataccttttaaattgagaaacagtacctcaataaacttttaaagtatatttatttttgttacaaaatgatgaacatgatgcaatgttcatgttctagttcatgaaaaaactagaaagtaaagcagtatttgttccctaacataggtgtaaagaaagttttatcaaaaattgtaaatgataagaaaaataagaaaataaaatgatattttaatctgtattttccaaaattaaggatttgactttaaaggattttttttaaacaacatgggcctttcatattttgaaatgaatctcagcaaataagagttattatcgtagcaagtcactgctactgatgaaactgtgctaatttggtgtctttggatagaaaatatttgagaaccactgatttgaatatcmtatgtcttcattataggttattgatataccttttgtaactttatctattgtacctggataaagatacaagtaactaggaaatattacatgggaagaaaatagaaccttatgattttctataaaaataat

SEQ ID NO: 101497 - DNA, 606 bp, Homo sapiens
cacacatacacacacacacacacacacacacacacacacacacacacacacggttgttggcaggaggcctccattcctcaccatgtggtcttatagagctgtgtgtgttctcatgacatggcagttgtcttcctctagaggaagtaatctaggagagcaagtaggaagacaattccttttatgaccttatctgggaaattacacaggctactttcatcaaattctattctgcaggggcaaatgactgcatctaaccaacactcaagaggaagataatcaaactccaccttttgaatggaaaagtatcagtcaatttgtggacatttatttaaagcaccaaagaactccccaatrgaggacatcacaaagttcaacccgatctttgtattctgcttaaagtttaggaacttggggtgatatgaaggcaactccatcaagcccaatatggctacttttagtccagaaaactagataacaaaaaggtacgttttctgaaatctcttaccttacccccaacacacaataaacaatataggggaaacaggaaatttccctgggaaaactctttgagggccacctacccattgggcaaaagatgatggttca

SEQ ID NO: 101498 - DNA, 592 bp, Homo sapiens
aatatgagagaggggaagtaaagaagaaatgattaagcaaaaaagaattagaactwgaatatttgaaaaattctcagcttagctgtgtttcaaaacaaagggagagaaagtgtgttctggaaagaacatcagtggtgtggatggacaaccatttgctaaagagattgtggtgcatgatgtaatgaaacaatcagccatctcagcagaagtcaggaatagagatgggggggtatgtaggacagatgcgtggaggaccctctttgatggcttagaccctgtgaattgcatgggaggccatcaggggtttcagccagcagaaatctgctggcttgaactaaaggagatataaatggaatgaaatggaggcaggttttcagacttctgggattctacataatggatcagtggagaactccccagttacaaacatgtattatccttcaagactggagaagaatgaccccaaacttagttcagaggttgacagagctgccaatggcactacaggatgtacaggcctggagggacatgattgcttcctccttggttccagggaggttggtcatctctttaactaacgagggcaagaaca

SEQ ID NO: 101499 - DNA, 575 bp, Homo sapiens
taaactgatagtcttcaaacatttgttcaacacattgaggagaggcaggtgagaggatggaaaacagaaggggcccacggtcacagagcagtttcatatccatccatgcttttggatattctagctctggccccaaacttactgccacttagaagacaatcccctggaaatacacgtcttttctcatggaataaaagacaaagttcatccacagaagattagaagtgggagaatatattaagaggagaatggttggaaaatgtgcttgcatagatcccactcatacagattcattgttgattttcttctaccttcctataatgaaggccmttatcatgtgagccttaaggaaaacatgtctagcattttgtttaaccaatcaatggtgtttaatttagggaaatagagtagacttttataaaatgttttttattccactgggtggttctcgtgaaaccttgagcagttttttttttctttcccatagtgattaaagcagctgtagagagatgttggaagggccagagcaagccttttgagtgattttagtgctcactgtgcattgactaagcacc

SEQ ID NO: 101500 - DNA, 628 bp, Homo sapiens
ttcctataatgaaggccattatcatgtgagccttaaggaaaacatgtctagcattttgtttaaccaatcaatggtgtttaatttagggaaatagagtagacttttataaaatgttttttattccactgggtggttctcgtgaaaccttgagcagttttttttttctttcccatagtgattaaagcagctgtagagagatgttggaagggccagagcaagccttttgagtgattttagtgctcactgtgcattgactaagcacccactcttgttgcactttccagataggaamttgctttatctttataacaatcctaggcattttattgctctccccatttcacagataaggaaaaatcaggagtgaaatgttaattaaaacttgcccagagtcacagaaaccacaggtaaggaccagtttcaaatccacaatgtggcctgtgagtccagagttaaatctaatcaaagtgatttaactttttggaaaaaaatttaaaaactccattttactctttataatcagatgatcctcaaagtaatatggtgtcccatgcttatatgacatacattctttgattcttcagtatttttcagtgtttgggctaagctatcgattttaacaatgtgt

SEQ ID NO: 101501 - DNA, 628 bp, Homo sapiens
ttcctataatgaaggccattatcatgtgagccttaaggaaaacatgtctagcattttgtttaaccaatcaatggtgtttaatttagggaaatagagtagacttttataaaatgttttttattccactgggtggttctcgtgaaaccttgagcagttttttttttctttcccatagtgattaaagcagctgtagagagatgttggaagggccagagcaagccttttgagtgattttagtgctcactgtgcattgactaagcacccactcttgttgcactttccagataggaacttgctttatctttataacaatcctaggcattttattgctctccccatttcacagataaggaaaaatcaggagtgaaatgttaattaaaacttgcccagagtcacagaaaccacargtaaggaccagtttcaaatccacaatgtggcctgtgagtccagagttaaatctaatcaaagtgatttaactttttggaaaaaaatttaaaaactccattttactctttataatcagatgatcctcaaagtaatatggtgtcccatgcttatatgacatacattctttgattcttcagtatttttcagtgtttgggctaagctatcgattttaacaatgtgt

SEQ ID NO: 101502 - DNA, 515 bp, Homo sapiens
atgacatacattctttgattcttcagtatttttcagtgtttgggctaagctatygattttaacaatgtgtcatggaatccagtgcttgtgccacctgcaactatatttcctcctgtcaaacatagccattgtttacctcagtgacttataaaaacttctcataaattcatttttaaagctatcaaactcctctaaaaactactgtctttaaaactgaggggattcgctttgtcaaaataattatagaagttgaaggtagaaagaattgctacatctttctttatgtgctgagatcctttccacagtgccaatttcatttgtacctataaactttaaatgatacttagttcacctaaactttctggctgacacaaaatagaattctcaacccctgaattgcaatctcagaagataacaggctcactctgtgcaccttgtactgtgattgattttcagatgctcttccgcaatccacttgctgtttaattgaaaaaaaattctccattttttcagac

SEQ ID NO: 101503 - DNA, 610 bp, Homo sapiens
ttgaaaagatcaacaaaattgaaaagcctttatcaaaactgaccaaaaaaatagaagactaatattattaaaatcagaaatacaagagagtctttaacatgaaccatagagaaaattaaaaatgatgactttaaaagtggcaaggataattgtaggagatgggtcagagtggtgggagaaactaaagggaaaggagcaggacttctgaaaggttggaaggctctgcatagcttcaggggagaataagctgaaggcagctgctctctgaccctgaggcagagggcaaggagtaggtacgaggaagtataggggaatttttcataaacaggcttgtttacttatgttaaccaggagctgacttttgatcatccgagctcctgactrctccctgaataggggaacaataatgttaattacccacagattgtgttggctccaggctttcggcattatgtctgtactgaataaaagcaagcagctccagctgttcaggactgctcattcttccaccgctaagtgctggacagtcccctagctgctctcgtactgcatacgtgtgtctgagtacgcctttcatacctcactcagacaccgtctgtgggacagaccc

SEQ ID NO: 101504 - DNA, 600 bp, Homo sapiens
tatagttggcctcctgctgtttgtattagatcttactgtttgggaaactaaggcttctctctgtcaaaaggtaaacatttttgttttatcatttgggctaaatgaatgactattttgtagtgacctgtgatcctattttgtggtatcaaatgtcttaaaatgttgatatttgacagaacttccaatagcaaaacttaaagttctaaattcagtctttttgaccttaaaatcacttttttgaatattaygttccctgaagtctgagagagacatattaggcttatgggatttgttatgtttgttaccattatgcagcaaacattgtcaaatctgaagtggcatgtagcttccttttggttttattttatacatttgttagtatgtgtttcaggattctatgacattcctgaaattctgatatgtcttaaacaaatgttgtaattactgttatgttaaattgctgcgtgctacagcaaaaccaaatttccttgtctactgtgtctttaactaaggctgtcataagacttttgtcattcacaattggtgttttgctttgatccttctgaaaaaaagagcaacataatctgccacggtccatga

SEQ ID NO: 101505 - DNA, 600 bp, Homo sapiens
tatagttggcctcctgctgtttgtattagatcttactgtttgggaaactaaggcttctctctgtcaaaaggtaaacatttttgttttatcatttgggctaaatgaatgactattttgtagtgacctgtgatcctattttgtggtatcaaatgtcttaaaatgttgatatttgacagaacttccaatagcaaaacttaaagttctaaattcagtctttttgaccttaaaatcacttttttgaatattatgttccctgaagtctgagagagacatattaggcttatgggatttgttatgyttgttaccattatgcagcaaacattgtcaaatctgaagtggcatgtagcttccttttggttttattttatacatttgttagtatgtgtttcaggattctatgacattcctgaaattctgatatgtcttaaacaaatgttgtaattactgttatgttaaattgctgcgtgctacagcaaaaccaaatttccttgtctactgtgtctttaactaaggctgtcataagacttttgtcattcacaattggtgttttgctttgatccttctgaaaaaaagagcaacataatctgccacggtccatga

SEQ ID NO: 101506 - DNA, 617 bp, Homo sapiens
ttctggtttggctggggtgataactcttttaactttcttgtctgctcctgtaacttttttcttcagtactaactctgctgttacgacctgacactgaaatggtctattttgaaggcctgggaaagcaatgttttcctcctgcataacaatttcttgatgtgtcttaattgctccacrtaacaaggagacatctcatactttttctaagagccatgcatttccctgtacaaggcactagttttctttttacatttctctataatatgatgcatgctcataacctttgggcccacactcttaaaatgtctgacaaaatgcaagtaccttttcatcaggttcaacatccaggtatctgaatgggcttcctatgaggagacgtaatcacaatgaaggaggtttttctttatctttttggtaactagcctgagaacaaaatatttgtgttttatgaagacactttcctgtgttgtctttattaggttttctgattacttgggaaaaccgggctttgaaagggttaaagcatttttttcttttacatcagtgtaagtttctatattgtgtttgaattctgattatcactctggttaaatgaattactattatttaattttatt

SEQ ID NO: 101507 - DNA, 548 bp, Homo sapiens
tttatagggctcaacctaaataaataygggcaaaagtcaatatggttgagttgctgaatttggtttcaggccaaagaaccttgcttatatatatatcctctgtccctctaacaaaacaactagctagttttatcttttcacttttctatgttcacctcacctcactgctcatttgctcttggaaacctggctgttgtgttggaaaaaagtggatctagttctgcctttgccattggaaaacatactttgagctttgtccatctcagatacttcaaaaacccttgtatatgtcattcagtctatgtgattgaaatctaggagctatcactcctaaattgagagacagaaataaaattttaaaacaattttcttaacaaacatattacaaataattaatcttaaatggcagcaaaatgtatccctggtgtctgagccaaagttaatatgtacacttttcagagcccctgctaagctgcctattgcatttgctggaatatggcactaacaggaggaaccgcattctcatgaccagatactaaatgaacatc

SEQ ID NO: 101508 - DNA, 548 bp, Homo sapiens
tttatagggctcaacctaaataaatatgggcaaaagtcaatatggttgagttgctgaatttggtttcaggccaaagaaccttgcttatatatatatcctctgtccctctaacaaaacaactagctagttttatcttttcacttttctatgttcacctcacctcactgctcatttgctcttggaaacctggctgttgtgttggaaaaaagtggatcyagttctgcctttgccattggaaaacatactttgagctttgtccatctcagatacttcaaaaacccttgtatatgtcattcagtctatgtgattgaaatctaggagctatcactcctaaattgagagacagaaataaaattttaaaacaattttcttaacaaacatattacaaataattaatcttaaatggcagcaaaatgtatccctggtgtctgagccaaagttaatatgtacacttttcagagcccctgctaagctgcctattgcatttgctggaatatggcactaacaggaggaaccgcattctcatgaccagatactaaatgaacatc

SEQ ID NO: 101509 - DNA, 548 bp, Homo sapiens
tttatagggctcaacctaaataaatatgggcaaaagtcaatatggttgagttgctgaatttggtttcaggccaaagaaccttgcttatatatatatcctctgtccctctaacaaaacaactagctagttttatcttttcacttttctatgttcacctcacctcactgctcatttgctcttggaaacctggctgttgtgttggaaaaaagtggatctagttctgcctttgccattggaaaacatactttgagctttgtccatctcagatacttcaaaaacccttgtatatgtcattcagtctatgtgattgaaatctaggagctatcactcctaaattgagagacagaaataaaattttaaaacaattttcttaacaaacatattacaaataattaatcttaaatggcagcaaaatgtatccctggtgtctgagccaaagttaataygtacacttttcagagcccctgctaagctgcctattgcatttgctggaatatggcactaacaggaggaaccgcattctcatgaccagatactaaatgaacatc

SEQ ID NO: 101510 - DNA, 526 bp, Homo sapiens
tgggcatgcaagccagaccacagtgggcgaggagaaaacaggaggcaaagtgrtaccagcctccatagatgctctcagaggaacttcagaatgttggccgggaggggaagctgctaaagtcagggagggaaaagaggagctaatatttacctggcaaggggcttccacaaaaagtcctcaccaactgtactccacaatcctgggagaaagggatcaccccagaaagagagaagaggaaatcaaggctcagtgaaattgctggtccaaggtcacaagaccagtaaaggttgagtttgcacccaggaatttgcacctaagattgtatgactctgatttttctgctacattatgcactggagaaggaaacaaagatctaggaagggcccttcaggctgggagggactggcgttcatgtacaggtgaagagaatacatggtggaaattgtcccacaggtggtgggaggtagggggagaatgccacaggtacataattggttgaaaaattcaacaaataacaaaaccatgg

SEQ ID NO: 101511 - DNA, 526 bp, Homo sapiens
tgggcatgcaagccagaccacagtgggcgaggagaaaacaggaggcaaagtggtaccagcctccatagatgctctcagaggaacttcagaatgttggccgggaggggaagctgctaaagtcagggagggaaaagaggagctaatatttacctggcaaggggcttccacaaaaagtcctcaccaactgtactccacaatcctgggagaaagggatcaccccagaaagagagaagaggaaatcaaggctcagtgaaattgctggtccaaggtcacaagaccagtraaggttgagtttgcacccaggaatttgcacctaagattgtatgactctgatttttctgctacattatgcactggagaaggaaacaaagatctaggaagggcccttcaggctgggagggactggcgttcatgtacaggtgaagagaatacatggtggaaattgtcccacaggtggtgggaggtagggggagaatgccacaggtacataattggttgaaaaattcaacaaataacaaaaccatgg

SEQ ID NO: 101512 - DNA, 609 bp, Homo sapiens
ttgagccaaagtgtgaggatgcacctgggaaaaacacaagccacagaagcatctgcaacctgtcctttccaggaaactcagtatttaaagggaaggagcaagcaggagaaaagaagggaagggtgtaggcagtgaggcaaacagctatctacttctgaggctctgattgatgctcaaataatctacactctacataaggtaaacatctgaaaagagggagtatgggaaaaagttgatgatgcagccatctcagggcaggcagaaaagtgattgatcttatcttgtccttgtgtattagtccactttcaccctactgataaagacatacccaagactgggtaatttatacaggaaaaagggtttaatgcacttacacatggctggggaggcctcacaatcatggcagaaggcaaggaggagcaagtcacatcttacatggatggcagcaagcaaagggagagcttgtgcagggaaaatcaaccttataaaaccatcagatctcatgagacttattctcaatcacaagaacagcatgagaaagacctgcccccataattcaattaycccccactgggtccctccaacaacatgtgggaattcaagatgaga

SEQ ID NO: 101513 - DNA, 412 bp, Homo sapiens
atcacttaatgatggaaacatgttctggtaatttcatcgtgtggatatcagacagtgcctttacacaaacctagatggaataacccactacatacctaggcttttgtgtttttccctatcactctgtgggacatagtatttgcctagtatccctacatgtaaggaagagagaataggataaactcagaatggcacctggtatacccaaagaactgcttgggggatagttgattttcaagctagctggaattggtttctctcttttgccacctaaggaaacttattataacagagattttttcaacccagaaaatgatctaccccataggcagacagtgagggttaaaggagwttgtatagtcaagttgactagcctagttcctggacaaattatgctcaacacacaccctat

SEQ ID NO: 101514 - DNA, 412 bp, Homo sapiens
atcacttaatgatggaaacatgttctggtaatttcatcgtgtggatatcagacagtgcctttacacaaacctagatggaataacccactacatacctaggcttttgtgtttttccctatcactctgtgggacatagtatttgcctagtatccctacatgtaaggaagagagaataggataaactcagaatggcacctggtatacccaaagaactgcttgggggatagttgattttcaagctagctggaattggtttctctcttttgccacctaaggaaacttattataacagagattttttcaacccagaaaatgatctaccccataggcagacagtgagggttaaaggagattrtatagtcaagttgactagcctagttcctggacaaattatgctcaacacacaccctat

SEQ ID NO: 101515 - DNA, 612 bp, Homo sapiens
ccataagtcctgatcaagaacaaaatttgctggtgcctcatggggaccttgaaaccggattctcttttgcagcagtatggctccctaccttttattccagggcaggcaccctgttgaggtggttgaggctaccagtgggaagtgcccacagccacatagggccaggtgctgctcatatagagagatccgcccccgccagaggaaactgactttggagaatgagtcacycgttggggtctggccctcagccatgtaagctcagaaattcaatcttttaagttccagaagttattggatgcttgaataaacaaccactgagggacctgagaacaaactggaaagaaaattgactaattctgagcagtctggaggttcacatcagccagatgagcacatgttctccctggaggcattgatcttgggaagccatgttatcccagagtggcttcctacccaggaactggcaatgaagggctattgatgtaaagtgatgttttaatggccccaggcttcccagggcagagggtgggggggcaccaacaatgttcagcctctacttccccaccttcaggcttccctggtcagccatggcctccatcaatggtcccattc

SEQ ID NO: 101516 - DNA, 612 bp, Homo sapiens
ccataagtcctgatcaagaacaaaatttgctggtgcctcatggggaccttgaaaccggattctcttttgcagcagtatggctccctaccttttattccagggcaggcaccctgttgaggtggttgaggctaccagtgggaagtgcccacagccacatagggccaggtgctgctcatatagagagatccgcccccgccagaggaaactgactttggagaatgagtcactcgttggggtctggccctcagccatgtaagctcagaaattcaatcttttaagttccagaagttattggatgcttgaataaacaaccactgagggacctgagaacaaactggaaagaaaattgactaattctragcagtctggaggttcacatcagccagatgagcacatgttctccctggaggcattgatcttgggaagccatgttatcccagagtggcttcctacccaggaactggcaatgaagggctattgatgtaaagtgatgttttaatggccccaggcttcccagggcagagggtgggggggcaccaacaatgttcagcctctacttccccaccttcaggcttccctggtcagccatggcctccatcaatggtcccattc

SEQ ID NO: 101517 - DNA, 612 bp, Homo sapiens
ccataagtcctgatcaagaacaaaatttgctggtgcctcatggggaccttgaaaccggattctcttttgcagcagtatggctccctaccttttattccagggcaggcaccctgttgaggtggttgaggctaccagtgggaagtgcccacagccacatagggccaggtgctgctcatatagagagatccgcccccgccagaggaaactgactttggagaatgagtcactcgttggggtctggccctcagccatgtaagctcagaaattcaatcttttaagttccagaagttattggatgcttgaataaacaaccactgagggacctgagaacaaactggaaagaaaattgactaattctgagcagtctggaggttcacatcagccagatgagcacatgttctccctggaggcattgatcttgggaagccatgttatcccagagtggcttcctacycaggaactggcaatgaagggctattgatgtaaagtgatgttttaatggccccaggcttcccagggcagagggtgggggggcaccaacaatgttcagcctctacttccccaccttcaggcttccctggtcagccatggcctccatcaatggtcccattc

SEQ ID NO: 101518 - DNA, 629 bp, Homo sapiens
cacccagttccccacactgaacctagactcagtyttagccccctttccagaaagtccctcctgatgctgggacaggccaaattccccattcctcagaacactgcagctattcattcaacctggcagggcaccacgtccaggccaggctgcttagcaacccatctcttcgagccactgccccctgccaatcaggtgggcaaagaggaggctgggagcaggcagggaggcgcgcctggaggactgccacaccaacttcaggttgcagtcataaatcagcggctctatagagactgccgcagtcataaatcagcagccctatagagactgccagtctctcaggggaccaacaatccctttgtagcagtgactctcaggaaaccagtgttcaagagtgttagtaacaatacatgggactgtaaaatgccctcacattttccctctagagaacagctttctgggtgctgattgtaggaaaacatcagctcctccctcacccgccagctggctgatcatacagggactgaccattcgttaactctccctccagcccccactcacccttccccaaggctccgcaccataccacacccaccccttctcatggactcaactgcagaggcccaatcccc

SEQ ID NO: 101519 - DNA, 540 bp, Homo sapiens
gaaactgtctgggaccttattaacatctgctctacaggtgttctgactatttaaggcctgcagatgggctgatagaatcagaattgaggaagtgtggctgtgtgggtaagagccatccaccatgaaggaaggtagagagggaactacagtaataacttggtgaatgttcaccaggtcccaggcttcgtgctaagtgcyttacatacattaatttctttctttctttttttttttttttttttttgagatggagtttcgctcttgttgcccgggcttgagtgcaatggcgtgttctcggctcaccgcaacctccgcctcccgggttcaagcagttctcctgcctcagtcccccgagtagctgggattacaggcatgcgccaccatgcctggctaattttgtatttttagtagagacagggtttcaccatattggtcagtctgatctcgaactcctgacctcaggtgatctgcccgcctcagcctctcaaagcgctggaattacaggtgtgagccaccgcgcccggcttacatacgttaatt

SEQ ID NO: 101520 - DNA, 588 bp, Homo sapiens
tcaaatgttatgcaaactgatctaattttctcaatttattgttagattttcagctcatggaatgtgtctgtgaaccagacaaatttaaggggaaagaagggactcaaggattagattcccatgagaacaagaacaaggccgtatttgatcggctgctgctgaaatacggcattttgataatcaagaatgagctttacagaattagcttttaggcagccagtggcatctccatctcaacttgtgttagcaaaatctgctggactataaatagttaatattaaagacaagcaaactataaactatcgactcaaattttttaaaaaaatwcttctccttttttatcctatacaagtaagcatcacttggcaccatagatttgttactggaaagtgcatgggatagcattaggagaaatacctactgtaaatgatgagctgatgggtgcagcaaaccaacatggcacatgtatacctatgcatcaaacctgcacattgtgcacatgtaccctagaacttagagtataataaaaaaataaatcaattaattaaaaaagaataaacgacataaaacaggtaaagagcttagaat

SEQ ID NO: 101521 - DNA, 538 bp, Homo sapiens
atcaaacaaagatgtttgaatttgtcattctgataaaatgacccacaataggaatcttcacagagcaagttttcttcccctcctcccaattcagtatatcacatctccctctccaacccacaaaaatcaatttgcagagataaatttacatataaataaaagtatgcctgcagsttgtaagttcaatcaataaagccacaagcatttgttaaatgcttcctatatgcctagttatgttttaagtgcttggaggtacaaaagagctacatggaatctctctggattcatttaaaacctattttgttacattgaaaatgtatcaaacgttccaaagaaaaaaaaagagagacaaagcctcttcaggaaccctttccttttgcgagcctttgaagctcatgttaaatactatagaagagtttttgaaacttagattcttaaagggaaaaataataggttggcctgaggtttgaaagaaatgttgtaacagtcactgtgaggcatccttcaggaaaaatagtgctttcagtgtttataagtt

SEQ ID NO: 101522 - DNA, 538 bp, Homo sapiens
atcaaacaaagatgtttgaatttgtcattctgataaaatgacccacaataggaatcttcacagagcaagttttcttcccctcctcccaattcagtatatcacatctccctctccaacccacaaaaatcaatttgcagagataaatttacatataaataaaagtatgcctgcaggttgtaagttcaatcaataaagccacaagcatttgttaaatgcttcctatatgcctagttatgttttaagtgcttggaggtacaaaagagctacatggaatctctctggattcatttaaaacctattttgttacattgaaaatgtatcaaacgttccaaagaaaaaaaaagagagacaaagcctcttcaggaaccctttccttttgcgagcctttgaagctcatgttaaatactatagaagagtttttgaaacttagattcttaaagggaaaaataataggttggcctgaggtttgaaagaaatgttgtaacagtcactgtgaggcatccttcaggraaaatagtgctttcagtgtttataagtt

SEQ ID NO: 101523 - DNA, 554 bp, Homo sapiens
attccatgtttacggacagggagtctcaatattgttaagacgtcagttctttccaatttaatctatagattcagcacaattccagtcaacatcttgtgaggttattttatagataccaacaaactgattctaaacttcatttggagggacaagagaactagaatagccaacacattattgaaaaaaaagaacaaagtttgacgattgacactacccaacttcaagacttactataaagctacggtaaccaagacagtgtgttattgacaaaagaatagcaaatagatcaatgaaacagaatagagagcccagaaatcaacttacataaatatagtcaattgatctttttttacaaaggagcaaaggcagtacaatggataaagctttttaatatatgaaacaactggacagctacacataaaatatagactttrcacccttcacaaaaaattaactcaaaattcagatcataggcctaaatgtaaagcacgaaactataaaactcctaaaagatagcatagaacatctaaatgacctgagatatagttatgact

SEQ ID NO: 101524 - DNA, 554 bp, Homo sapiens
attccatgtttacggacagggagtctcaatattgttaagacgtcagttctttccaatttaatctatagattcagcacaattccagtcaacatcttgtgaggttattttatagataccaacaaactgattctaaacttcatttggagggacaagagaactagaatagccaacacattattgaaaaaaaagaacaaagtttgacgattgacactacccaacttcaagacttactataaagctacggtaaccaagacagtgtgttattgacaaaagaatagcaaatagatcaatgaaacagaatagagagcccagaaatcaacttacataaatatagtcaattgatctttttttacaaaggagcaaaggcagtacaatggataaagctttttaatatatgaaacaactggacagctacacataaaatatagactttgcacccttcacaaaaaattaactcaaaattcagatcataggcctaaatgtaaagcrcgaaactataaaactcctaaaagatagcatagaacatctaaatgacctgagatatagttatgact

SEQ ID NO: 101525 - DNA, 534 bp, Homo sapiens
gtctctggcttctctgatgctgtctgcaggcttccctgtactcccaaagccagtcctgactcyaaaacccagccaggcctgcagagcttcaccatctctggttgtccaggcaaaaactctgaatgctgtaatgcagagatcactagagcttctatgtagagactcagccaagacccttgaagaagggagacaagtttggccatgaaacaataaaccacctttagaaactcaacagcacttattgggtgcctgtggaatggtgctaggcactgtgggtacagcaagctctgccttcacagagcttagagtcaccttcagacctgctgaacagacactccgcttccttaccttctgctggtagcatggtgtttaggcttccagggcagcttacctctttccagttctgatatgggcaataagagaagtcacacctgtgtggaccaacaccaccgggaatagcaataaaacaagggatcagacaaccaaggtacattccatcccttccagctgattctttctagtttatgcattgtt

SEQ ID NO: 101526 - DNA, 545 bp, Homo sapiens
aaaatctatttaaaaaattctttaaaacaaggttacaggaaacaaagttaatatacaaaaatcaatggtgttcatatattagcaacaggcaattgaaaatcaaatgatcttccttgaataaagacagttttccttcttcctttctgatctttatgccttttattccttgctttataccattgctagaagcaccattacaatgttaaataaaagtgatgagagtgggaattcttgctttggcctagattttaggaggagaatattcaatatttcaccagttagtataatgttgtattttttgtagatttcctttattagcttaagaatratctctttattccgagttttctgggaatttttatcatgtatcagtgttaattttgttaaacgctttttacacattcattgaaatgattacatgttttaaaatttttttctgttaaactgcattgattatttgatgttaaactctaccttgtttttcttagaaaaaaaatctacatcttgacatattgtttttatatcttgctgggttgaatttgcta

SEQ ID NO: 101527 - DNA, 447 bp, Homo sapiens
aaggtggggaggaggagccacccacttttaaacaaccagatctcatgagaacagcagcaggagatggtgctaaaccattcatggaggaccacccccatgatccaatcacttcctaccaggccccacctttaacattggggattacttcttgacatgagatttgatagggacacagatccaaaccctatcaaagggtttgatgtacagatcttaggggcacataaacattaaacccatagcagacaccccttgacatcaatcacagacctcagtcagccattgacccagggayggtcatggtattattaacccacctgaggaggcatgcttcagggaggacttccatgttgacacctccaacggaaggggccaatgaaggcagcctactcgatccctcagagcttgtgcctcctcccacttgtcaggagtatactttaaaaccccatg

SEQ ID NO: 101528 - DNA, 654 bp, Homo sapiens
tggtttttggtttttaagagaccacgtgagatttacttaatgaaaagcagagctgctggcttctcctcaatacatgtcctaacattagcatgcaggraaccgcctcaaggaggacactaagggaaaacacaaactaggacatggcaacatttcctcgaagattttaagaggctggactagtgttcatgaacatgtcttttgtcttacagcttcagtggggaaagaaagtctgtgcctgacggtttttggtgtttagacctctgtcttttttaaacattttcaaatgcctaaatgaaaactctgagggagtttccgactgcattgttcccatttcctaggttctgattccagcactgcctctaaatccagtgtgaacccgggcagtctcagcctccctggtctccaagagcccttcccacttactgcattctaacacatgatgctcaaagtctcctcctaatgggactccccgcacaggggcggctcctgcctacaaccggactgcctcagtgagtcttccctctcctctcctgctgtctcagtcaggcctaggtgctccgccagcaacctctgcagagcacagaactgtgtacagtgggagaattctcataaaactcaacccaggcttgcagctgcatccaagaaaggagaaaa

SEQ ID NO: 101529 - DNA, 654 bp, Homo sapiens
tggtttttggtttttaagagaccacgtgagatttacttaatgaaaagcagagctgctggcttctcctcaatacatgtcctaacattagcatgcaggaaaccgcctcaaggaggacactaagggaaaacacaaactaggacatggcaacatttcctcgaagattttaagaggctggactagtgttcatgaacatgtcttttgtcttacagcttcagtggggaaagaaagtctgtgcctgacggtttttggtgtttagacctctgtcttttttaaacattttcaaatgcctaaatgaaaactctgagggagtttccgactgcattgttcccatttcctaggttctgattccagcactgcctctaaatccagtgtgamcccgggcagtctcagcctccctggtctccaagagcccttcccacttactgcattctaacacatgatgctcaaagtctcctcctaatgggactccccgcacaggggcggctcctgcctacaaccggactgcctcagtgagtcttccctctcctctcctgctgtctcagtcaggcctaggtgctccgccagcaacctctgcagagcacagaactgtgtacagtgggagaattctcataaaactcaacccaggcttgcagctgcatccaagaaaggagaaaa

SEQ ID NO: 101530 - DNA, 327 bp, Homo sapiens
aaattagttcaagaataattagaaaatatgaatagacctataaaaagtaaaaagattgaatgtgtaatcaaaaactacgctgaggctgggtgtggtggctcacacttgtaatcccagcactttggaaagctgagataggaggatcgcttgaagccaggagtttgagatctgcctgggcaacatactaaaaccctgtattacaraactaaaaataaaaattaggcatgaatggtggtgtgggcacctgtagtctcagctacacaggaggctaaggcaggagaattcctttagcccaggaatttgagactacagtgagctatgatcctg

SEQ ID NO: 101531 - DNA, 568 bp, Homo sapiens
tcactgaaagctgtttttataagagcattaattcctttcatgygggcagcactcttatgacctaatcatctcccaaagcctccacctcttaataccatcacgctggggattaggactcaacatatgaattgtggaagttgggtgatgggagggacacaaacattcaacccatagaagcactttataaatttaaaatgaaaaaaacacactgtaaaaatttcaaagagtcttccaatgtgtctttatctattttgatgttcttgaaggggtgtcccttctccgtggtgagcacctcccctggtgttcataatcccagtcattctaacttcttttgagtcacttgtctatctattaggtccgctctttctttgacttttgttatctcttatcccttggcttcttcctctttgcctgtaattgtcctcaaactcccattctgccatccttccctctcctttgcttcctctgtttgtcatttcctagttacactccaatacctggtttctgcagccatagccttcttagatcttatcaacattctaagtgccaaatacaaagacacttgcca

SEQ ID NO: 101532 - DNA, 547 bp, Homo sapiens
gggtttctgcgagtagaaacatgtaagctgcagagagatcatttttgtaaactccatgcagatagatgcacagagaaagagctggaagaacccacactgcatggttggcactgggaaggaagaacaggctttcacgttttacctaaggtatttgttcactgattatgttttaagggtatatgctcattttgaaataaaaaaggacttttcaaaagatgcacccagtaattatatgcattggggaggtgacttagagcaggaatactgctgaataatttggttcaaacatgaaacctacacaagacaaagtcacttgacagaggatgactcttcagatgttcagggaaactcacgcactcactcacacacgatgcatcggccrggctccctgatgcccccaacgcctctcctatgtccaaggaaatacttctgcagagcacgttagagtttccaatgcatgtgtgttatctcagagacaaagggcagaaaggggaaaaaacagaaagtacagtacggtaagtctcaaatttcagcatcctgttgtctc

SEQ ID NO: 101533 - DNA, 496 bp, Homo sapiens
atgcctcaggtagttggcatgttatgatatgaatggattattcatttaggaagacatccacagcaggacccagagtcattataggaaactcatgcctgatggtaaagtgcttcctggcctgtgttaacaagcatctatttagatcatgacactcccttccaaagacattttaatatgccatttgataggggctagttggagtttaggtaggtggagttataaagtatttrctgaatccttacctttatataactccatatcacatataacaatgagtaagcttaggctcatagaataccattttatttgcaggctctaaaacctcacctggacttgcctaatcgtggcagttatctgttggcatgacattattactttatctcattcgccaagttcaggctttgaatgatttgaaagaaaccagtgtactagccttttaattttaaagatgaacaaaatggggcccagggaaattaaatggattttccacattcac

SEQ ID NO: 101534 - DNA, 590 bp, Homo sapiens
catttcagaattttatgtgataggcatgccaacatgaatgatttaaaacttattacagtgagtggttgctgactatcattttgaagattatacctctgtgtagacttcatttttaatttaattgtttactaagaaatttatctttcctgggtgctgttacaaaatgtgcagctttttgacaaaaaaaaaatgagacttgattgttactaaattttagacaaggtatataagtaagtacgatcggtaaaaaaaaaaaaaaaaaaaagcatgctatttgaaaaaatagaagtagaaatatgaaaaaaaatatatttaagttcttccctggcacaaattttcctcttccaatctctcgttcacttctctcccttagttgttctgtgaaatmgtagctagaataaaataaataataaatctaggactaacaggcaaggtttcattccaagtaaagcgtttcagcaatttccccctgtgttaatttccttatctggatgacagcaatccgaattagaataactctctttgctgcaatagagcagattaactccacagcaggttttcctgaaagatgtagcttagccagaccagtc

SEQ ID NO: 101535 - DNA, 443 bp, Homo sapiens
aactgagaagtattgatccagtaatagcagttcaagctttgactgtgagtccttaaccctccagacataatgtcatagcctcttatccttgcctcttaacattacctgcctatctctgcagagctgtcacctatggtaatacagttccaaacgctttytaatcattactcattcaggcagcattcattctgtagccagtaaaaaaaaaaaaaaaaaaaaagaaaaaagaaaaagttcaggtgtcgctttgacttctagacagaacgaggtgttttcttctacggtttccttcaggcctttaatatactgtgtgtattaaaatatgccatcctaaaaagaagccattaaaataatgtccagaagaggcattaagagagttaagccatcaggaacacgtggcaatccactctgaacaacgtaaagagaccactggggttagggaa

SEQ ID NO: 101536 - DNA, 590 bp, Homo sapiens
cttaacattacctgcctatctctgcagagctgtcacctatggtaatacagttccaaacgctttctaatcattactcattcaggcagcattcattctgtagccagtaaaaaaaaaaaaaaaaaaaaagaaaaaagaaaaagttcaggtgtcgctttgacttctaracagaacgaggtgttttcttctacggtttccttcaggcctttaatatactgtgtgtattaaaatatgccatcctaaaaagaagccattaaaataatgtccagaagaggcattaagagagttaagccatcaggaacacgtggcaatccactctgaacaacgtaaagagaccactggggttagggaagactttattctcagcagcaatccctcgctggagcaaagagctcagagtaaacaactttgtgcatgtaaaatctatcagtaaggcagaaccaggtgatgggaggtgattggcatcactgaactgaaggcagaaatagcacttggtggacaaaggtattgggagtagcagtgggacctaaatatgagtagcgtggaattaaatagtccaatagtaacaagaagtctacatgttatgagtttct

SEQ ID NO: 101537 - DNA, 635 bp, Homo sapiens
caaaaaccctcaaaattttgaatgcaattaaacgttaatatattttagtgaaactatatgatgtatagtatatatgacataatgaaatgtaaaaataatatagtatgtgttcaagcacttgtagtttataaatattttcatgtgaattgctatgtttcattcttgcaccaactctattaagtggacaagaataatctctcttcaaggaatggtacatgttttacacacacacgcacacacacaaacacacacgagctgaggcattttttggatgtggagctgtatgaggctgacagcagttaagtgatttgttcaagttcattacaagaaaaacagtaagttggagggaaaaaaacatragcttttgagtgggtctgtctgtgggtttaaaccctacttttacactttcaagttgcaatgactttgtgatagttactaaacatttcttaggaagtctcagttttctgagatgcaaaatgagaattgttgcagagccataaagaaaacagagaatgcacataaaacatacttagtaaatggtacataggaggtgcttggtaggtaaaactggaacttttgtctttttcttcagtgttcttcctactccactgtacttcaagaattaaaaatatcat

SEQ ID NO: 101538 - DNA, 635 bp, Homo sapiens
caaaaaccctcaaaattttgaatgcaattaaacgttaatatattttagtgaaactatatgatgtatagtatatatgacataatgaaatgtaaaaataatatagtatgtgttcaagcacttgtagtttataaatattttcatgtgaattgctatgtttcattcttgcaccaactctattaagtggacaagaataatctctcttcaaggaatggtacatgttttacacacacacgcacacacacaaacacacacgagctgaggcattttttggatgtggagctgtatgaggctgacagcagttaagtgatttgttcaagttcattacaagaaaaacagtaagttggagggaaaaaaacatgagcttttgagtgggtctgtctgtgggtttaaaccctacttttacactttcaagttgcaatgactttgtgatagttactaaacatttcttaggaagtctcagttttctgagatgcaaaatgagaattgttgcagagccataaagaaaacagagaaygcacataaaacatacttagtaaatggtacataggaggtgcttggtaggtaaaactggaacttttgtctttttcttcagtgttcttcctactccactgtacttcaagaattaaaaatatcat

SEQ ID NO: 101539 - DNA, 578 bp, Homo sapiens
ggttgcatactgtgggaggtaggattatggaaaagaaagatgttctggtcctaatactcagaatgtaggaatgggttaaattacatggcaaaggagaattaaggttgtatatggaattggtgggggtagatatggacattatcctggattatcaggatgagccctgtgtaatcataagcattctttcaagtggaagagggaggctagaggaagcatttcagagtaattctatgtgagaaagactctactaggcattgctggcttttaatatggaagggarcaatgaatcaaaaaatatagaaaacttctagaagctgaaaaagcaaaaaaattaaaaaaggatttatctctgaaaacacagccctgctgacaccttgattttaacacagtgatactatctcagacttctgaacccccagaacagtaaattaataaatctgtattgtttcaactcacaaagtctgtagtaatttgtagcagcagcaatagaaaactaccacatcactctttgactctcccatttaggaatgcttgtgttgtttctaagctgttagtattgtgaacagtgattctgagaa

SEQ ID NO: 101540 - DNA, 571 bp, Homo sapiens
aaactcagcttatgataaaactaktaaaattcttattaaaagaagccatagtttccagagcaaggaaacaaatcacccagtttaaaaatgggcaaaggacctgaatagacatgcctcaaaagaagacatacaaatggcaaacaggcatataaaaaatgatcaacatcactagtcatcagggaaatgcaaactaaaaccacaatgagataccacctcacacctgttacaatggctattaacagctgaatgtggtggctcatgtttataatcccagcagtttaggaggctgagacaggcagatggcttgagcccaggggcccaaaaccagcctgggcaacatggcgaaaccctgtctctacaaaaacacaaaaattagccaggtgtcatggcatgcacctgtagttccagctccttggaaggcaggaggatcgcttgagtccaggaggtggaggttgctgtgagccaaaactgcaccattgcactccagcctgggtgacagagaccctgtctcaaaaaataataataacatggctattatcaaaagaatgaaagatagcaaatactggcaagg

SEQ ID NO: 101541 - DNA, 639 bp, Homo sapiens
aatccacattaattgatacatattatattactgtaacaaatctgaacatggattttttattcagttataattaaagatgggagcccttctcttactttccctttgttctgagctgcgccatgccttttctcttttgggggctcttcagcaaagrcaagtgtccccagattgaaactctggatagaactttttagactcagggaacatagattaaatttacctttcagctgggtgtggtggctcatgcctgtaatactagcactttggaaggccagagtgggtggatcacctgaggtcaggagctcaagaccagcctggccaacatagtgaaaccccatctctaccaaagatacaaaaattggctgggtatcttggtgcatgcctgttgtcccagctactcgggaggctgaggctggagaatcacttgaacccaggaagcggaagttgcagtgagctgagatcacgccactgcattccagcctgggcaacagagtgagactccgtctcaaaaacaaaaattaccttttaactgccatgtgatcagaggcaaaaacatgactgccatatccataagtttcttttgatagtccttctataatcaatttgctcactctaataactctagatatgtaatcatgc

SEQ ID NO: 101542 - DNA, 592 bp, Homo sapiens
tagtaacatgacctggaaacatgctttcagctctctggacctccttcctctgctagaaaatgaggcgcttrgtccaaaagatgtatgatctcagtatgcattttcaaactcgtaaattacatgtgtcagagtactaattagaactattttcaagaattggaagtcccaggactctcatttcagagatgcctactgtatgtttttcagatgttgtctaatttgctctttaaaattctagagatatttcacagttgaagaagctaagatttcgtaaattaggttaagtaacctgcccaggacacacagctagtatgtggcaacacgttgggtcaaaactgatttgtctgctttcaaagtctgtattcatttactatgcccaatctctacctcctccaaatacaaagcagaggaaggaagcagtgtatatcaaatatctattatgtgccagaaactgtgtatgtctcattaagtactcaaaacaactttgtagagtattatttactttagttttatagacaacaaaacaggcacaaatgcttaaatcatttgcccaggaacacataaacagtaagtgggggagctagcacttgat

SEQ ID NO: 101543 - DNA, 502 bp, Homo sapiens
actttttgcatcaccatgagaaaatgagaccaagtgtttacaaatgagaaatcattccaactggaaatagtcggaggaacatgggaaacagttactagggttggaaacgtaatgagaaataacacacgagctgagcacaatgtgttttttgtgaagcagccacaggaagggaaaaagtgagcttagtaacatcscaaattgcagcagtgttgagagtgaggtcccaggagagagggaggatcccaggccaacgttttctgctctttgcccagggagccatagcaggggcaggatttgtaagaaaaagcaacgaaaatgtgttcagtggcaagagaactggaagaacgccgtaggtgtgcatggaacttccccgtaattagacaaaatttaatttacccacaggcttttcaaacagtttttcttctcaagtatctgtgttcctctaagactagtgtaggggcaaggaagcggggatgaagacatccaagtaagaaaacaaaat

SEQ ID NO: 101544 - DNA, 484 bp, Homo sapiens
aaggtctgaagataaaatttaacagtccatataaaacacaaacatgttcacttagcataacttgtttagcataacttgttttattttaccatggtgcagaatctctttgattctgcctttggggcagatttttggggttgcttagggatattatgtaactcaaatgataaagctatatttctggattttaaygaaccagagatacacagtcagaatttcgttattaaaaaattaaacaaataaacatgaatcaaatcatctgtgtctgtttccaaaacatgtatctatatattttcacaatctgcttttctcctaaaataatggttcttactgtttgtggttataatatttatttgagaatggaaggcaaattttgactgttatctcaagaaaaaaaatacggtattttgcaggtgatcataggagttcccagaattggttggagtctaaagactcctgactgagatagtttgaaatctggaca

SEQ ID NO: 101545 - DNA, 484 bp, Homo sapiens
aaggtctgaagataaaatttaacagtccatataaaacacaaacatgttcacttagcataacttgtttagcataacttgttttattttaccatggtgcagaatctctttgattctgcctttggggcagatttttggggttgcttagggatattatgtaactcaaatgataaagctatatttctggattttaacgaaccagagatacacagtcagaatttygttattaaaaaattaaacaaataaacatgaatcaaatcatctgtgtctgtttccaaaacatgtatctatatattttcacaatctgcttttctcctaaaataatggttcttactgtttgtggttataatatttatttgagaatggaaggcaaattttgactgttatctcaagaaaaaaaatacggtattttgcaggtgatcataggagttcccagaattggttggagtctaaagactcctgactgagatagtttgaaatctggaca

SEQ ID NO: 101546 - DNA, 484 bp, Homo sapiens
aaggtctgaagataaaatttaacagtccatataaaacacaaacatgttcacttagcataacttgtttagcataacttgttttattttaccatggtgcagaatctctttgattctgcctttggggcagatttttggggttgcttagggatattatgtaactcaaatgataaagctatatttctggattttaacgaaccagagatacacagtcagaatttcgttattaaaaaattaaacaaataaacatgaatcaaatcatctgtgtctgtttccaaaacatgtatctatatattttyacaatctgcttttctcctaaaataatggttcttactgtttgtggttataatatttatttgagaatggaaggcaaattttgactgttatctcaagaaaaaaaatacggtattttgcaggtgatcataggagttcccagaattggttggagtctaaagactcctgactgagatagtttgaaatctggaca

SEQ ID NO: 101547 - DNA, 484 bp, Homo sapiens
aaggtctgaagataaaatttaacagtccatataaaacacaaacatgttcacttagcataacttgtttagcataacttgttttattttaccatggtgcagaatctctttgattctgcctttggggcagatttttggggttgcttagggatattatgtaactcaaatgataaagctatatttctggattttaacgaaccagagatacacagtcagaatttcgttattaaaaaattaaacaaataaacatgaatcaaatcatctgtgtctgtttccaaaacatgtatctatatattttcacaatctgcttttctcctaaaataatggttcttactgtttgtggttataatatttatttgagaatggaaggcaaattttgactgttatctcaagaaaaaaaawacggtattttgcaggtgatcataggagttcccagaattggttggagtctaaagactcctgactgagatagtttgaaatctggaca

SEQ ID NO: 101548 - DNA, 578 bp, Homo sapiens
cgaggacagggacagcaaagagtaagcagagtgacctgggggattattcaccggtggcggcatattgtgtccaggagaatgaactgccatgaacagcaagtagaagagccgactcaacatggaatagtagttttagttgaagatatgaagctccccagtcactgcacagccagggtggattttctgccaccttcacaagcctcctgcagggagggtcaccgtgtctcagatctactcactgtggagtttaaatcctccctcctctgtttgtcacccctcagggtgagctgagaartcagccagagggagcagagtgacagtggctgaagggaaatggtactgggcagttgatagtgaacagagcccgagaggaaaagcccctccccttaaggctgcaagatctgcattagggcaggaggttcttcagtgcagaaagaagcagaggtcgtcaaccagaggatctggcaccagctttttggcacttacccagaagaacagttcacaggccaccaggggaaaacaccagatgttaccaggaggggcgtggaagtcctctggttcttggtctccttgaattc

SEQ ID NO: 101549 - DNA, 562 bp, Homo sapiens
acgattatcgagacaagtcaccccaaaaccgctgtgcagcttgggaaggaaaagagctaatcacatggagggttctatattcgcttcccaaggcacacactgtcccyacatggccaaaatctactgttcccctgggagggcctctatcccctgcatgcaatcaaactattccagcagggtggaaatcgcagttacacaagtggttcgacagccacatcccccggtgggcctgtacccctcctggctatgtatttttatgtgggccacaaaaaaataaactgccctttgatggaagtcctaagataacttattcaaccccccctgtggcaaacctctacacttgcattaataacatccaacatacgggagaatgtgctgtgggacttttgggaccacgggggataggtgtgaccatttataacaccacccaacccagacagaaaagagctctgggtctaatactggcagggatgggtgcggccataggaatgatcgccctatggggagggttcacttatcatgatgtcaccctcagaaatctctccagacaaatagacaacat

SEQ ID NO: 101550 - DNA, 562 bp, Homo sapiens
acgattatcgagacaagtcaccccaaaaccgctgtgcagcttgggaaggaaaagagctaatcacatggagggttctatattcgcttcccaaggcacacactgtccccacatggccaaaatctactgttcccctgggagggcctctatcccctgcatgcaatcaaactattccagcagggtggaaatcgcagttacacaagtggttcgacagccacatcccccggtgggcctgtacccctcctggctatgtatttttatgtgggccacaaaaaaataaactgccctttgatggaagtcctaagataacytattcaaccccccctgtggcaaacctctacacttgcattaataacatccaacatacgggagaatgtgctgtgggacttttgggaccacgggggataggtgtgaccatttataacaccacccaacccagacagaaaagagctctgggtctaatactggcagggatgggtgcggccataggaatgatcgccctatggggagggttcacttatcatgatgtcaccctcagaaatctctccagacaaatagacaacat

SEQ ID NO: 101551 - DNA, 562 bp, Homo sapiens
acgattatcgagacaagtcaccccaaaaccgctgtgcagcttgggaaggaaaagagctaatcacatggagggttctatattcgcttcccaaggcacacactgtccccacatggccaaaatctactgttcccctgggagggcctctatcccctgcatgcaatcaaactattccagcagggtggaaatcgcagttacacaagtggttcgacagccacatcccccggtgggcctgtacccctcctggctatgtatttttatgtgggccacaaaaaaataaactgccctttgatggaagtcctaagataacttattcaaccccccctgtggcaaacctctacacttgcattaataacatccaacatacgggagaatgtgctgtgggacttttgggaccacgggggataggtgtgaccatttataacaccacccaacccagacagaaaagagctctgggtctaatactggcagggatgggtgcrgccataggaatgatcgccctatggggagggttcacttatcatgatgtcaccctcagaaatctctccagacaaatagacaacat

SEQ ID NO: 101552 - DNA, 622 bp, Homo sapiens
gctgtagtgggctgaaggcttataaagggacttggctgaacatgtagatttctgggacctactgatttgattcagctggcttgaagtggagcttagaaatctgcattgtaagccagcctcctggatgattcagatgtaggcagtctgctggtaatcttgtgcagatattgttgtcagcagtggaaaatacaaagagtgacatacagcctcatactgggcttagaaagacaagtctagcaggtgagtatggcagctgagttgagggagaaaggctcatcgtgatgtggtcagttagcatttcactgtgacggttcacaygagaaacgcccaatgcctcaactgtggcagtaggcagtggtaatgcagagacagaggtgagaactcttgcagagggagaatcctcagaattcagcaaatgaatgaaagttgaggggagagagagaggggagaatcacaagtacatttagtagttctcacaggagtaattagggtctagtgtcattaatgcaaagtaaaatatgtttgagtgagaagataaaaaggttgggttggggcatattgagacttcagtgtcagtggaagctacaactagagatttaattcaggtcttctccaggtttgc

SEQ ID NO: 101553 - DNA, 607 bp, Homo sapiens
tttctttcatattgcattatatttcaccaaaaataataataccttcaattaatacttataattattttatatctcttacaagcaacagggaakttagaatttccaaatcttttttttttttttttcactttaaagagaggaatgaagggtggtggaaaggatatggacttggaaagggagtctttaaaatctctagttatgaccaagaggatataaatatgcataactttggaaggaagattatttttatatgtattttacataaagcttataataattacatcaagattcaagcagaattaattaatattgccaattctgatcacactaggcaattagaactctcattcatttaataaaagtttaccaagcgccttttaggaagtgttctaggcacatgcagtgtatcaatgaacaacaccaaataaataaatccttgcccttgtgaagactgtattcttacaggtgaagacaaacaataaacagagaacataataagaaagtaaattatatagtatcttagaagttgatgagtactatgggggaaaataaattaaatggagtaagaggaatcagaagtactatggcagggtcagtgtatcagtca

SEQ ID NO: 101554 - DNA, 599 bp, Homo sapiens
cagtttccttacatgaagttataaaatctaaaactcatgagttctgccatatgcagctgttgattactgggtgagttgtgaactttcccctacttttacattttcattcagtcatataaaaccattgagtagttcttcctaatattttgtctttgcttgtccaatttttcacacttgttaaaattttttttggagccattttagagtcacagcaaaattgaaaggaaggtacagagatctccygaatctccctgcccactacacatgcgcagcctcccatgttatcaaaatccttcaccagaatagtacatttgctataatggatgaatgtacaacaacacatcatcttatcaacctttttttttttttttacttatcaagttttaaaaaaaaattgtctaatttttagttttccattttttttatttcaacaggtttttggggaaccagtgctgtttgattatatagataggttctttagtggtgatttctgagattttggtgcacctatcacccaagcagtgtatactgcacccaatgcgagaacttttatcccttgccacccattaccattcctcctgaatccccaaagtctaaca

SEQ ID NO: 101555 - DNA, 640 bp, Homo sapiens
tgacatctctctctacatatcccagatggcatcttcttccaatataaggctgttttgtcggcattgaaaaatctgtgttttagtgtagccatttttatcaataatctcagctagatattctggataacttgcttcagcttctttatcagcacttgctgcttcaccttgcacttccatgttatggtgatggcttctttccttaacctcacaagccaaactctgctaccttcagactttttttatgcagctttctcacctatctcaggcttcataaaattgaagagcatyaggatcttatggattaggctttggtttaagggaaggttgtggctggattgatcttcagtgcagaccacaaatagtttctctgttttggaattagggctgttttgttttcttgtcattcatggagtaatacttttaatgctttcttcatgctttccttgctaattttaataatttctgattttttatttaaaatgagaatcatgtaactctttcacttgaacatttagagacgattgtagtgttattaattttaatattggcctaactgaaattcaatattggtctaatttcaattgttgtattacaggcaatagaaggccaaggagaaagagagagccagggaaacaggctg

SEQ ID NO: 101556 - DNA, 640 bp, Homo sapiens
tgacatctctctctacatatcccagatggcatcttcttccaatataaggctgttttgtcggcattgaaaaatctgtgttttagtgtagccatttttatcaataatctcagctagatattctggataacttgcttcagcttctttatcagcacttgctgcttcaccttgcacttccatgttatggtgatggcttctttccttaacctcacaagccaaactctgctaccttcagactttttttatgcagctttctcacctatctcaggcttcataaaattgaagagcattaggatcttatggattaggctttggtttaagggaaggttgtggctggattgatcttcagtgcagaccacaaatagtttctctgttttggaattagggctgttttgttttcttgtcattcatggagtaatacttttaatgctttcttcatgctttccttgctaattttaataatttctgattttttatttaaaatgagaawcatgtaactctttcacttgaacatttagagacgattgtagtgttattaattttaatattggcctaactgaaattcaatattggtctaatttcaattgttgtattacaggcaatagaaggccaaggagaaagagagagccagggaaacaggctg

SEQ ID NO: 101557 - DNA, 575 bp, Homo sapiens
agggcttttttttgaaaccttttcaaacacataattaattcctatggaaatcttatgaaataaacattattgcctccgttatgtaaaaagagaaattgactttcggaaaagttaaagaacgtgytaaaggttacactgcttgtaactgagaataaatccaggtttgtctaaccactaactccttgatttttgtataacttgctgccttcatatgcatgaccatgtttaattcacaagatagaactcataggtaggcagtaccgagtagacaatatacctattttacagatgagtaactgtaaagtggttatactcaatacatgatagagctacagtggaaaccctgcttcctacatcaaagatactgaattatttcaagttttaatataaaaatgcaattttatgagagtgaaagtataataatagatctagccccctaaagttagcttttcctcttagtccttcttttattcaaattcaggatttcagttaaccttacaagtgggggaaaaaaatgagaaaaggaaaagacagccttatgtttcttaaatttacaaatgactgagaaaatgttc

SEQ ID NO: 101558 - DNA, 577 bp, Homo sapiens
taggctccaaactgatcaatttttcgtccttacctaggcatttggaccaaataaaccacaaggatcacaactcttgtgtggtatcgctgcggcatctatctccctattaacataaactgtgtaaatctatgatatttgttaagttccctcatatgcaaaacgctctgctatgtgctgtgatgagatgtagaggaattagaaaatgcaggttttatactttcagggaattgtaatccatgcttatacaaaactgctttcacaatgccaataataatgctgaattctgcatgttttggtttttctctttttgaatgaaagtgatgtatgcgrttgtttaaaataaaacgaaacacacttagagtgaatgaaattacccatcgtctttctactgactagtcctcagaaaaaattatcttcaaccacttatgtttttaattctcctaatggttatttttatacctaaatattatgattatattgctgttttgatttaccagctataagcattattcatttataaactgtaatggaatattcgcatataaattatttatttaacttttattctctattattt

SEQ ID NO: 101559 - DNA, 577 bp, Homo sapiens
taggctccaaactgatcaatttttcgtccttacctaggcatttggaccaaataaaccacaaggatcacaactcttgtgtggtatcgctgcggcatctatctccctattaacataaactgtgtaaatctatgatatttgttaagttccctcatatgcaaaacgctctgctatgtgctgtgatgagatgtagaggaattagaaaatgcaggttttatactttcagggaattgtaatccatgcttatacaaaactgctttcacaatgccaataataatgctgaattctgcatgttttggtttttctctttttgaatgaaagtgatgtatgcggttgtttaaaataaaaygaaacacacttagagtgaatgaaattacccatcgtctttctactgactagtcctcagaaaaaattatcttcaaccacttatgtttttaattctcctaatggttatttttatacctaaatattatgattatattgctgttttgatttaccagctataagcattattcatttataaactgtaatggaatattcgcatataaattatttatttaacttttattctctattattt

SEQ ID NO: 101560 - DNA, 536 bp, Homo sapiens
atacaccgatgatcagacatcaaaatgaaatgcagacccttagaacaactttgcttcgtgtacttttaatacattttatatgccacacggcaatttactgagaggtggattttaacataccacatatgctattggcaagataagaattactgagttgaatgttggttcactaaatatgctgaaacccttttacagtgyagactctgaggaacagctaacactctctttatgggcacattgaaatgaattgtgcttttactgtatgtcattgttatgtttcaggggacatgatttcaccagtagctttgccaaatttttgcaataacatgattccactgtatttctattttagtaccacgatctcatgccttgaagtttatttgaaaaaagaaaacaacataaaaaagagtgaagttcagccaaatccaggttattcaggatttaagttataatccagcatgaagattatcctaaacttttgcttctcttcctcacctttagtatttttcatcttaagtggatgttcctgctcagta

SEQ ID NO: 101561 - DNA, 657 bp, Homo sapiens
ttagtttctggttttattctttcatcactgagtgcttcttcttattctctttttctgagttctctgtgtcttttgacctgtaaatacatctatcagagcatcccaggataccatcataggcccactcatctctctatctagagaatcactgaaggggtaattgcatccagtagcatgggtttaaatgccatctggatgctttttccaaatctatgcctttacttctaatccctctgctgacttcaattcagaatgcctgctcaatatttctatctaggaatctaacagtcacttgaaacccaacttgttcaaaaccagacttttcatttctgcccctctttaccgcaccctaaatatacccattttcctaatcttctttatctcagtaaataacataattatccatccaatttcttaagacctaagggtcacttctgagactttgctcctctccattccacccacatgtggtacaatatcaattctactgcttcctgacttccttctctaaatatgtcttcaacccagtaacttcaaaaacccagtaacttcaatccagtaacctcacttcatataccacagtcacyttcgctccagacactattgtctcacatctagactgtacactagtctctaaacagatatttctgtttctac

SEQ ID NO: 101562 - DNA, 629 bp, Homo sapiens
ggccataaacaaaatctctgtgacaggttcatgatggccatgatgcccacactggaaggttgtgggtttaccagaatgagggcaaggaacacctctcccacccagaggggaaaaccacttaaaggcattcttaaaccacaaacaatagcatgagtgatctgtgccttaaggacatgctcctactggagataactagccagagcccatccttttatttcagcccatccctttgtctcccataaggaatacttttagttaatctataatcyatagaaacaatgcttatcactggcttgctgtcaataaatatgtgggtaaatctctgttcaagactctcagctttgaaggctgtgagacccctgatttcccactccacacctctatatttctgtgtgtgtgtctttaattcctccagtgttgctgggttagggtctcctcgactgagctggtcttggcaagtggcgcccaacgtgggcaagctggtctcagcatgaattcaggtaatgtttgtttatcactctaacaaaattcctgcagtatattggtatccctaataaaaaaaagctattgtttgtaatttgattatgcattctttatgattgtgagatctgactatgcaagttagaaat

SEQ ID NO: 101563 - DNA, 591 bp, Homo sapiens
tattgttttgtgaatcctttctttcttcctctagtattgtatatccttttggttggatgtatttctgtagtggtaagttagatacctttcttctgctcattagtgtatccattctaccagtgagttttatattctcatctgtgttcttatcctttcacttccagatgtgggattccctgaagtatttcttgtaagatctgtctagtggtgatacatttcctgtttttgcttgtccaggaaatactttatttagccttcatttttaaagaatagcttttctgggggtagtattcttggccagcaaaggttttttcagcaccttgaatatgttgtcccatcctctcctggtgtgcaagttttctgctgagaaacagttgttagtctaatggagatttacttatatgtgacttaaggcttttctctatttttaaaattmtttctttgtctttgccttttgacagtaaaatcccaataggccttggagaggagctttttggattaagtatatttggagactttgagagctagatatcctagataacatggatctagatatccatttctctctgaagacatgggaagttttcagct

SEQ ID NO: 101564 - DNA, 533 bp, Homo sapiens
acatttttcaacgattaagaatcatcattacataacttggtgaaactgaaaaagtatatcatatgggtacacaaggctatttgccagcatatattaatattttagaaaatattccttttgtaatactgaatataaacatagagctagaatcatattatcatacttatcataatgttcaatttgatacagtagaattgcaagtccytaagtccctattcactgtgcttagtagtgactccatttaataaaaagtgtttttagtttttaacaactacactgatgtatctatatatatctataacatgttaaaaattcttaagaaaattaaaaattatataaaatgttttgtggtgatatatttttaaacaggcatatgttgttattaagcttttatttgttataaacaaagtgttgaagcgcctgaaaacataaaaatactttataagacatataagaagttgggtggtcatagcagaaattgaggcttccaatgttagggcataatatagattggacacttctaccatggtaaa

SEQ ID NO: 101565 - DNA, 652 bp, Homo sapiens
gggtttcgctacagtgggaagctattattgcccctaggcctgaaggtcgatgacaaggaagttactagaatctggcaagtgatggagtggagctatagccaaggggctgcctgagaggagcagtggccaaatgtgattgagaattgctggtgaaatgattcaccaaccacaggaagaggctgaccatcatagaccacatttcaatgacttatgtttcattaatgagtcatcatcaatttctctttcattttgatagccccctcttaggattcaggttttgaggtaactcttctactagacaacattttaaagtagtaactatttttctcattgctattaaccaagccacacattaatgccgagcttctgttaagtaaaaaataactagggataccagactgagttttkcagcccagtcagaagaaaagcaatttgacatactgttaccctttgcagtcttagcaagagaaagacaatgcgcttgtttattgtctaaattagcactttgcccctgatactcctcaaagctgaaagaccctctaagatcaagaactgatgaagtaagtcttcagatttgataaactggtgttctatagggaaattaaagccaatgtgaaatttgcagttgacttttgtgatgactaccttcccc

SEQ ID NO: 101566 - DNA, 643 bp, Homo sapiens
atcttagccacatacctatgaaatgtatatgtgtgtgtatacatatgtgaatttgtttctgagattatggaggctgaaattcccaagatggaaggaaagctggatacccaggaaagcatttgtttcccattaggcctcttaattctctcctgacctttgattgattgcatgagtcccacccccgttaaggggggcaatctgcttcacttagtctgcccatcccgatgttaatcatatgtgaaacactctctggaacacaaccagaatcacatttggccgaatgtcccggcaccctggtgctcagtcacagtgacacgtgcaagtaactatcacacttgtcctttgtcacatttgtcatttcccctgtttttctcccaatctgcagcttatatttgttctcttaatactgtctcgtgttgagcaaaaacttttactttttataaagttgaatttatcaatgttttctttaatggtttgtgtttcttgataacaaagaacactttgcctaactgygtcgtgaagattttgtcttatatttcctgctatactttttctacttttatagtttatatttagttgcataatccattttgagttagtttttgagtcagtattgaggttcaggtgaatctttttcctttgg

SEQ ID NO: 101567 - DNA, 596 bp, Homo sapiens
  misc_feature (1)...(596): n = A,T,C or G
nnnnnnnnnnnnnnnnnnnnnnnggggtgatattcctgttcccagtggcccttactgacccgagagatgtcattgccgcaggcaggacctatgggcgcatataggttgtaatgaaactgtagtctccgctggaagcctagacatgaaatgggtcagtgagcaaggctctattcctagtctccagccatgcctgtrtcaacctgagcccgctctcagcacattggacccaggcagatgtaaaaaattcacagaactatgatttggactcaagggtttgtagatttcctccctcattctaatttcagtgtctaaaattcttgcatccatgaacgagctgggcatttgatgagacagggctgaatactgcagttttcctcctagaaatcatctggggcattgtctttgaactgatgggaacaataaggcataactgtttgcacaaacttgggataaatgattttgggataacgatctaccagaatagggatatttcacccttggttctgagatgcaaaccaaagaatatcatgaccagctttcaggcctcctgaagtatatctctcacattgtcctgttctcttgctgaggagcctgag

SEQ ID NO: 101568 - DNA, 596 bp, Homo sapiens
  misc_feature (1)...(596): n = A,T,C or G
nnnnnnnnnnnnnnnnnnnnnnnggggtgatattcctgttcccagtggcccttactgacccgagagatgtcattgccgcaggcaggacctatgggcgcatataggttgtaatgaaactgtagtctccgctggaagcctagacatgaaatgggtcagtgagcaaggctctattcctagtctccagccatgcctgtakcaacctgagcccgctctcagcacattggacccaggcagatgtaaaaaattcacagaactatgatttggactcaagggtttgtagatttcctccctcattctaatttcagtgtctaaaattcttgcatccatgaacgagctgggcatttgatgagacagggctgaatactgcagttttcctcctagaaatcatctggggcattgtctttgaactgatgggaacaataaggcataactgtttgcacaaacttgggataaatgattttgggataacgatctaccagaatagggatatttcacccttggttctgagatgcaaaccaaagaatatcatgaccagctttcaggcctcctgaagtatatctctcacattgtcctgttctcttgctgaggagcctgag

SEQ ID NO: 101569 - DNA, 423 bp, Homo sapiens
ttatcatttactaacctactgtaggtggaccagacttcaaaaactgtattctcatggcgactgcatggaaacttgagcacattttatggaaaattattgagcacagtcctttcctgatcactgtatgctgtgtgtcctgagggcactaactcagagtgtcctgttactccctcatcagtgtgtcacctggacaattcactgagctcattctctctctctgtgtgtgtgtgtgtgtgtgtgtgtgtgtgtgtgtgtgtctatctgtctttctctttcattcttttccatttggccctgttctgtcccaacatgaaggcaataatttgttacctcattaatggatctmtccttttacttttttaaccacttccttatgctacccatgaaacctagttggggctctgttgtgtctgatttcccctg

SEQ ID NO: 101570 - DNA, 591 bp, Homo sapiens
tgtttaggtttccatttcttcctccccttatcatttactaacgtaccataggatgaccatacttcaaaagctgtactctcatggccactgcatcgaattttgagcatattttatggaaaactattgagctcactcttttcatgatcgcagtktgctgtgtgtcatgagggcactaactcagagtgtccttttactcccttaccagtatgtcacctggccaattcactagctcactttctctctgtctctgtctctgtctctgtctctctgtctttctctttcattgttttctacctggccctgttctatcccaacataaagacaataatttgttacctcattaatggatctgtcctttttcttttcaaactcttccttatgttagccatgaaatctagctggggctgtgtggtttctgatttcccctggcttattctttactttttcccactgttccaggctcaacagggagctgctggatgagaaagggcctgaagtcttgcaggactcactggatagatgttattcaactccttcaggttatcttgaactgactgactcatgccagccctacagaagtgccttttacat

SEQ ID NO: 101571 - DNA, 591 bp, Homo sapiens
tgtttaggtttccatttcttcctccccttatcatttactaacgtaccataggatgaccatacttcaaaagctgtactctcatggccactgcatcgaattttgagcatattttatggaaaactattgagctcactcttttcatgatcgcagtgtgctgtgtgtcatgagggcactaactcagagtgtccttttactcccttaccagtatgtcacctggccaattcactagctcactttctctctgtctctgtctctgtctctgtctctctgtctttctctttcattgttttctacctggccctgttctatcccaacataaagacaataatttgttacctcattaatggatctgtcctttttcttttcaaactcttccttatgttagccatgaaatctagctggggctgtgtggtttctgattycccctggcttattctttactttttcccactgttccaggctcaacagggagctgctggatgagaaagggcctgaagtcttgcaggactcactggatagatgttattcaactccttcaggttatcttgaactgactgactcatgccagccctacagaagtgccttttacat

SEQ ID NO: 101572 - DNA, 596 bp, Homo sapiens
gcctccacctggtcttccagataggggtgatattcctgttcccagtggcccttactgacccgagagatgtcattgccgcaggcaggacctatgggcgcatataggttgtaatgaaactgtagtctccgctggaagcctagacatgaaatgggtcagtgagcaaggctctattcctagtctccagccatgcctgtggcaacctgagcccgctctcagcacattggacccaggcagatgtaaaaaattcacagaactatgatttggactcaagggtttgtagatttcctccctcattctaatttcagtgtctaaaattcttgcatccatgaacgagctgggcatttgatgagacagggctgaatactgcagttttcctcctagaaatcatctrgggcattgtctttgaactgatgggaacaatcaggcataactgtttgcacaaacttgggataaatgattttgggataacgatctaccagaatagggatatttcacccttggttctgagatgcaaaccaaagaatatcatgaccagctttcaggcctcctgaagtatatctctcacattgtcctgttctcttgctgaggagcctgag

SEQ ID NO: 101573 - DNA, 596 bp, Homo sapiens
gcctccacctggtcttccagataggggtgatattcctgttcccagtggcccttactgacccgagagatgtcattgccgcaggcaggacctatgggcgcatataggttgtaatgaaactgtagtctccgctggaagcctagacatgaaatgggtcagtgagcaaggctctattcctagtctccagccatgcctgtggcaacctgagcccgctctcagcacattggacccaggcagatgtaaaaaattcacagaactatgatttggactcaagggtttgtagatttcctccctcattctaatttcagtgtctaaaattcttgcatccatgaacgagctgggcatttgatgagacagggctgaatactgcagttttcctcctagaaatcatctagggcattgtctttgaactgatgggaacaatmaggcataactgtttgcacaaacttgggataaatgattttgggataacgatctaccagaatagggatatttcacccttggttctgagatgcaaaccaaagaatatcatgaccagctttcaggcctcctgaagtatatctctcacattgtcctgttctcttgctgaggagcctgag

SEQ ID NO: 101574 - DNA, 632 bp, Homo sapiens
ctccgttctagtgactctgagggaaacttggtgatagtagccagtacctgctctgaggggcttcaagaggagtctgctcctaatagaacctgtgctatctataagtgacagtatcaagagcagggagtaggggctgtgcatggtggctcactcctgtaatcccakccctttgggaggctgaggcgggtagagcacgaggtcaggagtttgagaccagcctgggcaacatggagaaaccccatctccactaaaaatacaaaaagtagatgggcatggtggcaggtgactgtaatcacccctgctcaggaggctgaggcaggagaatcctttgaacccaggaggctgaggttgcagtgagccaagattttgccattgcactccagcctgggcgacagggcaagactgttaaaaaaataatactaataatgataaataaaaataagaataagaagcagaatgtagcttggtgagagtgaagtcctgcttcctagggcacagagtcttgttcctaaagaggaagaaagatcgcacccgagaatgtgtggagatagcagtgcagtgtacagagcagagaccgtgggcctgtctcctgggctccatccaagttgcttgtcttttctgtccctgtttcc

SEQ ID NO: 101575 - DNA, 632 bp, Homo sapiens
ctccgttctagtgactctgagggaaacttggtgatagtagccagtacctgctctgaggggcttcaagaggagtctgctcctaatagaacctgtgctatctataagtgacagtatcaagagcagggagtaggggctgtgcatggtggctcactcctgtaatcccagccctttgggaggctgaggcgggtagagcacgaggtcaggagtttgagaccagcctgggcaacatggagaaaccccatctccactaaaaatacaaaaagtagatgggcatggtggcaggtgactgtaatcacccctgctcaggaggctgaggcaggagaatcctttgaacccaggaggctgaggttgcagtgagccaagattttgccattgcactccagcctgggcracagggcaagactgttaaaaaaataatactaataatgataaataaaaataagaataagaagcagaatgtagcttggtgagagtgaagtcctgcttcctagggcacagagtcttgttcctaaagaggaagaaagatcgcacccgagaatgtgtggagatagcagtgcagtgtacagagcagagaccgtgggcctgtctcctgggctccatccaagttgcttgtcttttctgtccctgtttcc

SEQ ID NO: 101576 - DNA, 579 bp, Homo sapiens
  misc_feature (1)...(579): n = A,T,C or G
gtctgccagtccccagtatcaagttactcgaccccaggcaagtgtgacaatctcatagtcacctgagtgcaggaggtgcacaggcagtatctstcaggcctcctagcttcgattcagtatctcttgtcatctgtgattaagtcatctgtccctgaacaatgtccatggagtttctatgcctgtttcaggaagctggcagccttgcctttgtatttggaaatattgttccccaggcttcactgctctcagctttcatccggatctcctttaagtcagcttgcttagctgcacagtcaccctgaaatcaggacggaaacttttcttctttactttgctgatatatttccataaagcaaggctggaccctggttctccaccctgtcaatgcaatggctgatccaatgtttctttgtagcatcgtggattttttttnttttttttttttttttttttttgcgatggagtcttgctctgtcacccaggctagagtgcagttgcaccatcttggcttggtgcaacctctgcctcccagattcaagtgattctcctgcctcagcctcctgagttgctaggaccaca

SEQ ID NO: 101577 - DNA, 579 bp, Homo sapiens
  misc_feature (1)...(579): n = A,T,C or G
gtctgccagtccccagtatcaagttactcgaccccaggcaagtgtgacaatctcatagtcacctgagtgcaggaggtgcacaggcagtatctgtcaggcctcctagcttcgattcagtatctcttgtcatctgtgattaagtcatctgtccctgaacaatgtccatggagtttctatgcctgtttcaggaagctggcagccttgcctttgtatttggaaatattgttccccaggcttcactgctctcagctttcatcyggatctcctttaagtcagcttgcttagctgcacagtcaccctgaaatcaggacggaaacttttcttctttactttgctgatatatttccataaagcaaggctggaccctggttctccaccctgtcaatgcaatggctgatccaatgtttctttgtagcatcgtggattttttttnttttttttttttttttttttttgcgatggagtcttgctctgtcacccaggctagagtgcagttgcaccatcttggcttggtgcaacctctgcctcccagattcaagtgattctcctgcctcagcctcctgagttgctaggaccaca

SEQ ID NO: 101578 - DNA, 579 bp, Homo sapiens
  misc_feature (1)...(579): n = A,T,C or G
gtctgccagtccccagtatcaagttactcgaccccaggcaagtgtgacaatctcatagtcacctgagtgcaggaggtgcacaggcagtatctgtcaggcctcctagcttcgattcagtatctcttgtcatctgtgattaagtcatctgtccctgaacaatgtccatggagtttctatgcctgtttcaggaagctggcagccttgcctttgtatttggaaatattgttccccaggcttcactgctctcagctttcatccggatctcctttaagtcagcttgcttagctgcacagtcaccctgaaatcaggayggaaacttttcttctttactttgctgatatatttccataaagcaaggctggaccctggttctccaccctgtcaatgcaatggctgatccaatgtttctttgtagcatcgtggattttttttnttttttttttttttttttttttgcgatggagtcttgctctgtcacccaggctagagtgcagttgcaccatcttggcttggtgcaacctctgcctcccagattcaagtgattctcctgcctcagcctcctgagttgctaggaccaca

SEQ ID NO: 101579 - DNA, 580 bp, Homo sapiens
tgttcagttccctaaaataaatacctctctctctctttcatgtttatgtgtgtatatgtatgtatttatacttgtatatatcctattggttctatttatgtggagaactctgactgatacaattatattctattgagttcttaagtttattgaactgctttgctattgttggatttttagttttttcaaaattatgctacaaaaaataatacatcaataaatatatttatatccttgttcatattgtggattactctatcttagcctagcttcttagaagttgaattataaacattaatagtatgcccacattgttggcatacatatttacttctgccaacaatataatcttcaamtcattggttaccattttttaaatgggagccagttcaataaacaaatccaaatcccttaccatgggttacacattcagtgcttactccatgccagactttgtctagctacagggagcttgcaaaaagtgaaaaataaagaaacataaaatttaaaagaaagaaaatgtgagaatgtagccctccaggcagagggaacagaaagtgcaaagggaagttctttaagt

SEQ ID NO: 101580 - DNA, 612 bp, Homo sapiens
ttgagaagtcttatgtcctatgaagacaaaaaacggggagaaagggagaaaaacaacaacaaacaaaaggaataatcctggaaaattgatataggccacattaccctgatcccatacatcaatagacagatatgaaagtggcttatgtatgtaaatagattgctgttattttcctctgaattttaagttgtctagatttagttcacaaggcttcaagaaagtgcagcttagttttcagtgatttcaagttaggaaaaagtggagggaaaggaaaagaaagaaggaaaaaattgaaaacattattttcgagacttggaaaagtaagaatttagtccaaactgttgaatataataaatattgaaaaacattargcaagactagaatgtaacaacaggtatactatagtttttgaaacatatgtttgtttctccagtttttcatttttactaaaagcaaatcatgggagtaccaatttgctttattatacttggccagattatttatataaagtgtcacagaaataattactttttacataggcttataaaattgtctttgatggaaatttgttccatagatggaatctcagataagactttttttaaagccaaa

SEQ ID NO: 101581 - DNA, 612 bp, Homo sapiens
ttgagaagtcttatgtcctatgaagacaaaaaacggggagaaagggagaaaaacaacaacaaacaaaaggaataatcctggaaaattgatataggccacattaccctgatcccatacatcaatagacagatatgaaagtggcttatgtatgtaaatagattgctgttattttcctctgaattttaagttgtctagatttagttcacaaggcttcaagaaagtgcagcttagttttcagtgatttcaagttaggaaaaagtggagggaaaggaaaagaaagaaggaaaaaattgaaaacattattttcgagacttggaaaagtaagaatttagtccaaactgttgaatataataaatattgaaaaacattaggcaagactagaatgtaacaacaggtatactatagtttttgaaacatatgtttgtttctccagtttttcatttttacyaaaagcaaatcatgggagtaccaatttgctttattatacttggccagattatttatataaagtgtcacagaaataattactttttacataggcttataaaattgtctttgatggaaatttgttccatagatggaatctcagataagactttttttaaagccaaa

SEQ ID NO: 101582 - DNA, 630 bp, Homo sapiens
aaccaacttcatcactcacaagttctatcttctacaaaacactagaacacaattcagccaatccaaggtttttttaaaaaaaatattttatcrtaaggattgcttttcctctagtttccagtagcatgttcctcatttccatgtgaaacctcagtagaatcacccttaacctacgtatttccagcatgcacctcaaaaatcttctagctattacccaattccaaagccacttccacatttgatgtgttactgcagcaccctgttcttggcaccaaaatctattagtttgcttgggctgtcaaaacaaaccaccagactgggttgctaaaagaacagaaatttactttctcacagttctagagggctagccatctaagatcagggtgtcagcacagtcagcttctagcagcagatcgcttcctggcttgcagatgccaggtgtcttgttgtgtcctattatggaagagagagtagaatcgggtgtctcttattattattattaggacactaaccacatgatgagggcccacaggacctcctttaactctaactacttcccaaaggccccatctcccaacaccatcaaaccaggagttagggtttcaacatgaattttggaggaacacaatt

SEQ ID NO: 101583 - DNA, 633 bp, Homo sapiens
ttcaaccaacttcatcactcacaagttctatcttctacaaaacactagaacacaattcagccaatccaaggtttttttaaaaaaaatattttatcataaggattgcttttcctctagtttccagtagcatgttcctcatttccatgtgaaacctcastagaatcacccttaacctacgtatttccagcatgcacctcaaaaatcttctagctattacccaattccaaagccacttccacatttgatgtgttactgcagcaccctgttcttggcaccaaaatctattagtttgcttgggctgtcaaaacaaaccaccagactgggttgctaaaagaacagaaatttactttctcacagttctagagggctagccatctaagatcagggtgtcagcacagtcagcttctagcagcagatcgcttcctggcttgcagatgccaggtgtcttgttgtgtcctattatggaagagagagtagaatcgggtgtctcttattattattattaggacactaaccacatgatgagggcccacaggacctcctttaactctaactacttcccaaaggccccatctcccaacaccatcaaaccaggagttagggtttcaacatgaattttggaggaacacaatt

SEQ ID NO: 101584 - DNA, 549 bp, Homo sapiens
gcactacaactaaaggtgaacattaaatcatttctttagtagtaaccttgcaaagataaaaatataccaaagtaaacatacagttcatagattactagttgtcctttttctttcctgaatttaattgcctgtataaaagtgtataatcagttcatcttgttattaagatttctgaggatgataaaataatataaaatatttgctacttgaaaagtaaatgtttatttactactttcaagttatttggtaatattttgtcttaaaattgggaataaatttcttaaccctttcycaaaggcaaaaaatagaattgtagcaagtgaaaagagaatttcttcttctttatatatgataaacatatgtaaatgaaagtgagtttaaaagcatattaacctagctcagatcacttacaattatcctttatagaaaaattacatttagtcaaaatgaaatatatatatattttttcatttcagctgaatttgtctcagaacatgtgacatttgaatgagcactctaccatgtttaagaaacatgtatgttatcgac

SEQ ID NO: 101585 - DNA, 555 bp, Homo sapiens
ttgagattgtgccattattctccagcctgggctccaagagcaacacttcatctcaaaaacaacaacaacaacaacaacaacaaactgtagactaccatcattgagttgccaagacaacaactgctttcatttcgatattcttcaagttccaaaatggtttagctcatctgccaagaccatagaattgtttgccttttcctgatctcctcttatgtttctcttaagtagtcaagctgttccaagagcagtggctatacattgaggcagccactctatatagcagtggtttccaacctttctgctataaattcttatgaaagtcaaaaactttcataaacccctacagaaktgcagctgtacttttattctgttgattgaaatataccaaacggctgctatgaatttggtacattttgaaattactttgtgttttatttatcacaaaagcctctacctatattttaataacataaaatgtgtacatatctgagtaagatattttgtcccttatgtctaaaaatactacgaatattgatttatggcccttttaacaag

SEQ ID NO: 101586 - DNA, 537 bp, Homo sapiens
tacagaaagtttgtaagggaacaggtgatttcatgcttctgttttcttatttgggggcactcacattagtgatgggaatcctaaaagagtttcaaagattacatttaaatagttgcatttttttaatcaggagaattctatattcagtggattccctgatatgaattcattttttgatttaagtagtcttcttgtaatttacttgtttcaaaaatgtacttttgtatattggatttgcttaaagtgaaacatgtctaatatactattgactttatattaagaccattaaagtatccagtggacaaatctatcggtacttctcaacatgtattctaaaatcctatcaggtttagtggataggcaatctggaaaattatttcttacacaatattaaaaataagagttgattctaccrtagcgtatagtaaggtaatggctgcaactgtgtatgcgactgttgccatgtttgattagggcatgcatatttgacatataaaatattgttcttattaatgttcatagcagtggatttatttg

SEQ ID NO: 101587 - DNA, 567 bp, Homo sapiens
ttggtaggaaaaatatttctagaagcactctaacagaaaactgcttgcttaatcataaatctgaacatttggaccaggtggttttcaagatgatatttataaagcttggttttttaaaaacccagtgaatttaatgaattgtgatttatcaataayaaaaggaaaaaaagagtcctgattactattcttgaaattcttaattttttgttgttcataatcatttgatgagtttataataaataactctggtatatattttctgaaagaaaggatatagactttgggggggatatagactttgttgtttgagtcattgtacctgcttgccaagaaaataatgttaatcatatgaataattaatattgcacgattagcacatacaatggagttctttgtcatctgtctcaaacaaaaattcccatctatggatatgacttttatgcactttaattttttttaagtttttaatgcattttttttctgtctgttagatgatgtaatttatcccatggctatgttaatagctaaaaatctagaaatttctttcaacctctattgattttacaa

SEQ ID NO: 101588 - DNA, 567 bp, Homo sapiens
ttggtaggaaaaatatttctagaagcactctaacagaaaactgcttgcttaatcataaatctgaacatttggaccaggtggttttcaagatgatatttataaagcttggttttttaaaaacccagtgaatttaatgaattgtgatttatcaataacaaaaggaaaaaaagagtcctgattactattcttgaaattcttaattttttgttgttcataatcatttgatgagtttataataaataactctggtatatattttctgaaagaaaggatatagactttgggggggatatagactttgttgtttgagtcattgtacctgcttgccaagaaaataatgttaatcatatgaataattaatattgcacgattagcacatacaatggwgttctttgtcatctgtctcaaacaaaaattcccatctatggatatgacttttatgcactttaattttttttaagtttttaatgcattttttttctgtctgttagatgatgtaatttatcccatggctatgttaatagctaaaaatctagaaatttctttcaacctctattgattttacaa

SEQ ID NO: 101589 - DNA, 567 bp, Homo sapiens
ttggtaggaaaaatatttctagaagcactctaacagaaaactgcttgcttaatcataaatctgaacatttggaccaggtggttttcaagatgatatttataaagcttggttttttaaaaacccagtgaatttaatgaattgtgatttatcaataacaaaaggaaaaaaagagtcctgattactattcttgaaattcttaattttttgttgttcataatcatttgatgagtttataataaataactctggtatatattttctgaaagaaaggatatagactttgggggggatatagactttgttgtttgagtcattgtacctgcttgccaagaaaataatgttaatcatatgaataattaatattgcacgattagcacatacaatggagttctttgtcatctgtctcaaayaaaaattcccatctatggatatgacttttatgcactttaattttttttaagtttttaatgcattttttttctgtctgttagatgatgtaatttatcccatggctatgttaatagctaaaaatctagaaatttctttcaacctctattgattttacaa

SEQ ID NO: 101590 - DNA, 386 bp, Homo sapiens
tattgtaagcttgtttcatgcaaagttagccattgaaagtctcaaagcacagagaaaccagaataaattagctcaaaacaaaccaatgcaggccaaaatggttagcagaaggctcatgagttaagacagaaataaaatctaaaaaayaattgaccccaagatccatttaaaagcataaaatgcaaaattctaacaatgacctccattaaataaggtactgatccattattttcagaaggtattgcatagatatttgcttcatgtcatatacaataattctcaattaaatcacaaggtaataattagttctgaatgaagttgaaatattttcaagtgcatagatgctaaatgtcgattaagaagaatgtaagaggagtaaaatgtga

SEQ ID NO: 101591 - DNA, 635 bp, Homo sapiens
aggacaggggaaggttgatgttctggctcaactagtctggcagaaagcaaattcagccttcctctgcctttttgttctattcaacccttcaacagattggatgatgtccacccacaatggggagggccagctactttactaggtctaccaatttaaatgctaatgtcttccagaaacactctgacaaacacatcccaaaataatgtttaagtagctagttgagcatcttttggcccagtcaaggggacacataaaataaccattacatgttctaatgggaaaagtgaacaacacaaaaaatagatgggtaatgtaagcagagagatgtaaactctaagagagaatcaaatggaaatgttaaaaataaaaaacaccacaaaggataaatgcttgaggggatggatatcccattctccatgattggattrttacacattgcatgcctgtatcaaaacatctcatgaaccccaaaaatataggcatctactatgtacccacaaaaattaaaaattaaaattgaataaaaataaataaataaataaataaataaaaataaaaaacactgtaacagatatgaagaatgcctttaataggctcagctgtagactggacacagctgaggaaagcattaatga

SEQ ID NO: 101592 - DNA, 635 bp, Homo sapiens
aggacaggggaaggttgatgttctggctcaactagtctggcagaaagcaaattcagccttcctctgcctttttgttctattcaacccttcaacagattggatgatgtccacccacaatggggagggccagctactttactaggtctaccaatttaaatgctaatgtcttccagaaacactctgacaaacacatcccaaaataatgtttaagtagctagttgagcatcttttggcccagtcaaggggacacataaaataaccattacatgttctaatgggaaaagtgaacaacacaaaaaatagatgggtaatgtaagcagagagatgtaaactctaagagagaatcaaatggaaatgttaaaaataaaaaacaccacaaaggataaatgcttgaggggatggatatcccattctccatgattggattattacacattgcatgcctgtatcaaaacatctcatgaaccccaaaaatataggcatctactatgtacccacaaaaattaaaaattaaaattgaataaaaakaaataaataaataaataaataaaaataaaaaacactgtaacagatatgaagaatgcctttaataggctcagctgtagactggacacagctgaggaaagcattaatga

SEQ ID NO: 101593 - DNA, 576 bp, Homo sapiens
tgggatccagggctcaactcaaacatggtgtaactgcctccctgagcatctgttctcatgactaacaccttttatgcctccaaaaaccttcccaagtttgaccaatgaatgttcctgaaaccagaggtgacttgtttcaatgcccctaaggtctgtgagttatagcttagacatttctgagatggacattgctttactgctttggtatgtggaagggtctgagtcgcagaagtgtttaggtgaatggccaaaaaattaattaattaattaattaaataaataaaataaatgttactttgtcaaacacttgttctcagagtgaaaatgcagaatagacacctaaagtgtaagctctggctaagaatgacttttctctttacaagtagttrcatcgtaaatggttctataagcatctacgtaatatcgtaggcttgaccacctagactgtgaagccatcatcctctttccagaaaatacctaggatcctcagatgcagaggatggttgaataaaaaggatcatttccagccggatgtggtgactcatgcctataatctcagcactttgggaggccaag

SEQ ID NO: 101594 - DNA, 576 bp, Homo sapiens
tgggatccagggctcaactcaaacatggtgtaactgcctccctgagcatctgttctcatgactaacaccttttatgcctccaaaaaccttcccaagtttgaccaatgaatgttcctgaaaccagaggtgacttgtttcaatgcccctaaggtctgtgagttatagcttagacatttctgagatggacattgctttactgctttggtatgtggaagggtctgagtcgcagaagtgtttaggtgaatggccaaaaaattaattaattaattaattaaataaataaaataaatgttactttgtcaaacacttgttctcagagtgaaaatgcagaatagacacctaaagtgtaagctctggctaagaatgacttttctctttacaagtagttgcaycgtaaatggttctataagcatctacgtaatatcgtaggcttgaccacctagactgtgaagccatcatcctctttccagaaaatacctaggatcctcagatgcagaggatggttgaataaaaaggatcatttccagccggatgtggtgactcatgcctataatctcagcactttgggaggccaag

SEQ ID NO: 101595 - DNA, 584 bp, Homo sapiens
aagatcatatggtcaataagtgcaaaaacaagactcaagcctcactgggttttaatggaagaaccatgtggtgtttgagtagaaaaatctattccctctcctctctctctccctctctctctctcttttcccagtgataaacagtaggaagtgggattagtctgtgttgaaccctattacttcagcccacattcattgctcatctttccactatttttagtttttccttctgttctggactcttcctttcttccttcaaatagaaaaaggtcacacctctatttaaaacatcacagaacacccatatttttgctcttctatcaacttrccagtctaaatcttttttattttcagctaaacttattagatgaatgtcataattgccccattttcactttgctttcactctcatggccaccactggaatgaagctgttcttcagacttacttatgacatctgctccagtttcaaaggctgtctccaagtcctgactttctgaaattctctgcagcatctgacacaattaatctcatccaccctcacctactgccagtaaaaatactggcagctgacacacatggaa

SEQ ID NO: 101596 - DNA, 524 bp, Homo sapiens
tccctggtaactactattctattctattctctacttctatgagctcaaccttttcagattccacctgtaagtgagatcatgtagtatttgtctttctgtgcctggcttattttacttaaaataatatccaccagactcattcatgttgtcacaaaagacaggattttcttcttttttaaggttgaatagtattcctctgtgtgtgtgtgtgtgtgtgtgtgtgtgtgtgtgtgtgtgacattttctttatatattcatccattaatggacacttaggttgattccatatcttggctattgtgagtaatgctgcaataaacatgrgagtgcccatctctcttcagcatactgatttcatttcttttggacatatgcccagaagttggattgctggaaaatatggtagttctatttttaattttttgaggaacctcaatactgttttccactatggctgaacttatttacattaccaccaacagtgtgcaagagttcccttttctccacatcctctctaacacttg

SEQ ID NO: 101597 - DNA, 524 bp, Homo sapiens
tccctggtaactactattctattctattctctacttctatgagctcaaccttttcagattccacctgtaagtgagatcatgtagtatttgtctttctgtgcctggcttattttacttaaaataatatccaccagactcattcatgttgtcacaaaagacaggattttcttcttttttaaggttgaatagtattcctctgtgtgtgtgtgtgtgtgtgtgtgtgtgtgtgtgtgtgtgacattttctttatatattcatccattaatggacacttaggttgattccatatcttggctattgtgagtaatgctgcaataaacatgggagtgcccatctctcttcagcatactgatttcatttcttttggacatatrcccagaagttggattgctggaaaatatggtagttctatttttaattttttgaggaacctcaatactgttttccactatggctgaacttatttacattaccaccaacagtgtgcaagagttcccttttctccacatcctctctaacacttg

SEQ ID NO: 101598 - DNA, 469 bp, Homo sapiens
acttgctgtagtctgccttctctctgaaaaaaatagttttatgaaaattcagtcaatgaaattgggctgttgaactctaatttagcatcatagagaaattgtgtgtgtttcgtgagcaactatctcattcaagaggttgcccacacagtttgcagctagagaggaccttcagagaatcagggcaacccttcattttacatctgagtaagccaaagtctaaggcgtaaaagatattcacccaatgcctcacaacamaaagatgcctccagacttctgtcagtatacatttaaaatatctactttcatgtgtatacacacgtgggaagcatgaataaagaggtgtaagtttcattggaaacaaatatctcttacataatttatttattgtcacataacaaattacctcaaagcttattaggttgaaaacaataatcatttttcactcacaatttctgttggtcaagaattc

SEQ ID NO: 101599 - DNA, 467 bp, Homo sapiens
cttgctgtagtctgccttctctctgaaaaaaatagttttatgaaaattcagtcaatgaaattgggctgttgaactctaatttagcatcatagagaaattgtgtgtgtttcgtgagcaactatctcattcaagaggttgcccacacagtttgcagctagagaggaccttcagagaatcagggcaacccttcattttacatctgagtaagccaaagtctaaggcgtaaaagatattcacccaatgcctcacaacacaaagatgcctccagacttctgtcagtatacatttaaaatatctactttcatgtgtatacacacgtgggaagcatgaataaagaggtktaagtttcattggaaacaaatatctcttacataatttatttattgtcacataacaaattacctcaaagcttattaggttgaaaacaataatcatttttcactcacaatttctgttggtcaagaatt

SEQ ID NO: 101600 - DNA, 464 bp, Homo sapiens
agaattcctccaccattcaaaatagatattctaaatcaggaggaacctcagcaagaatgggaaaattcatcaggttcaatgggagcccasgtgagtggcccctatagcagagacttctctggccaaaccaagagatgggcaggcaggtggtgagttccagatggagcttctggggcaagtgtctgcttctgcttgttccaaacttattgctaggtcctccaggcagtctggaatgcccaccacttgagaggacaactgaatcaggaaactcgtcactaaaaatcatgttattcattgatgataaggactaaatgcaacagatctcctaaaatgaaagagactcttcctccctccatccaacctcccacctgaaataagcggttcagctggaagatatgtgtattaatcaggattaggttcagttgcaaagtacaggtacccaactacggtcacttcaataaaac

SEQ ID NO: 101601 - DNA, 559 bp, Homo sapiens
aggccacatttagttttaatatgtgggtgtttaataattcattgtaaaaaaatctctgaaatcatttaggaatttaaattatattttggcaaatttttataaatagaagtggagggttaagataaatatttgtggtaaatggaaactgcatggcttttttttttgttgcctatagtttgctaattttgcaaaataagtgtctacccttaaccagtgtcctggttggtaatatttgcagcataatctgaactaggtcttggaagcagaaccacacacagcaggcactgctggaatcagggtgaagcctgactgtcaaatacctgtgctgagagaccacatggagactgccccacttcccatatctaaagagacctgggtagaaagcactgggcacgtgtgcacttgagttggaggcgctgtgagcagatccagcacaggaggtaaaagagtcactccatttcattycttttcagtcaattttcaatttcgcctccaaaatggcctgttaagacttgagtcacactattgaccctgggtctaaagcatcgtcacttttctg

SEQ ID NO: 101602 - DNA, 590 bp, Homo sapiens
ttaaatggttatattaggataaaaataaaagtttcaaatcaataatttcaacttttgtcttaagaagatcagaatgaactgagagtaagtataaggtgctaaataataaagatgagagcagaaatctataaaacagaaaatggtaaatattttgacactaactgataaactgcaatacagatctgatggcaaccacctgtagttaaagtcagacttcacagggttgagagcatggtccacaacaagagtcctcttactttagatgccagccacactttaagggttccgaggctgctcacatgtcttgccacctggttgcaaatacaggagtttcccatgtcctccctcaggtttgataattcactgaaatgtctcacaactgtggaaagaattatgctaatgatcacagttttatcattttatcataaaggttataaattaggaccagccaaatgaagaaacacacagaacaagtgtgtaatggtcctgaatgcagatcttccatgccctctccstgtggaatcagggcacactaccctccgtggcacatcaagtaaagtgataaatattatacatcttggtaaaaagac

SEQ ID NO: 101603 - DNA, 527 bp, Homo sapiens
atgtggcagcgcaggtggaatatccatccttatgttcccagtgttttgctgtagctggcacatagctggagttcagcaaatgccttttgggtgaatggctgaatgatggatatttggatggatgagacgagtggatggataaagctctgcactgcaaagagattctgtaaagctttgtctcacttcaggcctgggatggktatccttatttgcaaaaatccaaactaggactttatttagcctttgagcatgtagaatttccattctagtaacaaagtattttcaactgaaataaaattagataataggagtatactaaagacccttttctaaatgtggcctacttgactatttccattgccgaagcaactgctgtctaaacagtcttgactgaactgaggaacccagaagtcttagtaggcaaaattagtgcctactctagttttctgcctattcatttaggaatatttgtgttacttacagaaaatataaatatctgttcaattctgtcctcatatagtaacaca

SEQ ID NO: 101604 - DNA, 575 bp, Homo sapiens
aatgttctaggaatacaataaaaatacagaacattctcccaaactttaaaagaaaaactaaaaatttcttttaaaagcattaaataatgaaatacaaatttaatgataaatatctaaatagagacggcaattagaaatctggaatcatgtttcaaaaatttcttaaaatatcaaagcccagaattagttttcttttaccatatgcatgcactcagagaaatcattatttacttccaacaatatcattcagcaaatatgcctttatcctttgaaaagaagtttctctgctagagaatatcacacaaatgttaaaacaaggactgagttcgtgaacaaatagagtgtgtaatttttaacttcacctacccgctccacacacacaaacttaactgasccattgaggaacagttctgctatagtgttgaaccaaagaataaaaaagtctttacaaagtcaggcagtgaagggccatgcattctcttatgaggtttcagcctcaggcattttattttcacgctcattaattctgatatgtcacaaacagaagagatatttttgaaaggttatgatattca

SEQ ID NO: 101605 - DNA, 575 bp, Homo sapiens
aatgttctaggaatacaataaaaatacagaacattctcccaaactttaaaagaaaaactaaaaatttcttttaaaagcattaaataatgaaatacaaatttaatgataaatatctaaatagagacggcaattagaaatctggaatcatgtttcaaaaatttcttaaaatatcaaagcccagaattagttttcttttaccatatgcatgcactcagagaaatcattatttacttccaacaatatcattcagcaaatatgcctttatcctttgaaaagaagtttctctgctagagaatatcacacaaatgttaaaacaaggactgagttcgtgaacaaatagagtgtgtaatttttaacttcacctacccgctccacacacacaaacttaactgagccattgaggaacagttctgctatagtgttgaaccaaagaataaaaaagtctttacaaagtcaggcagtgaagggccatgcattctcttatgaggtttcagcctcaggcattttattttcacgctcattaattctgawatgtcacaaacagaagagatatttttgaaaggttatgatattca

SEQ ID NO: 101606 - DNA, 665 bp, Homo sapiens
attatggcctttatcattttaagatttttatatgtctacttttatgaactctaggctagttttttccacttttatttctacaatcatggggcctattttatattttctcttgcacttgattatagaagagattgaaatgagttaggaaacatgtacttgaaaccaataatgggcacactttacaggatttcaaaatctaaaaatatcataacataacttcagggaagagtaagaagtattggtgtcatttttttccttttagtagrttagttgaagaggtaaattgaacatggactatatgtcagacttttttttccaaattatattcttaaatatatagtaaaacatatgctagagacagttttttaataacaaacaatatttgaattgagatcctgaagaaaaataaattaactgtgtaaaaatgtattactaaatatctgcattttctagagatgtatccttaagtatgtaggtataaaattacactcttgagatatatttttaaaataatttggcaagaagagaacagggataccttaagcagaaccaacaaaattatgataattgttgaatatgtgtgatggttgtatgttaatgtattgattattttgtgtgggtatgaaaacatgataatataattcaattacaaaaaattaaaaatt

SEQ ID NO: 101607 - DNA, 542 bp, Homo sapiens
atttttttttttttccccagtgtaagcagctctgcccagaacccatattttgggtgaaggacacccttagtccmtggagtgagaaacagggatttgctggatgtaatgattttccagcctctccctctcacctctgctattgaagattgagttagacctgctctgaaggccacagaatagatggatgcatattctaattcctaatgcctacagggcaataactcaggctgattccttcagctacaataacaaggtttattttattacagtttgaaagctgtttgggacctcactaggagaacatgtcccctggctcaaataggttaaacatctgctaactttccccccaactttccccttaactttgttttattgttattgccctcatgaggccactaagcaggagttcatgggaggaagaatggaagtgacatttctatcattattcagcacattcaggcagtttattatctgggaactcattcctcctcaacccccaaggaacttaatatgaaataatattaacacattaagcatgtaat

SEQ ID NO: 101608 - DNA, 579 bp, Homo sapiens
agggaatttgtcctaaggatgctagaccaaagaggggaaattatattttacatcaggttgaaaatgtctatattggcgcacttacaataaattctggatttaaygtactaggtcaaactagcccaaatagctggaagtagatttagtaattttcttggactttttttattattaaagctggaccaaatggtagtctatagcaaatgaagtgaagatatcagaaatgctttggtttaatataaatcaagaaatccaaagtcttaggaaaatattggagttgggggtggatttaatcacatgtgacttattcatcctttcaaaacatctagtccttcctgaaaaacagcctagatgttatttcttttcactcagcatagaaaaatacattggtgagagaagcaacagaggccttaaaaagtatttcaatgactctcctctttagggtgtgataaagatgagaaatgtaaccatttaaatggcttcctgattttaatgataagggtgggtactcagagtaacaatgacaaagtaatatttgttaatgcccagaagcaagatgggcatgctatgctaccattg

SEQ ID NO: 101609 - DNA, 574 bp, Homo sapiens
ggatgggacaggcagataatcttccctaaagtctggccatccccagccrgcccttctctgaagtccagtcatctggacttcatctgaagccacctctcctccggagtccagtcatccctctgaagtctagttgcctctctgcagtcaagcagcttctctccctctaccaattgaatctggagtctttataggcacaggatagggagcaggacaggccataggcagttttagaaaaggcaccattcaattggaaaaaagacattattcagaaagaacaaattgggagagagcaggcaaacagggatagaagtttttacattgggttgtgggtttcaggcttttcagctcgtaggtggggttttgccaggacctgccgctgtctgcctagcatttctctgcctcctgcccctatcagtatagaaatagtgaacaaaccagcatgataagtagcccttgaacctggctttcttgtcttaagtcttcctactgtgttccaatgaaatactccattgtgtctataaaaagcagctgagtttttgtttacatgtctaaaaaccaagaacgaataaatact

SEQ ID NO: 101610 - DNA, 574 bp, Homo sapiens
ggatgggacaggcagataatcttccctaaagtctggccatccccagccagcccttctctgaagtccagtcatctggacttcatctgaagccacctctcctccggagtccagtcatccctctgaagtctagttgcctctctgcagtcaagcagcttctctccctctaccaattgaatctggagtctttataggcacaggatagggagcaggacaggccataggcagttttagaaaaggcaccattcaattggaaaaaagacattattcagaaagaacaaattgggagagagcaggcaaacagggatagaagtttttacattgggttgtgggtttcaggcttttcagctcgtaggtggggttttgccaggacctgccgcwgtctgcctagcatttctctgcctcctgcccctatcagtatagaaatagtgaacaaaccagcatgataagtagcccttgaacctggctttcttgtcttaagtcttcctactgtgttccaatgaaatactccattgtgtctataaaaagcagctgagtttttgtttacatgtctaaaaaccaagaacgaataaatact

SEQ ID NO: 101611 - DNA, 478 bp, Homo sapiens
taaagaaaacagttttattattgaataagcattaaaccagaatgtgatacacatcacaggcaatctactaagagattgcaaagacagaaagaaatctaacccttttataaagccgaccagataaaactcattatctacagaatctctaaatagacaataattagtcctccagtaasaggatttgacagtgccatttattacatatagtttatcctaaatttacctgttaattggggtgaccatctgtgttagttaattggttttatacaaaagaaaaataaactttccatatcttcttgacagaaggtagttttgcagcttggagccaggcacccactgaagttaggctcctaccctcccacagaaatcgggctacagggtactgtctcccttgatgtttccatttcaaaaagagggctcccaggttcttgaaaaagacattcctgggtcataacgctggcaggagccttatttaatt

SEQ ID NO: 101612 - DNA, 566 bp, Homo sapiens
aaataaaactacacctgtataatgcattttaatgaccaatgccatttttgtgagtcattaaggaaatcgtaagtgattatttctctctcttgctggctaacctgcctctttcttacctggtagattcccaaacacaactttcctgcctgtactggattcagagacattttcttttttctttytttttttttttttgttttactagtgcataggaattataactttatccccacagtacatagttatgcaaaccaaataagatcaaggatggggcagtgcttataaagacaaagtgaagtattaccattcctggaaatgaaatggacaatgaaacttcaaagaatggtcactccaaaagacacacattaagctttcaaatgcatttcacagacatatatttaagttgaacattggaagaggtgctattccctgagaattttgattgaatggtcttgtaagacgcagtctggaaggcgaaggcagtagcttttcctattgtaatgcatctcatttatcctcatggataatacataaaacagcaacaattgtttacatcttggtgactg

SEQ ID NO: 101613 - DNA, 442 bp, Homo sapiens
cattgtctggcctatctgacatacaggatttttataaaccaatctaaataccatcagaaaatwgtaaaggagagagcgaattggtgagaagagtggttctcacagtccggaaactaattttcaattgactaccatagttccttgatcctgaaaagcgcacttgttttctacaattgtgtatctctgaaattaaggtgtcctgtaattaataattaaatctaatgtagaaagtatctttctttttttctgaaaaacttttattggatcagtgtgttgaatctgtgctcaaatctaagaatgaagaacgaaggaattattatatgcctgcaaatattttggttatgttgatttgctagccctaagggcattaaggtatgttgtacagctaggaaaagtgaaatgagtaaagagaagaaaatcagggatcagccagggagcatag

SEQ ID NO: 101614 - DNA, 442 bp, Homo sapiens
cattgtctggcctatctgacatacaggatttttataaaccaatctaaataccatcagaaaattgtaaaggagagagcgaattggtgagaagagtggttctcacagtccggaaactaattttcaattgactaccatagttccttgatcctgaaaagcgcacttgttttctacaattgtgtatctctgaaattaaggtgtcctrtaattaataattaaatctaatgtagaaagtatctttctttttttctgaaaaacttttattggatcagtgtgttgaatctgtgctcaaatctaagaatgaagaacgaaggaattattatatgcctgcaaatattttggttatgttgatttgctagccctaagggcattaaggtatgttgtacagctaggaaaagtgaaatgagtaaagagaagaaaatcagggatcagccagggagcatag

SEQ ID NO: 101615 - DNA, 581 bp, Homo sapiens
tgtagttgctctcatatctactcctccccagggtcagaaaaatgggtagtgttgtgtgcgattataccctcactactgtgctgcatttcactctgctcagagtactattgctcccatgggaagactccttcctgtgagctagacatccattactgagcccagagcccatgccttccttcttccctagagccctgctcatattgagcacagcctagggatgattgtgagtagcatttttctcattgtgcttctaagagcctctctaagggctgataaagccatgatactctcatcggttgcacacattgggtttctgagtgagcctgtccaaagtttgacaatgattgatttcgtctaccaccttcattacccagagacagagartcacttctctgtggtcacttcctatggccactcctctatggtcacaaggaattcaagttctgcttcccatcaggtctttattctattaatctccacagtctttctctgtgttttcctattctaattatgaaacaagatagtgggtttatattccagatgaaccagtttctagctgaaacaagttatttaacccctat

SEQ ID NO: 101616 - DNA, 581 bp, Homo sapiens
tgtagttgctctcatatctactcctccccagggtcagaaaaatgggtagtgttgtgtgcgattataccctcactactgtgctgcatttcactctgctcagagtactattgctcccatgggaagactccttcctgtgagctagacatccattactgagcccagagcccatgccttccttcttccctagagccctgctcatattgagcacagcctagggatgattgtgagtagcatttttctcattgtgcttctaagagcctctctaagggctgataaagccatgatactctcatcggttgcacacattgggtttctgagtgagcctgtccaaagtttgacaatgattgatttcgtctaccaccttcattacccagagacagagaatcacttctctgtggtcacttcctatggccactcctctatggtcacaaggaattcaagttctgcttcccatcaggtctttattctattaatctccacagtctttctctgtgttttcctattctaattatgaaacaagayagtgggtttatattccagatgaaccagtttctagctgaaacaagttatttaacccctat

SEQ ID NO: 101617 - DNA, 618 bp, Homo sapiens
caaatatgagataatatatgtaaagtgcctaacatatcattattatacatttgatacaattttgaagaattgtgaaatatgaaatacaggggtaccaaaattaagtaatattgaagtttaagagtactgttctgatttggattgtcactgaagattgcacggaatagggcaacattaatagttaactttaaaggatggctgtgttggattttaataagctaagtaggaaaagaggtcttttcaatttaataatgataacttgagcaaagatttaaaggaagaaaatatagtaggcattcagtgcagggagtatatttattatgttatggagtgcccattasgctatcttgcaattactcttttacatagcagaagctgagactcaagaaacatttgtatacctttccaagtggatggcacagtgcactaaataaacattaaatgcacaaataaataaagattgcggaggttgcagacaggaaaaccctttttggagagctcagtttggattccactgaacaatgagtcaaaaatatgagatgaagacataaaatagtgctgactataggaatttgaaagaagtagccagaacaaaacctcacaaagcaatgaaaagaa

SEQ ID NO: 101618 - DNA, 656 bp, Homo sapiens
cttcagggaatctcctggataaatgccaaacacagaaatcaaagttctccctgcactaattcacccttattctaaagtgaaatacgcattaaaacctactggggagttaaatacttgcttatttcaaagttgttttcctccttttactaactttaagtacgttagaatattttaagtcctgaaggcaatatgattagagaatataaccgttatatttatgacaataattgcatctgatagaacatgggaaagaatggaggaaagaacattctttctagagatatggataatttactttatgcaacgctatgcatcttagtttctgcatctgtaaggtgaagctttttttttttttttttggagacagagtctcgctctgtcacccaggccgaactgcagtggcactatctcggatcactgcaagctccacctcccgggttcaagccattctcctgcctcagcctcctgagtagctgggactacaggcacccaccatcatgcccggctaattttttgtatttttagtagagacrgggtttcaccatgttagccaagatggtatcgatctcctgacctcatgatccgcccgccttggcctcccaacattgctgggattacaggtgtgagccaccgcacccggccaggtgaagcatttt

SEQ ID NO: 101619 - DNA, 605 bp, Homo sapiens
tactttgtctataatcttacttagctatcaactctcttcagaaaaaaatggattctatttggttctagttgaagtcttacaagttccaaataaagctttattgtgtttggggacctccgaagttgaagtactgatcccttcagccatttgccatttgtttcctactaatgcaatgggtaactcgtgtgtgtgtgtgtatgtgtgtgggtgtgtgtgtgtgtggtttgttttgaaccaacaatatactgttagtaaatggcacgcaaacataaagacactgtgcaaaattatccctcaggtccattcgaagggattcagttgattttattgtcttcccctaagtgtgtacaacacatatatgaaagaaaaacactggaacttttagttatttagtaaagatggaaattttcactattttgctgaaggttcatatttaaayataaatcaagacattaatctacacagtttgggagattttattttttatattataatttttttaaattttaactgccacataataattgtatatatttatggggtacaatatgacgtttcatgcacatttagtataatgatcaaatcaagataattagcatatccat

SEQ ID NO: 101620 - DNA, 546 bp, Homo sapiens
tgaacggaactgaattgaattgaattgaaagaaaaatttcaggctaaccccaccctattacctagtataggttgtgtatgcttgggaccagaagtgcttcagattttggatattttgaattttggaatatttgcatatactgtacacaatgagctattttggggatgagacccaagtccaagcacaaacttttatttatgttttacattcatcatatacacatagcctggaggtaaatttgaataattttttgcatgaaacaacgtttgtgttaattacttatgtgtagaattttcaacttkaggcatcatgttggtgctcaaaaaattttgaattttggagcattttcgattttagacttttggattaggaatgctctacctgtattccaaaagagcagcagaaaacatctaaaactatcagtgattcaaagaaataagagaagtaagataaaaaaacatacacactgacatacatactattcaagtattatttaatatcacacaaagaggataataggatttaattacattagcttatattact

SEQ ID NO: 101621 - DNA, 600 bp, Homo sapiens
gattttccatgtcaaatacagagtgactaaggaagatgctaccagtagaagataactttatgyacctgacaatttttaaaaccaccatcaggtttgtcagtggtaagattacctgccaacatatattccattatatccagtgaaacgtcaatacataatttaaagacactataccaggtcaatatcttctattggattccttccatcatatgttccttttacatagcatgattttaactttgatacatattttttagaaatgtttttaaagatttttctttctgtttttgttttctctttagccaaagaaataatgccatgaaaagattatcaacatattattcaccttgccaaatatttttgcatatcccacagttaccatctcatgtaattttgatacaaaaaattctaaactcagtcattgacctcaactgtgataacctactgatgccttcaggcaaacatttttggttattaaataatacataaaaatatttaaattgcaatgcaatattttttgtaagtaaccaaggtatttccttataactgaccataagaagggggctgttgaggaagcaagatcagaataataagtagaga

SEQ ID NO: 101622 - DNA, 600 bp, Homo sapiens
gattttccatgtcaaatacagagtgactaaggaagatgctaccagtagaagataactttatgtacctgacaatttttaaaaccaccatcaggtttgtcartggtaagattacctgccaacatatattccattatatccagtgaaacgtcaatacataatttaaagacactataccaggtcaatatcttctattggattccttccatcatatgttccttttacatagcatgattttaactttgatacatattttttagaaatgtttttaaagatttttctttctgtttttgttttctctttagccaaagaaataatgccatgaaaagattatcaacatattattcaccttgccaaatatttttgcatatcccacagttaccatctcatgtaattttgatacaaaaaattctaaactcagtcattgacctcaactgtgataacctactgatgccttcaggcaaacatttttggttattaaataatacataaaaatatttaaattgcaatgcaatattttttgtaagtaaccaaggtatttccttataactgaccataagaagggggctgttgaggaagcaagatcagaataataagtagaga

SEQ ID NO: 101623 - DNA, 535 bp, Homo sapiens
gctggctggaggccccattcgggagtcctgctagtgaggaggaacaggatcaggcacctgcttaaagcagcagtctggctatgttgaggtagagcagctgtgccatggtggggcatcctttctgccccagatcagctcaaactctccaaagcctgaaggctggaatggctaaggtgcctaaatagcaaagatgtcagcctgctcctccacctaggagttccttcttagggaggtgtaatgctgctattrgtagctgggtggaattccaaaccagtgggtcttatcttgtgtggtgctgtggaagtggggcctgcaggctgttgctgttcagccccctagattcagcctccttcctaggggtatgtagaggagtctaacctcccactttcccagaactgtagctacttttgccagaaagcccaagtatgtaagtctccagggtctccatgcatgcctaagtggctgctctgccaagactttgcatagctctgtctgtcagacttaagactgaaggccctggtggagtgggttcaca

SEQ ID NO: 101624 - DNA, 640 bp, Homo sapiens
ttagtactcataaattttaacatttgtactatagcaatattttggagtatgtaaggtgaaaatgaaaagtggcatcttagtccaacaataacaataacaataacaatactgtatccattcagagttccagcacagagtctactccmgctcataaaagtaggaagaaacttaaaagcctgtcaaatggtttacagaactgagggaagaaaaagcctccagcatgtgtccaggcatggctcccagagccacaccacagaactgagtagccaaggaagctgctttattatcagaaagctgcaactcagatgttgcctgctgacttgtgaagtggtcatgcaactcctggctacagggccaggccatttgtcataatcaacaccagtaaaattggttttcatgggtattgagaatatacagcacacctaacacatctagcttgctggcaaaaggaggagattcagcttacaaatttgattacatcaaaatagacttctgaagggctaatttccccatataaggagtggtataattacttaacctctcaggacctgttaccctctaccacatttgaattttgttgacagaggaaagctcattgcaaagtgaaaaatttcaagaaagctaggagtttggaatttga

SEQ ID NO: 101625 - DNA, 640 bp, Homo sapiens
ttagtactcataaattttaacatttgtactatagcaatattttggagtatgtaaggtgaaaatgaaaagtggcatcttagtccaacaataacaataacaataacaatactgtatccattcagagttccagcacagagtctactcccgctcataaaartaggaagaaacttaaaagcctgtcaaatggtttacagaactgagggaagaaaaagcctccagcatgtgtccaggcatggctcccagagccacaccacagaactgagtagccaaggaagctgctttattatcagaaagctgcaactcagatgttgcctgctgacttgtgaagtggtcatgcaactcctggctacagggccaggccatttgtcataatcaacaccagtaaaattggttttcatgggtattgagaatatacagcacacctaacacatctagcttgctggcaaaaggaggagattcagcttacaaatttgattacatcaaaatagacttctgaagggctaatttccccatataaggagtggtataattacttaacctctcaggacctgttaccctctaccacatttgaattttgttgacagaggaaagctcattgcaaagtgaaaaatttcaagaaagctaggagtttggaatttga

SEQ ID NO: 101626 - DNA, 640 bp, Homo sapiens
ttagtactcataaattttaacatttgtactatagcaatattttggagtatgtaaggtgaaaatgaaaagtggcatcttagtccaacaataacaataacaataacaatactgtatccattcagagttccagcacagagtctactcccgctcataaaagtaggaagaaacttaaaagcctgtcaaatggtttacagaactgagggaagaaaaagcctccagcatgtgtccaggcatggctcccagagccacaccacagaactgagtagccaaggaagctgctttattatcagaaagctgcaactcagatgttgcctgctgacttgtgaagtggtcatgcaactcctggctacagggccaggccatttgtcataatcaacaccagtaaaattggttttcatgggtattgagaatatrcagcacacctaacacatctagcttgctggcaaaaggaggagattcagcttacaaatttgattacatcaaaatagacttctgaagggctaatttccccatataaggagtggtataattacttaacctctcaggacctgttaccctctaccacatttgaattttgttgacagaggaaagctcattgcaaagtgaaaaatttcaagaaagctaggagtttggaatttga

SEQ ID NO: 101627 - DNA, 602 bp, Homo sapiens
ttttggagtatgtaaggtgaaaatgaaaagtggcatcttagtccaacaataacaataacaataacaatactgtatccattcagagttccagcacagagtctactcccgctcataaaagtaggaagaaacttaaaagcctgtcaaatggtttacagaactgagggaagaaaaagcctccagcatgtgtccaggcatggctcccagagccacaccacagaactgagtagccaaggaagctgctttattatcagaaagctgcaactcagatgttgcctgctgacttgtgaagtggtcatgcaactcctggctacagggccaggccatttgtcataatcaacaccagtaaaattggttttcatgggtattgagaatatacagcacacctaacacatctagcttgctggcaaaaggaggagattcagcttacaaatttgattacatcaaaatagacttctgaagggctaatttccccrtataaggagtggtataattacttaacctctcaggacctgttaccctctaccacatttgaattttgttgacagaggaaagctcattgcaaagtgaaaaatttcaagaaagctaggagtttggaatttgat

SEQ ID NO: 101628 - DNA, 270 bp, Homo sapiens
gaattcaaggagtatcttataacttaaatacactacacacttataacacaccaggcaccawgtgaggaaatgggatatgatctctgccctcccaggcttattggagagacaggtaaatgccaccaactgctgagtaaagcacacagggatagagcttttacccctgagcaagagtacagaatcagcctgcctaatacaggacctgatatgaaccacatgctcaatgaaatgtttgtgacgatgacaactgaatgagaaatgtttgcagaa

SEQ ID NO: 101629 - DNA, 575 bp, Homo sapiens
ggagtgcagtggcatgatcacggctcactgcaaccttcatctctcaggctcaagcggtcttctagcctcagcctcctgagtagctgggactacaggtgcacatcattgtgcccagctaatatttttttaatttttagtagagacgaggtctcactatgttgtccaggctggtctcgaactcctggcctcaagcagtcctcccacctctgcctcccaaagtgctgggattgcaggcatgagccacatgctcggcctcagctccctcttgaacaccaacaattcctagatttggtcttttgaattacttttgtagatcttagatttggygttttgagttacttttgtagatcttgttggcggtcttcattcctttcagttatttttttcctttttttccctctggctgtattttcaaatagccagtcttcaagctcactgatactttcctctgtttggttccctctgctgttgagagtctatcgagttcatcagcaaatgaacttcaacgattcagcaaatgaacttctcagtttcaagatttgcttgatttttaaaattactttaatattttgtta

SEQ ID NO: 101630 - DNA, 575 bp, Homo sapiens
ggagtgcagtggcatgatcacggctcactgcaaccttcatctctcaggctcaagcggtcttctagcctcagcctcctgagtagctgggactacaggtgcacatcattgtgcccagctaatatttttttaatttttagtagagacgaggtctcactatgttgtccaggctggtctcgaactcctggcctcaagcagtcctcccacctctgcctcccaaagtgctgggattgcaggcatgagccacatgctcggcctcagctccctcttgaacaccaacaattcctagatttggtcttttgaattacttttgtagatcttagatttggcgttttgagttacttttgtagatcttgttggcggtcttcattcctttcagttatttttttcctttttttccctctggctgtattttcaaatagccagtcttcaagctcactgatactttcctctgtttggttccctctgctgttgagagtctatcgagttcatcagcaaatgaacttcarcgattcagcaaatgaacttctcagtttcaagatttgcttgatttttaaaattactttaatattttgtta

SEQ ID NO: 101631 - DNA, 498 bp, Homo sapiens
acccacccacatacataccagtcaaagacacagaggaagacacatatgcatacacagagagatttgggaacataaggctgcaaagctatggagacatatgcattcacaggtgtacgcagacagacatatccataaatacacagagatatataaacatatgcatactcaacatgcaaattcatactgactcacagatttatgcacatttacatatayaaattcacacatatacaggtatacacatgtacacaaacactgacacatgtacacaccaagatatatacgcacacatgtacatgtgcacacacagaaatacttttgtattctccctgggccccatgtggaaacacactcccaagaagtctgtctctccccactgcctccaccccctacaatccagggctctctaccgtcttgatacccagtctcagttctgagtttcctacttcatcaactctacatccttcctggagcccagtacctcatctgtgacaaagt

SEQ ID NO: 101632 - DNA, 498 bp, Homo sapiens
acccacccacatacataccagtcaaagacacagaggaagacacatatgcatacacagagagatttgggaacataaggctgcaaagctatggagacatatgcattcacaggtgtacgcagacagacatatccataaatacacagagatatataaacatatgcatactcaacatgcaaattcatactgactcacagatttatgcacatttacatatacaaattcacacatatacaggtatacacatgtacacaaacactgacacatgtacacaccaagatatatacgcacacatgtacatgtgcacacacagaaatacttttgtattctccctgggccccatgtggaaacacactcccaagaagtctgtctctccccactgcctccaccccctacaatccagggctctctaccstcttgatacccagtctcagttctgagtttcctacttcatcaactctacatccttcctggagcccagtacctcatctgtgacaaagt

SEQ ID NO: 101633 - DNA, 581 bp, Homo sapiens
agtatatatgcaacgtttgctgaatggatgaataaatgaatcagatagaaaactaggacacttctctctgacaactgtaagtgaaaggttggttttgcttgtgcacaagcaaagttaacrctggaaatattaacatcttaacacctttccatgaagtggattagggttagtgcttcagggcatagtccagggttcccagagagtaggcattaggaaaggtctggagtggactgaataaggaagtgcagtgtagtggggagaagggggctttggcatcaaatggtgactgacatagtttttggttttaacagtataatgttgaacaagcaggtcatgtgagtctgtttgtcatctataaaatgataataagcatatatattgttttaagaaataaataatagccaaaagatagaatcaacccaaatgtccatcaatagatggttaaacaaaatatggcatactgtggtatatacatacaatggaatattatagagtcttaaaaaggaagaaaattctgacaccttcttcaagacagatgaaccttggggacgttatgttcattgaaataaggacaaatactg

SEQ ID NO: 101634 - DNA, 581 bp, Homo sapiens
agtatatatgcaacgtttgctgaatggatgaataaatgaatcagatagaaaactaggacacttctctctgacaactgtaagtgaaaggttggttttgcttgtgcacaagcaaagttaacgctggaaatattaacatcttaacacctttccatgaagyggattagggttagtgcttcagggcatagtccagggttcccagagagtaggcattaggaaaggtctggagtggactgaataaggaagtgcagtgtagtggggagaagggggctttggcatcaaatggtgactgacatagtttttggttttaacagtataatgttgaacaagcaggtcatgtgagtctgtttgtcatctataaaatgataataagcatatatattgttttaagaaataaataatagccaaaagatagaatcaacccaaatgtccatcaatagatggttaaacaaaatatggcatactgtggtatatacatacaatggaatattatagagtcttaaaaaggaagaaaattctgacaccttcttcaagacagatgaaccttggggacgttatgttcattgaaataaggacaaatactg

SEQ ID NO: 101635 - DNA, 587 bp, Homo sapiens
tctcctttggggcttaaagaatggatccccaggtgagtctgctaaggaggagaaggtgcctggtgcagggaggcaacctggctacaggcaggggtcaggggccagcctggctccgctcatcacctctcactgaaagacctctaatcaggccccttcccctaactgaggcaaggccaaggccctgaagcttgtctggaggaattcgcccccaccctgcatgggagatttgagagctaccccactgagaaaaggaagcctcctcatctgggccaggggcctacttgcctgccgcctcatggaaggtatttastgttttgtgccgctaacagaatacctgagactgggaaatgtataaagaaatttatttggctcacagttctggaggctgggaagtccacaggcatggtgccggcatctgctcagcatctggtgagggccttcttgctgtgtcatcctgcagcagaagtggagggacaagagagcatgagagaggaagggaaaggggaccaaactcatcattgtatcaggaatccattcctgtgataatggcattaatccattcatgagggcagagtaatccattcatt

SEQ ID NO: 101636 - DNA, 587 bp, Homo sapiens
tctcctttggggcttaaagaatggatccccaggtgagtctgctaaggaggagaaggtgcctggtgcagggaggcaacctggctacaggcaggggtcaggggccagcctggctccgctcatcacctctcactgaaagacctctaatcaggccccttcccctaactgaggcaaggccaaggccctgaagcttgtctggaggaattcgcccccaccctgcatgggagatttgagagctaccccactgagaaaaggaagcctcctcatctgggccaggggcctacttgcctgccgcctcatggaaggtatttactgtttwgtgccgctaacagaatacctgagactgggaaatgtataaagaaatttatttggctcacagttctggaggctgggaagtccacaggcatggtgccggcatctgctcagcatctggtgagggccttcttgctgtgtcatcctgcagcagaagtggagggacaagagagcatgagagaggaagggaaaggggaccaaactcatcattgtatcaggaatccattcctgtgataatggcattaatccattcatgagggcagagtaatccattcatt

SEQ ID NO: 101637 - DNA, 401 bp, Homo sapiens
tgaattcaaattttatatcgaagggcatagccagaataccaaagtatatcaggtgaatgaaggtccagggataagagacaaatggaaagaaacacatgaaasaaggaacccaagataaaaaccatatttacttacaggatcaacaaaatccatattgagtccataacaaagcttctggattcgagatgtaattttgtcaaacatgactcgttcttggcggccatctaaagaatcaaatcatgttagcaattattaaattcatgttagcaattattaagactacaatgtcaaagaatcaaatgtaattaacatgtaaattgaccaacatgaagtgctatttcacagaaaagattgaggccccctcaaaagattcatgaagagattgtcttctctgatgtcac

SEQ ID NO: 101638 - DNA, 641 bp, Homo sapiens
ccaagggatgggacatggacatatctttgtgagagccacccctctgcctaccacagcctccaaatgtggattgtgaaggaatgagagagagagggaaaggggcagtgagggtggccttggccttggcaggttggtgtgcagagggccgtagtaggggtgggtgtgtgacaatcacaatgcgggaagcaagggtgctgctatcaggaagcctgtctggtctggtcatagcatccttgactccaatggttcagctcagaagggtgggaactcagctctgcctgtggggctgggctaagccagaaaggctccctggsgtagatgagcttcaagtctttcctgaggaaagaccagctgaggggtgcagagagagcgtacaggctgaagagatgctactcaggccttttttcatgctaggagatcccagctgtgcctcttgtcaggtctagggcttttcagggcagggatgggcctcccccctcaactggggagaccctttcacagaggcaacgtctggggccagggtaaggttgtggctgcggagcacagaggggaggccccaaaggtcctcaccaggactccatggcagggacagccagggaagggagacatgaggcaggcacacatgtctcaagggcaatgtg

SEQ ID NO: 101639 - DNA, 641 bp, Homo sapiens
ccaagggatgggacatggacatatctttgtgagagccacccctctgcctaccacagcctccaaatgtggattgtgaaggaatgagagagagagggaaaggggcagtgagggtggccttggccttggcaggttggtgtgcagagggccgtagtaggggtgggtgtgtgacaatcacaatgcgggaagcaagggtgctgctatcaggaagcctgtctggtctggtcatagcatccttgactccaatggttcagctcagaagggtgggaactcagctctgcctgtggggctgggctaagccagaaaggctccctggggtagatgagcttcaagtctttcctgaggaaagaccagctgaggggtgcagagagagcgtacaggctgaagagatgctactcaggccttttttcatgctaggagatcccagctgtgcctcttgtcaggtctagggcttttcagggcagggatgggcctcccccctcaactggggagaccctttcacagaggcaacgtctggggccagggtaaggttgtggctgcrgagcacagaggggaggccccaaaggtcctcaccaggactccatggcagggacagccagggaagggagacatgaggcaggcacacatgtctcaagggcaatgtg

SEQ ID NO: 101640 - DNA, 567 bp, Homo sapiens
atgtctaattgtttcctttttacatgtttattttataagcgagatatttggatcttataaactgaggaaatcattattcttatgttagagtcttttattttgttttctcaggtgtcagttcttcagcttgttggcatctctttcatggtactggtggtcttccttgtactcttcctggcatgagagattccttatttgcccaagtgsagatgcttttggtgactgtggggtgcagagtgtggcatactggaagtaactgtgcaggtagcttattttgggggtatatccaaaatagtttatccattcatatttcagattagacctccctgagatagtaccatgtatttttagctagattcagtactttggcctagggtaaacactgcagctgtccgcagattattgtaagggaaaaacgagtaatatttcaactatttgaaattgctcacctaatgattttccctggaacacatcctactttgtgtattttgtgactatgtgtttgcagaatctcaagaactgctcccacctataaaaggatttttttcaaacactgtttggactgtg

SEQ ID NO: 101641 - DNA, 439 bp, Homo sapiens
gtgagaattcactcactacctggagaactgcaccaagccattcatgagggatccaccstcagcacccaaacacctcctgctaggccccacttcccaacaccaccaagttggggatcaaatttcaatacgagttttggagggaacaaactcaaaccataccaccaagatatacacagggactgcaagtgatcagactccacaaggtgaatgtcattaaagctgtggttgtttccacccatctagtcaactctcagatggtaggcaacattttcagtcctagaatactattattacagattctggctcatgcataagggattacacaaaaaactacaaccatgaaagaaagtcaccaaggggttacatttggcttaagcaattaaatgaatagcagaatagccaagttgtcatataaaaattgcccaaatagccattataa

SEQ ID NO: 101642 - DNA, 439 bp, Homo sapiens
gtgagaattcactcactacctggagaactgcaccaagccattcatgagggatccaccgtcagcacccaaacacctcctgctaggccccacttcccaacaccamcaagttggggatcaaatttcaatacgagttttggagggaacaaactcaaaccataccaccaagatatacacagggactgcaagtgatcagactccacaaggtgaatgtcattaaagctgtggttgtttccacccatctagtcaactctcagatggtaggcaacattttcagtcctagaatactattattacagattctggctcatgcataagggattacacaaaaaactacaaccatgaaagaaagtcaccaaggggttacatttggcttaagcaattaaatgaatagcagaatagccaagttgtcatataaaaattgcccaaatagccattataa

SEQ ID NO: 101643 - DNA, 439 bp, Homo sapiens
gtgagaattcactcactacctggagaactgcaccaagccattcatgagggatccaccgtcagcacccaaacacctcctgctaggccccacttcccaacaccaccaagttggggatcaaatttcaatacgagttttggagggracaaactcaaaccataccaccaagatatacacagggactgcaagtgatcagactccacaaggtgaatgtcattaaagctgtggttgtttccacccatctagtcaactctcagatggtaggcaacattttcagtcctagaatactattattacagattctggctcatgcataagggattacacaaaaaactacaaccatgaaagaaagtcaccaaggggttacatttggcttaagcaattaaatgaatagcagaatagccaagttgtcatataaaaattgcccaaatagccattataa

SEQ ID NO: 101644 - DNA, 592 bp, Homo sapiens
  misc_feature (1)...(592): n = A,T,C or G
tagctatatgagaatggatggataatggaataacttgttcatttatccagttagcaggaattggtttctgtataccatgtgccaagccctgtgttctgwtcccctcagtaagcaacatccatgctctaaaaatagagcagttttttggtttcttgggtttgagttagtgcagacagtgggttccatgagatgaaacctggatatcttgagctaagcctttaagttttgctataggaacaccagctgcttcacaattaacaaacatttctactaggttgtctttttttttttcctttttcattatgtgtttttgtgtgtttatctctgtcttctggttattttagtggaaagttgacaaaggctgntttagggctaataagcagatacaccttagagttctgctagatttttaataagtacatagtatatctccgctttcaaacttttagctacttgagagaaggccctgcattgtatttgtttttgaacttctcttgaaatcccgtacatgatgatgtttaacaatgacttgttaaatgattagattttatgtgccttcataacactaaatatgagagacaatttaacacat

SEQ ID NO: 101645 - DNA, 593 bp, Homo sapiens
gagaggcagcgcccccgagggggtcagttctctgtctccttggtagcctatgcccccgtggcctccacgcccagcacctgccttgggattccctcgcctgctggcggggccccagctctggtcacatcttggggaacccaggtttcttcttcagggagagcccagctcatagcactgggcaagagagacagattgcatgccaccagcccctaggaggcctcaacctcagcatggacagcaacagccctgggcaagtggatcctgagaaaagggtccctcttggygcaagggcaagaggggccatcacagtacaaaggagggaaggcccatctcagtaggaagtcccaggtagggagggcttcctcaacccatggacaccaggctcttggcacaaggcaaccccatctatagggtatgtacaagataccctctggttagagtagaaaggggagatgcctttcctggaacaacagggtagggagattctagaaaaggttgtgttcaggaagaaagagaaaggccacagacccagcaaatagatagtcaagtcagaagagaagagagaacatctcaggacaaagctggaagacaca

SEQ ID NO: 101646 - DNA, 593 bp, Homo sapiens
gagaggcagcgcccccgagggggtcagttctctgtctccttggtagcctatgcccccgtggcctccacgcccagcacctgccttgggattccctcgcctgctggcggggccccagctctggtcacatcttggggaacccaggtttcttcttcagggagagcccagctcatagcactgggcaagagagacagattgcatgccaccagcccctaggaggcctcaacctcagcatggacagcaacagccctgggcaagtggatcctgagaaaagggtccctcttggtgcaagggcaagaggggccatcacartacaaaggagggaaggcccatctcagtaggaagtcccaggtagggagggcttcctcaacccatggacaccaggctcttggcacaaggcaaccccatctatagggtatgtacaagataccctctggttagagtagaaaggggagatgcctttcctggaacaacagggtagggagattctagaaaaggttgtgttcaggaagaaagagaaaggccacagacccagcaaatagatagtcaagtcagaagagaagagagaacatctcaggacaaagctggaagacaca

SEQ ID NO: 101647 - DNA, 563 bp, Homo sapiens
gggaagaggagcccagaaatcaacccgctgcagtactgacaccaactgcgggcrtgggacgcttaccttggagtcagggaggctgaacacgctggggtcgtccgtactccccaccatgatcttgtgctccttccccggggcatggccgcctgcgccctcggagcgtgcagccttggcgccgtggcgctccccggacacccggtcgctggtggtgtttcccatggctgcagctcgtcggggaccacctaccgcggggaacgacaccgggctgggaacacctcagccgccgcgtcaggggcgcccccccggcccccgcccctgcgcctcgggacagggcaagggattccccgcccaaggaaagccgagccctggagccctctccctcttggcctgcgggaacgcctgcaaataccccggtgccctcactggccctagctcaggaaacccgctatcgggacctcccccgcgtccccgcgctcactgccaggggcgcccccactccagtcacctcgggcgatgcgctccctcctccaagggccactgatgtgatggctgttctgcag

SEQ ID NO: 101648 - DNA, 620 bp, Homo sapiens
cccgggcgtggcgctgcttctcgccgcggcccgcctcgcggctgcctccgacgtgctaggactcagggacgacaacttggagagtcgcatctccgacacgggctctgcgggcctcatgctcgtcgagttcttcgccccctggtgtggacactgcaagagacttgctcctgagtatgaagctgcagctaccagattaaaaggaatagtcccattagcaaaggctgattgcactgccaacactaacacctgtaataaatatggagtcagtggatatccaaccctgaatatgtttagagatggtgaagaagcaggtgcttatgatggacctaggactgctgayggaattgtcagccacctgaagaagcaggcaggcccagcttcagtgcctctcaggactgaggaagaatttaagaaattcattagtgataaagatgcctctatagtaggttttttcgatgattcattcagtgaagctcactccgagttcctaaaagcagccagcaacttgagggataactaccgatttgcacatacgaatgttgagtctctggtgaacgagtatgatgataacggagatggtatcatcttatttcgtccttcacatctcactaacaagttgg

SEQ ID NO: 101649 - DNA, 655 bp, Homo sapiens
aatggcaggcaaattatctgagatcaggagttcaagaccagcctgaccaacatggtgaaaccctgtctcttctaaaaaaagataaaaaattagccaggggtggtggtgyacacctgtaatcccagctacttgggaggctgagatgggagaatcacttgaacctgggaggtggaggttgcagtgagccgagactgcgccattgtactccagcctgggcagcaagagagaaactccatctcaaaaaaaataaaaataaaaataaaatactagtaaaccaaatccagcaacacattaaaaagatcattcatcataatcaaggaacatttatcagaaagacacaaggatggttttacatagacaaattaatgaacatgatatatcaaatcgacagaataaaggacgaaaaccatatcatcttgctaaatgctgaaaaagcatctgaaaaaaatacaacattccttcatgataaatacactcaacaagttaggcaaagaaaaaaacacctcaacacaataaaggccataaatgataaacccatagccaacatcatatttaatgaggaaaagttaaaagctttttctctaagatctggaataagacataaatgcctacttttaccacttttattcaacatagtgctagaagtcctagccag

SEQ ID NO: 101650 - DNA, 655 bp, Homo sapiens
aatggcaggcaaattatctgagatcaggagttcaagaccagcctgaccaacatggtgaaaccctgtctcttctaaaaaaagataaaaaattagccaggggtggtggtgtacacctgtaatcccagctacttgggaggctgagatgggagaatcacttgaacctgggaggtggaggttgcagtgagccgagactgcgccattgtactccagcctgggcagcaagagagaaactccatctcaaaaaaaataaaaataaaaataaaatactagtaaaccaaatccagcaacacattaaaaagatcattcatcataatcaaggaacatttatcagaaagacacaaggatggttttacrtagacaaattaatgaacatgatatatcaaatcgacagaataaaggacgaaaaccatatcatcttgctaaatgctgaaaaagcatctgaaaaaaatacaacattccttcatgataaatacactcaacaagttaggcaaagaaaaaaacacctcaacacaataaaggccataaatgataaacccatagccaacatcatatttaatgaggaaaagttaaaagctttttctctaagatctggaataagacataaatgcctacttttaccacttttattcaacatagtgctagaagtcctagccag

SEQ ID NO: 101651 - DNA, 574 bp, Homo sapiens
aagctctgaaccccaggccaggctggcaggaagaagcggaggctcatcaagaatggcggctggagggacgagcactcagctcagcttatcaaatccttcctgagcatctgctggctgctgggtgttctcctggatgggagagaagacatggccccaggcccagagaaaygaagtgctcaggaggacatgacccgaccgagtacgcgatgagagacggcgaggacttggtgaatcccagcaggcagggactcagagagtgggagggtgaagagtcattaagatggcaggtttgggtgtgtgagcaaatggaactgacaccctcaacagatgaagagaaactggaagagtctgctctagggggaatgcgagcaaacacggcgcttgccatttccaagctctgcggggcctgcctcccagctccagaggcatgcactgctgccacaggatctaccatgctgtgtgagacagtcgtgccagtgactgtgccctgaagagctgcgccctcacgccctggagcagcttccatctgatctacctctggaagcccagggcactgcacatggcggtgaatagt

SEQ ID NO: 101652 - DNA, 605 bp, Homo sapiens
ccaattaattaaaaatacttgtaatggaaagtctcgtttcctgagcagtccatatttagataaatgggaaaagacatctatagccagcattttcatagtcttcactgagactaatgtcaacaaaaaatttaatatggcagtcttgtattttaagctcacgcttttggggatacattctcaggtcttctttaatgtgggaactgcaaaatataactgccattacatggtaatgggagttaaagaatagagtcctcatgtaaaggttagaacatacttttctattagtccttcaaggacagactttcaaaatgtttgattctartaatcccatgctttgagtagattgattactcttcagtttgtaaatgtaagtgggctatgtgaaatttcttaactgatcaaggttttggatgttcagttatggatgaaaactatctcaacttaactttacccccattatgatatgcagggtgggtagacaaaagctttttattagctaactatatgaaaggataaacactgtaataattcatgtgattcaaaatgggcaaaagcaaaagactagcttcccctcaagaagaaaaatttcagacctatgaaaagga

SEQ ID NO: 101653 - DNA, 605 bp, Homo sapiens
ccaattaattaaaaatacttgtaatggaaagtctcgtttcctgagcagtccatatttagataaatgggaaaagacatctatagccagcattttcatagtcttcactgagactaatgtcaacaaaaaatttaatatggcagtcttgtattttaagctcacgcttttggggatacattctcaggtcttctttaatgtgggaactgcaaaatataactgccattacatggtaatgggagttaaagaatagagtcctcatgtaaaggttagaacatacttttctattagtccttcaaggacagactttcaaaatgtttgattctagtaatcccatgctttgagtagattgattactcttcagtttgtaaatgtaagtgggctatgtgaaatttcttaactgatcaagrttttggatgttcagttatggatgaaaactatctcaacttaactttacccccattatgatatgcagggtgggtagacaaaagctttttattagctaactatatgaaaggataaacactgtaataattcatgtgattcaaaatgggcaaaagcaaaagactagcttcccctcaagaagaaaaatttcagacctatgaaaagga

SEQ ID NO: 101654 - DNA, 605 bp, Homo sapiens
ccaattaattaaaaatacttgtaatggaaagtctcgtttcctgagcagtccatatttagataaatgggaaaagacatctatagccagcattttcatagtcttcactgagactaatgtcaacaaaaaatttaatatggcagtcttgtattttaagctcacgcttttggggatacattctcaggtcttctttaatgtgggaactgcaaaatataactgccattacatggtaatgggagttaaagaatagagtcctcatgtaaaggttagaacatacttttctattagtccttcaaggacagactttcaaaatgtttgattctagtaatcccatgctttgagtagattgattactcttcagtttgtaaatgtaagtgggctatgtgaaatttcttaactgatcaaggttttggatgttcagttatggatgaaaactatctcaacttaactttacccccattatgatatgcagggtgkgtagacaaaagctttttattagctaactatatgaaaggataaacactgtaataattcatgtgattcaaaatgggcaaaagcaaaagactagcttcccctcaagaagaaaaatttcagacctatgaaaagga

SEQ ID NO: 101655 - DNA, 553 bp, Homo sapiens
cgtcctcatgttcctgcaatatgaacagtatcacaaagaactattcaacttccattcttggcaattaattaaagatacctggcaaatgactacatttttaaaactttctgtggcttcatttgtggataaagtgaaaccaagagtaggaaaaaacttgagcaagactttaataaaacaataagttattagtaagggaaaatatgtcgattgtagaatgctttaaaattaatgaactattctactgtctgcctagcagacactccatgaacaagtttttttacaagtcataatgtgtatggtcaacatactgtatgcaggraagattgtgagacattgtattttttagctccacatatgaaaaatcacacatacactttaatcacaactgctcaaactttttttttgttaactttttaaattaaaaatatttatgtttattatagagaatttagaaacaatgaaagctacaggaactaaaaactcattgtcacggccaccagccaaggggaactgcttttttaacctgttatttatagaaactctaagagaacag

SEQ ID NO: 101656 - DNA, 557 bp, Homo sapiens
gctgtctctcagcttgcatccttacatacagtgggcgctcaatgaatacttgtggacacattcttttttctttttgagatggagtcttgctctgtcacccaggctggagtgtagtggtgcgatctcggctcactgcagcctccgcctcccaggttcaagcaattcttctgcttcagtctcccragtagctgggactacaggtgcgtgccaccacgcccagctaattttttgtatttttaatacagatagggtttcactgtgttagccaggatggtctcaatctcctgacctcatgatccgcctgcctcagcctcccaaagtgttgggattacaggcgtgagccaccatgcctggcctggaaacattcttaaacagcagcagaattgtgaccatgcgaatttcatgtaagtctatttcacaaagatacacttacatatttagcatagctaaatgtaagtaatttaatcgtatatcatttgcgcaggtaaaaattctcctaataaaaattcagcttagattatctttcctgattttcagttctgcaaacttagcccctg

SEQ ID NO: 101657 - DNA, 557 bp, Homo sapiens
gctgtctctcagcttgcatccttacatacagtgggcgctcaatgaatacttgtggacacattcttttttctttttgagatggagtcttgctctgtcacccaggctggagtgtagtggtgcgatctcggctcactgcagcctccgcctcccaggttcaagcaattcttctgcttcagtctcccaagtagctgggactacaggtgcgtgccaccacgcccagctaattttttgtatttttaatacagatagggtttcactgtgttagccaggatggtctcaatctcctgacctcatgatccgcctgcctcagcctcccaaagtgttgggattacaggcgtgagccaccatgcctggcctggaaacattcttaaacagcagcagaattgtgaccatgcgaatttcatgtaagtctatttcayaaagatacacttacatatttagcatagctaaatgtaagtaatttaatcgtatatcatttgcgcaggtaaaaattctcctaataaaaattcagcttagattatctttcctgattttcagttctgcaaacttagcccctg

SEQ ID NO: 101658 - DNA, 557 bp, Homo sapiens
gctgtctctcagcttgcatccttacatacagtgggcgctcaatgaatacttgtggacacattcttttttctttttgagatggagtcttgctctgtcacccaggctggagtgtagtggtgcgatctcggctcactgcagcctccgcctcccaggttcaagcaattcttctgcttcagtctcccaagtagctgggactacaggtgcgtgccaccacgcccagctaattttttgtatttttaatacagatagggtttcactgtgttagccaggatggtctcaatctcctgacctcatgatccgcctgcctcagcctcccaaagtgttgggattacaggcgtgagccaccatgcctggcctggaaacattcttaaacagcagcagaattgtgaccatgcgaatttcatgtaagtctatttcacaaagatacacttacatatttarcatagctaaatgtaagtaatttaatcgtatatcatttgcgcaggtaaaaattctcctaataaaaattcagcttagattatctttcctgattttcagttctgcaaacttagcccctg

SEQ ID NO: 101659 - DNA, 557 bp, Homo sapiens
gctgtctctcagcttgcatccttacatacagtgggcgctcaatgaatacttgtggacacattcttttttctttttgagatggagtcttgctctgtcacccaggctggagtgtagtggtgcgatctcggctcactgcagcctccgcctcccaggttcaagcaattcttctgcttcagtctcccaagtagctgggactacaggtgcgtgccaccacgcccagctaattttttgtatttttaatacagatagggtttcactgtgttagccaggatggtctcaatctcctgacctcatgatccgcctgcctcagcctcccaaagtgttgggattacaggcgtgagccaccatgcctggcctggaaacattcttaaacagcagcagaattgtgaccatgcgaatttcatgtaagtctatttcacaaagatacacttacatatttagcatagctaaatgtaagtaatttaatcgtatatcatttgygcaggtaaaaattctcctaataaaaattcagcttagattatctttcctgattttcagttctgcaaacttagcccctg

SEQ ID NO: 101660 - DNA, 540 bp, Homo sapiens
ttcaaagtctgcttttagccatagcaccagatgacttgtgcgtggttagtagacatggaatttcctacaagtagaygaagcaaactttaaattcccagactgatgagagtttcccacatttctttatcacaagcaggagagacttgttaagataacctaagaagttaagagatagcttttttttttccctcctgaagcccagggatgatggggagctgatgtttaaggagaatatctgtttgaaaatgagacacacaatgattctgtgcagtaaaacgagcaaattgcacagagtgcatttgtttgcatggaagcaaactagacatgcaattgtgactagttaaccctgtggttagagcatgtggctatcagagctgaggttgagagctctgtatggctcaccctcctcatgctgcccatgctgaaattctgggaggttatgcaggaaggcctgtcccagtgctgacattaaccagctggtggccccaccgatgcttcttgccttctcttatctgcaaaatgaagggattgagttgaatt

SEQ ID NO: 101661 - DNA, 628 bp, Homo sapiens
tctgtgtttttttttgttttgttttttttttgagacggagtcttgctctgttgctcaggctggagtgcggtggcatgatctcaactcactgcaacctctgcctcccagttccagtgattctcctgtctcagcctcctgagtagctgggattacagatgcatgccaccaggctygggtgatttttgtatttttagtagagacagagtttcatcatgttggccaggctggtctcgaactcccaacctcaggtgatcagcccacctaggcctcccgaagtgctgggattacagacatgagccaccgtgccgggcaccatactcagctttggatgaaacaccaccaccacctgaaggtatggagactggatccccaagtggccactggagggtcagatgctgaacctcagcaatgttgcacagttggaaaaccttgaccgatgggagacaggagacaggagagtgtaggaaaccaagctgatacggaccccctcccttcctgcattcatgggctaccctgagctgtggcttctccttgtttccctggcagagaggtcccacatgctaagtgagcacatctgctgagcaccagcctgtgtctctgtggctctcaagaaatcagtgggcagtca

SEQ ID NO: 101662 - DNA, 313 bp, Homo sapiens
attgtaatccaatgacattgccaacgtgggggtgggggcgctggcctcggcgcgctctccgagttttggctgcccgcccrgctgggaataactctcttcgcataattcgcgtgtttaccaggcatgaaaattcttgctttcgcccccctcgcataagacccctcctcttccccactccccaccacctccgcccctcgcaagtgaaactctgtctaaaaaaatattggcccggggcacagaaagttttgcataaattcataagtgatgaatggctgattttaacgttatttgggtatttgtcagaacttaacaa

SEQ ID NO: 101663 - DNA, 313 bp, Homo sapiens
attgtaatccaatgacattgccaacgtgggggtgggggcgctggcctcggcgcgctctccgagttttggctgcccgcccagctkggaataactctcttcgcataattcgcgtgtttaccaggcatgaaaattcttgctttcgcccccctcgcataagacccctcctcttccccactccccaccacctccgcccctcgcaagtgaaactctgtctaaaaaaatattggcccggggcacagaaagttttgcataaattcataagtgatgaatggctgattttaacgttatttgggtatttgtcagaacttaacaa

SEQ ID NO: 101664 - DNA, 569 bp, Homo sapiens
ttgttctctatatttacaataactgtaaaataacattgaactctatagcttcttcgaggtccaaggaaaaccaaaacactttccgaagaatggaaaatagcttttaaaaagtcctctacaaaagttcccccgtctctttgtacttcaagaaaaaaataacttttcccccctgcttcgccatgcgaagggcactggaatataaatagcaggttaacattattagcaacaaccagaataagtctctcttttctctgttcttttttttttctttkgcttacttttttttaaaaatacagtagaagccggtaacttttaacgtataatactgaccttttaataagtaaattaaaactgggaccgtatatacacacacatatacattcctacacagttaaacagtgcattacaggaaccagaaagctaggtctctgtagcccagaaaaaaaaaaaaaaaaaaaaaaaaaggttcattgaaaaccctcgctagagggggggggaactggttggaggcggtgcagggggcgtcggtggggatcgatcaagtgtccgggtgcgggcagggggccccc

SEQ ID NO: 101665 - DNA, 569 bp, Homo sapiens
ttgttctctatatttacaataactgtaaaataacattgaactctatagcttcttcgaggtccaaggaaaaccaaaacactttccgaagaatggaaaatagcttttaaaaagtcctctacaaaagttcccccgtctctttgtacttcaagaaaaaaataacttttcccccctgcttcgccatgcgaagggcactggaatataaatagcaggttaacattattagcaacaaccagaataagtctctcttttctctgttcttttttttttcttttgcttacttttttttaaaaatacagtagaagccggtaacttttaacgtataatactgaccttttaataagtaaattaaaactgggaccgtatatacacacacatatacattcctacacagttaaacagtgcattacaggaaccagaaagctaggtctctgtagcccagaaaaaaaaaaaaaaaaaaaaaaaaargttcattgaaaaccctcgctagagggggggggaactggttggaggcggtgcagggggcgtcggtggggatcgatcaagtgtccgggtgcgggcagggggccccc

SEQ ID NO: 101666 - DNA, 638 bp, Homo sapiens
atgcaaaaaaacgtggtaatagatagaccatgaaagaaacacttgtttacaatatgagcactgaaacaagaacataaagtatcacccagttcgacctcagttgaaacatgcatgtcagacaactcaattttttgccattctgcataggtcagtgagtggccacaaaagcactgtgggtgttgtctttggaactgcaaataaattttagcaatgggaaattcacaaataggaaatctgcaaataatgaggatagactgtaacttatcatccataccaagacacttttatgactgaagagttgytattaacaattacaccaggacaactggcataaactggactttctcaagcaaatggggatgtatgacaccctaattttagcttttgagattcctttaagaatctgatgaaagccatgagcacacacattttttatagacaattccaagggattcatagaccccaagtttccttaggctacacatgtcagccttaaggaacagttttaaaaaataatatacaaactgaaatatggtaaaagtatgcctaaaacttgaggccaacataatgatggagcaagtttatgcagagaactcaaggcattcatggacaaggccactatcaacataaagttgtct

SEQ ID NO: 101667 - DNA, 627 bp, Homo sapiens
tgagtactggttgaataaaccaattaaccagtctcccaaacttcaagaagcccagcaccactgaggctgacctgttggmagctggactggtcttcccacccgaaagttgtgccttaggataaactaaacctgccactgatttattccccctagatcccagctctgtctgccactctccacccctctcccttggcacagagttgatggctatctcaattatcacaagtccagagttgatagttgttatctcaattctccaaagtcctctttcctttgagctaaacattagactttccccctgcctcaggcctctgcctctcctttgcctctcatttctagagccctgaccagcaggtacccacaggcaggcttcccttgactgcatgtgatcattgccaagcacttgtcattctttaaaagggtctggccatttacatttgtgaccctcccccaaaacacacacacacatgtggcgtggcgcacacatacacacactcacacacacatacaccaaaggcaaagtctcttgatgcccctgatgcccgtatatctctgttgtcaaaatagttttctgtttgaccttccaaacagaaagttcatgtttgtaattatgcttggaaaattata

SEQ ID NO: 101668 - DNA, 627 bp, Homo sapiens
tgagtactggttgaataaaccaattaaccagtctcccaaacttcaagaagcccagcaccactgaggctgacctgttggcagctggactggtcttcccacccgaaagttgtgccttaggataaactaaacctgccactgatttaytccccctagatcccagctctgtctgccactctccacccctctcccttggcacagagttgatggctatctcaattatcacaagtccagagttgatagttgttatctcaattctccaaagtcctctttcctttgagctaaacattagactttccccctgcctcaggcctctgcctctcctttgcctctcatttctagagccctgaccagcaggtacccacaggcaggcttcccttgactgcatgtgatcattgccaagcacttgtcattctttaaaagggtctggccatttacatttgtgaccctcccccaaaacacacacacacatgtggcgtggcgcacacatacacacactcacacacacatacaccaaaggcaaagtctcttgatgcccctgatgcccgtatatctctgttgtcaaaatagttttctgtttgaccttccaaacagaaagttcatgtttgtaattatgcttggaaaattata

SEQ ID NO: 101669 - DNA, 528 bp, Homo sapiens
taatatccattcccatgcctattctcagatttctgtttatataagttaaagaactcaagcagttcttttcgaatgtggtgcacctcctcatgggtcacacactcaacctcacctctaggggcccgctggaactttagtctagttataggtctaaaagcaaataggggtgttgggggaggctcatgaggagactcaacattattttgcctggcaactgcctcaggrgaggccatcactgttgccacaggcagcagggtttatcttctcatacaaaagtggaaaggctgatggcagcatgggttggggtgcagatgttgccactactggggacggggaagctgctccttctggcaagaaagtttcatcagagtttacaaactcagtgtccccagcttcatcagggtcctcccacacatccccattccaagtttcagggtcccattgttttcctatcaatgccctcactttagcaatagacacctggcaaggctgtgcaagcacctttcattgcatgtcagccactcacat

SEQ ID NO: 101670 - DNA, 483 bp, Homo sapiens
atgatagacgagcattagcttcaacttaaagtaatcaggtgcgttagttcctarcaagagattcagcctgccttttaaaattttgaagccaggtatggatttctcctctctagctacgaaagtcctagatggtatcttttcccaatataaggttgttttgtctacattgaagatctgttgtttagtgtagccattttccacaattatcttagctagatcttcaggataacttgatgcagcttctacatcagcgcttgcttccctaccttgcacttttatgttatagagatggtttctttatttaaacctcatgaaccaacatctactagcttcaaaagtttctactgcggcttcctcacctctcacagccttcatagactggaagagacttagggatttgctctgtatttagctttggctaacaggaatgattttgctgatttgatcgatgtgtaccactaaactttctccatatcagcaata

SEQ ID NO: 101671 - DNA, 529 bp, Homo sapiens
gtaggttgtccaggacatggaccctgcttcactctccaacaccagtgcatactgtattgtgatgtgcatgagaaatgatcttttactatgttaaaacaccaggattctggaattgtttgttatagaatttgtcttccctgatatactcacaaaatggaggtgacctagaaagttcacaagatatgacatatctgtcattctctggctactaatagatcctatcagtgcatgtaagaaaagggtctagtagaaaaggaaacacgttsgtagctgtacatactgcttattgtaattgtccacttattcatgcatttaacaaatatttattatgtacttactatgtgccaagctctgtgtaagtattgggggtgcacaagtaagcaaagtagacatgggccctgcccttgtatagctgacagtctggtgggataccaaacatgaaacaaattattcttatatgaacagctattatgaaagaagacattatagaccactgttgggaacaggggtgtcacctagacaccaagga

SEQ ID NO: 101672 - DNA, 557 bp, Homo sapiens
ccctcgggtctgtaagtttcacgcctggttctgtaaatttcgctcccggggtcggtcagtttcaccctttgggtctctaagtgtccggttccccctcccccacagccagcctctgatgagccagcctctgttatgtcgggtggttaatttcattccctgggttgcggtttcaaatctcctcctcacgcgttgggcattggttccaacccctaggattggacagtttcgtctcagggtgggccaggactttccttggtcatctccactccgcatttggtcgcgcgttctgtgggcagtgcgcaaatgcgatcgggggcaccaccagctcccgcatccgtccctcccttcttccccctgccactttccccctttctccccacccctttctgtctctgcgccctcccctcccgtctgtagaacctccggaacccgaagctggagaaagcggagataytggagttcgccgtgggctacttgagggagcgaagccgggtggagcccccgggtacagcgcgggggtggggcagcggagggagggaggggggacgccaggaggc

SEQ ID NO: 101673 - DNA, 590 bp, Homo sapiens
atgaattggaggaaagtaacgattgctgagtagcactaaggagccacccgagtgtggtggcgttaggaattgaaatccgcagtaaaaaagtttttgcaggtcgataggactatgagaatcgcaagagggcgctcgcgggctggtccctgacggccgagtctctgagattctcagaataacgcgggagattctccaaggaaagaaccagaaaacaaactgctttttccttctccagagaccgagatacctaaataccaaaactagtgacgctgtgagcaggattcgaacctgcgcggggagaccccattggatttcgagtccaacgccttaaccactcggccatcacagccgcgtgcgctgtcggccctgtgcaactatagctgcctatcaacacgcccgcctccagccggctccrcccggctccgcccggctccacccgcgccgcctagagacgtctgcgctcgtgcgcctctgctcggtggcgcagaccatgccttccctccagcagacgtcagcagccccattggagcggcagccttcctattctccctctcctccctgagcataggatggaaacaaaacgggtccaa

SEQ ID NO: 101674 - DNA, 556 bp, Homo sapiens
tttctgtttataaataagattgccaggctagtgggtttcaaggttactcgattgctaatataaaatatttatgcaaaattttactggtattcttagacaaatggattgcaataaatacaaataatataaactctatcaattgtcaaaacatacgcctaaaatattcatgaaaatattcgtcatgaaaatcggatcactacagtctgtataattacagagataattcatataacaaaactaatccgtttgaygattattttattcatttaagaaacagcattttgtcaaagtggtgatatagatatgtgatctttttttgcaattaacatgttaaagttctttcagactaacacttcatgttcttacacgttttgtttaaaaaaaataaaaaggtggtttgctgacaacttatatcctgatgttcattgatccaaaactagcccttaaatgtataatgcactgcttgtacaaactctgataaaaataatttaataattgaaaaatctctgatcatctaaaaaaggtctattcacacagatgatagggctataatatt

SEQ ID NO: 101675 - DNA, 579 bp, Homo sapiens
atgtcactaggcgataggaatttttcagacccattataatcttgtgggaccactgtcatatatgtagttcatcgttgaccaaaatgtcattatgtggaatatcactgtattcttcaaaataaaggtagacattttcagataaaggaaaactaaggatttgttgctagcatatctggacttcaaggaatgataattttattaggctggatgaaaataatggtaaatggatgttcaaatcttttgcagtgaacgaaggccattggaaatgggaagtatataggaaatagtaggaatacatcttaatttctttaaaatacacatgactggtttaagaaaaacttaaagcattaactcragaggcttagaatttatgtggatgtgatatatatatgacaaatgtaagcacgaagtgtggaatggggtaaatggagctacaaaattgcaaggtttttatattttatgtgaagttctacaatattaactctaaacagactgtgaagagttaacaatgcatagcatatttcctacagaaagcactaaaacatgaatgtaaagaaatgtaactaaaagccaatagat

SEQ ID NO: 101676 - DNA, 593 bp, Homo sapiens
tgcctctcctctgcaaagacttaatctctctggtcatctttgtatcttgaaaaaacaattgattaatacctcaacttcatcaaaaaacccttgtttaccattggaaaactgaaatttttagcaagaagaaaaaactgaatataaatctattcattttaattacaataagcagaaatagaattaataagttaattctataagttatgttagcatttgtaaaaggaggcttaaaactgagtctcatgagatttgtccttgttggagttgtaggagatgaggttaatccactaattcttaacgtacatcatgtgaagtaccacgtgggtcaaccctgatcaggckttatccacagaaacagattttcctaaaactgaaccagaaaagaagtaatagagggagagtttaatccagactttcaagtttttgactggtggatataagctaatctgttcgacttcaataagattctgcttacctgacttgttttttgtagatttcaaaaactctatttgttatttggcctctaaagcatcactggacctttttctttctttttttttttttttcaatacagatagactttaataaaatgc

SEQ ID NO: 101677 - DNA, 636 bp, Homo sapiens
tcaattgtttttatcattagatctcgtaaataagtgagaccatgtcatgtttttcttcctgtgcctagcttatttcacttaacataatgatcaccagttccatcaatgttgcaaatgaataaatctcattcttttttatgactgaatagtactccattgtgtatatgtatcacgttttctttattcattcatctgttgatggacacttaggttgcttcccaatctagctattgtaaacaatgctgcaacaaacatgtgaatgcagatatctcttcaatacactgatttcctttcttttgggtatatacccascagtgggattgtgggatcatatggtagctctatttgtagttttgtgaggaacttccaaactcttctccataatgatcatactaatttacattcccaccaacaatatatgagagttcccttttctccacatcctcgccagcatttgttattgcctgtcttttaatataaaccattttacctggggtaagatgatatctcattgtacttttaatttatatttccctgatgatcaatgatgttgaacattttttcatatgtctacttgccatttatatgtcttcttttgtgaaatgtcaaatcttttgcccatttttcctatagaat

SEQ ID NO: 101678 - DNA, 636 bp, Homo sapiens
tcaattgtttttatcattagatctcgtaaataagtgagaccatgtcatgtttttcttcctgtgcctagcttatttcacttaacataatgatcaccagttccatcaatgttgcaaatgaataaatctcattcttttttatgactgaatagtactccattgtgtatatgtatcacgttttctttattcattcatctgttgatggacacttaggttgcttcccaatctagctattgtaaacaatgctgcaacaaacatgtgaatgcagatatctcttcaatacactgatttcctttcttttgggtatatacccagcagtgggattgtgggatcatatggtagctctatttgtagttttgtgaggaacttccaaactcttctccataatgatcatactaatttacattcccaccaacaatatatgagagttcccttttctccacatcctcgccagcatttgttattgcctgtcttttaatataaaccattttacctggggtaagatgatatctcattgtacttttaatttatatttccctgatgatcaatgatgttgaacattttttcatatstctacttgccatttatatgtcttcttttgtgaaatgtcaaatcttttgcccatttttcctatagaat

SEQ ID NO: 101679 - DNA, 577 bp, Homo sapiens
tactttaaggtgtgtgtgtgtgtgtgtgtgtgtgtgtttctcagaagaattgtggaacatggggtgtggcgcaatttggagccagtccagtacatatttgtagagtagaaataaaaacctagccccagctacttgggaggctgaggcaggagaacagcgtgaacccgggaggcgaagcttgcagtgtgctgagatcgcgccactgcactccagcctgggcgacagagcsagactccatctcaaaaagaaaagaaaagaaaagaaataaaaaccaagtccgtgagaagcaacaaacacggatttacaaggattgatagtttttactcttctaagtggtcaaagttagggggcatatatttgagtcatcattaaaccaaggcctgatatgtccatagaagatctttgaagagaattagatgaaagtaaaataatgtatcctaaaagcttttgaaatgccagtgagttgaaacatatacagaggtcctacccatgaaaactgaggtgtcatggcctacccaagtagcagaccaggaacagaaaatacagccaagagactgacaatcattacatagcataa

SEQ ID NO: 101680 - DNA, 716 bp, Homo sapiens
acaaaaccaggaggacttaaaagaaataagaagaggttttggaaatttaaatatgagagcaggaattttttaaaatgctagaagagaaagttaaggaagtttccagaaagtataacaaaagatagagagaaaggataaaaaaatgagagggttagtcctggagaataatttgtgtgtagtggaaattctacaaataaagaacaagaaaaataagagggaaataattatcaaagaaatagcaccaggcatggtggcttactcctgtaatccagcactttgggaggacaagagaggaggatcacttgagcccaggagttcgagacaagcctgggcagcttggtgaaaccctgtctctactgaaaaatggaaaaattagttgggcttggtggtgcacgcctgtagtcccagctacttgggaggctgagctggaaggattgcttaagcctggaaggtccaagctgcagtgaactgagattgcaccactgcactccagcctgggccacagagcaagactctgtctcaaaaaacaaacaaacaaacaaataaaaaacccaccgacaackacaaaaaaccactctgggcccaggataatgaatgaagagaaacagactcataccagggcacatcttcatgaacattggggattaaagaaaagatcccagaagcttcctgaaaaaatatcaggtcaaatagcaaaggatttgggaatcacaaaa

SEQ ID NO: 101681 - DNA, 556 bp, Homo sapiens
ttttcccttgtgttaagttcttgttttccttgtggcttaataattgcatccttttgtcattgttgtttctgtagatttccagattgtcagacataaacaatttccagattgtcagacatggaaagcacttctcagtgaatttaagtaaatcaaataaagtcttagttcaagttcaacattaaccactgaaaattcccttaacctagcaggtttcctaacaggggatttaaatcttaattactatacaaaggtctgaccagacctaggaggaacccccttcaggacaggatgatagatggttcctcccaggtgattgagaaaaaaaaaaaaaaagaagaagaagaagaagaaaagggggagggggagaatttatgtaaaaagaatgttatatggtaaattcttgtcctaaaataaattaactggttgtttaaagaaaggaatgtttgcaataagtcagaaagttgagacgtcgaagaatagtctgtgaaagtcgtgaaagaaaaaaawcgtgtgttacaaaaaaggaacttatgcaagaaaagttgtataatttaaa

SEQ ID NO: 101682 - DNA, 708 bp, Homo sapiens
tgttttgttaattcaaatgttgaagtagatgatgggaccaagatggcagaataggagatatcatcttacatcctctcccaagaaaaacagctatagacagctattcacaaagcaaaacagcccagagagagctataggacccattaaaaatctatggcaatacaatgtagaaaaaaaaactcaaagaatattcatatagcaagaattattggtaaggccaacatacctgagacagcaggaagtggccagaagcaaaaaagaaaggcagaggctatcagcatcagccaagaagtggaaaccactgtagtcttcaacagcatgcttcacagagaacactggcatctctttccacctaggtaaccgagagtcactcctggcagggaaaccaagagagggagatgtagctgaaccctatgcccccagtaggtggatgatgttcattaattaggggaaaggagctaccacctctcccaattctgcacatgtgcaaccacagagctgtgggtactccacaaatgctcacacacacaccctggctctgtggctacactgggctcactcatgttgcaracaccaaagccaacaccatagtaagctggtttgtactacagcccctgagccaagcccttgctgcatgtacccatgttccagccactggctcagccactgtagagagctagaccatacactgactacagagctactgta

SEQ ID NO: 101683 - DNA, 635 bp, Homo sapiens
catgaggctcaagcaacattagctcaaagaagattacaccaatatacattataatcaaattgtcaaaaatcaaagacaaagagagaatcttgaaaccagmaagagaacagcaactgcagctgacaagggaacctccataaagctatcagcagactcctagcagaagtcttacaggccaggagagagtgggatgacatattcaaagtattggggctggcagggggtgtgagggagatatcaatcatgaatactatacccatcaaagctgtccttcagaaatgaagaagagataaagtgaatagaggcaaacatgtcattcctagaaaaacagaagctgagaaaattcatcaccactagaccagactacaaaacatgctaaagggagatcttcaaggtgaaatgaaaggacactaagtaacaacatgaaaacataagaaagtataaaattcattggcaaaggcaaatatatggtcaaatttggaatatttgaatactataatagtggtgcataagtcatttttaaacccagtataaaagttaaaagataaaagtattaaaaatgtttacagctataataatttattaatagatacagaatattttttaaaagcatatcaataacataaaatgtgagg

SEQ ID NO: 101684 - DNA, 635 bp, Homo sapiens
catgaggctcaagcaacattagctcaaagaagattacaccaatatacattataatcaaattgtcaaaaatcaaagacaaagagagaatcttgaaaccagcaagagaacagcaactgcagctgacaagggaacctccataaagctatcagcagactcctagcagaagtcttacaggccaggagagagtgggatgacatattcaaagtrttggggctggcagggggtgtgagggagatatcaatcatgaatactatacccatcaaagctgtccttcagaaatgaagaagagataaagtgaatagaggcaaacatgtcattcctagaaaaacagaagctgagaaaattcatcaccactagaccagactacaaaacatgctaaagggagatcttcaaggtgaaatgaaaggacactaagtaacaacatgaaaacataagaaagtataaaattcattggcaaaggcaaatatatggtcaaatttggaatatttgaatactataatagtggtgcataagtcatttttaaacccagtataaaagttaaaagataaaagtattaaaaatgtttacagctataataatttattaatagatacagaatattttttaaaagcatatcaataacataaaatgtgagg

SEQ ID NO: 101685 - DNA, 574 bp, Homo sapiens
ctgcaattctggagcacacagaattagggtttaaaaggtatattgtgcctcagcagaagaaagaagctgtgacaattggagctgtttgaaacctgttccacggggaggtrtgtggcacgtcattgaaagggatgaagagggccttctgtgatctttttatggatgtcatagaggagagtcacaaggacagagagtaaaacaattatctatctttcctgccaactctaaggaagtctgggataataatctttctttctgatatcctttggtgcgtgttttccttcaccatacaacccttttcccattgtcttcagtcaaattgtgtgggaatcctaaatctgacacatattgtctgatgctggacaaattatctaagctccttgtgcctttctcctcatcaataaaatgagaacaatgatagagtatctgttatgggattgttgtgagatttatataaattaatccatataaagtccttagaagggtgcatgaaatcataagtgctcaataaacgttaggttcattgttttttaaattatttttcatacactgccatttatggtttctttattat

SEQ ID NO: 101686 - DNA, 620 bp, Homo sapiens
tattaatcttgttttactttttccaacgttacaaagtgtttgctttattgtattttgcctcttctgttcataattatttaaccaatagtcctcgatactctattggaagaaactggaactaataataattttgattcatagtacaaataaatttctagtgatcataattaagaaactattctaattcttacttgacatagctaactctacagagattttgttgattgtggcaaaaataacttctttttttttaatttccttaatttctggyggtttctatttagagactggtactgttaaaaactgccactaaggctctattatggttctgctgggggtttaatttattagatttgtgcctaaccttatcaaacgagcttctaactaatgattatactctaaagaccacttttacactaattggctttccctgtttaattgttttacaaaattgataatttagtggaaatataataaaccttgaatattttagataatttggcccctttgtggtctttagagggttctcacttaatagaaaattggaatgtacattgtaaaatttaggtcttgctctcagcacatgatttgtaaaggatgtatgatagcataaagaaggt

SEQ ID NO: 101687 - DNA, 599 bp, Homo sapiens
ctctgtgtaacgttttggtaattcttgcaatatttcacctttttcattatttttatatccataatggtgatctgcaatctgatctttgctattactgttgtaataattttggagagtcacaaattgtacccatataagatggcagacttcatcaataaatgttgtatgtgttctgattgctccactgaccaaccatcctgtctctctatcctcatgcccccctattcactgagatagaacaatattgaaattaggccagttaataactccacaatggtctctgagtattgaaatgaaaagaagagtcacatatctctcactttaaatcaaaagctagaaatgattacacttagtgaggaaggcatgttgaaagccgagataagaagaaagctagacgtcttgtgccaaacarccaagttgtgaatgcaaaggaaaagttcctgaaggaaattaaaagtgctactccaaagaacacacgaacgataagaaagcaaaacaggcttattgctgatagggagaaaatttaagtggtctggagagaagatcaaaccagccacaacattcccttaagctaaaacctaatctacagtaaagcccta

SEQ ID NO: 101688 - DNA, 488 bp, Homo sapiens
gacccacaccagagtctccatgcagaggactcaggctccagctatggctacaacatagggtttttatacaagaaaaataaagtgaattgagcctgaaagaaaaaaagaaaagaggggaggagaaggtgtccgttastcttcctcctcctttcagagtgacccagagtggagagaaagatagaaagagtgccccacttctcctctttcatcccatctcctcagggtcccagcaaccatcatagatgccacccatggatgcaagcataaccttcgcccatggatctagaggagctagtcggcaagagtagtcatgtttacctgtatgaggccctagctctccaccctgctggtttcccagacccacatgacccataaggctcccagggtaccccaggggcccagaagagattgcacaatagttgaatttgggcaagaccctttaatggagggagtgtcttaactctatccatacattctgttactactgc

SEQ ID NO: 101689 - DNA, 555 bp, Homo sapiens
tagcaaagctcacaggagagtgatgtataaaattagaatggtaattatttcaacattagacctaactcctagctggattggagacttctgttaaggtcacttaatgaacaagaaattagaacaagaatttagatgatttgatgtgtgttagcctgattaataagttaatcaattaatccattcaacaaatagagtatcaactatgtattggagaaagattatcaactaygtattggagatacacaggggatcaagataggcacaatcctgctttcatgaagccgatagtccagtgaggcatacagaggagcaaatcttgggagatttattacaatagagggggataaatatgattgagtaaccaaaagttgctatgtgagtcacaagggcgggcctaactcagacacggggatctggaaaggtttcctggaggtggtaatgtctcagcagagagctgaaaggtgacttaagcagacaatacaggggcagctggatcgggggtagggggagagaaggagtacaaagttttgaagacaaaggagggtttggcagcta

SEQ ID NO: 101690 - DNA, 604 bp, Homo sapiens
ggatacggctccttgatcttggacttcccagcttccaggactgtgagccaaataaatttatgttcattataaattacccagtctcaggtattctgttataacaaaacaaagtgggccaggtgtggtggctcatgcctttaatcccagccctttgggaggccaagctgagaggatcacttgagcccaggagttcaagaccggcctgggcaatgtagtgagaccctgtctctgaaaaaatccaaacaaaaccaaaacggactgagacactctgcgtttctatttattttcaccacagttcctttcagaatctgaaatttttatagttatatgtttataacatttcgcctacagtacccaacacasagagagagagagagagagacacacacacacacacacccctacctagaatgtaaactccagaaaagcaaagaccctgtctgtctaattcatagctgtcatctttgtgtggtggcctgtatatcctaaatgttgaatgagttcagttaaggaataccaggggatgccaagacagccaactgagagtttcctggttgtactatttgtaacaatctccttttcgttaaaacctactaagtgatct

SEQ ID NO: 101691 - DNA, 570 bp, Homo sapiens
atttttgtctggcaggtttgttaatagtatttccttattttccttgtgttgtctgcagagtctgtagtaatatcccctgcttcactcatgatattggccattgtgtattctcttttttctttgtcagtctaaaaagagatttgtcaattttattgatctttttgaagacccagctcttcctttcattgatttcctttattggtttcctgttttaaatttcattgatctatacttgaatcattgttcttttcttctggatatttttggttttgtttgcccttatttctcagagttcttgagttggcagcttttattactgatttgatacttatcctctttcctaatatatgcatttaggttattaatttccctatcaacagggagtgtctggcacattttaatatgttgtatttttattttcattaagtattgtgtattttctaatttcccttggtacttcctttttaaggattatttagaagtgtgttgtttagtttccaagtgttggaagattttcctcttagttttaygttattcatttttagtttgatttcatcatggtaagagaac

SEQ ID NO: 101692 - DNA, 575 bp, Homo sapiens
aagtgtggtactcaggacctgggatgattggatatggggtgtgaaagagaggagaaggcttggactacttgcgggcctctggcttgggtgcgtggctggagagcagagccggagcctgtaactgaragaagagtcttgtctccaagtcctttcttcaggatggccacagtctcaggcgctgtaagtgtgcctgcatgcttccgtgcttgtgtgcttgtgtactgctgtccccgccgtgactggggcgaggcccggctgtcctgctccaggaatggctgctgttcccctgcagagcagaacacggatactcaggggcctctgtctgctggcatgctgcctgggctccagaggcatttccacatgctgtagaccagggcccactccttctctgagaggggcatgatccgtactctctccatgactgattgttgtttgaggaaaatccacctgcttccaattactctgcaggtcaggctgataaaatgttggactgaaggtaatttccaatgaagaaaatgtgttggcttggagtgttatttaaagagaaccatccattgcacaaacacctcctgaga

SEQ ID NO: 101693 - DNA, 613 bp, Homo sapiens
aagtggcctaatttcagatgactatcccagttccatagatacaaatatccccagagtggaaaaggccaattcatgaggaaaccagcactgtagattaacactagaaaatctatccatcttctgctacccaakttttgttcactagagaacatactattttgtaaattgatcaccttatcagatcttaacaggaaggacatattttttcacatgtgaagtgaatttttaaattgttatttccaaaaaattttctatagctttttctgatgcaaagccacagaatccatctttggataaagctttattgtttttgaggataaagggagaaatgtgctcctggattatgcaaagactaggcaaaagtagccaagcattttgttaaaacgctttgatatgatgggtccttttgtataaacaaagagaaaaaagctaccatgtagaattaatcattttgtatctttttaagtgaagcattattaatagagttgaacccatgttatgcctttctgaatcactttatttccttctagtctaagagttttatagtttcctttcatgtttgtcaatttttattagaaatgttcctatgttgctgtatggtaaacgcacctga

SEQ ID NO: 101694 - DNA, 581 bp, Homo sapiens
ctctctttctaataatgattctaatcaccattctactctttgcttctgtgaagtcaactttgtaaaaattccacctataagtgagatcatgctgtatttgtctttctgggcctggcttattttacttaacagtgttctctaggttcatccctgttgtcacaatatatacaacaaattttgactgccattgttaattaacaaaattcatggaatgtaatcaaactggacttcatttttttccccacacattctttaaatattctcacgaaaagtagtctrtctcttgccaatcttgcagtcccttgacattggcaatcactctcatgaaaaaaaaaataaaacttttaaaaactctcatgttgagttgcaaacagtctgaattcagcaaggaattagcactttgaacatgacttacacttttgtctcacaacgatgaggtttgatgtgtgtgaagcaatttctgactttctgtttctgtacatatttctacctgcagtactagataccattttttacattcctggtaaaagcaggggaagagcatggtagttaagaacagtagaaagttctttactgacttc

SEQ ID NO: 101695 - DNA, 580 bp, Homo sapiens
agaattcatctcattccttatgcaggaaaggagtatttaggtatgaatacatttatatttttaatattataagtgttaggtgcatatacatttataattatcatatcttcttcatatattaaccttgttttcttcataaaatgtccctctttgtttctggaaatatttcttgtattcaagtctattttctgtgatagtaatgaaaccactctagttcttttgtacatatttatttctatggaatatatttttttatccttccaacctgcttgtgtctttgaatataaagtaggattttatagataacattgagaaaagtcatgttttttagtcagtctagcaatctctgccttttgattgaagtgtccattcacatttaatataaycatagttacggctgggtttacatctgacattttggtaggttttttaaaacatatttcttctagatttttctgtttgaattctttgctgatacttttgcattctttgctgataattttgaatttgtcatattaattcttctgttgattttaactataattttgggttatttccttagtggttcttctgcagatta

SEQ ID NO: 101696 - DNA, 613 bp, Homo sapiens
ccacctaaaatgaaagagaaactcaattgcaacagaatggtgtatgaattcagtctaattaaatgttttgtaagacagaagtcatcagaaaagcatttgatatgtggttaaaaatcaaaggctcatggctaattgttcaaaggcttagggaatctgaggaagctaaatattgccattctaagtatgctttctctagatgtctcttcattttacttaaaacgtaraaaggaaatcaggaactgatacacggtagtgattccttgaagaaaatcaattaaaaatacatttgttaaagtaaattttaaaataaatgtattaaattctaacaggcttaagtactctggtagcatggtagcattttgataaataactgacttcccattttccttattcagagggacaaaaatcctgagactttgctgaagttgcttatcagcttaaggaggttttgggctgagacaatggggttttctaaatatacaatcatgtcatctgcaaacagggacaattggacttcctcttttcctaattgaataccctttatttccttctcctgcctgattgccctggccagaacttccaacactgtgttgaataggagtggtgaaacagg

SEQ ID NO: 101697 - DNA, 597 bp, Homo sapiens
gtgttactgggcttcaggtgccccataaagcagatacaacttagatcacaacacccacttccttttgaatatctggtaaacctttccaagaaggatgtgcacagagaagcccagactgctaaaactaaaataaatatctaactcttcaatgcccagacacagatgaacattgaaaagtaccaagacaatccaacaaaacatgacctcaccaaatgaactaaataaaacaccaaggaccaatcctggagagacaaagatacatgacctttcagacagaaaattaaaatagctgtgttgaggaaactcartgaaattcaaaataacacggaaaaggaatgtataattccatcagataaatttagcagagattgaaataatgaaaaagaatcaagcagaaattctggagctgaaaaatgcaattggctcatgaaagaaagtatcagagtcttaatagcagagttgatgaagcagaagaaagattaatgagtttgaagacaggatgtttgaaaatccagaggagacaaaaaaaaaaagaataaaaaccaataagtcatgcctacgagatccagaaagcagcctcaaaaggacaaatataag

SEQ ID NO: 101698 - DNA, 597 bp, Homo sapiens
gtgttactgggcttcaggtgccccataaagcagatacaacttagatcacaacacccacttccttttgaatatctggtaaacctttccaagaaggatgtgcacagagaagcccagactgctaaaactaaaataaatatctaactcttcaatgcccagacacagatgaacattgaaaagtaccaagacaatccaacaaaacatgacctcaccaaatgaactaaataaaacaccaaggaccaatcctggagagacaaagatacatgacctttcagacagaaaattaaaatagctgtgttgaggaaactcagtgaaattcaaaataacacggaaaaggaatgtataattccatcagataaatttagcagagattgaaataatgaaaaagaatcaagcagaaattctggagctgaaaaatgcaattggctcatgaaagaaagtatcagagtcttaatagcagagttgatgaagcagaagaaagattaatgagtttgaagacaggatgtttgaaaatccagaggagacaaaaaaaaaaagaataaaamccaataagtcatgcctacgagatccagaaagcagcctcaaaaggacaaatataag

SEQ ID NO: 101699 - DNA, 612 bp, Homo sapiens
agtagaaggaaggttgacagaggctgggaagtgtagtgcagggcaggggagggttgaggatggttaataggtacaataaaaatcatagttataaagagtgaataagacttactatatgatagcacaacagggtgactatagttaacaatttaattgtacattttaaaataactaaaacagtataactggattgtttataacacaaaggataaatgagggaatggataacccatttattgtgatgtgattattatgtattgcatgcctgtataaaaacatctcatgtgtcctataaatatatacacctagtaagcacccacaacaattaaaaattaaaaaaayaaaaatgtaaataataataatataaggtgcatgaagggcaatgactttcattttcttttttatcaaactagctccagaactcagaacagtgcccaaaagacagtacatgctaaaactatgtgtgcaagaaatgagggaattaataagtggagtgtaactaatggcaatttaataaggattattcaaatttgatattaaaaataaagttaaagttagtaagataactaagtctactagcaaaacgggcttgtacacaattgtaaagtttgt

SEQ ID NO: 101700 - DNA, 612 bp, Homo sapiens
agtagaaggaaggttgacagaggctgggaagtgtagtgcagggcaggggagggttgaggatggttaataggtacaataaaaatcatagttataaagagtgaataagacttactatatgatagcacaacagggtgactatagttaacaatttaattgtacattttaaaataactaaaacagtataactggattgtttataacacaaaggataaatgagggaatggataacccatttattgtgatgtgattattatgtattgcatgcctgtataaaaacatctcatgtgtcctataaatatatacacctagtaagcacccacaacaattaaaaattaaaaaaataaaaatgtaaataataataatataaggtgcatgaagggcaatgactttcattttcttttttatcaaactagctccagaactyagaacagtgcccaaaagacagtacatgctaaaactatgtgtgcaagaaatgagggaattaataagtggagtgtaactaatggcaatttaataaggattattcaaatttgatattaaaaataaagttaaagttagtaagataactaagtctactagcaaaacgggcttgtacacaattgtaaagtttgt

SEQ ID NO: 101701 - DNA, 600 bp, Homo sapiens
ctctggtctggaaacaactggttctcatgataataactgatttagggaaaagccataaatgaatattgaaactgagtttagaagtttgagaagtaaggagatattggcatagtctccaagctctacttcaagtatcttcccacaagatgyttattgtttgcaatgggaaaattgtaactttaaaatgaagttacaattattacactaccttaataaagtgatcaaagttggtccatcaccagtaatggacaaatcaaaatcatgtaccttctgatataaagcatcatgaaagtggtgcttttcaaaaacatgtagaagcacaatctaatcattaggaaacatcacataaaccatgcccaaaggataatctacaaaataactgcttactttgaaaatgccaatctcatggtacacaaaagaaacagagaagatgttgtagattaagtagactaaaatgacacaatataattcataatctggacatttcttttgctatcaagaacattatttgaacaattgttaaatccgattaaatgctgatgattatatattatttcatcgttatttttctgattatgataagtggactaaaattatgtt

SEQ ID NO: 101702 - DNA, 528 bp, Homo sapiens
cctaaaagtgtcccctacatttacatctaagtaagaatagccaaggacatgtattattgagcatctactatagtcttatttcacaggaatgtacctgaagcatacgtggatagtatgtataggtwtatatatggcccaccctaagaaagtaacattattagaaagggaaatgtgtatttataacaataataaacagataatgaagagtgctttagggcaaagggctctaatggaaagacgagatgacttagacaatctaggtttgaacctcatattattggcagtaacagtgtaaactcagacatgttctatagactctctcatcatcagtttcctcacctgtatgttaagcagataatactaccatgtccacaaatgtctatcaagcattcctgttgagcgaagtacatgagtgaagatctctagggctcagagagacaaaaatactccatttatggcagtatgaacttctaccatgtcctctgtttagtaagtataactgttgtagggatgaaaactcaaactttt

SEQ ID NO: 101703 - DNA, 404 bp, Homo sapiens
gacaatagttttagatcagtttggaagagaagggttccatgcagttgagataatgcatcacttccatatttgccaccagggctgactcattcattatcccattgcacagttacagaatctcccagagtaaattggctgatgtcaactggaggagtaatcctttccacttaattatgtagtaactttgctacaatgaatgttgtctactaggaagagttatgatccaaagatgcacatcctgttgaccaactctcatagatccattcacgtgcctctttcaccaacttttttgwccctaatctaactttccttctctttagctctagaacaatcaacaaaatcattctttcccattcatgaattcatatatatcatgaactttagctacttcttttctacatgag

SEQ ID NO: 101704 - DNA, 645 bp, Homo sapiens
aagacggacctttatccttctgcagcccctgggattaagggtcctcttgtaaaagggaaaggggaaatatgtgagaagtactcaaatcagagtgactccagtttgaataagggctaaggaaaatgaagctggatcaccaactggtaatgaagggctgcacagcctgcaatcaccttgcttagttaaaaggccaccttttatgctagtaataatattagctagtaataatgataccttctcttttacaaaaaagagaagagggggcatgttgggaaaaagctgagtgttgggagaagctgaggcagggcttgcatgtctgacataatgtaaaaaagtgttggaacatgtccggggtccaggatctaaaaccccttgtggcctttggaacaccaagctttgtgctaaagggtggaaggctcccctgatgcatcatcatctaagcccagggcataaaatccctcgtggcttggataaaatccagggctcgtggctctggaatagttctagacttgctggctccttsctccttgctctcccaggatccattatatctggatttaaaagaacctgccctccatgatctcaagtagcagagcaaatgctaaaccatcacagctgtaaatcatgtgcttaatgcaacatgcc

SEQ ID NO: 101705 - DNA, 385 bp, Homo sapiens
tttgatggtatcaaagatatttcttatttttaggtgtaaaaattgtgattgtgttttttataaaggatctttagytttcatagatacataattaaatatttacagatatgatacctgagatttgcttcgaaatttttctaagtaaaaggatggggttctagagggtctggatataaatgagacagaattgaccatatgttgataattgtggaacataagagatacacacacacacacacacacacacacacacacacacacccctatgcacacagagagaaattcattttttattattcctttttcttttatatatatttttaaaggtctatataaaatcaagcttaggaccaggtcttaatttccagccaagatctgatctttc

SEQ ID NO: 101706 - DNA, 631 bp, Homo sapiens
gggaagtgggggggcactggggatgattcaagtgcattacatttattgrgtactttatttctgttattattacattataatctataaagaaataattatacaactcaccgtaatatacaataagtgggagccctgagcttgttttcctgaaaccagatggtcccatctgggagagatgggagatattactgatcaccaggcattacagtctcataaggagtgtacaacccagatccctcacatgtgcagttcatgatagggtttgtgctcctatgagaatctaatgctactgatgatctgacaggaagcagagctcaggcagtaatgcgagtgatggggagaggctgtaaatacagatgaagcttcacttgctcgcctgccacttacctcctactgtgtggcccagctcccaacaggccccagacaggtaccggtctgctcctgggtgctggggactcctgcattaccacattcatttgtttttgccaattttcataatatctaccatatcttataacttttatttgtggaaatactgtctgtggctcaggatctaactaatgagtctcttcttacttaaataattccttgataaatttctaccagtcagtttaggctaacatacaacccc

SEQ ID NO: 101707 - DNA, 539 bp, Homo sapiens
aaagggttaaaaaatgatttatttttcagacatggtacatgtccatttcaggtcagctacagaactctgctctgtgtcatcatgttctctctctggacctgatgatgacacaacagctactatctagaacacacaaatcaccatttcaaaagtaaagaacagtgcacattgtcagtttgcttgcacttaaaacttcttgctccaaactggcatgcttcacttctcacatttcattggctggaaccagtcacataatcacatttaaaggtggcaggaaaacccaatcctgctattcacctaaaaagagggagaaaatataattttgatggacagcattaatctgtcataattatcatgcttccttcctcccagttactacaataagaataagagaaaacctctcttaatttataaggtaaggtcccaaggagcactcttctcagagtcaaaaacttctttcagttagctttactttgaaatattcctgaaagaaragtactcatgctgaacagtgagatagacctctgattccaaatgcc

SEQ ID NO: 101708 - DNA, 556 bp, Homo sapiens
gtgattataaggcataattacaattagctgcacaagagtgttaatcatgaaaataattacatgtcagctttcctcctaaagaagagagaatgtaattaagtggcccaaagggggcaaagaaaacacatctctgggtgttacaggtaaggggtgaagggctgatgttttcagtggtaaaactctctcagtgctttaaatgaatcaaccaatttctgctacaaaaaaaaacaaggaaggagataagaacaaactggtttgagatttttcttgctaaaaaagcaaaccaaaacttgaggtctgaggtagaacagtgtggtaattaaaagccagacagcytaggaggccaaggcaggtggatcacctgaggtcaggagttcgagactagcctggccaatatggagaaaccctgtctctactaaaaatacaaaaactagctgggcgtggtggtgcacaactgtaatcccagctattcaggaggctgaggcacaagaatcgcttgagcctgggaggcagaggttgaagtgagccgagatcgcgtcatcatactctagcctgg

SEQ ID NO: 101709 - DNA, 546 bp, Homo sapiens
tcatcttccctctccaagtctgtgtatgacaagaccttcctgatgggtctccttgccttctacctcagccccctccaacccacccttcatttcctcatttaaaattctttaatggtcctctttgacctacagtcttgcccaatgtctcattactccaaaatgtttcttttcatctccctccctgactttatacagaccagtcctcctttctgggattacctctctccccttgtgtattagcccactttcacactgctgataaagacctacccaagactgggcagtttacaaaagaaagaggtttattggacttaacagttccatgtggctgggaaggcctcacaatcatggcagaaggtgaaaggcacatctcacatggtggcagacaagggaagagagcttgtgcagggaaacccccattttgaagccatcagatctcatgagacccattcactatcacaagaagagcatgagaaagacccatccccatgattcrgtcatctcccaccagatccctcccacaacagtacaatgtcctttccacat

SEQ ID NO: 101710 - DNA, 645 bp, Homo sapiens
agccagttatacgagatgtatgaacttaagaaaattttagtctaatgtaccccttcataataacaatttacaaaaggacaagctacatttccacagtacttgtgtaaatgaaactttgtcagattacttgtgataaacctcaaatccaaagaggcattcactggaatcttaattagtggtagtaatagggattagggagccagggcactattttgttaacttttcatatatgagtgtttgcgcaacagataaccctcatttgatcacttcagcaaaacacccattattgtgtaggaggtggggctggggaacagaggtagggggaaggggatttcaagaatgaagaatagaaatagagtacaacaacaaagtctttaaaaacaaacaaaaaaattagattattctaaactgttgcactaaggctctaaactttcttaagactaagtggctaccattcttctctgaggtatatgagaggaagkgaacccagaaagcatgaattttcacacctccatttaaacttctgcaaaaagacagtggtggtttctactacctcttcctttagagatgaagcaaatgagagaaaatatcaatagcaaattgttttacaaatgtagaaatttcagggtgctggcagagacctgg

SEQ ID NO: 101711 - DNA, 566 bp, Homo sapiens
gcacagctgcaaaactcagtcaaagtaggcccacatgcataatgtgattctgctgatgtgggcttcaaaacccagctcagatgcaagtkgtatttccatgaccatcctaccaaagaaaaaaaaaaaaggtaccccttcttctgaggtctcagccttccacatttgttatttattcttagcaaggagtacagaactggaacacattggtgctcaataagtggttactaaagtgaaggaggacaaggccccgcactaagttaagcatctctggagtaaaaagtaatataatacagcagagcaaagaacagaagctttagaagcagactgcctgggttagaattcccatggagactagtcaggtgacattggactactaagcttcaccgggcctcaatttctgcatctgtaaaatggagagaataccacctacttcaaaagggttttgagaaaatgagagatagtttaaaagagctttggacaataatgatgaagagtaagaggaagaggaagaattggaaaaaggaatgtggcagacagactttacagcgacccctaatgatgcctgc

SEQ ID NO: 101712 - DNA, 566 bp, Homo sapiens
gcacagctgcaaaactcagtcaaagtaggcccacatgcataatgtgattctgctgatgtgggcttcaaaacccagctcagatgcaagtggtatttccatgaccatcctaccaaagaaaaaaaaaaaaggtaccccttcttctgaggtctcagccttccacatttgttatttattcttagcaaggagtacagaactggaacacattggtgctcaataagtggttactaaagtgaaggaggacaaggccccgcactaagttaagcatctctggagtaaaaagtaatataatacagcagagcaaagaacagaagctttagaagcagactgcctgggttagaattcccayggagactagtcaggtgacattggactactaagcttcaccgggcctcaatttctgcatctgtaaaatggagagaataccacctacttcaaaagggttttgagaaaatgagagatagtttaaaagagctttggacaataatgatgaagagtaagaggaagaggaagaattggaaaaaggaatgtggcagacagactttacagcgacccctaatgatgcctgc

SEQ ID NO: 101713 - DNA, 558 bp, Homo sapiens
cctgccgccgcctggccgccctggggcggggtccggccgcaggcgcgcgacgggaggggggcgcgggggtacggagacggcggcccgaggggtctcgcgagcagagtcgagcgcgactcacccgacgccaaacaccagaaccggggccgccctgcgcgagaccrcaaacgacagcgaagagcgttaggctgtggccggacagtggcggcgccgacacttcctgcctgaaggggcggagcggaaggcgcaccggaaggcgcaccggaaggcgcggcgggaccaagtggaacgggggtgcgctgagtgttcgcgcccgggccggcggggtctgcgtgtccgccgagcggcggggctgctgaggccggacgcacacggccggggtcttaattgcccctccggcctgctccgatccgctgcgatatcgcggcctgcgctgcggcggtcgcccgcagcccggccctcgtcccccactcctttggtagctccgccacccttccgcattcctgggcccgctgggcgcggctgggcaggccgctggaatttgacccgagtgggccg

SEQ ID NO: 101714 - DNA, 558 bp, Homo sapiens
cctgccgccgcctggccgccctggggcggggtccggccgcaggcgcgcgacgggaggggggcgcgggggtacggagacggcggcccgaggggtctcgcgagcagagtcgagcgcgactcacccgacgccaaacaccagaaccggggccgccctgcgcgagaccgcaaacgacagcgaagagcgttaggctgtggccggacagtggcggcgccgacacttcctgcctgaaggggcggagcggaaggcgcaccggaaggcgcaccggaaggcgcggcgggaccaagtggaacgggggtgcgctgagtgttcgcgcccgggccggcggggtctgcgtgtccgccgagcggcggggctgctgaggccggacgcacacggccggggtcttaattgcccctccggcctgctccgatccgctgcgatatcgcggcctgcgctgcggcggtcgyccgcagcccggccctcgtcccccactcctttggtagctccgccacccttccgcattcctgggcccgctgggcgcggctgggcaggccgctggaatttgacccgagtgggccg

SEQ ID NO: 101715 - DNA, 558 bp, Homo sapiens
cctgccgccgcctggccgccctggggcggggtccggccgcaggcgcgcgacgggaggggggcgcgggggtacggagacggcggcccgaggggtctcgcgagcagagtcgagcgcgactcacccgacgccaaacaccagaaccggggccgccctgcgcgagaccgcaaacgacagcgaagagcgttaggctgtggccggacagtggcggcgccgacacttcctgcctgaaggggcggagcggaaggcgcaccggaaggcgcaccggaaggcgcggcgggaccaagtggaacgggggtgcgctgagtgttcgcgcccgggccggcggggtctgcgtgtccgccgagcggcggggctgctgaggccggacgcacacggccggggtcttaattgcccctccggcctgctccgatccgctgcgatatcgcggcctgcgctgcggcggtcgcccgcagcccggccctcgtcccccrctcctttggtagctccgccacccttccgcattcctgggcccgctgggcgcggctgggcaggccgctggaatttgacccgagtgggccg

SEQ ID NO: 101716 - DNA, 391 bp, Homo sapiens
gaattcaggatgagatttgggtggggacacagccaaaccatatcacyggctctgatagttaactggagaaatgctgttttaactgttaaaagacaaagattcctgatatctaagctgttttgaagtatatagcctaacatagtgatactataatagttcgttaatgaataaacgtagtgattaaattacatttactaaattaatcttatgacacaaatattatttttgaatccccgaaataaaactaatacctaaaacaaaaattatagtcgatgcttactttagccaatcttttagtttcctcatctgtaaaagggcataataatagtgcccactttattcagtggttgtgaggataaagcacaataatccatgtaaatttcttagggag

SEQ ID NO: 101717 - DNA, 552 bp, Homo sapiens
ggatttaaaaaatctatttttcttaaaaaaaaagtaaaatcatgacttggtagatattatcttgctctggataaaaaaaaaattgaatcaaatttttcagaccgaaaattgacttcattctctatcttcttacaagtaattacaggcatttgagtctctggattaaggattacgaggtaacaaaaaatggagaaaatcagtttggtgtcttaaaaatatatcatctcacctaaactgcttattcaaaaaccctcaacagtcatccagtgctttttgaatctgtacaaagctacgtgatgctaaaggcctccacccctcccaggcctaggatttcaggtktccctctcacttctgtgtaagagaaaaagagatttaatgactctaagctaaaaaactcacagctaatgaagagaaatagtcaagaggcagattttgactaatctagcagagtctcatttcagtcaaagttagattctgaaattagtacttaaggcaaacgctgcatttataaaagttattcttgaaaattctttaagttgctcataaaataat

SEQ ID NO: 101718 - DNA, 552 bp, Homo sapiens
ggatttaaaaaatctatttttcttaaaaaaaaagtaaaatcatgacttggtagatattatcttgctctggataaaaaaaaaattgaatcaaatttttcagaccgaaaattgacttcattctctatcttcttacaagtaattacaggcatttgagtctctggattaaggattacgaggtaacaaaaaatggagaaaatcagtttggtgtcttaaaaatatatcatctcacctaaactgcttattcaaaaaccctcaacagtcatccagtgctttttgaatctgtacaaagctacgtgatgctaaaggcctccacccctcccaggcctaggatttcaggtgtccctctcacttctgtgtaagagaaaaagagatttaatgactctaagckaaaaaactcacagctaatgaagagaaatagtcaagaggcagattttgactaatctagcagagtctcatttcagtcaaagttagattctgaaattagtacttaaggcaaacgctgcatttataaaagttattcttgaaaattctttaagttgctcataaaataat

SEQ ID NO: 101719 - DNA, 591 bp, Homo sapiens
tgcccctttgaagtatgtaatttttgtgacccacttcccgttcgtacacccccttcccttttgaagtcctttgataaaaacctgctggttttgcggctcaggtgggcatcacagtcctactgatacgtgatgtcacccccagaggcccagctgtaaaattcctctttttttactctttctctttatttctcagaccggctgacacstagggaaaatagaaagaacctatgttaaaatatggggggtgagttcccccgatacacaatcactagataaatgtaaatttgtaaccaaaactagtgctatgaaggaaattataggatttggccttgtcacagggtctttggtacaaaggaaaacctctccataatttaaaaacgcaactcacaaacttgatggttttataaattttggtttttatatattgatgtctttaaaatcagggcacacatattagaaatgttattactttatataaatgccatcatttaaagaaaaagcaactttattttttaatcatttttaattgacaaaatttatatatatttatggtatacaaagcaatgttctcatatatgtatatactatgga

SEQ ID NO: 101720 - DNA, 591 bp, Homo sapiens
tgcccctttgaagtatgtaatttttgtgacccacttcccgttcgtacacccccttcccttttgaagtcctttgataaaaacctgctggttttgcggctcaggtgggcatcacagtcctactgatacgtgatgtcacccccagaggcccagctgtaaaattcctctttttttactctttctctttatttctcagaccggctgacacgtagggaaaatagaaagaacctatgttaaaatatggggggtgagttcccccgatacacaatcactagataaatgtaaatttgtaaccaaaactagtgctwtgaaggaaattataggatttggccttgtcacagggtctttggtacaaaggaaaacctctccataatttaaaaacgcaactcacaaacttgatggttttataaattttggtttttatatattgatgtctttaaaatcagggcacacatattagaaatgttattactttatataaatgccatcatttaaagaaaaagcaactttattttttaatcatttttaattgacaaaatttatatatatttatggtatacaaagcaatgttctcatatatgtatatactatgga

SEQ ID NO: 101721 - DNA, 591 bp, Homo sapiens
tgcccctttgaagtatgtaatttttgtgacccacttcccgttcgtacacccccttcccttttgaagtcctttgataaaaacctgctggttttgcggctcaggtgggcatcacagtcctactgatacgtgatgtcacccccagaggcccagctgtaaaattcctctttttttactctttctctttatttctcagaccggctgacacgtagggaaaatagaaagaacctatgttaaaatatggggggtgagttcccccgatacacaatcactagataaatgtaaatttgtaaccaaaactagtgctatgaaggaaattataggatttggccttgtcacagggtctttggtacaaaggaaaacctctccataatttaaaaacrcaactcacaaacttgatggttttataaattttggtttttatatattgatgtctttaaaatcagggcacacatattagaaatgttattactttatataaatgccatcatttaaagaaaaagcaactttattttttaatcatttttaattgacaaaatttatatatatttatggtatacaaagcaatgttctcatatatgtatatactatgga

SEQ ID NO: 101722 - DNA, 640 bp, Homo sapiens
tatgtaaggggtccagtttcagttttctgcatacggctagccaattttcccagcaccatttattaaatagggaatcttttcccattgcttgtttttgtcaggtttgtcaaaaatcagatggttgtagatgtgtggtgttatttctgaggcctctgttctgttccattagtctatatatctgttttggtaccagtaccatgctcttttggttattgtagccttgtagtattaaagtcaggtagcatgatgcctccagctttgttctttttccttaggattktgttggctatgcatgctcctttttggttccatatgaaatttaaagttgttttttctaattttgtgaagaaagtcaatggtagcttgatggggatagcattgaatctacaaattactttgggcagtatggccattttcacaatattgattcttcctattaatgagcatgaaatgtttttccatttatttgtgtcctctcttatttcctttagtagtggtttgtagttctccttgaagaggtccttcacatcccttgtaagttgtatccctaggtattttattctcttcctagcaattgtgaatgggagttcactcatgattaggcttcctgtttgtctgttattggtgtataggaatgcct

SEQ ID NO: 101723 - DNA, 640 bp, Homo sapiens
tatgtaaggggtccagtttcagttttctgcatacggctagccaattttcccagcaccatttattaaatagggaatcttttcccattgcttgtttttgtcaggtttgtcaaaaatcagatggttgtagatgtgtggtgttatttctgaggcctctgttctgttccattagtctatatatctgttttggtaccagtaccatgctcttttggttattgtagccttgtagtattaaagtcaggtagcatgatgcctccagctttgttctttttccttaggattgtgttggctatgcatgctcctttttggttccatatgaaatttaaagttgttttttctaattttgtgaagaaagtcaatggtagcttgatggggatagcattgaatctacaaattactttgggcagtatggccattttcacaatattgattcttcctattaatgagcatgaaatgtttttccatttatttgtgtcctctcttatttcctttagtagtggtttgtagttctccttgaagaggtccttcacatcccttgtaagttgtatccctaggtattttattctcttcctagcarttgtgaatgggagttcactcatgattaggcttcctgtttgtctgttattggtgtataggaatgcct

SEQ ID NO: 101724 - DNA, 469 bp, Homo sapiens
tccttaagtaactcccctccatcctgctcctgtgctaggctcctataactcctatggcatccactgtraagcaaggagttagatgttgctgccagaggacaaataaaatcagaaccgattttattcttcggttttgtgtttaattttacctaaatcaatggttttagtctcctttgcccttacacattggacaaagtttaaaatataaagttgttccacattttaaattttgctcacataattaatctgtaacaaatcgaaacctcctatcgggtcacttccctctgcttttcctaatctctgtagtatgtggggttttgtttgttttgttttgttgcttttttccaggctgtctactatcctggaaatttacaagactctattagtgcagtttgctcaaagcccctgctcttctaatccggcaaggcgcccattgccgctcctgattgggctagaggctcatgattgt

SEQ ID NO: 101725 - DNA, 469 bp, Homo sapiens
tccttaagtaactcccctccatcctgctcctgtgctaggctcctataactcctatggcatccactgtgaagcaaggagttagatgttgctgccagaggacaaataaaatcagaaccgattttattcttcggttttgtgtttaattttacctaaatcaatggttttagtctcctttgcccttacacattggacaaagtttaaaatataaagttgttccacattttaaattttgctcacataattaatctgtaacaaatcgaaacctcctatcrggtcacttccctctgcttttcctaatctctgtagtatgtggggttttgtttgttttgttttgttgcttttttccaggctgtctactatcctggaaatttacaagactctattagtgcagtttgctcaaagcccctgctcttctaatccggcaaggcgcccattgccgctcctgattgggctagaggctcatgattgt

SEQ ID NO: 101726 - DNA, 606 bp, Homo sapiens
gtgaaaactctaaaaataatagcaaaatacagtccaacagtctagaggagatatgctctgagcccctagttccctgcttgtaaaagaacaatgctattagaccaacctcatgcagtcattttgaagactaagtgatattgtgtgcatcctgaacctggcacatggaaagaactctacagatggtaacctgtgagagcatatgaagcactaaatatatttaattttcactgttacatttttaactacctgtctttatttaagacrcaacttctgtgttctttattgctttaatgttcaatattatttagtgtacatctcttgaacatattccttctctctgactgtagttaacaatatgttatatctttgaaaaatgctaagggagtgaatttttatgtgttgttacctcaaaaatgataactatgtgtggtaatgtatatgttagttagctagatttagtcattccataatgtacatatacttcaaaatatcatgtttttcttgataaaaacatataattttatttgtcaattaaaaaataaaaaaggctattgagtgctattttgacagactttatattacaattttcattgcataaaaatgtta

SEQ ID NO: 101727 - DNA, 598 bp, Homo sapiens
tcttttacacatatgtaaatgtgatcattttgtgtataaggacataaaatatgtgcatttatgcgtaaacactaaatgatttatagtcataggtggatgaatattacatccttgtgcaaaatttcacatttataattatgtttccattcacatgtgtatgcatgtatacatacatgttacataaccacatatatagcaatagctaatatctttattgaaggtttactatgatccaagtgttctactcaaattatcttgtctaatattcaagtagatgcctgctataattgctaaataggcattttattattctcaatttaaaaattaccaaactgaggcatataatggttaaataaggtgtttaaggttgtgtagttgatgagtagttgaactgaaaatccccaagaaatctgattcyaatgcctttgcttataatcattatgttttaccacttctggtgtgtatatgtatctcctacatgtttggatctaagtatgcatgtaagtcactattggataagctgacttgaggaatcttgctgaggagtttatttcaagatggcaaatagagacccatgctcaggaagatttccaaggcc

SEQ ID NO: 101728 - DNA, 535 bp, Homo sapiens
aaacacaataatggaattgtgtgtttcactttggagatatgttacatctagactaaaaatataaatagagatctttggagggagaatggctataatcttaggaatattctttttttaatttttatttttaagttctggggtacatttgcaggatgtgcaggtttgttacataggtaaatgtacgtaatggtttcttattgcatatccacagaaagctgaacttcatgcctaatcatcagggcaagttggcccctgctttgaaaaaatgactcaggggctctgagctttgaaatattttccccagaatattctaagtcccctctgtcccacctctattatttatagataataamcctcctattatttatttattgataactatatgctgggataccaaaaaaaaaaaatgtgccaggaatggctgggaccagtattgttctccagacattctgtcttaaactccagaccaggactaaagtgcatatatatggaatttcaggactcgcacctatgtggttgtctctggtctctatga

SEQ ID NO: 101729 - DNA, 589 bp, Homo sapiens
ggttgttcattaactaagaagaatcactctcagggtcttcagggcatatatttcctaccaatggaaaaggttgtcagaacattttgataataaaagagcagatgataaaacaatcctaataaccacttattccccttatgcctttaaatcaacttagtttaaggaggtggatcaatgtctgttaggacagggaacaatcaacattgaataaattttcctgtatgaataaatttcgaggaatatgtcttgccatatatgtatgaaaaaatatatatacatttctatttatatatatatattttttttcctttttacttttatttctgtgtacctttctcatgccttttgtctttttctcttcttctttattcatttctgtgtttcatactttcacacaatatgaggcactctactgagcaaattatgtaactagygtgtgaatgcaggttaaaaagtggaggcaggtttatggatacagggcaaaaagctggtcaccaaactttagtagacttcaattcattgagagttgacttatgccaggtactgtgctggaaaataataaaggaaagcctgtgttctagctgaatat

SEQ ID NO: 101730 - DNA, 411 bp, Homo sapiens
tgaattctgtcatgcctgtggcccagtactcctgtattttttagaggatgatgaatggctttcattttccccgcttsatgtttggaaccaattgaatgataccaataagagttagacagatggagatcaaagtattagctgtaatgctaataaaagctgaattagtaaacatagtttagatgtgcaggcacagtggatttcctagtgctttcccctgaattggggttatagagccaaatcctgcatgggaagcttagcatgtggtagaaagcaaagcagaacactgtctgtagtgaggtagggaggcagatccctaagtcagggagcagaagagactgagctcagcggtacccacttctgaatacatcagttgtttaagtccatcttccttccacaggatgagtgtggagg

SEQ ID NO: 101731 - DNA, 452 bp, Homo sapiens
aaagcaagtactaacccctaacacctatgtccagggcaatctttcctagacatacaccatttgtctcactcttcatcttatcaaacagcaccctgtccrtattctggggtccctgtccctgacagaggcagcacattgttgggaagtgtttgccttagcatttgcaggcattgtgctgggatgaggtatcagatgacaggctttcatctggatatgatttatttattatatcagtactttatattagagaaagtgcaccagtgtgaaaattgaaggggaaacctattttggctacgggataacctggaaattattaaagtcaaaagcttctgggtcaaagggtagcagcttcatgttattagaataatatgttaatatttaagtcctataacctctttgggcctttgaaacacctgtgatgaaaatggttttcacactgttaaaatggtaac

SEQ ID NO: 101732 - DNA, 550 bp, Homo sapiens
cctatgtccagggcaatctttcctagacatacaccatttgtctcactcttcatcttatcaaacagcaccctgtccatattctggggtccctgtccctgacagaggcagcacattgttgggaagtgtttgccttagcatttgcaggcattgtgctgggatgaggtatcagatgacaggctttcatctggatatgatttatttattatatcagtactttatattagagaaagtgcaccagtgtgaaaattgaaggggaaacctattttggctamgggataacctggaaattattaaagtcaaaagcttctgggtcaaagggtagcagcttcatgttattagaataatatgttaatatttaagtcctataacctctttgggcctttgaaacacctgtgatgaaaatggttttcacactgttaaaatggtaacaaatagatggaggctcattgctttagttttgaatctattcgtgtgactaaattttatgagccaataaaacatatcctaacataagtacaaaaagattcagtaaaataacatcctgccaatt

SEQ ID NO: 101733 - DNA, 351 bp, Homo sapiens
cacatcaaaaccacaatgagataccacttcacacccactcagatggctatgataaaaatgacagacaataacaagcgytgatgaggtgaggatgcgtagaaagtgaaatccttatacattgctagtggaaatgtaaaatcatgcagccactttgtaaaacaatctggcagttcttcataatgttatacctagagttgacccagcaattctactcctaggtaaatacccaaagaaatttaaaaactgttatcatttataagtggtagctaaatgatgagaacacatggacacatcagggaaaacacacactgggtcctgtcggagggtagagggtgagaggaggtaccggat

SEQ ID NO: 101734 - DNA, 351 bp, Homo sapiens
cacatcaaaaccacaatgagataccacttcacacccactcagatggctatgataaaaatgacagacaataacaagcgctgatgaggtgaggatgcgtagaaagtgaaatccttatacattgctagtggaaatgtaaaatcatgcagccactttgtaaaacaatctggcagttcttcataatgttatacctagagttgacccagcaattctactcctaggtaaatacccaaagaaatttaaaaactgttatcatttataagtggtagmtaaatgatgagaacacatggacacatcagggaaaacacacactgggtcctgtcggagggtagagggtgagaggaggtaccggat

SEQ ID NO: 101735 - DNA, 564 bp, Homo sapiens
gggaaaaatccacaaattaaactgctttggtagaagtgggaggtcagagattatcatgagatcataaccctctctctgtccctacaagaattacagaaatcttgggaaaagggaaayggaaggtaaatagagatttaagccaatcatatctagttctttagaagaagctagtctccagctgacatcttaaagagatacagacataaatttagatataaatatagatagatatagatatagatagatatggtatctttgtttgagccgctataacaaaataccacacactgggtaatttataaacaatagaaatttctttgttacagtttggtggctgggaagtttaacattgaagcacctgcttgtgaggggccagtctctctgcttccaagatggtgcctcgttgctgcatcctccagagggtgcagatactgtgtcctcacatggccaaacatacaagggcaaaaaaggggtgaactccctttgtcaacccctttaaaaaggcacctaatcccattcatgaggggggaaccctcatgactcaatcacctattaatgccacca

SEQ ID NO: 101736 - DNA, 564 bp, Homo sapiens
gggaaaaatccacaaattaaactgctttggtagaagtgggaggtcagagattatcatgagatcataaccctctctctgtccctacaagaattacagaaatcttgggaaaagggaaatggaaggtaaatagagatttaagccaatcatatctagttctttagaagaagctagtctccmgctgacatcttaaagagatacagacataaatttagatataaatatagatagatatagatatagatagatatggtatctttgtttgagccgctataacaaaataccacacactgggtaatttataaacaatagaaatttctttgttacagtttggtggctgggaagtttaacattgaagcacctgcttgtgaggggccagtctctctgcttccaagatggtgcctcgttgctgcatcctccagagggtgcagatactgtgtcctcacatggccaaacatacaagggcaaaaaaggggtgaactccctttgtcaacccctttaaaaaggcacctaatcccattcatgaggggggaaccctcatgactcaatcacctattaatgccacca

SEQ ID NO: 101737 - DNA, 593 bp, Homo sapiens
gtgaaactatctagaatgttagaattcaagatgctagagcaatacaggctgttagtcaaggcctcaaataacaaaaagtgaaagttaagacaagcttaagcagagaatgacaaagccaaaaactcaactgtaaattaagaacccttattagggagaaacgctgattctaataacctttgctgccaatttgaataagcaatatatggtggcatgttgggtcaaagccaaaagaaaaaaacccaagttcagggccagaccaacagtctagttggctgtgtgtgtgctgccctgacaatcagtggtcaggactcctaatgaaggctggagcacagatgaggtcaaaggactaatgcaccactgagtcatgtaacaaaatacagggcaataaccacctcacaccattttaacacaaaagaaaaatcaaggatcccgaaaatattgttacatctttgacattttmtattaatcattctgaacttgaacatcactactaagtttcatcctcaaatactgtagagcttctacagtacaaaatgcatttcatagatcagatagcatacttcaaacacagttttatcagttataatatttgc

SEQ ID NO: 101738 - DNA, 554 bp, Homo sapiens
tacataaatatgcatgtttatgcgcagctaattcttttttaaaatgagatttattttccccttttcctataaaactaagttctcactaagtactaagttctggtttcatgcaatttaaaaagtcaaacagactttccttatcttgcaacgtagatagatcgcaactactgtctgcataacaaaattaagtgacacttatatttaataatcttttccatgatgcactgtcctgtatattgcttttgagttttattaagcaactgagtgacatgattagctatattttaccaaaaagagatctagtcaccatcaatcagcaccatgacttcaagtcaggatctgattcttagcatccttttaagataccwtgcggcgtctttcattgatccatgaatatatgactcaggtgtgttgcaaagcacgaagacactggctgagagcttgagccaacaaggtgctgtgcaggtagataaaggaacatagcatggagaaaatgttttaaaggtaatgtttgttcttttggactagggaagctcttcaccacgtaaaacaaa

SEQ ID NO: 101739 - DNA, 641 bp, Homo sapiens
tctttgactgattaatcctgtgttcagattgtctcttttttcccttcccctatgaactgcatagtctctagtgtgatcatgagtcagatgaggttgttttctgatcaaagaaaatatcttcttaactatcaaaaaccatctgactaaacttggaaaaggattttgtagcccaaattgaaccttgagatgactgtattccaggctgacagctaaactgaaatattttgagagattctgacaccgaaccatctggctgagttgctcccagtttcatgaccctcagaaaccatacaatactaaatgtttattattcaagctgctaagttttaagtgatttgttatgatagaagagataactaatgtagtaccaagtgcttggttcacttccaatctctctgaaattttaaaaattcatttggaaataaaaatgaaattataactactcataatttgtgggttgcagtggaagccgtgcttgagggaaatatatggcattgaatgtgtatattagataagaagagagatctaaaatcaataccataaatttccaacttaggamactagtataagaagaacaaattaagtctcaataaacagaaggaaagaaataataaaaattagaacagaaatcaatgtaatta

SEQ ID NO: 101740 - DNA, 592 bp, Homo sapiens
tttcatataagcttacataatttctaakttatttatttctcatgttcttcagttttgtgtcatgtacattcctacagtgatgtattttgattcttgctttatgcttcagtatttggcatatgttttgttttattattccaaaattaattcttattcttatcaattaatataaagacatatacacacacataatataaaaactgtattttttatttaatcaaatcaatataaatgctgtaaatatgcctatcattaatatatatgtggattatgtaatgttcgtaaaagtaaggctgaaacattaaaatacattaggctaccttctgactgataataatatggctataatttcttgtaatgtagaaattccttttgctttatatcttgctacctgtaggagatatcatgagattctacttattttcattttctagaatttactaactttgttcctctgtactttgaacatgaaacacaaagtctgaatgagatctatcatacttaagacttattttactatattctttttcaaagttttttttaagttttaaaatttctaaataactatacaaatatatgttaatcagtgttt

SEQ ID NO: 101741 - DNA, 592 bp, Homo sapiens
tttcatataagcttacataatttctaatttatttatttctcatgttcttcagttttgtgtcatgtacattcctacagtgatgtattttgattcttgctttatgcttcagtatttggcatatgttttgttttattattccaaaattaattcttattcttatcaattaatataaagacatatacacacacataatataaaaactgtattttttatttaatcaaatcaatataaatgctgtaaatatgcctatcattaatatatatgtggattatgtaatgttcgtaaaagtaaggctgaaacattaaaatacattaggctaccttctgactgataataatatggctataatttcttgtaatgtagaaattccttttgctttatatcttgctaccygtaggagatatcatgagattctacttattttcattttctagaatttactaactttgttcctctgtactttgaacatgaaacacaaagtctgaatgagatctatcatacttaagacttattttactatattctttttcaaagttttttttaagttttaaaatttctaaataactatacaaatatatgttaatcagtgttt

SEQ ID NO: 101742 - DNA, 454 bp, Homo sapiens
cttgatgtgaatagaaaagagaagctgcctaaggattttgctccagaacgctgcaacatcctagggtcagggtgataaggggagatcatcagagaggtctgaacagaagcagccttagtagaagtatatgctagaaataaacaataaaaatgtttccagaaatgcagaatattcaactcgttcaactactgatcctataatgaagaatgagaactaagcactggtcttggcatcaacataggtaacaaaggctatttgcgtacaatattggacagaaaaacctgaataaagttgtttctacgggaaaagggaatttctttgggatttggagatctggagtctaacattttttgatatgttttactgcactggtgagargagaaatgggtaagcacctaaaggcaaattttgaggtttagtagactgagagagcccctcaaagatgtacacataa

SEQ ID NO: 101743 - DNA, 511 bp, Homo sapiens
attataataaacaatattataatctgtcacacatacactataaatcaaccactcttttcctgggtatacccaaaaatgtcaagtaatatactaaagtgacatgtacagtacaagatgttcacgcagccttcttcatgggtaccagagagctggaagcaaacctcatgtttgttcctagaggactcaaaaatagtggtgaattttcatgatggagtattataacagcaattagaarcaatgaattaatgtgcaaataattatctgagctgattctaaaaacacaattatctgaatttatttttaaaaagcagtgtgagatatacgatgaattaaaatttctttttgcacacaaaacagaacattttatcaaataaagtgattaagtaaagaaaggattgcctgtattaacagtgataattccataaattgatgaatatggtgaactcaactatatatcacaaaggtatcagtaattgaaattatctcaaaaattattccatatctgacccaa

SEQ ID NO: 101744 - DNA, 609 bp, Homo sapiens
ttctttttctattttctcactttttgtaggttagaccttagggagcatgtgttaaagttatttctaacgtggcccagagattttgtgataaaactcaattaacctggtgctctcacaccatgaaattccagctggaggttgggtaggagtaaatattaataccttcattaaatatttcctaatataatgaccctgggacaactgaacttgcattatttaataaaactgtactccattaagtcagaatgacattgccaccactttcagtccttggaactaatagcattcttttccattaaataaaaggtcattttagagatyataacattgccatccaatgtaaataatattaacaaaatattaatattataaatataatagttataatattaaaatataaatattataaataaaatattaacaaaataatggattagaatatgcagaactaaaattctttatggcaatatttatgaagaagataaaataaaatgtcaatatgataaaaatatattttaaagtatttaatcacttgctatcatcaaaatattcctgaattttctgacaccaataaaacttcagaattctatttccgtccctaaatatgag

SEQ ID NO: 101745 - DNA, 576 bp, Homo sapiens
ctgaacatttttatactgagctttaaagagtatgaatttgttttattacactagcttctctagatcacttttttcccatgataaagtttctcaacttctctgatgcgctgttgctttgttatttttatatctaatctagatatctttaaaattagatatttttaatacctaattaaaataattaaagaaacactccatttttcaaaatgtatttctaaaagtgcttgggaaaattaagcataatcatgagttttaaatattataactgyctaccaaatcaatgaacccataggcaacaaaccctcaaagtcaagggaacctcaaattcaaggaaaaaccttgaaaataagcccaaaacaaagaccaaaaaaaattcccaaaattattggtaaaaaggctttttgtagaataattatgttattaatggtcgtaaacaggactgtaatcgatgatcttatcagtcccataagaaaaaaatcaataaaaagattatactgggatctgaagcttaggtttgttcaaagtaaattaatttatttagtatcactttccaaaaaacttcagaaataattttgc

SEQ ID NO: 101746 - DNA, 587 bp, Homo sapiens
tggatatcaattatttacattaagggaaaatggatatgagttttatttaaaaagggtttttcccagatataaaatggaattcattgcaatggctcatgtaacatcagattcaaaataaccctgaaatctgattttttaaaatcttggtttagcctctcctaatcatggtctgtttttcagcacactgtccctgatgcccaattccatggccaatttccttcaagtgttggtaaccagaatagttttaagattataattccttacacgtggccacgagcatgggagatttatgagttagtatgtaatatctatcagaaaatacctttccccataattattacaaaactccatgttacttttgttttccaattccaaacctggaaaggatttttatctctggcatgatgtttgccttctaacaagaatgcacacttgtaatgctccatgcaaagaggctacacttaccttccactgaaaaactaatctacaacactgcagacttcactaccttctatcagccagcctggttataccactaataataccactattatataccatmataaaaatgcacatgtactatatta

SEQ ID NO: 101747 - DNA, 636 bp, Homo sapiens
ggggcagtgtgaaatatttttattgcaacaatgagttcaagaaaaaacacctttaaactccagtccaaataggttaacatctttaaatgttaacgattctgttgattattgcttgaattctcccagggaatgactgtaaaccrcatgattgcaggatgtcacctcttttgttcatttttgtttctccagggcctaatgcagtactcacatgtatctggtgcacattaaatatttatgaaataaatgaataaatggatactaccctaaaagttaggtgacacattcacatttttaaaggcagaaattgagattccaggagattaggttacttgcctaaggtcctagtgaaacttggacttgaaatgaggtttcatttccaagcaaagatatttgctaacacattgtactgcttccagattatgaaagatggtggtgataaaatgagataaaatgggataaaatgaacattttctttagcattagccatagagcatccttagcccattctaaaacttggtttgtcttctgactttaatgagttagaatttagtttattaagccttccaatcatactgacctgatggaacaactcttccctgagaagtatctggaaagataaaagcactaaaaatttct

SEQ ID NO: 101748 - DNA, 563 bp, Homo sapiens
cccacagtatcaaagcaatgatgaaacctaagtatgtctcatcagcaggttcagttcagctctgcggccctggcaggccctgaaacctccttctctaaacagtgcctctcttaacaagagcaggggagagagggatgcttgaacatactttattcttcctggagctggcgtatttcaccagaacaaaattcatcagcatttttttaatctgaaagagcttgggtttataacacacacttacaactaatatccaaaagtttgccttccaggtggttgaaatatcactatgctggtggtctattctagacatagatagctgacataaaacacacacttccaaatatgcctaagatttttttgagaaaaatattttcaaaaactattaaccatttcaaaaaaacagggaaatgtcttgtgaattggctattctctatgaaacacatcaatacagacggtttttaaaggaacatgatctgaaaacacataggcttaaatatgtacctgatttgttatgaggtggatccttggactttgtctattacktaacacattttttcattaaa

SEQ ID NO: 101749 - DNA, 579 bp, Homo sapiens
taatattaacaatgatctgagtgtttattattgtgtatattaatataatattttatgtatattaatatatgtatatattatatacttaatttatgtatattaatatttccaacaacttacattatattgtactactgttattctattccacaaataagaacaattaacatctgaagagcttacatgacactcaagctattaaggagttggratttgaacccacaactgtctgaccctaaagtccaggttccaaacaactgtgcataccacttctcatttctttttcaatgtgaggtagaccttagtgctggtccaagggtgcaaggtaacacactctaagatatatgtgtcatacgcctgcgtaacaactcttgtttaaattccacagctttaaattcaagaaagtacttggaccaagccaggctggcctggggaggttgtgaatggtaaatgagacagagttcatgcctgggatacaacacttgaccattctatgaggtcatattacatacagatgctccttgacttaaaatgagatcatgtcccaataaacctatcattaagtttcaaatatcatta

SEQ ID NO: 101750 - DNA, 579 bp, Homo sapiens
taatattaacaatgatctgagtgtttattattgtgtatattaatataatattttatgtatattaatatatgtatatattatatacttaatttatgtatattaatatttccaacaacttacattatattgtactactgttattctattccacaaataagaacaattaacatctgaagagcttacatgacactcaagctattaaggagttggaatttgaacccacaactgtctgaccctaaagtccaggttccaaacaactgtgcatamcacttctcatttctttttcaatgtgaggtagaccttagtgctggtccaagggtgcaaggtaacacactctaagatatatgtgtcatacgcctgcgtaacaactcttgtttaaattccacagctttaaattcaagaaagtacttggaccaagccaggctggcctggggaggttgtgaatggtaaatgagacagagttcatgcctgggatacaacacttgaccattctatgaggtcatattacatacagatgctccttgacttaaaatgagatcatgtcccaataaacctatcattaagtttcaaatatcatta

SEQ ID NO: 101751 - DNA, 579 bp, Homo sapiens
taatattaacaatgatctgagtgtttattattgtgtatattaatataatattttatgtatattaatatatgtatatattatatacttaatttatgtatattaatatttccaacaacttacattatattgtactactgttattctattccacaaataagaacaattaacatctgaagagcttacatgacactcaagctattaaggagttggaatttgaacccacaactgtctgaccctaaagtccaggttccaaacaactgtgcataccacttctcatttctttttcaatgtgaggtagaccttagtgctggtccaagggtgcaaggtaacacactctaagatatatgtgtcatacgcctgsgtaacaactcttgtttaaattccacagctttaaattcaagaaagtacttggaccaagccaggctggcctggggaggttgtgaatggtaaatgagacagagttcatgcctgggatacaacacttgaccattctatgaggtcatattacatacagatgctccttgacttaaaatgagatcatgtcccaataaacctatcattaagtttcaaatatcatta

SEQ ID NO: 101752 - DNA, 597 bp, Homo sapiens
gttgtttaatttttgccttttagtcttttatatagttgggatatgtgtcccctccaaatatcatgttgaaatgtgaccttccaatgttggaggtagagcctagtgggaggtgttggctyatgggagtgactccctcatgaatgtcttggtgtcagtcccttggtgatgagtgggttctcactctattggttcatgccagagatagttgtttaaaagagtgtggcaacccttcctctccctcctgctccgtctcttgctctgtgacatacctactccccctccaccttctaaccatgagtaaaagcttcctgaggtcctacaagaagcagatgttggcaccaagcttcttgtacagtctgtagaactataaacctcttttctttataaatcacccagcttcaggtattcctttatatcaatgcaaaatgaaataaaggaatcagagaaaatggagactaacagtcttttctccgcttttcctgaccagtctaacagagacctgtttaatttgttcacttattttattaaattggttttgttatctctctacattgtgtttctgatttcactgatctctgctcttagttttactatatt

SEQ ID NO: 101753 - DNA, 597 bp, Homo sapiens
gttgtttaatttttgccttttagtcttttatatagttgggatatgtgtcccctccaaatatcatgttgaaatgtgaccttccaatgttggaggtagagcctagtgggaggtgttggcttatgggagtgactccctcatgaatgtcttggtgtcagtcccttggtgatgagtgrgttctcactctattggttcatgccagagatagttgtttaaaagagtgtggcaacccttcctctccctcctgctccgtctcttgctctgtgacatacctactccccctccaccttctaaccatgagtaaaagcttcctgaggtcctacaagaagcagatgttggcaccaagcttcttgtacagtctgtagaactataaacctcttttctttataaatcacccagcttcaggtattcctttatatcaatgcaaaatgaaataaaggaatcagagaaaatggagactaacagtcttttctccgcttttcctgaccagtctaacagagacctgtttaatttgttcacttattttattaaattggttttgttatctctctacattgtgtttctgatttcactgatctctgctcttagttttactatatt

SEQ ID NO: 101754 - DNA, 597 bp, Homo sapiens
gttgtttaatttttgccttttagtcttttatatagttgggatatgtgtcccctccaaatatcatgttgaaatgtgaccttccaatgttggaggtagagcctagtgggaggtgttggcttatgggagtgactccctcatgaatgtcttggtgtcagtcccttggtgatgagtgggttctcactctaytggttcatgccagagatagttgtttaaaagagtgtggcaacccttcctctccctcctgctccgtctcttgctctgtgacatacctactccccctccaccttctaaccatgagtaaaagcttcctgaggtcctacaagaagcagatgttggcaccaagcttcttgtacagtctgtagaactataaacctcttttctttataaatcacccagcttcaggtattcctttatatcaatgcaaaatgaaataaaggaatcagagaaaatggagactaacagtcttttctccgcttttcctgaccagtctaacagagacctgtttaatttgttcacttattttattaaattggttttgttatctctctacattgtgtttctgatttcactgatctctgctcttagttttactatatt

SEQ ID NO: 101755 - DNA, 398 bp, Homo sapiens
gtattcctggattccctgcwgcgtgggtccccagggtgggatgctgagagggggctggtaccatctagtcctgctggcagtttgccctgggactcagaatatggcatacgcagggttgggctgagctgaggggaggggtgagggctgctgcagcctatctccccaccctggccctgcctgtatctctgtaagctgtccccccattgtgagagagctgtgcttcctgcttggtagcatggaggggaggtagtggtgagggggcagctgccaaggtgtgagggtggggaaagccccgtgccaggctggatgtgaggtcggtggtttccaagctagggggtccccttttgtctgtgcccctttggtccctcacccaacagagctgcctgcgtatggtccac

SEQ ID NO: 101756 - DNA, 398 bp, Homo sapiens
gtattcctggattccctgcakcgtgggtccccagggtgggatgctgagagggggctggtaccatctagtcctgctggcagtttgccctgggactcagaatatggcatacgcagggttgggctgagctgaggggaggggtgagggctgctgcagcctatctccccaccctggccctgcctgtatctctgtaagctgtccccccattgtgagagagctgtgcttcctgcttggtagcatggaggggaggtagtggtgagggggcagctgccaaggtgtgagggtggggaaagccccgtgccaggctggatgtgaggtcggtggtttccaagctagggggtccccttttgtctgtgcccctttggtccctcacccaacagagctgcctgcgtatggtccac

SEQ ID NO: 101757 - DNA, 444 bp, Homo sapiens
gaattccctaggcaagaagcaagtaacctccagagcacaggaagggtgcaggtgacttgccatgggtggctggtgaaaggggctcaaataatctacactctggcagtcaggctcaaaagcctaccaagggagatgacagaattgcccgtaacttaacttatgtttcaggaatgagagaggtggcatcagtacaaaatatacatatgtgtatggacacagataaagataaacatatagaacacacataggataataagaaacttttatttaaaaaaarttatgctagtaaatctgacaacttaaagcaacattctcacccaggagtgactttcctccccaccctctcttcgccactactgtccaaaatggcagtagtgctggccaaggttgagaagccttgataatagatgaagttgataaatttcttgaataatacaagctgcc

SEQ ID NO: 101758 - DNA, 648 bp, Homo sapiens
ttattctagttcagtaaaaccccataaaaagttttggtttgctttcttgtttatatttcatttgtcatcatctttccttaaagctactttagaacatttttacaaaaactgtgcatattcacatgctatgttgtatttgttgagtaagaagtaacatatacagatggtggcccccaaaatatgtgtttacatcctaatcccaagaacctgtaaatattaccctatttggcaaaatatgtgattaaattaggaattttgagaggagacccatatccttggtgatccagataggctctaaatttaaggacaagtgagactgaatgagatttgaactgcagaggagaaggtgaggtatagatagggacggaaactggagtgatgtggccacaagccaaggaaatcagcagccccagaagccaaaaaggacagaaacagattctcccctagaaaccctatagggattactgcccttctgaaaacctgatttcagattccaggctccagaattagaagataataaayttcagttgttttaagccgcaagtttacagtgttttatctaaggcagccctaggaaattaatactgtagctaaggaaagttaatatatttcctaatactagaaaataaataattgttaaaatgtctg

SEQ ID NO: 101759 - DNA, 551 bp, Homo sapiens
ttggcactggcctgcaggtgccccttggcatgaacagccatgaacagcagaagaaggcagacaggctcctgggcagaagggggcaggtccctgataagctacactttcaagctaaagagggcctgaagcctggggcctgggctgccactcacacagaccagatgggaacttrtacttttccctgggcccgcccatggctgcccatggttacccatggaccaatcaacatgcacttcctcctctgtgaggcccataaaaatcttggactcaggcccataaaaacctctgcctcagccagatgggaagagaggatggagagggtagagagaggatggagagataatggggagacaatgggatgaccagctgcagagaggaactaccctcttcggagatctggacatttgttgggatgacttgcctagcagagaggagatatcctactctctgctgagagctaaagagacaatggtatcactagctgcagagagtagctaccctctctgccaagagctgaacagtctttgggacaccctgactattgagaggag

SEQ ID NO: 101760 - DNA, 611 bp, Homo sapiens
tatgttgcccaggctgttctcaaactcctgggctcaagcaatcttcctgcatcaaactcccaagtagcagggactacaggtgtacaccaccacactcagctatttttctacaatttttaatattattttagtctcactacagaaccaataatataagtagagaaacaatctctcctaaaaactatatgataccaaaataataagtttccaagaagaaaagctatatgctatgtgccgaacctttttgcaactaaaagttaccaggattccatgattactgcaaataatttgatccactgaagagttatacaggcataaatattatgaaagtcacactcacaggatttaaaactcaaagtattagtatttatccaaataaagcttaatcaaatttcatatttcctytattggagaaagcatttcctaatgtgattttcctgtcactacttattttccagttcattttttgtcagctcctaccctgtcacggtacttatcaatctttgttagttaccaaagttaaacaaattttttcaatcaactagccatatatatgtttttctctgacccactttccgttaccaccataaaacaatgacagataaaccact

SEQ ID NO: 101761 - DNA, 506 bp, Homo sapiens
agctaattccattctcatactatccactgggtgcaccrgactcactcccatttgtattattaaagcacatgcaaataggatataaaaagaaggaagagtactgggcctcaaaatgagttcaaatctcatttctgccaattcctatgtctaaaaaaaaagcatcctaatctctttgagcctcacattctctgagaatcacttgaccagaatgttcaatacaggtaaaaatactagaaagtattttaattaattctaagattccttaaaattctgtaattctatgtcctcttgattctgtctataggaaaactgggaatacatacccagcagaattttaaaaaataatagaacaaaagaaacagcaagaaaagcagagaagaaagttctaaaaaatcaagacaagattatagaaaagtcatggaaaaagaaacaagactaacaaaagtattatggaagtagcagaaatacttgcctaaatggaaaaccaaactgggaagtcaaatgat

SEQ ID NO: 101762 - DNA, 554 bp, Homo sapiens
tcttgttccagtctttagaggaaaggccttcattttttccctgttccgtatgatggtagctgtggatttgtcatatatggtctttattattttgaagtatgttgtttctatacccattttgattaggggtttttttatatcataaaggatgttgaattttataaaatactttttcagtatctattgaaatatgtggtttttgtttttgattctgttaatatgatatatcatgtttattgagttgcttatgttgaaccatccttgcatccctggaatgaatcccatttgatattataaatgatctttttagtgtgttgttgaattctgtttgctagtattttgttraggattttcacatatatgttcatcacggatattggcctgtagttttcttttcttgttgtcgtgtccttatctgattttactgtcaaggtaatgctggccttatagaatgagtttggaagtatgtcctcctcttcaatttttttgaagagtttgagtacaattggtattaattcttctttaaatgtttggtagaattcagcagtgaagtt

SEQ ID NO: 101763 - DNA, 456 bp, Homo sapiens
acagaaagctaagaagccagaacaccctgagaggggatgtgagttgggaaagagaaggacaccaacctaagaatgtcaccattcyccctataggtcattgggttagtccatttttgcattgctataaggaagtacctgaggctgggtaatttataaagaaaggaagttttttggctcgcggttcttcaggctgtacaagcatgttgcccacatctgcacggcttccagcgaaggcttcgggaagcttctaatcatggcggagggggaaggggagccaatgtatcacatggcaagaaagggggcaagaaggagagggaagaggtgccaggctttttaaacaaccagctgtcatgagaactcatagagtgagaacttacttatgactaaggggatgacactaagtcattcctgagggatctgcccccttgatccaatacctcccactaggccctacct

SEQ ID NO: 101764 - DNA, 614 bp, Homo sapiens
gcaatgaggaatagtcaaaaaacactacagattaataacccaataaattatcctgatgtttatgtacttttatatgtacatacagttttaacgtaattgtcatcatttttcattcccccgataaaaaggaagctatggagtatgatggtggccatgaaatctgagactagactgcctggttcaggtcacacctccatggtcaccatctgtgagcccttaggcggtgcctctatctcctcttctgcaaaagggaaaccttgacctctccttctcctggactgagtggattaggacagagcagtgcctggaacgagtggggctgtaggcactgtagtgatgcttctctgtgggtcaggtctgctctggcccagacttacaccattgagcaacccacagaggagcctgggctagtggagcacccacccacagagctgagacaggcaatggagaccctcatgcaagcccaggacacctcgggggctccattctctgaagaaaactaagacaggggaaggggctgcacactcataggactctagtaggcattcagttattttgtamttttctttatgtattatcacttttgtgttaagagtaattctggaatagtttat

SEQ ID NO: 101765 - DNA, 546 bp, Homo sapiens
gaagaaattctgaatgaagttttgctaaccataggctgcaaaatgatacaggtggatgtgttcattgatagagagttgcattgctttgaggatcaggtttgatctgtctctttggggtccaggactaaaaatatctgaatctggcaaggagaaatggcaaaagactgtcatcttgtttggagaccaagtaggtcagaggtaggtgtggggctaaggagagcccatctgagagggattggtccctcaaggcgggactcagcctctggatctgggagccatgatactttgtgtcctgtttaagtggtttgttttctttttctatttttaattaccttctgaggatattgcctacagggatattttattaactcttccagtcttgagtccactgaggtctggggattagggaggcaggatccakgcatgggaaagcttctgctgtgaagtagtgagagaacatctgcagagagtgagcaaggcctgaagggaggttgttattgaggtgacaatacacatgaaagacatattttggaacatgttggtgtc

SEQ ID NO: 101766 - DNA, 504 bp, Homo sapiens
ttgccccgcaatgggctaggcagtggcaagggaatagagagtccttatacactgatgatacactgagatcaaagctaagatgttctcttcacctgacatgtaatgttattattttagtttgaagttaaatatattatcttgtttaaatacaggctgcttgtgrttttgcctgtggtttaaaaaaaaaacaatataagataaagatggattaaatatataaaactcagaagtctggcaagagttagaaaagaaggtctatactttatataaaaagcatttattggtgtcaagaagtctatcaagctagatatagatatgtactcactgtctgcctcctcatacatattatccagactaagaaagccaccaaatctccatggcagctcaccttcagcctcctgccctgcacatccatgcacgatttttaatccagtcttacactgggctgaggaactaattctcatctccactgagatattttcaacatcaacaatatttgttcta

SEQ ID NO: 101767 - DNA, 504 bp, Homo sapiens
ttgccccgcaatgggctaggcagtggcaagggaatagagagtccttatacactgatgatacactgagatcaaagctaagatgttctcttcacctgacatgtaatgttattattttagtttgaagttaaatatattatcttgtttaaatacaggctgcttgtggttttgcctgtggtttaaaaaaaaaacaatataagataaagatggattaaatatataaaactcagaagtctggcaagagttagaaaagaaggtctatactttatataaaaagcatttattggtgtcaagaagtctatcaagctagatatagatatgtactcactgtctgcctcctcatacatattatccagactaagaaagccaccaaatctccatggcagctcaccttcagcctcctgccctgcayatccatgcacgatttttaatccagtcttacactgggctgaggaactaattctcatctccactgagatattttcaacatcaacaatatttgttcta

SEQ ID NO: 101768 - DNA, 589 bp, Homo sapiens
attataaccaaggcagaaattcttgattaaataagcaattagtcctgagaatagaaactaaaaccaggatagtttctcttttatttatcagacagcataaagtttttcattactatagaaaattcattaatctggattagtttcccttagtcaaaggtccaaattatacaactattttaacaagacayattttcaatactctctgttatgtactgtaattggaattagcctaagaaagcgttcatgttctgaaccttactagcttcaatgaatagataagaatgagttgaaattagcacgtcaattgcttgtatgtaaatgatttctagagtgcttggacacctgaaagcatcccttatgttcttttagcaatttcagtatattaaaagcaagtattaattttcctaccatttaattacatataagtcaaagctcaggcgattttattatagtatagcaaataccctaactaaattactctgaagtgtgaattggtgaaattcaaattaacgaaagtgcacaatcacaatcaaagataaatatcagcctcgctttacatcctctccaaatttatagcatcaagatttag

SEQ ID NO: 101769 - DNA, 589 bp, Homo sapiens
attataaccaaggcagaaattcttgattaaataagcaattagtcctgagaatagaaactaaaaccaggatagtttctcttttatttatcagacagcataaagtttttcattactatagaaaattcattaatctggattagtttcccttagtcaaaggtccaaattatacaactattttaacaagacatattttcaatactctctgttatgtactgtaattggaattagcctaagaaagcrttcatgttctgaaccttactagcttcaatgaatagataagaatgagttgaaattagcacgtcaattgcttgtatgtaaatgatttctagagtgcttggacacctgaaagcatcccttatgttcttttagcaatttcagtatattaaaagcaagtattaattttcctaccatttaattacatataagtcaaagctcaggcgattttattatagtatagcaaataccctaactaaattactctgaagtgtgaattggtgaaattcaaattaacgaaagtgcacaatcacaatcaaagataaatatcagcctcgctttacatcctctccaaatttatagcatcaagatttag

SEQ ID NO: 101770 - DNA, 589 bp, Homo sapiens
attataaccaaggcagaaattcttgattaaataagcaattagtcctgagaatagaaactaaaaccaggatagtttctcttttatttatcagacagcataaagtttttcattactatagaaaattcattaatctggattagtttcccttagtcaaaggtccaaattatacaactattttaacaagacatattttcaatactctctgttatgtactgtaattggaattagcctaagaaagcgytcatgttctgaaccttactagcttcaatgaatagataagaatgagttgaaattagcacgtcaattgcttgtatgtaaatgatttctagagtgcttggacacctgaaagcatcccttatgttcttttagcaatttcagtatattaaaagcaagtattaattttcctaccatttaattacatataagtcaaagctcaggcgattttattatagtatagcaaataccctaactaaattactctgaagtgtgaattggtgaaattcaaattaacgaaagtgcacaatcacaatcaaagataaatatcagcctcgctttacatcctctccaaatttatagcatcaagatttag

SEQ ID NO: 101771 - DNA, 589 bp, Homo sapiens
attataaccaaggcagaaattcttgattaaataagcaattagtcctgagaatagaaactaaaaccaggatagtttctcttttatttatcagacagcataaagtttttcattactatagaaaattcattaatctggattagtttcccttagtcaaaggtccaaattatacaactattttaacaagacatattttcaatactctctgttatgtactgtaattggaattagcctaagaaagcgttcatgttctgaaccttactagcttcaatgaatagataagaatgagttgaaattagcacgtcaattgcttgtatgtaaatgatttctagagtgcttggacacctgaaagcatcccttaygttcttttagcaatttcagtatattaaaagcaagtattaattttcctaccatttaattacatataagtcaaagctcaggcgattttattatagtatagcaaataccctaactaaattactctgaagtgtgaattggtgaaattcaaattaacgaaagtgcacaatcacaatcaaagataaatatcagcctcgctttacatcctctccaaatttatagcatcaagatttag

SEQ ID NO: 101772 - DNA, 623 bp, Homo sapiens
tattcaaatacacagaagttaaataatatgctcttaggcaatgactgagttagcgaacacattgaaagggaaatttaaaaaaacagaaacaaattaaaatggaagcataacatatcaaaatctatgggatacaacaaagacactactcagagggaartttatagcaataaacccctgtctcaataaagagaaaatatttcatataaacaacataatactatacttcaaggaaccagataagtgaaaacaaattaaatctgaaattatacgaaaataaatagtaaaagccaatagaagtaaacaaaatagagactataaaattacaaaagattgataaaagttttttttaaaaaaagataaaactgataaaactttaatcagtcaaataagataaaagaaagaaggctcaaatgaatagaattagaaacaaaaaacagacatgataactgataacagaaatacaacagatcataaagatacaatcaactgtatgtcaataaattagaaaacttagaatacattttttttgaaatgtacaaccaatgcatattgaatcatggaaaaacagaaaatctgaacagagcaagttttagttagttttgcattgttataaagaaaaacct

SEQ ID NO: 101773 - DNA, 245 bp, Homo sapiens
caaattgttgtgtatgcatacaacgggatattattctgctataaaaaagaatgaagtgttgatacatgctrcaatgtagatgaaccttatcagcattatgctaagtgaaagaagccagacacaaaatgtcccatagtatatgactttatttatatgaaatattcagaataagtaaatccatagagatagaaaacagattggtggttgccaggggcagtaagatggggaattaggtattactactt

SEQ ID NO: 101774 - DNA, 610 bp, Homo sapiens
taccctgcaatatactaaactgacttgttagttctagtagtgttttcatagattctgtaagttttccttcagagagaaacaaacccattgtctgtgaacaaagacagtttacatcttccttacattctgtttgtctttaatttctttttttttktgtgttattgccctgactccaacctctgttaccatgttaaatagaagtggtgagaccagatttcctcaccttgttcctgatgttacagggagcagttttttgtatgggcctaattttgcctcactattaaggcaaaacttttcttagtactctacccaatgtgttgtgagttattagtttttccagtctgaatagtgaaaacaggcactagtcctggctctgctggagatccagagagttttccttctaatcttttaggatgtttttcctcttgatcttaggtagttcctttacatggatatactgataagtatttagttgatgatttgagagggattgtccagaggtctctctttgtgcagttctatccttgctggtactctattctgcaaactctagctctgtggcctccctgaactcccagttctttctcctcagggcgatctcctgacatcc

SEQ ID NO: 101775 - DNA, 548 bp, Homo sapiens
aacgggagtttccctgcacaagctccctttttgcctgctgccatccatgtaaggtgtgagttgctcctccttgccttccaccatgattgtgaggcctccccagccatgtggaactgtaagtccattaaacctctttcttttgtaaattgcctagtcttgggtatrtctttatcagtagcatgaaaatggactaatacagattcctaactcaaaagttcaaccgttgtgtcaggctgctctcagcactgtccccctttgggaaggcccatgatgataaccatctcctttagctttttcatcagtgcctgtaatattttttcctctggttcccactgttgttatggcctgatgctaagatgctaaaatattttatcttaatgcctagaaaagcaatgttttctcctagtataacttgaacctgtactcttggttttttcttgatgtataatcttatttttggcttttaggttttgactcttatattgcttaaaagggttttaagggctaatgaatgcctgcctacctccattcctgtctggcctagaatg

SEQ ID NO: 101776 - DNA, 548 bp, Homo sapiens
aacgggagtttccctgcacaagctccctttttgcctgctgccatccatgtaaggtgtgagttgctcctccttgccttccaccatgattgtgaggcctccccagccatgtggaactgtaagtccattaaacctctttcttttgtaaattgcctagtcttgggtatatctttatcagtagcatgaaaatggactaatacagattcctaactcaaaagttcaaccgttgtgtcaggctgctctcagcactgtccccctttgggaaggcccatgatgataaccatctcctttagctttttcatcagtgcctgtaatattttttcctctggttcccactgttgttatggcctgatgctaagatgctaaaatattttatcttaaygcctagaaaagcaatgttttctcctagtataacttgaacctgtactcttggttttttcttgatgtataatcttatttttggcttttaggttttgactcttatattgcttaaaagggttttaagggctaatgaatgcctgcctacctccattcctgtctggcctagaatg

SEQ ID NO: 101777 - DNA, 548 bp, Homo sapiens
aacgggagtttccctgcacaagctccctttttgcctgctgccatccatgtaaggtgtgagttgctcctccttgccttccaccatgattgtgaggcctccccagccatgtggaactgtaagtccattaaacctctttcttttgtaaattgcctagtcttgggtatatctttatcagtagcatgaaaatggactaatacagattcctaactcaaaagttcaaccgttgtgtcaggctgctctcagcactgtccccctttgggaaggcccatgatgataaccatctcctttagctttttcatcagtgcctgtaatattttttcctctggttcccactgttgttatggcctgatgctaagatgctaaaatattttatcttaatgcctagaaaagcaatgttttctcctagtataacttgaacctgtactcttggttttttcttgatgtataatctyatttttggcttttaggttttgactcttatattgcttaaaagggttttaagggctaatgaatgcctgcctacctccattcctgtctggcctagaatg

SEQ ID NO: 101778 - DNA, 573 bp, Homo sapiens
ctatcagctcatttcagggagtcagccagagaatcctccctctcctgtgcttcctcccttgtgcctgggcatatgctccaataaagccttgctaggaaaactcttttggcctggtgagaatttctattgcatcaagagcctaagaacccatgatcggtaacactttgagcaaaggaaaaggtcccccttccctagggagatgcagctctgcatrcacccatatgtttggtgggagtgcaaactggcttcccgttgcatatgcctctctgtctaggagaacagaaagatgataattacatgcatattggtccaccaagcacaggcacacatggaacatgtactggcacaggcctactactgcccagggctggtggaagctggctgacattgtcccttaccatgtaaccttctgtcttcttctggtaccatttcagtacagcattgcacttgaaaccgccatattcccgggccaaggccaccagagggtttcttctttccacactggttagagagaagagcacgttaaggagaagatgctaatgtttagaatcctcaaattcacaagaactaaat

SEQ ID NO: 101779 - DNA, 514 bp, Homo sapiens
tgtgtactcaccaaatcatttaatgtgaactcactgtggactcacagaatcttcaaatgcattattcraagagaacatttatgaaatagaaatttaggggtccttggtttgcgaaaatcttagaatcatgatcttggaaattctaatctcatgatgctaggtatttggtctcggccacaggagtagcttgatattaacaaagtttgagaaaaccatcagaattctagaagaatgaggtcacagacacaagacactgaagaacagaaaatcctgagacaagaaggcttttagccatagtcgttgcagcttaaaagtagaggatcataaagtcatgggactaatcattacagcatataatcacaaacattagaagaattattggaatcagattatttgaactacagaatagcagatccagcactaacattttagaattaaggaaggagagaactgcggatttacaggattcaaattcttccaatcagacattcctaaacaggaattcaaattaaat

SEQ ID NO: 101780 - DNA, 462 bp, Homo sapiens
gaattcaaataaatgcttgtaataacagtgccaggtcccccactgcctcattgcacaagtatcatgaactagtcacttaatctctctgggcctcaatctccttgtttgtaaaatgaaggagcagctctagatgttctcaattcttaggagagggaatgtttctccaggacttcstggcattgataccatgcttaccaggagccttcttggtgagggtagtgcatgcgcgtatgcgtgcgtgcgtgtgttatagcatattcttaaagttttgttatggaaaataaataattctcattacaaattaatagagtggcattctggtttatacactagtctctttgcatttagtctttgtgtgttacttccctacccctgagtaaactcatacaaatcgagtttctagacctggcacagctcctcgtctgtgcagcctgcaggtggatgctgtatatggcttgatta

SEQ ID NO: 101781 - DNA, 607 bp, Homo sapiens
ttgcctgtgggtaattgctagttgaatttctggggcagggagagaagctagggaactcctgttccaccatcttactgatgtcactytcccaacattattttaagtcttaaagaatagaataacttcactgacatctgggaatattactattattacttgttgaaatgttggaaatgtgctaggtaattttggtggcaggctccagtggagctttgggaaggccttattataaagtagtaatctactgagatgctctgaaacttgggaaactctgaatattcttgggttacttgagtttttaattatatttctcccaggtccccattttgcatttcatttactatcctttcccccagtttattcacttttgctcactggaatgtccaccacaatcctagtgatattttaagataaaaattattgtaaatgtatcttaatattccaatttttttttttttttttgagatggagtctcactctgtcacccaggctggagtgcagtggcgtgatctctgctcactgcaagctccgcctcccgggttcacgccattctcctgcctcagcctcccaagtacctgggactacaggcactcgccaccacgcccag

SEQ ID NO: 101782 - DNA, 554 bp, Homo sapiens
gagccgtgttagcataatgctatcagaacaggcagtgagggcatgtcacacatcgtagtgacaacgttaatcaaatagattattaaatttaaaaagttattgtatattgatgacgttaagacattartataattgctaatagactttttagaatccttgaagatcattatttattctgagcaaatcaaaacaaacttctgtagattatgtatgcagggaggcaaataaatattcatatttcatgttttaaaatattcatattggccaggtgcagttggtctgtaatcccaacactttgggaggccaaggcaggtggatcacttgatcccaggagtttgagaccaccctggccaacatggtaaaaccctgtcctactaaaaaataacaaaaattagctgggcatggtggtgcacgcctgtactcccagctacttgggaggctgaagcaagagaatcacttgagcctggcaggcaaaggttgcagtgagccaacatcaccccactgcattccagcctgggtgacaaagcaagactctgtctcaaaatgaaataaaa

SEQ ID NO: 101783 - DNA, 554 bp, Homo sapiens
gagccgtgttagcataatgctatcagaacaggcagtgagggcatgtcacacatcgtagtgacaacgttaatcaaatagattattaaatttaaaaagttattgtatattgatgacgttaagacattagtataattgctaatagactttttagaatccttgaagatcattatttattctgarcaaatcaaaacaaacttctgtagattatgtatgcagggaggcaaataaatattcatatttcatgttttaaaatattcatattggccaggtgcagttggtctgtaatcccaacactttgggaggccaaggcaggtggatcacttgatcccaggagtttgagaccaccctggccaacatggtaaaaccctgtcctactaaaaaataacaaaaattagctgggcatggtggtgcacgcctgtactcccagctacttgggaggctgaagcaagagaatcacttgagcctggcaggcaaaggttgcagtgagccaacatcaccccactgcattccagcctgggtgacaaagcaagactctgtctcaaaatgaaataaaa

SEQ ID NO: 101784 - DNA, 633 bp, Homo sapiens
tttgaaatggttattttcaatgataaaagtatgtgtagtttaaattttagtaagacgttgccaaatttctctaaaaactatgccaatgtacactcctaccagcctgtgtacaaaaatatatttacactcatcctcaacagtcctggacatcacacacatttaaaagttttgccattatgataggcaacaaaagatacctcatgttaacaattagacttttctgattactaatgaggggattggagatttttttcttatgctcattagccatttgtgtttctttgaattacgtattttattttccctgttgagttatttgtgtttttctaattagagcttatatgcattttttcrtgatcttttgctaatctagtaaattttcttacagaaatgtatagcaagtttcatttttatgtggttctcactatgtttgactagatttttgagaaggtcttaacacctttaaattataagatgattattctgtattgttcccattattttgcatttatctctttaatccacctagaaatgattttgtgtgatgcagaaatctaactttctaaaacatttctagataaaggtctgttttccaaacactacttgttaaaaacttcagtctaaacccaacca

SEQ ID NO: 101785 - DNA, 636 bp, Homo sapiens
ggtgtgatctggctgctagtaatatcacaaataacaacagctcgtatgatgaaatgatatttggaattgaccactgtgttcaattcttacttaccctatctcccttggtagggtaaataagaagaattaccattctttctgtattcctcatcccaaagcaagtttttagatcagaaccagagtaccgtatgagaaattctttgttgttcaatttaaagatctgtggtcaaggtgttaagagcaagagatctggtccttcccttgactatctgaaggttccacagtaaagcagataggcagagatagagtctacaaagggagaatgctgactcattgggagcaaatgtcctgcagctgctagtgccagggagcagcacaaagccayggaagggctttctgggataccagccttttctgtttgagaaagcactgtgcatcgcttggaaaattagatgacccttctcactgtagcctgatgaggatgacctgctgacaatatctagatcattgcccattgcccagcaacatgtcagttccctgtttgttcatcccatggagaccttttccacccattttcaatagttcagagcactcttaagcctctggaatcgggtgtgtggccctggaaatagaagg

SEQ ID NO: 101786 - DNA, 572 bp, Homo sapiens
caaggccagtattcatggggcagccgggccctctatgcctcggctgaggttaagctgtttggggtttctttgtatattaaaggatcatctggttaaccccaaaacccagggccgccagaactgttcagactctgaccccacagaggcagggtgggctcctggagygcaaggaaacccactgccttcatgataataacaacaccattttttgagcctccgcaacgtcccaggtacttaccccaaacatctttaagcctgagcctttgaagttcttcttatttttatccccctatcttataagggaagaaaaggggactcaaagaggttaagtgatttgcataaggttttctggccacaccgcggtgaagccaaaattggaacccaggtctgtctccaaagcgaccctattttctatatcactctgcctcctccctcatcttctatttcttcttcttaaggatgcattatcacaaatgtggcttccctaccacaccggatatctagagtagagtcctttcttgttctgtctctgcatcttcagccactatcagggtacccagcaccaacagggg

SEQ ID NO: 101787 - DNA, 475 bp, Homo sapiens
cacagcctgatttcattgagacacaatctgatttccaaactgagcttcctgtttgcttagccactgactgggatgcagtgggacaggcccccaaaccatccaaggcatgggccgcagtccacagttctcttccctgtttytggcaagcacctgtccatatgtcatgaggagaatgagacaggagtatggacttcaaggaggcaccatcttctcacactagtttctgaatttttagatgcttttagtatagcacttttagtataggactgtgcaagagtagccttcctaacatcattgccaatgactacccttcccaagccttctatcctggaacacagccctaccgtccccaattcatgttgctccttttgacactcctgtcttggctcatcctgctttcttcatctgaattgcctttctccattattccatgtccaacttctgcccatccttcaaaacccaggttaaaagccat

SEQ ID NO: 101788 - DNA, 552 bp, Homo sapiens
ctcacactcatttccttcccggagtcagtctcatttgctttccctaaaagccgctggaggagccaatatgtacgtgatgaatatttcatctcctgagcgtgggtttgcgggagagctgtgatcccctggggagggagcactgcccagccgtgcctgggaagaaggggggctgagaggggcactggcaataggctctgaagaaggcaggttttagggtccacccacctgctcctgccgacaccgttggccttgggaggctcagagaggtcagggcagccygaatctgaggcacaaatacttcgtgccccatggggctcccagtccttcgttggggttcgcctgtggcaaggggcagatgttttcctgagcccagagatgcatgaaaaatggggaaaatgaggcttagggaggctgagagggagaggggagagaacaataccagggttctgaggttctgaggtttgcgcacccacgaacccacactcaggagatgtccaggctgaaggtgccactggcatgactatggctgaaggtgtggagcacatcctggtc

SEQ ID NO: 101789 - DNA, 552 bp, Homo sapiens
ctcacactcatttccttcccggagtcagtctcatttgctttccctaaaagccgctggaggagccaatatgtacgtgatgaatatttcatctcctgagcgtgggtttgcgggagagctgtgatcccctggggagggagcactgcccagccgtgcctgggaagaaggggggctgagaggggcactggcaataggctctgaagaaggcaggttttagggtccacccacctgctcctgccgacaccgttggccttgggaggctcagagaggtcagggcagcctgaatctgaggcacaaatacttcgtgccccatggggctcccagtccttcgttggggttcgcctgtggcaaggggcagatgttttcctgagcccagagatgcatgaaaaatggggaaaatgaggcttagggaggctgagagggagaggggagagaacaataccagggttctgaggttctgaggtttgcgcacccacgaacccacactcaggagatgtccagsctgaaggtgccactggcatgactatggctgaaggtgtggagcacatcctggtc

SEQ ID NO: 101790 - DNA, 511 bp, Homo sapiens
ttttcataaggaaatttccttraaatgcagccacacttatgccctttataattcacaaggcctaaaatatttactaactggctctttacaaaaagagctgtccaattcttggttcagtagagctaagatcctctgttgtattttagtaagttttacccagtatattgaaaagctgacacggaacatgaatccccatgtgcaatcccttggcaatattcagattaatttgaggatctggtatttcagcactcacacattgacagcaaaaaacaaaaatttaataactagaattctgttgctaacaaggtacagtgtcaatgtagcatgtagctagcttccttttgtaactcagcagatattatgagaattccaacaaaactggcttaagatgtgtcatcaaactaaaggctttaaatagactttaattgtgaaataatcagtacactcctggtctaacaacttcttttattaaaatgagtgcatgctacattattttctgggtatgacaatt

SEQ ID NO: 101791 - DNA, 511 bp, Homo sapiens
ttttcataaggaaatttccttgaaatgcagccacacttatgccctttrtaattcacaaggcctaaaatatttactaactggctctttacaaaaagagctgtccaattcttggttcagtagagctaagatcctctgttgtattttagtaagttttacccagtatattgaaaagctgacacggaacatgaatccccatgtgcaatcccttggcaatattcagattaatttgaggatctggtatttcagcactcacacattgacagcaaaaaacaaaaatttaataactagaattctgttgctaacaaggtacagtgtcaatgtagcatgtagctagcttccttttgtaactcagcagatattatgagaattccaacaaaactggcttaagatgtgtcatcaaactaaaggctttaaatagactttaattgtgaaataatcagtacactcctggtctaacaacttcttttattaaaatgagtgcatgctacattattttctgggtatgacaatt

SEQ ID NO: 101792 - DNA, 511 bp, Homo sapiens
ttttcataaggaaatttccttgaaatgcagccacacttatgccctttataattcacaaggcctaaaatrtttactaactggctctttacaaaaagagctgtccaattcttggttcagtagagctaagatcctctgttgtattttagtaagttttacccagtatattgaaaagctgacacggaacatgaatccccatgtgcaatcccttggcaatattcagattaatttgaggatctggtatttcagcactcacacattgacagcaaaaaacaaaaatttaataactagaattctgttgctaacaaggtacagtgtcaatgtagcatgtagctagcttccttttgtaactcagcagatattatgagaattccaacaaaactggcttaagatgtgtcatcaaactaaaggctttaaatagactttaattgtgaaataatcagtacactcctggtctaacaacttcttttattaaaatgagtgcatgctacattattttctgggtatgacaatt

SEQ ID NO: 101793 - DNA, 511 bp, Homo sapiens
ttttcataaggaaatttccttgaaatgcagccacacttatgccctttataattcacaaggcctaaaatatttactaactggctctttacaaaaagagctgtccaattcttggttcagtagagctaagatcctctgttgtattttagtaagttttacccagtatattgaaaagctgacacggaacatgaatccccatgtgcaatcccttggcaatattcagattaatttgaggatctggtatttcagcactcacacatkgacagcaaaaaacaaaaatttaataactagaattctgttgctaacaaggtacagtgtcaatgtagcatgtagctagcttccttttgtaactcagcagatattatgagaattccaacaaaactggcttaagatgtgtcatcaaactaaaggctttaaatagactttaattgtgaaataatcagtacactcctggtctaacaacttcttttattaaaatgagtgcatgctacattattttctgggtatgacaatt

SEQ ID NO: 101794 - DNA, 605 bp, Homo sapiens
taaacaataaaagaggaagataggaacaaatgatagacaaaacaatcactaaacaattaataaaatgaaaggagtaagtcctcacctatcataaaaactttgaatatacatgatttaaattccccaattaaagatatagatagaatgaatggattacaaaaaaagaccaaataatatgctgtctacaagaaactcactttacctgtaaagacacatagactgcaagtgaaaggaaggaaggatattccatgcaaatggaaaccaaaagcacacagaagtagctatatttatatcagacaaaatagatcttaagtaaaaaaaaaaaaaaawaaataaaagagaaagagaagggcattatataataataacaggatcaattcagcaagaggatacagcagtcataaaggtatatatactcaatacctgagcacacagatatataaggcaaacatcactgaaactaaagagacagatagcctccagtacaataatagatggggactccatagtctgactttcagcattgaagggatcatctaaacagaaaatcaacaaagaaacatcaaaatgaacctgcactatagaccacatggacctagcagaca

SEQ ID NO: 101795 - DNA, 533 bp, Homo sapiens
aaaaaaacacccaacaaattaggcatcaaagaaacagacctcaaaataataaaggccactctataacaaacccacagctaaaaccatacagaatgggcaaaagctggaagtgggggctaagtgcastggctcatgcttgtaaccccagcatgttgggaggcgaagacaggagaatcacttgaggccaggagtctgagaccaggctgggcaacacagtgagaccttgtctctataaaatagtaaagaaaaaaattaaagaaaaaagaacaaaaatagttggaagcattccccttgccaactggaacaagacaaagatgcccactctcactgtatgtattcaacatagtactggaactcctagccagagcaatcaggaaaaagaaagaaagaaaaggcatccaaaaaggaaaagaagccaaactatctctctttgctgatgatatgattctgtacctaaaaaactctaaagagtttgccaatttatcctggaactgataaatgacttcagtcaggacacaaaaatcaatgtaaaa

SEQ ID NO: 101796 - DNA, 533 bp, Homo sapiens
aaaaaaacacccaacaaattaggcatcaaagaaacagacctcaaaataataaaggccactctataacaaacccacagctaaaaccatacagaatgggcaaaagctggaagtgggggctaagtgcagtggctcatgcttgtaaccccagcatgttgggaggcgaagacaggagaatcacttgaggccaggagtctgagaccaggctgggcaacacagtgagaccttgtctctataaaatagtaaagaaaaaaattaaagaaaaaagaacaaaaayagttggaagcattccccttgccaactggaacaagacaaagatgcccactctcactgtatgtattcaacatagtactggaactcctagccagagcaatcaggaaaaagaaagaaagaaaaggcatccaaaaaggaaaagaagccaaactatctctctttgctgatgatatgattctgtacctaaaaaactctaaagagtttgccaatttatcctggaactgataaatgacttcagtcaggacacaaaaatcaatgtaaaa

SEQ ID NO: 101797 - DNA, 533 bp, Homo sapiens
aaaaaaacacccaacaaattaggcatcaaagaaacagacctcaaaataataaaggccactctataacaaacccacagctaaaaccatacagaatgggcaaaagctggaagtgggggctaagtgcagtggctcatgcttgtaaccccagcatgttgggaggcgaagacaggagaatcacttgaggccaggagtctgagaccaggctgggcaacacagtgagaccttgtctctataaaatagtaaagaaaaaaattaaagaaaaaagaacaaaaatagttggaagcattccccttgccmactggaacaagacaaagatgcccactctcactgtatgtattcaacatagtactggaactcctagccagagcaatcaggaaaaagaaagaaagaaaaggcatccaaaaaggaaaagaagccaaactatctctctttgctgatgatatgattctgtacctaaaaaactctaaagagtttgccaatttatcctggaactgataaatgacttcagtcaggacacaaaaatcaatgtaaaa

SEQ ID NO: 101798 - DNA, 533 bp, Homo sapiens
aaaaaaacacccaacaaattaggcatcaaagaaacagacctcaaaataataaaggccactctataacaaacccacagctaaaaccatacagaatgggcaaaagctggaagtgggggctaagtgcagtggctcatgcttgtaaccccagcatgttgggaggcgaagacaggagaatcacttgaggccaggagtctgagaccaggctgggcaacacagtgagaccttgtctctataaaatagtaaagaaaaaaattaaagaaaaaagaacaaaaatagttggaagcattccccttgccaactggaacaagacaaagatgcccactctcacygtatgtattcaacatagtactggaactcctagccagagcaatcaggaaaaagaaagaaagaaaaggcatccaaaaaggaaaagaagccaaactatctctctttgctgatgatatgattctgtacctaaaaaactctaaagagtttgccaatttatcctggaactgataaatgacttcagtcaggacacaaaaatcaatgtaaaa

SEQ ID NO: 101799 - DNA, 418 bp, Homo sapiens
tgaattctagtgttctgttgcattgtagggtgaatatggttaactaatatttttttttttttgagacagagtcttgctctgtcacccaggcttggcgtgcagtggtgcaatctcagctcactgcaatctcygcctccggggttcaagccattctcctgcctcagcctcccaaacagctgggattacaggtgtgtgccactacacctggcttggctagctaatatttaaaaagctagaggagaggattttgaaagttcacaacacaaagaaatggtaaatgtttgaggtgatggaatatattaattagcctgatttgaccattatacattgtttacacatatcaaaatatcactgtgtataccataaatatgtacaattatacaggtccacaaaaaatcaaaggaagccaggtgtggtg

SEQ ID NO: 101800 - DNA, 451 bp, Homo sapiens
ttgcattgtagggtgaatatggttaactaatatttttttttttttgagacagagtcttgctctgtcacccaggcttggcgtgcagtggtgcaatctcagctcactgcaatctccgcctccggggttcaagycattctcctgcctcagcctcccaaacagctgggattacaggtgtgtgccactacacctggcttggctagctaatatttaaaaagctagaggagaggattttgaaagttcacaacacaaagaaatggtaaatgtttgaggtgatggaatatattaattagcctgatttgaccattatacattgtttacacatatcaaaatatcactgtgtataccataaatatgtacaattatacaggtccacaaaaaatcaaaggaagccaggtgtggtgtcacattcctgtggtctcagctacttgggaggcagaggcaggaagaattc

SEQ ID NO: 101801 - DNA, 578 bp, Homo sapiens
ttggaaatggaagatatgactggcttctggatatattcttcaggtactcctgacaagatctgctgacagattagatgtgaggtgtcagagagagaggggagtcaatgatgacaccttagtttctagcagagcaactgcaagagttgccattaatgcaagtaggaaagaccatgtgaggggtaggtatgagaaagaatatcggtaccccaatcttggacctggtaagtttgtgatacccaacagttcgtgaccaatcaaacagagatgtcaagtaggcaggttggtatrgaagtctggaattaaggagagagatctaggctggagacacgcatttggaaatcattagcacacacaaggtagtaaaagtcatgagaaagaagattgaggactgagtcctgggacatatcagtcctgggacatatcaatgtgtaaaaggtgggatatgagaagaaagcaaaacagactatgacagatggactggaaaggcaggaagaaaagccaggtgagtgagtgagatcctgaaagccaagtgaagacactgttatggaggagagagttttccattgggtccaatattg

SEQ ID NO: 101802 - DNA, 561 bp, Homo sapiens
ctggcttctggatatattcttcaggtactcctgacaagatctgctgacagattagatgtgaggtgtcagagagagaggggagtcaatgatgacaccttagtttctagcagagcaactgcaagagttgccattaatgcaagtaggaaagaccatgtgaggggtaggtatgagaaagaatatcggtaccccaatcttggacctggtaagtttgtgatacccaacagttcgtgaccaatcaaacagagatgtcaagtaggcaggttggtatagaagtctggaattaaggagagagatctaggctggagacacgcatttggaaatcattagcacacacaaggtagtaaaagtcatgagaaasaagattgaggactgagtcctgggacatatcagtcctgggacatatcaatgtgtaaaaggtgggatatgagaagaaagcaaaacagactatgacagatggactggaaaggcaggaagaaaagccaggtgagtgagtgagatcctgaaagccaagtgaagacactgttatggaggagagagttttccattgggtccaatattgct

SEQ ID NO: 101803 - DNA, 552 bp, Homo sapiens
ttttcctttcatctcatttcattctgccaaattaaatacatcagcatagatgcaataaaaaggggagtaataatgaatttttgacctagagggagcaaccatgagcccatccaccctcactctgcggctgctgacatgcagagaaaaacaccagcagtttttactcttgcttagagaaaacactcaggatttatattctacctgcagcatataagtctatgatcagacctgctttggggaatagattcctgcttccttctttacttctgtttgagttttcagcataataagcaatttaatcagcagctccactagaatgcttcagatatttgcatatcagcactacttgtctctctttctccttattaaaattggcatctaccatgtcactacacaggactgtagagccaagcatcctgagccaataacagcaaaatatgacttcttgctcaacagcctaaaccattacctggtctctgctgcttgtccttcagacctgtattttaccagctgtagaaaatctatrctggttttcccctatccaaaacaaac

SEQ ID NO: 101804 - DNA, 516 bp, Homo sapiens
cttaaatcgtaactccactgcctccctcttacaaggacttctgtgattatattaggcctacmtgggtaattcaagataatctccacatctcttgatccttaatttaatcatatatacaaaatcccctttaccatgaaaggttccggagataggacatggaaatcttaggaggtcatgatttggcctactgtatcatcttaaaataacaataaatagccttctcatgtccaattctttttttaattttattattattatactttaagttttagggtacacgtgcacaacgtgcaggtttatatatgtatatatgtgccatgttggtgtgctgcacccattaacttgtcatttagcattaggtatatctcctaatggtatccctcccccctcccccaatctcatgtccacttcttaaatcccatttctttattcttttttctctcagctttggtcagttcttcctcttcttattgtttatagtaatatcacatacaatcatgcaccacataatgccat

SEQ ID NO: 101805 - DNA, 516 bp, Homo sapiens
cttaaatcgtaactccactgcctccctcttacaaggacttctgtgattatattaggcctacctgggtaattcaagataatctccacatctcttgatccttaatttaatcatatatacaaaatcccctttaccatgaaaggttccggagataggacatggaaatcttaggaggtcatgatttggcctactgtatcatcttaaaataacaataaatagccttctcatgtccaattctttttttaattttattattattatactttaagttttagggtacacgtgcacaaygtgcaggtttatatatgtatatatgtgccatgttggtgtgctgcacccattaacttgtcatttagcattaggtatatctcctaatggtatccctcccccctcccccaatctcatgtccacttcttaaatcccatttctttattcttttttctctcagctttggtcagttcttcctcttcttattgtttatagtaatatcacatacaatcatgcaccacataatgccat

SEQ ID NO: 101806 - DNA, 399 bp, Homo sapiens
caggacacaataattgttatcaaatttatatattagagttcttttcaagatgtcttttaaaagaagagttttgatgctaaaacaaattaggcaaataaatatcagtgattttggataattatcttttaaaaattatttctacagtctgaatatgtcccccaacatttatgtgttgaaaacttagttgccagtgcaatagtgttgagaggtaggacctttaataggtaagtagattatgagggctctgccctcctgaataaatatcactttcatgggagtgggtttgttataaaagcaaggtcarccctcttgctctcatgctcttacaccatgtgatgccttctgccatgtcatgatgcagcaagaagggcttcaccagatgcagaccctcaaactcag

SEQ ID NO: 101807 - DNA, 527 bp, Homo sapiens
ttgtaaatatatttctagagacatgtacaacaatatttataacagtatcgtttataaaaaacaaagacctaaaaacaactggactaactattgacaggagaatggccaaacaaattgtggtgtgtttatttatttaagtataatacagcagtaaaaatgaaataaagctatatccagcaatagggaygagtatcataacataatgttgagagaaaaaagcaggttgccacataattcatatattatgacagaacttttacacacagtaaaacacatcagaaactaaataatatattgtaaagaatctatatgtagccaaaatgtaatgaaatgcgatgaatgataaatgcaaaatctggagtggaggtttcctccaaagggaatgaaaagagatataatcagatagggacaccaaacaggcttcaccaatattaacaataatctatctcttaagctgtgtggtaggacatgggtatatgtcctaattatttcatcttatatttaagttatatatattatattatatg

SEQ ID NO: 101808 - DNA, 325 bp, Homo sapiens
aaacctcaaaccttgaatttaattttaaatgattccagattagtatttcctttggggacctagcaaaagcaaaggcaaatcctccctcaatgaagacctctkcatcctaagcctcaaaaatctccacaagtaattcttcaaaggcagtgagcaaataagcacatagggagagaaggcaccgtgagtaagaatcagcaaaaacaacagacagcagaaacagatgcacaaagcctccagagattgaaactacctgtcaggcacatgttaaaaaacaagcctgaaaatatttccgggaatgtaaaaagtgatctaatggatttaaagc

SEQ ID NO: 101809 - DNA, 469 bp, Homo sapiens
gagacgacttgcttagcacagctgcccctgccaggtagtgactttatgccaccccaccattcatttcatccttccagtcatgtacactcactcactggtttctttcaaatcagtagtcacaaaatctgatgtctgcagtggccgatgagtaatgtaaatgagcaaggcaggccaggtgtaagacaatagggaatggtggaaactgtaaaaaagttgaacacgtctcatcttaaaggaaaagaagaaatattagrctacttttgccagatagtgtcatctttccagagaaagcccaaatctgaatttttacacaatatcttaaatgttggccactaatttaaaatttaaagcctgtgcaatgctaacaaaatacacctataggccagatctaatctcaggagtttccagagtgtgatctcaggttcaaattttatataaatatccatgtctctcatgcttcagaagaggg

SEQ ID NO: 101810 - DNA, 590 bp, Homo sapiens
atggtgaataagtctcacaagatctgatggtttaaaaagggaagtttccctgcacaagctctcttctcttgtctgacaccatgtgagacatgagtttcaccttctgccatgattgtgasgcttccccagtcacacagaactataagtccattaaacctttcttttgttaattgcctagtctggtgtacatctttattagcagcataaaaatggactaatacagtggggaagtaacttgttatagattatataacctacaatttccaggcccttgaacccagatattcttcctcctcatgcaccctgtctttattaaaccctcttgaaaccacaaacatatatcaagcccaggttacaggccatgaacagtgggagacacattacatgcattccctcaccacaacctcacgagacaagcagtagtatccccatttctctgatgagaaaaatcaaggctcaaaaatattaactcatttgcccaaggccattcagctagtaagagacaaagccaaatctacaattccaacaatgtcttcaaagccagtccctttaaccactcggctataatcctttcatttaaacccttacaa

SEQ ID NO: 101811 - DNA, 581 bp, Homo sapiens
gaagacatcactatggatattacagwtataaaaaaagaaatgagtagtatgaacaactttatagttaaaaattaaactgcattcttgccaaaatagttgttcatactatgtagtccagcatcaaaaaattcaaaataaaatttttaaaatgacatcatttaaaatagtttcaaaaacatcaagtatggaaaattgtgatgaaatgaaaaaaatttctagaaaaataaactaccaaacctgagccaagaggaaatagaaaatctgattagcaataaagaaactaaatcaaatataaaaactatcccacccaaaaaagtctaaacccagatgaccttattattaagccttatagatatttaaaggaaaattaatattaaatttatgtaatattttccagaaaacaggaaagacgaatttttcccgattcattttatagtgccagaatagcctgataaggagttatactacaaaaaagaaaaataaaatataatatccctaatgaatagagggacaaaagtaaaaaacaaaacaaagtataaaaaataaatattctagattagattgaacattaacataattat

SEQ ID NO: 101812 - DNA, 545 bp, Homo sapiens
tacaagtatccagtgctgttgatatctactaggtaatcagaaaatatctgttggacagatgaagaggaagtgaatggagttccacattccagttaaatgtgatgaatgtatatttacttttactccttcccaaaaccacactaaaatgacaaagagatttaaaaaacaagtctagacgggttgataggtgcagcaaaccaccatggcacatgtatacctatgtaacaaacctgcatgttccgcacatgtatcccagaacttaaagtaaaataagaaaaaaataaaaaaataagaaaaaaaaacaagtctaagtcaacaaagacacatagattaaaacagcatagccttgatctctgcgatttgtaaatgcaaccaatatacctcgtattggttatcacytgctgcataaccaaccaccccaaagcctaatggcttaaaataaaaatcattttacttgctcataatggtgtgagtcagtcatttgggctaggctcaggtaggtgggtctactgttggtattaaatgagttcattcatttgcagtca

SEQ ID NO: 101813 - DNA, 540 bp, Homo sapiens
aattcttccctctcgcagacccagagagatgacatttttttctgcattttctgccatgaacatgtgtttatagtctctctctctgtctgtctgtctgtctctctctctctctctctctctctctctctctctstgtgtgtgtgtgtgtgtgtgtgtgtgtgtgtgtttaaagcaggctgagcatgttgactggatcaggcacatgggtggaggcacaagagacacagaagcccctgtctctggcttccagtctggctcaccatcgcctgggagacatgaaaggcagagcaaagatatgacacagctcagctcctactcatctggtacaaaccattaaaatgatgcaagctctgagcacaaggagacaatgtacatttttcacgctgattgtttcctgcgagtatatgaccaggctgagcagatcctatctcattcttacccagtgttttaatttttaatttttttttttttggtgaaaagaaaaacaaggtgtcaatccacactctttctttgtgcagcccctccatctgtcattctctg

SEQ ID NO: 101814 - DNA, 624 bp, Homo sapiens
tttgtgaccattaagtgagataaatcatgtaaagaccttagagtagagcctagcacaaagtaagtgttgaataaatataagcatgaattatctaatgattawcctgaactccataaagtttgtagaactatctgactggtaatctttattatgtccactattggtgaacatgtcatatgagatagttttatatcattttcttaatatagaggaataggtcagatataaaagctaaagccaaatatacacattaacatatatacctacacaaaaattgttatattttgttgaatggattgcaccttgggccacattatttcttctattatttaactccttaattatgtgttaaactgtgagtctcaccttttttgcaaagatgtagagaaggtatcagtaatggaatctttatattctgaaaataaatataacaggtggttatgttttacttgtgttatttcactaccatcttgaaaagcattcagataattttccttgaatatggggaatttgtatttttttaaatacgatattcattcagtacttcaatagttttatgtagatttccttggtcattatatggagcctcattgtgtccatgcagatgctaaagctattcctgac

SEQ ID NO: 101815 - DNA, 428 bp, Homo sapiens
aaaacccttcaaaacatcaaagaatccaggagctgtttttttgaaaaaattaatacgatagactgctagctagataataaakaatagaagaatcaaataaatacaatcaggaatggtaaaggaatattaccgtggtctccacagaaatacaaacaaccatcaaagaaaactataaaaacctgtatataaactagaaaacctagaagaaatggataaattcctggacatatacaccctcccaagactgagccaggaagaaattgaatccctgatgagaccaataatgagctctgaaattgaggcggtgataaatagcctatcaacacctccccaccctccaccccccaccctccaaaaaaagcccaggaccagatagattcacagcttaattctaccagaggtacaaagaggagctggtaccactttta

SEQ ID NO: 101816 - DNA, 486 bp, Homo sapiens
gcattgataaagaaaaagcagagaacactagaacaaagtaaatggcataaaatatgaatggtgaggaagtatgaatctcttgcagaaagcaatgccatgaaatgtgggtattgatggcacatctcacctcttgcagccacaatagcctcctggtagaggagtcagtacaaagtaatgtggaaactgtgaagagagcaagataataatgggccttttgtagtaggggatgctcatggcaagaaattgatgggaggtcatcggaggggggctgatggttgtggatgtgaaagtagggcccaccttctctgcagcaattatctcgaagttttgtcaaagaaatatatctgattaggatgcctgcttaycagttctattttattaacagcaatgcagaatggagcctgtaggatttagtgagacctacgaacaatttgtttacttggatgttccacaggtccttcaaattcactgttttaagcagaattc

SEQ ID NO: 101817 - DNA, 530 bp, Homo sapiens
gagaatcaacattgggacagtcttgtcagtggacatagtaataatgctcaggcactggaaacgttctaaagcattgatgctgcagcagcaatctaccagaggagcaggatggctggcaagagacggtggctgcctggggacatgaaagccagcaagcataccagacttccagacaygtgaagatgcctagcagaagataactggtttatgacatagctcttaggactcctagaaacatgtaaggaaagcattgcaggatgccaaagacaagttttagagggtggagagtatcagtaacaatgaggagtaattttggttatgttcatattgatttatataaccaagctaatagaacaccagtagagtcgtgctagtgctcactgcctgttgagcagtggtaatgtggaaatatggtaatatggtaaataatttacatggcttttctgaaatgattttataagtactctctgaattaagtgttgttttcctgctttacagatgaagaaacaaaggcacaaaaaaggcggaat

SEQ ID NO: 101818 - DNA, 530 bp, Homo sapiens
gagaatcaacattgggacagtcttgtcagtggacatagtaataatgctcaggcactggaaacgttctaaagcattgatgctgcagcagcaatctaccagaggagcaggatggctggcaagagacggtggctgcctggggacatgaaagccagcaagcataccagacttccagacatgtgaagatgcctagcagaagataactggtttatgacatagctcttaggactcctagaaacatgtaaggaaagcattgcaggatgccaaagacaagttttagagggtggagagtatcagtaacaatgaggagtaattttggttatgttcatattgatttatataaccaagctaatagaacaccagtagagtcgtgctagtgctcactgcctgttgagcagtggtaatgtggaaatatggtaatatggtaaataatttacatggcttttctgaaatgattttataagtactctctgaattaagygttgttttcctgctttacagatgaagaaacaaaggcacaaaaaaggcggaat

SEQ ID NO: 101819 - DNA, 592 bp, Homo sapiens
ctgtgattgactgtggcagcctctactggttatttactcagtagcctttaattcctccccacacaaggttggggagtgggcacatagaggaatttgtccaggttggcaggggctcatacaggaatttctttgctttctctattggcagaggaatttctttgcttcccctatttcccttgtagccagatcacaggcaaagacccaatacatcaagagcaatctgctagaggtatgggaaggaaattctcccctctcctttagatatagttgtgtacaagtaggaagacttgggccacagacattttatgaaaatagtgaaattagtcaaataataaccaccaccaygttgagaggtataggctacagaaacagaaaatacttaagtgaaccaaatatttgtaaggaaggagtatagaaagaaaaagagcttaatacccagcattattccaaatggttgatactaaatacgtatgttgtgggatagtttattattaatgttaccagttttcttctctgggtattgagtaccagaaaggaaggaattatgactttttgatccttgtatccatagaatcaaaaacagtacctgcaa

SEQ ID NO: 101820 - DNA, 467 bp, Homo sapiens
gtacacagctgtgtgactcacactcctatcaagacacaaagtacatccataactcactggaaactccctcatgcccatgccagcccttcccaaccccggtccccaccacactctaccctggaagcaaccactgttctgacacctatcataatagatttgttttgcctgatctacacctttatataaacagaatggtacagtgtggatcttggggtctagcttctttggctcatcatgattatgtgtatgtgtgtggcttatccatgtggtggggtgtgtccatggtttgttccttttatagatgagtttgtcttttctgcctttgattggcacctgaaccgcttcaaggtgctaacaactctgaataagctgctataaagtttttataaaagtctaattgtggatgtatgttttcttytctcttgggtaaatatatgagtggaattgctgggtctcaggattaactt

SEQ ID NO: 101821 - DNA, 565 bp, Homo sapiens
agtagaactgtgtataccctttatcatattagccactttattatttattatattaatggggaaactgaggttcagaggaacagtgaatgcactagaaaccaggtttgttaatatgcttttcctaccatgccccctgtgctttgagttgcctttgcattctaggagtcaaatttgctaatatggcagaggatgggtttattcagaagaaatctagaaatacaccatagaccctagggttgtttccatgccaactcacctgattatttagtaacaaatagactcccaaaccaaagtacattgctcatcccccaccctcaaccttggggataactgattaagctagataccccattagcaaatcacctcctatgtggcatcaaatgtgttcccagatggttcagaagagcatagtcacttttcaagatcagggagagcagagcaggacggcagttcaggataggcgtgtccagcttaggcagcctctctccatgttccaaccatgctctttttccttcttgatcctgtgtgagttttktttttttttttttttttttttttcacgaga

SEQ ID NO: 101822 - DNA, 570 bp, Homo sapiens
cattttacctgcagtcatagacataggaatttaacccaaagtgaaatgagcaaaacatcacagtttggccrctgcatgaaaatccatttgataggtgaggggaaagccaaaatcattctgggtgcaatatattctaccaaaaaaaattaacgaggcagatgccatctcagatcaagccaaatttgctatgcgttcccctgtggcaggggagaggaaaagaaccaagaactttcaaattcctaaatcagaatcaaagctcagagatatctagtattttgtttatatgaaaatttaccacattttcagtgaaagctatttaactttccaaagttaatgtccaactttatacattaaattaccaacattttaaatgaaaatttaaaaaaaacttcattttagaaacagtggcttactctcactgtgtaaagtagaaatttcccaaagcaaattttattttatttttaaaatttttgtctttcaaggcagtattttggtctgtcacacaggctggagtacagtggtgtgacactagtttactacagccttaaactctcggactcaagcaatcct

SEQ ID NO: 101823 - DNA, 570 bp, Homo sapiens
cattttacctgcagtcatagacataggaatttaacccaaagtgaaatgagcaaaacatcacagtttggccgctgcatgaaaatccatttgataggtgaggggaaagccaaaatcattctgggtgcaatatattctaccaaaaaaaattaacgaggcagatgccatctcagatcaagccaaatttgctatgcgttcccctgtggcaggggagaggaaaagaaccaagaactttcaaattcctaaatcagaatcaaagctcagagatatctagtattttgtttatatgaaaatttaccacattttcagtgaaagctatttaactttccaaagttaatgtccaactttatacattaaattaccaacattttaaatgaaaatttwaaaaaaacttcattttagaaacagtggcttactctcactgtgtaaagtagaaatttcccaaagcaaattttattttatttttaaaatttttgtctttcaaggcagtattttggtctgtcacacaggctggagtacagtggtgtgacactagtttactacagccttaaactctcggactcaagcaatcct

SEQ ID NO: 101824 - DNA, 625 bp, Homo sapiens
ttttggtcacccctagtcccagcccctagcaactgctcttttctgtctctctaattttaccttctgtataaatggaatgacagtatgtagccttttgagtctgaattccttcacttagcacaatgcatctgagactcatccatggtgtgtgtacagtaggctgttaggaatttaagttcgattctaaaagttacaggaacaagccaaatactgtctgtagaagttcatttttaggtgggtgggttctaaaaaaatagtctggttttattttcagtcagagggtgagattgtcagggaaaagactaaagcaagagtacccagaggggaggtagcttcaggggagttttctctgatatgtaaatgcacagtcttttatgaaacagaatggtctggaattgacatctgcctctcctcagagtctagggttaaagaamagtggggacagggggctttcttctgaaacacttgctctgaaagtaaaagaaagatgttgacatgggtaaggctgcccttgggccagaattacagaccaggtcatgataggagctaagaaagttgctttccagctcttcctttttttttttttaatgaaaaacaagagcctgctgaatttttaactactagc

SEQ ID NO: 101825 - DNA, 561 bp, Homo sapiens
ctttggtcagttttaagcccttggaaaaaaatttttttttcactctctggttactaaggaaaagtctgcatttcaatcattgcatgtgacagactgccacggttactacttgagaccgtcagtggggcagttactactgtcactacttgagaccatcattacaagagtgaatgaagggacgaacatagaaatgaaaacttaagacaacagaaactgttttaaaggaaggggccagaggaagaagaagagagctccctgcttctagtgagcaaaggcagcccctgagcttctacagcccttcgtatttattgggtagaaaaagcaaggaagaggaggtaaygattggtcagctgcttaactgatcacaggttcatattattactaacaggcttcagatgtacctaatcacaggaaacactgcgcttggggtgtgactgccctcagcattccttctgggtggcagacgcagtttgacagtttgccaacattctgcatttatgagaacagtttgctgtttactcatatagcctccagtggtatactgagttgatcacgaccctc

SEQ ID NO: 101826 - DNA, 555 bp, Homo sapiens
tccttctgtgactggcttatttcacttagcataatatcctcacggttcatttatattgtcccatgttataaaatttccttctttttaaagrctgaataatattttgttacatatatataccatatttcctttatccagtcatccattaatggacagctaagttgcttctaaatcgtggctgttgtgaatagtgctgcagtgaacgtgagaatgctaatgtcttatcacaattcaaatttcattttttttttgttaattacccagagatggttttgctgctgacattctttttttttttttttccctgttaggtagccttaaactgtaagactatttgtgctaccactacagtaactaatttaatgtgtggatatttatatgtataaatttttacttccagaatacataatttttatatacacttgaataaaacgccttaataaaacattcttctgctttaagtaaagcactccccaaaaatggcatttttattttttacagatatgcaacatgtgaaacttaaaatattatccgagagagagagacaagcaggat

SEQ ID NO: 101827 - DNA, 555 bp, Homo sapiens
tccttctgtgactggcttatttcacttagcataatatcctcacggttcatttatattgtcccatgttataaaatttccttctttttaaagactgaataatattttgttacatatatataccatatttcctttatccagtcatccattaatggacagctaagttgcttctaaatcgtggctgttgtgaatagtgctgcagtgaacgtgagaatgctaatgtcttatcacaattcaaatttcattttttttttgttaattacccagagatggttttgctgctgacattctttttttttttttttccctgttaggtagccttaaactgtaagactatttgtgctaccactacagtaactaatttaatgtgtggatatttatatgtataaatttttacttccagaayacataatttttatatacacttgaataaaacgccttaataaaacattcttctgctttaagtaaagcactccccaaaaatggcatttttattttttacagatatgcaacatgtgaaacttaaaatattatccgagagagagagacaagcaggat

SEQ ID NO: 101828 - DNA, 555 bp, Homo sapiens
tccttctgtgactggcttatttcacttagcataatatcctcacggttcatttatattgtcccatgttataaaatttccttctttttaaagactgaataatattttgttacatatatataccatatttcctttatccagtcatccattaatggacagctaagttgcttctaaatcgtggctgttgtgaatagtgctgcagtgaacgtgagaatgctaatgtcttatcacaattcaaatttcattttttttttgttaattacccagagatggttttgctgctgacattctttttttttttttttccctgttaggtagccttaaactgtaagactatttgtgctaccactacagtaactaatttaatgtgtggatatttatatgtataaatttttacttccagaatacataatttttatatacacttgaataaaacrccttaataaaacattcttctgctttaagtaaagcactccccaaaaatggcatttttattttttacagatatgcaacatgtgaaacttaaaatattatccgagagagagagacaagcaggat

SEQ ID NO: 101829 - DNA, 555 bp, Homo sapiens
tccttctgtgactggcttatttcacttagcataatatcctcacggttcatttatattgtcccatgttataaaatttccttctttttaaagactgaataatattttgttacatatatataccatatttcctttatccagtcatccattaatggacagctaagttgcttctaaatcgtggctgttgtgaatagtgctgcagtgaacgtgagaatgctaatgtcttatcacaattcaaatttcattttttttttgttaattacccagagatggttttgctgctgacattctttttttttttttttccctgttaggtagccttaaactgtaagactatttgtgctaccactacagtaactaatttaatgtgtggatatttatatgtataaatttttacttccagaatacataatttttatatacacttgaataaaacgccttamtaaaacattcttctgctttaagtaaagcactccccaaaaatggcatttttattttttacagatatgcaacatgtgaaacttaaaatattatccgagagagagagacaagcaggat

SEQ ID NO: 101830 - DNA, 617 bp, Homo sapiens
aaaatggaatccattttttgaattaacattttatttattggaggttcaaaattgatgttccttaccatcagcaaagctrctgtaagtattcatttgttaaaaaaaaaagtattggttttcagagagtgaaaagtattcccgttagtgcatccaatttggcccaaattcatacttttttcatctctgcagtaagtagcctactttgtgtctacttttagcccaaccttgagtgctctcttagatgctaagtcaaataaaagattgagtgatgagtacaaaatactcacaagtggtaatgatgacactggaaagtactgagtagaatttttggtagaacacgtcaatggaatttttttttaattttacaaaggattaagccttatgtcccagtaatagtcaagccttcattccttatgctaaaactgtctcctataaattgtatggtagaactggttacataggacaagaggtaaagattgttttattcttatacattttgagaaaaagatatgctttatagtgaactttgtattttcatgaaatataattctaaatgcagaattatagattgattatagaacaaaagctcactttacatctgggagagaggactcaca

SEQ ID NO: 101831 - DNA, 617 bp, Homo sapiens
aaaatggaatccattttttgaattaacattttatttattggaggttcaaaattgatgttccttaccatcagcaaagctactgtaagtattcatttgttaaaaaaaaaagtattggttttcagagagtgaaaagtattcccgttagtgcatccaatttggcccaaattcatacttttttcatctctgcagtaagtagcctactttgtgtctacttttagcccaaccttgagtgctctcttagatgctaagtcaaataaaagattgagtgatgagtacaaaatactcacaagtggtaatgatgacactggaaagtactgagtagaatttttggtagaacacgtcaatggaatttttttttaattttacaaaggattaagccttatgtccyagtaatagtcaagccttcattccttatgctaaaactgtctcctataaattgtatggtagaactggttacataggacaagaggtaaagattgttttattcttatacattttgagaaaaagatatgctttatagtgaactttgtattttcatgaaatataattctaaatgcagaattatagattgattatagaacaaaagctcactttacatctgggagagaggactcaca

SEQ ID NO: 101832 - DNA, 614 bp, Homo sapiens
atttcagacacctgtttagaatgacctgattttttcctaaaatcactcaagatagccacccctcagcaagggtaattgatttatttctcttctaaattgaagcaagaagyaatttgttggatgtagccttgagcaaaagcgaatgttgagttgacctgattctccaactatttttagcataacagtggatgagaagggtaaataaaaaataaaaatagaagttagacacacacacacacacacacacacacacacacacacacacacacatttctggttacattcatcaaaagaaaaagttctttcttagtaattctagctaattataccttttatcttaaggatttttaataaacatacctcaattcatctgactcctctcccacattcagttatgccattttgatgattctaaatctccagtttctctcataccaattgtcttctgcactcttacattatataagttcattcactcatattgtgttatctgtaataatattctaatatactaatttctctgtcagcaacattgtatctcttaattcagatttttcactttgccagcagaaacgtatctctaaaacacagatagaaatatttaaattaatttc

SEQ ID NO: 101833 - DNA, 614 bp, Homo sapiens
atttcagacacctgtttagaatgacctgattttttcctaaaatcactcaagatagccacccctcagcaagggtaattgatttatttctcttctaaattgaagcaagaagtaatttgttggatgtagccttgagcaaaagcgaatgttgagttgacctgattctccaactatttttagcataacagtggatgagaagggtaaataaaaaataaaaatagaagttagacacacacacacacacacacacacacacacacacacacacacacattyctggttacattcatcaaaagaaaaagttctttcttagtaattctagctaattataccttttatcttaaggatttttaataaacatacctcaattcatctgactcctctcccacattcagttatgccattttgatgattctaaatctccagtttctctcataccaattgtcttctgcactcttacattatataagttcattcactcatattgtgttatctgtaataatattctaatatactaatttctctgtcagcaacattgtatctcttaattcagatttttcactttgccagcagaaacgtatctctaaaacacagatagaaatatttaaattaatttc

SEQ ID NO: 101834 - DNA, 593 bp, Homo sapiens
gtagaccttgaaatcatttgtagaactttttctaatatgtagccaagggaactatcttaggtctggcctctggaggacagaatctgcacacatttttaaaaacaatcaaacaaaaaacacaacctaaactattactatcacaacccccaaaaaactccctgagttatttctgtaattctgatgcacagcattatttataaacaaaagtgttggcrcacagtaggcattaaataaatatttttcaataaataaacgagtatttagcattgatgtcaagtctaaccagttttctgttagtgattcttagtaccccaacttaactctacctgaacttgcccacagctatctcaccgattcctacgtagtaggagaaatctccccatccattacccttagatgaaagcactacccaagacataggatgtcccagcagttgaaattgagtactatatgttatacaactgcatttattaaaaaaaaattatttcgtttgtgttatcttgagaattattgtgatcacctctcaatttattttttaaaatattcaaaattaaaatgatcaactcaattagctctatgttaccaaaataaat

SEQ ID NO: 101835 - DNA, 593 bp, Homo sapiens
gtagaccttgaaatcatttgtagaactttttctaatatgtagccaagggaactatcttaggtctggcctctggaggacagaatctgcacacatttttaaaaacaatcaaacaaaaaacacaacctaaactattactatcacaacccccaaaaaactccctgagttatttctgtaattctgatgcacagcattatttataaacaaaagtgttggcacacagtaggcattaaataaatatttttcaataaataaacgagtatttagcattgatgtcaagtctaaccagttttctgttagtgattcttagtaccccaacttaactctacctgaacttgcccacagctatctcaccgattcctacgtagtaggagaaatctccycatccattacccttagatgaaagcactacccaagacataggatgtcccagcagttgaaattgagtactatatgttatacaactgcatttattaaaaaaaaattatttcgtttgtgttatcttgagaattattgtgatcacctctcaatttattttttaaaatattcaaaattaaaatgatcaactcaattagctctatgttaccaaaataaat

SEQ ID NO: 101836 - DNA, 573 bp, Homo sapiens
ggactgacataggattttatttaaaatgtgacattatatgaaattatgttataaaaagtgtactgaatttttagaaaaagaaatctgcaatagccaaacacagttttattgctaatctttatatttttccttatattattctgacattactctttaaagtgaaaaatgaaagtgggtaatacatcccttaaaaattataataaaggcaatgggattattactgctctctggaattaaaaattaatataaaattaaaatacttccttcctcaattgccatcctcctagcagggaagatgtggacttacattaacccaagggtcctgagtgcagcagagaatctctgggctgactgcccctattacagtgatgaacagataagaatgtgctgatggatggaatcccaaamcatagaaaagtaagtctttaatttggctggccagattgatcaaaatttcagtggggttattttcttactacaagagagattctaacggttgtagtaaccgtttgagggtatgaaggagagtggagagatcctaggatattgttgtcatagaagcttagggatata

SEQ ID NO: 101837 - DNA, 597 bp, Homo sapiens
actgaagtttttaaattattgagactccctgctagtttcaaactaaagattagtcctaagcataaaagactggctgtggtgaccgggagtggtggctcacgcctgtaatcccagcactttggtatgccgaggcgggtggatcatgaggtcaagagatcaaraccatcctggccagcatggtgaaaccccgtctctattaaaaatacaaaaattagctgggtgtggtggtgtgtgcctgtagtccaagcaactcgggaggctgaggcaggagaatcgcttgaaccagggaggtggaggttgtagtgagcccagatggcgcccctgcactccagcctggtgacagagcgagactctgtctcaaaacaaaaaacaaaaaacaaaaaaaaaccactggctgtggagacccaaagaatagttccaagcatgacaagcatgaaggcgtagattggggtacccttgaatcactctagtttctttattggagcctttaaatataatctctgttaattttatagccttaaaatggccctggaattcacctgacttcagaactttttccgcactaagaatagctaaaacttaaaatgaacttaaata

SEQ ID NO: 101838 - DNA, 628 bp, Homo sapiens
ccatctgcaggactagagagctgggctcattacttactcttgttattccttggctgggggttgcaagaagaggtgacttttaccagatgaaatggagaaagcccttggsgaaagagatgcaggtgctggcctttggaattgttcaaatttcactgaaatggttttggctgagaggataaggtaaaatgccgaggtttctcttacaagataatttagtttttccctcatcaatgagtgaaatcattttaacttcaagtttatttactgtcattatttttcctaccaatgaactttttagtttccacctggttattccttttttttaaacatatacatatatatagatgagttctcactatgttgcctaggctggttttgaactcctgagctcaagtgatcctcctgcctcggcctcccaaaatgctaggattacaggtatgagccatcaggcctggcctgttaatttctttatgaattttaatggaacattttgaaataatgcattctttttctctcatattttgttcattacatttaacaacttccttcttgaaaagacctgttgaatatttatgttttaagttagtttttttaatattcagttttataatttacctataattgatat

SEQ ID NO: 101839 - DNA, 628 bp, Homo sapiens
ccatctgcaggactagagagctgggctcattacttactcttgttattccttggctgggggttgcaagaagaggtgacttttaccagatgaaatggagaaagcccttggcsaaagagatgcaggtgctggcctttggaattgttcaaatttcactgaaatggttttggctgagaggataaggtaaaatgccgaggtttctcttacaagataatttagtttttccctcatcaatgagtgaaatcattttaacttcaagtttatttactgtcattatttttcctaccaatgaactttttagtttccacctggttattccttttttttaaacatatacatatatatagatgagttctcactatgttgcctaggctggttttgaactcctgagctcaagtgatcctcctgcctcggcctcccaaaatgctaggattacaggtatgagccatcaggcctggcctgttaatttctttatgaattttaatggaacattttgaaataatgcattctttttctctcatattttgttcattacatttaacaacttccttcttgaaaagacctgttgaatatttatgttttaagttagtttttttaatattcagttttataatttacctataattgatat

SEQ ID NO: 101840 - DNA, 555 bp, Homo sapiens
tttaggtgctttggatgagatggaagtgtgttagtcctacttttaatcaatatttatattgtagatgaaagttgaacacattaagttctacttcaaaggaagtgaattargtctcatagaaaattgtacatggagttaaaattcagcttgttgagattctgctttgtttatgcaatgtagtgctagttcgtgataatgtacataagttgcatgacagttcatccatttttgtggatttcatgatagttcagtctaccttttatttcatgaaattttgtcatatctgtacatatagttatggggccagaagaatattatattttaattcaaaaatttaggaattctgtgaatataatgtatacaagtttaaagaaattagacatagaaaatactaactagtgctgatctgtattttatcttctctgaaggtgctagattaggaccaagggtaagtcttttattaaccctggcatcttgtaaaagcatttttcttcccatttagcttctgcttatattttagccattttcccagttactcccaataaatggaggtgc

SEQ ID NO: 101841 - DNA, 555 bp, Homo sapiens
tttaggtgctttggatgagatggaagtgtgttagtcctacttttaatcaatatttatattgtagatgaaagttgaacacattaagttctacttcaaaggaagtgaattaggtctcatagaaaattgtacatggagttaaaattcagcttgttgagattctgctttgtttatgcaatgtagtgctagttcgtgataatgtacataagttgcatgacagttcatccatttttgtggatttcatgatagttcagtctaccttttatttcatgaaattttgtcatatctgtacatatagttatggggccagaagaatattatattttaattcaaaaatttargaattctgtgaatataatgtatacaagtttaaagaaattagacatagaaaatactaactagtgctgatctgtattttatcttctctgaaggtgctagattaggaccaagggtaagtcttttattaaccctggcatcttgtaaaagcatttttcttcccatttagcttctgcttatattttagccattttcccagttactcccaataaatggaggtgc

SEQ ID NO: 101842 - DNA, 555 bp, Homo sapiens
tttaggtgctttggatgagatggaagtgtgttagtcctacttttaatcaatatttatattgtagatgaaagttgaacacattaagttctacttcaaaggaagtgaattaggtctcatagaaaattgtacatggagttaaaattcagcttgttgagattctgctttgtttatgcaatgtagtgctagttcgtgataatgtacataagttgcatgacagttcatccatttttgtggatttcatgatagttcagtctaccttttatttcatgaaattttgtcatatctgtacatatagttatggggccagaagaatattatattttaattcaaaaatttaggaattctgtgaatataatgtatacaagtttaaagaaattagacatagaaaatactaactagtgctgatctgtattttatcttctctgaaggtgctagattargaccaagggtaagtcttttattaaccctggcatcttgtaaaagcatttttcttcccatttagcttctgcttatattttagccattttcccagttactcccaataaatggaggtgc

SEQ ID NO: 101843 - DNA, 605 bp, Homo sapiens
tgtctacttgttctgttgcttattgatagaggaatattgtgatctctgaacaaaattttgaatgtgactatttctctttgaatttctatcagacttttctttatgaattttataacagttttattaacattattatgttcatatgtatattattatagtcacataaaatttcatatacataaaatttatttttaagtgtataattcagtcatgttaatatacatttaatatttatatattaaatatatattaaatacttcactcactacaaaaagaaaacctataccaattagcaatcactactaattcctcctttcctgcaggtcctaatttactgtctctctctgggatttgcccattctggacatgtgatctgaagatagtcaaacactatgtcrttatttcaaaggtggaaggataaattcagcactttcagtctatcttggctagaaatgaaagtataaaagttggattggcaaatttaatatatttaataaaaccagaagcttctagatttataaaacccatgctataatctgtctaagcacatacaacacaatcacacaacatgtttggttgcaaaaattacaactttaaaaatattt

SEQ ID NO: 101844 - DNA, 590 bp, Homo sapiens
ccttagaattttctacatacaagattatgtcatatgcaagaattgatagttttrcttctccttttccaaaatgggtgcattttatttctttttcttgcctaattgccttggctagaaattccagcacaatattaaatagaagtgcttagaacagacctccttctcttgttcccaatcttaggaggaaagcattcaatctttgatttggtatgggtttgtgtccctgcccaaatctcatgttgaattgtaatccccaatgttggaggaggggcctggtgggacgtgactggatcagcgggacagacttccccattgctgttctcatgatagtgagtgagttctcatgagatctggttgtttaaaagtgtgtagcacctccctcttctatcttcctcttacttcagccatgtaggtcatgcctgcttccccttcaccttctgccataattaaaagtttcctgaggcctcctcagccatgcttcctgtaaagcctccagaaccaggagccaattacaccttctcttttctttataaattactcagtctcaggtagctctttataacgatatgagaatggactaattaatttca

SEQ ID NO: 101845 - DNA, 624 bp, Homo sapiens
gcttagaacagacctccttctcttgttcccaatcttaggaggaaagcattcaatctttgatttggtatgggtttgtgtcyctgcccaaatctcatgttgaattgtaatccccaatgttggaggaggggcctggtgggacgtgactggatcagcgggacagacttccccattgctgttctcatgatagtgagtgagttctcatgagatctggttgtttaaaagtgtgtagcacctccctcttctatcttcctcttacttcagccatgtaggtcatgcctgcttccccttcaccttctgccataattaaaagtttcctgaggcctcctcagccatgcttcctgtaaagcctccagaaccaggagccaattacaccttctcttttctttataaattactcagtctcaggtagctctttataacgatatgagaatggactaattaatttcatcattaattatgatagtaagttgtaaatttatcagagataattttttatcagagataaatttatcagggataaattttatcaggtaaggaagttcctttctatttatcatttattgagtattttttttatcatggagcagtgttggattttttcaaatgcattttctgtgtctattg

SEQ ID NO: 101846 - DNA, 590 bp, Homo sapiens
ccttagaattttctacatacaagattatgtcatatgcaagaattgatagttttacttctccttttccaaaatgggtgcattttatttctttttcttgcctaattgccttggctagaaattccagcacaatattaaatagaagtgcttagaacagacctccttctcttgttcccaatcttaggaggaaagcattcaatctttgatttggtatgggtttgtgtccctgcccaaatctcatgttgaattgtaatccccaatgttggaggaggggcctggtgggacgtgactggatcagcgggacagacttccccattgctgttctcatgatagtgagtgagttctcatgagatctggttgtttaaaagtgtgtagcacctccctcttctatcttcctcttacttcagccatgtaggtcatgcctgcttccccttcaccttctgccatrattaaaagtttcctgaggcctcctcagccatgcttcctgtaaagcctccagaaccaggagccaattacaccttctcttttctttataaattactcagtctcaggtagctctttataacgatatgagaatggactaattaatttca

SEQ ID NO: 101847 - DNA, 579 bp, Homo sapiens
tttgaaataaaacatttttacacattgaaaactgctctagtctcatagataatgatgattcaataaacactgtgggtgcaaaacttggaaagtgtacactggcttgctgtacaatgtcctcaattctatattaataatacagtgtaaactcattaattataaatgcatagccatttgttggtgaaaagaaaacaggatgtcaggggcaaataaagaattcagtggtgaagcaatatctttgacaagaacttctatttgtctaatgctctgtataactttaatagcacccaacagttggtggtctgtagtggttctaggcaatgagtggattgccttttctttgtttgctttgcaactgaaggatgtttgcaatattaaaaagcacacacactcacacatacagacmcacacgccataacaaaaacagcctcaaggctaccatatggcggtggtcctgcacctgaaacccaaacaaagccaacagcaacagattcagtgtttgtctttggctaagaatctgagctgacgtcaattatacttttgagcctggactgaattcaatgaaaacttgtcagttgg

SEQ ID NO: 101848 - DNA, 432 bp, Homo sapiens
tttgtttgctttgcaactgaaggatgtttgcaatattaaaaagcacacacactcacacatacagacccacacgccataacaaaaacagcctcaaggctaccatatggcggtggtcctgcacctgaaacccaaacaaagccaacagcaacagattcagtgtttgtctttggctaagaatctgagctgacgtcaattatacttttgagcctggactgaattcaatgaaaacttgtcagttggtactttagaaaaatgaattaaactaagcctgtgtttcttatcattgaacgtaccagccaaactgttttgtgcatgcctttgacattttaattgcaggaactaggtgaatttttttctaagtccttctaggacaggtaaacaaaatacatatttttcctggcatatcstttagagagtttgaacagtgttgcc

SEQ ID NO: 101849 - DNA, 620 bp, Homo sapiens
gttcatgccttcctcttcaaaccggtttcaagggaatagtgaaatagagttccctgatagraaatgcattttattgaaggacaataaaatcatgctaaacttaatgagaatgttttaaaattattcctattttctctttcaggtgatgcttgaaacacatttattctattcccctgatactatgacaggaaagaaattgtattattacttctactacctagggaaaaatagctgattagctagttttgactttaagactattctcaaatcattctcctagaacatttctttgccttgttttcaatgacagagaaataaggccattgcatgctttccattatcattaatgactcttctaatgatttgatgcctggtgcctttaatttttattttagaaaacacatctagtactaagactaagtttctttgtcattcactgtaaatttcccttgaggcatgtgtttttttttaaagaggcataaataaataatcaataaataaaagttcatagtacagttaaagtggaccgaagtcaaattgacttttatgcatccagcagaggaatacaataagtgaatatagagagtatttactgtataatgccatatcaataattaaaa

SEQ ID NO: 101850 - DNA, 620 bp, Homo sapiens
gttcatgccttcctcttcaaaccggtttcaagggaatagtgaaatagagttccctgatagaaaatgcattttattgaaggacaataaaatcatgctaaacttaatgagaatgttttaaaattattcctattttctctttcaggtgatgcttgaaacacatttattctattcccctgatactatgacaggaaagaaattgtattattacttctactacctagggaaaaatagctgattagctagttttgactttaagactattctcaaatcattctcctagaacatttctttgccttgttttcaatgacagagaaataaggccattgcrtgctttccattatcattaatgactcttctaatgatttgatgcctggtgcctttaatttttattttagaaaacacatctagtactaagactaagtttctttgtcattcactgtaaatttcccttgaggcatgtgtttttttttaaagaggcataaataaataatcaataaataaaagttcatagtacagttaaagtggaccgaagtcaaattgacttttatgcatccagcagaggaatacaataagtgaatatagagagtatttactgtataatgccatatcaataattaaaa

SEQ ID NO: 101851 - DNA, 620 bp, Homo sapiens
gttcatgccttcctcttcaaaccggtttcaagggaatagtgaaatagagttccctgatagaaaatgcattttattgaaggacaataaaatcatgctaaacttaatgagaatgttttaaaattattcctattttctctttcaggtgatgcttgaaacacatttattctattcccctgatactatgacaggaaagaaattgtattattacttctactacctagggaaaaatagctgattagctagttttgactttaagactattctcaaatcattctcctagaacatttctttgccttgttttcaatgacagagaaataaggccattgcatgctttccattatcrttaatgactcttctaatgatttgatgcctggtgcctttaatttttattttagaaaacacatctagtactaagactaagtttctttgtcattcactgtaaatttcccttgaggcatgtgtttttttttaaagaggcataaataaataatcaataaataaaagttcatagtacagttaaagtggaccgaagtcaaattgacttttatgcatccagcagaggaatacaataagtgaatatagagagtatttactgtataatgccatatcaataattaaaa

SEQ ID NO: 101852 - DNA, 552 bp, Homo sapiens
atcagtatgagagcagtatcctgtgataccaatagttggtgtttacagagcctttgcaatgtttctgacatcatgacaagcaatatcacgtattatctgactgaattattaaaamatttctgagaggtaaatatgtctgtgtttcattttaagaacaaaaacgtataacaagactaagagagtgatttaacctactttcatagtattagtcagtaaaagcttactgctgtaataaataaccctagtatttcaatgacttaacctagggaagtttatttcttactcagataaagcctaatagcatgtgcattaaaaagcattccatacagtgatttggggatccaggcttcctctatgttgtggttctaacccccagtgcgttctctgagccctgtaaatttatccggaaaacgagaaaaagaatatggagaagattaccacccaccattacatgcttagccacttgaagcattttctgcttatttcctgcttcctttcattttcatgaagtatcaaatgtttggtaaatggtgaacatgtactgggagggtg

SEQ ID NO: 101853 - DNA, 526 bp, Homo sapiens
aattaccaggctagtctagtttgttcacattctcagagccacctcctttccctggaaagcaacctggtacctctgcttcttcttcctcttcttctttttttttttttttttttgatggtgtctttctctgttgcccagactggagtacagtggcatgatctcggctcactgcaacctytgcttcccgggttcaaaagattctcctgcctcagcctccgagtagctgggactacaggtgcacaccaccatgcctggttaatttttgtattttttttttttttttttttttttagtagagatggggttttgccatgttggccaggctggtcttgaactcctgaccttgagcgatccacccaccttggcctcccaaagtgctgggattacaggcgtgaacagccgcacctggccaactctgtacctacttcttattgctagttttgttgttaaagtcttgaatctgaatttcccaaacagattacagggttcatggaaatggaagctggttgtccatctctttgaattc

SEQ ID NO: 101854 - DNA, 513 bp, Homo sapiens
caatatgtcctcggtcacatgctactcctccaaaatttcacctatacycagaatttggctttttccaggacttgtataaattaagacttattgaacagtagcagaaacactcctttctactgtattttttctgcagcagatggatatgtctgtatatcctccagatcaccatttctgtttcctcttcttatatttccatctcctttcaagcagatcttagctgagctttataaagttcaacctacttcttcaattagatcccatttctcttccattcgtaaggctgagcttttactggataagaatgtcatcatttctttttctttcttttccctcagtttctacttttacagcaaaacaagactctttttttttttttttggtaattcagttaatgtcactactaatgttcttaatgtgccttttccaatgcctaagtagtactctcttcacatattggatagacaatgctagcggctgcaagagacaagccctggaatcccagtgaattac

SEQ ID NO: 101855 - DNA, 513 bp, Homo sapiens
caatatgtcctcggtcacatgctactcctccaaaatttcacctatactcagaatttggctttttccaggacttgtataaattaagacttattgaacagtagcagaaacactcctttctactgtattttttctgcagcagatggatatgtctgtatatcctccagatcaccatttctgtttcctcttcttatatttccatctcctttcaagcagatcttagctgagctttataaagttcaacctacttcttcaattagatcccatttctcttccattcgtaaggctgagcttttactggataagaatgtcatcatttctttttctttcttttccctcagtttctacttttacagcaaaacaagactctttttttttttttttggtaattcagttaatgtcactactaatgttcttartgtgccttttccaatgcctaagtagtactctcttcacatattggatagacaatgctagcggctgcaagagacaagccctggaatcccagtgaattac

SEQ ID NO: 101856 - DNA, 611 bp, Homo sapiens
cctgactatctaagctgtctctaacatgaggtcccaattctctagtaatcagaggggttgagagggtgaggaaggagagttgtaaatgggagtggacttactttatgcagtcaaatcttaacaagacacaagccctagaggaaacaactctatggacctgaaaactgcaaacacacacacacacaccatacaaattgttctgaccagcaaagaaggcatgaacacttgacttcctaacaagggtccacaggcagagaccatctatcttgtttgaaattcttaaaatcctggttacatgattctaaaattcctggacacatgatgtcccaaccaacaggagattagaagtagcagattgaaaggctagagaaagctacacagatatcagcaagaactgacagctgacaaaaaggtaagaaagagaatcattattctcaaaagtgagcatattttaaaactcagcagtctaggagcaytgagaggaactaacagctttacaaacttcaacctctcttgagtcattgccatccccaggcatgtgaaaaataattacaagtgtaggaaagaaatacagcatagtagcataacatattaaagagatttaggaattc

SEQ ID NO: 101857 - DNA, 567 bp, Homo sapiens
tatgatgaactcttagactgcagggactcaccagggtatgcagcaagagataatgggtttacatttcagcatgagggattcaggcttgctctaaatgtctttcctgacagtgaagcttggtatgtcttacaaggtacagcgatggctgtggaattactctcccggaaaacctttccagtcggggcgagtctcatctctctgggataatgtgggtgcagccctgcctgggagtttggtcggcagcctctcaagattcattccagtctgatgattctctcactttacaccaayagatgcgctgtggcaaaaaaggtgagtcaacacacacagaacaattatggagggcatttcttttcatgtggcaaagaaaaacagtggttattccaaaggaagcacaggaacctcaaagctagctttttgttttattttcttaaatcctggcaattgtgactcataacacagagcaacatttacagaagtgtgaaatttgcgcacttcattccctgatgtgcttcagcctgggagctatggcatttacacacctgcagggctgagggctacccggaa

SEQ ID NO: 101858 - DNA, 567 bp, Homo sapiens
tatgatgaactcttagactgcagggactcaccagggtatgcagcaagagataatgggtttacatttcagcatgagggattcaggcttgctctaaatgtctttcctgacagtgaagcttggtatgtcttacaaggtacagcgatggctgtggaattactctcccggaaaacctttccagtcggggcgagtctcatctctctgggataatgtgggtgcagccctgcctgggagtttggtcggcagcctctcaagattcattccagtctgatgattctctcactttacaccaatagatgcgctgkggcaaaaaaggtgagtcaacacacacagaacaattatggagggcatttcttttcatgtggcaaagaaaaacagtggttattccaaaggaagcacaggaacctcaaagctagctttttgttttattttcttaaatcctggcaattgtgactcataacacagagcaacatttacagaagtgtgaaatttgcgcacttcattccctgatgtgcttcagcctgggagctatggcatttacacacctgcagggctgagggctacccggaa

SEQ ID NO: 101859 - DNA, 609 bp, Homo sapiens
ggccgcccaggaagccactcagctcctaagaagtgggaaggagatgctgacgggcatgaccaaggcatctcccaccggcctctctaggagggactgtgcttactggtagcctgggtgagaccatctgggccccagctttgggcactttgggcacttgggtcaataatmtgagcgctgtgaagcccctggctggtgagtctcctgttctttatccagaattccctgagaagaagccccatcggcccccatgaccgaactcggtgcacaacccgcagtaaaggcatagtcacttcttatggggtgatggatgagaaccaggcgtgggagcctctattcaccaggcattctccacaaaaacttctcttatccatggtcttttccctctggggatgaaatcaaaggaaagaggagtgacatttcccaggagtctccccacagggccctccccggggggtgagggaggctccggaggtgcctggctgctgggcgtcccagcgtggagaccggaaggagggcagtacaggaccaggctctcaggacaccagcctcatggagcgcttgggagtttgggaatggagaatggaaaaggaaagttgtgggggcagctgc

SEQ ID NO: 101860 - DNA, 533 bp, Homo sapiens
ggagaatcccttgaacccgggaggcagaggttgcagtgagccgggattgcaccactgcactccagcctgggcaaggagcaacacttcgtctctaaataaataaatagagataagggwcttgctatatcacccaggctggtctctaactcctgggctcaagcaatccccctacctcggcctcccaaagtgctgggattacagaagtgacctttttgatactttcaatattaaaattccctccagtgacacccatcatttgtaaaagctggatgggcccagcctcatctcactttggaagcagggtcagagcgccatctggtggctgtctagtgagccttgtattggctgagcagcagaatcagagcctgagatctggaaggcccctaggagtcaggtggtccagcagaggttcagagatgggaagtaacccacctaaaggcacatggcaaattagaatccatctccaggaccataacccagcgtttgggcaataagactgtgcttttcgaattcccctggtgtttcggagaagc

SEQ ID NO: 101861 - DNA, 552 bp, Homo sapiens
aattcattgctatgaaaaacacgtagggaaaacatgttagaataaattcctggaagtggaattgctacaattatcagttttcattttggtctcacagaccagaaaacccaacataataaaagtttaattatgtaaggcctcattatctcatagcaaacaagcctagaagacagttcatgggcacatggtagctccaggctgggagaaaggatatgaatrtgttaactgtatagatattaccaaatcgcccttctcagaggctgaactgtcttgatttccaccatcagtgtacagcgtttccttacagtcagaccaacagcacattatcatactttgtttgaaatttcccagctgaacaggtgaaaatgatactcattggacttttatatcacttttgcaggttcaacctcccagactcaagcaatcctcccacctcagactcccaagtagctgggactacagatacatgccaccacacccagctaattttgttgatttttttgtagagatacccttctcactttgttgcctaaactggtctcctgggcccaa

SEQ ID NO: 101862 - DNA, 552 bp, Homo sapiens
aattcattgctatgaaaaacacgtagggaaaacatgttagaataaattcctggaagtggaattgctacaattatcagttttcattttggtctcacagaccagaaaacccaacataataaaagtttaattatgtaaggcctcattatctcatagcaaacaagcctagaagacagttcatgggcacatggtagctccaggctgggagaaaggatatgaatgtgttaactgtatagatattaccaaatcgcccttctcagaggctgaactgtcttgatttccaccatcagtgtacagcgtttccttacagtcagaccaasagcacattatcatactttgtttgaaatttcccagctgaacaggtgaaaatgatactcattggacttttatatcacttttgcaggttcaacctcccagactcaagcaatcctcccacctcagactcccaagtagctgggactacagatacatgccaccacacccagctaattttgttgatttttttgtagagatacccttctcactttgttgcctaaactggtctcctgggcccaa

SEQ ID NO: 101863 - DNA, 512 bp, Homo sapiens
caagagctaaagcaagcagaaagtgtggataagaagctgagaacttgagtaggagactttggcaatttcgaagggctgggagataaatttggagttcaaactacaagacaagcagacctgggggccaagatgtctggggaagagaagcacgtggaggttagcttctaaggcccctttctctggaaggcattcacggatccgtaagcagcacccagccaaggagtgaagcatggctaagagaccgggaagctgagcagagtctttggcagtctcgtggggcttggaagacagacttggagttgaaggcccaccaaagaggaagagccctaaagaacaagccagayttccagcgagaacctcagatgggttacacaccaggaggcagggtgagctggaaatagagcggccttcaaaaagcctgacagcttcaaaccagctcaaccgcagcctggattacgaatgaccttcccttctctaactgccttccggaaaatgaagtaaatcctccatga

SEQ ID NO: 101864 - DNA, 580 bp, Homo sapiens
ctcagcgataaaaaggaatgaaataatggcatgtgcagcaatctagatgggattggagaatattgttctaagtgaagtaactcaggaacagaaaaccgaacatcatatgttttcactcatagtggtgggagctaagctatgaggatgtgaaggcataagaatgacacartggactttggggactcaggggggaaaggtagaaaggcggtgagggataaaacactacaaactggtttcaatatatactgcttgggtgatgggtgcaccaaaacctcacaaattactactaaagaacttactcatgtaaccaaataccacctgtccccaaaaacctatggaaataagattaaaagattaaaaacaacaacaagagggctatcagttggcagcacttgcagtagctgggggataagtccttcagtcctgaaggagcatctgggcagctcatcacagaatctacaatggtccatcttttgtgccactcaaatccacttcttataggttctggaagcagctcctccccatgactgcttcattttccatttactgtcaaaattgactaaatgggtaccaagggaca

SEQ ID NO: 101865 - DNA, 611 bp, Homo sapiens
tgttttctttcatgacgtgcttttattgaaagctaatatcgagggctcactccatcaggcactgtgtttatgtgaattgttttatttaattttcaaatagtcttgtgaagaagcatcaggcaatcacattttacagaagaggggaatgaagcctggcaaggaggaaktttgcccagcatccccagctagttacaagatttgacccctcatggtcagtgctactgctcttaaccaatgcactatgcatcaaccgtttgaggccaggtgattccacatcacacttgtctcattcctggtcaagggtgaagttagtccttgaaccagtcatcaattaattcaggatggtgattttctcttgtctcttgttttcaagacccaaggcttggcttccccatgtccaagggtaggatctgcctagtcctatagctcagaggtcccattggagtcagtggggagtcactagcctctcccaggtccaccatgctatatgcccccagaggggaccgtagagatgaaagaggaggtgatgctataaatgcccatagaatcttgctctattgctcaccctctgtgtgaccttgagcaacttattagcctccttaagcctcagt

SEQ ID NO: 101866 - DNA, 561 bp, Homo sapiens
gcttcctgcttgtgacaggtgtgtctatttgcttgatatatagactatcagatccatttcaaatctgtccagaaattctctgtctatctacttcaaaggacaaaaacaaacccatgctaaattatagagtcaatcagtgggtggttggtatatctgattttttgaactaccatgaaacaccttgtttatgtcatccctctcaaccaagaayacaggtgcaaaaccagaacaatggcctttttccaaagtctatgcaatttattcataagttagcacctcagagccatttattactacaggttgagcatcccaaatctgaaaaccccaaatctgaaatactccaaaatctaaaatttctgagagtagacatgaaactcaaaggaaataggggcattttggattttgaatttttgggtttgaggtgttcaactgacaagtctataatgcagatatcctgaaatctgaaacacttctggtcccaagcattttagttaagagatagtcaacctgtattctatttaatcttaatttacaaacaattctaacaaacatggctgtttg

SEQ ID NO: 101867 - DNA, 488 bp, Homo sapiens
tgtgaattctgggacatcacagtgtcccctgggaagggggtcttggaagacttgatctcctggctccctatctctgggctgtatggtggaggtgatagggagctggaacccctggcctgggaaaatagggatgtctgagcctccctccttccagccagcacgcacgctgtaagcacctggctccctgttaagggccctgtggagggacagcacgggtggtttttctgtcttgctttggtttgtttgccggagcaccccctttctcctaacccacctattcccaaccccaagtggttcatctggggtttaccctgcgtttaagcctgaaggggatttgctgtttcactcaggcagctcaggactcctccaggaaggctggggaaagccaccccttcccagtgtgaactccctgggggaygtcacatgtgcacctgcaaggccaatgtagcctgaccagcgggtccagagaggactccagcctctgcggt

SEQ ID NO: 101868 - DNA, 580 bp, Homo sapiens
tgaggggtggggttggtactctatttccagagcccacttcatatttcctcttgcaggggtgccaaagtagaaggcgatgctcactttttaagaccttattgaaaaaccatagtgttgagcattttcaatatgcccaacattgtcactaagatgtgaggctataaaggtgcaaaagacatgatggttgccctgcaagtgatagcttcatcttcatcacatagtcctgagcaacagtaatggatgactagtatattgattaccttcggtaccaggtgctttgtatacattatctctaaaggctgacaacaaccctgcaaaaagatactyttaataccagatgatgaaactgagactagaaaggttacataatatgttcaagtcacacaattaataagtagcaaatcccagggtagaaaatgaggtctctctggccaactccaaactggggaaactggggccagaaagattcagtcgtttggcaaaagtctgctgtcagttgatagcagagttgggatcagaactctagcctctgactccagcccttatgagctgagctgactccacactgtgttcagcaccg

SEQ ID NO: 101869 - DNA, 622 bp, Homo sapiens
attcaataaagccttcatatgtaatggtaactttagaagatttgggaaaatggaatttggaaaaagtttgagacatgtgcaaagtctaaagaatctctccaagagcttccgaatctcttaggagttcctacactttgatttttagggtagatcttaatgaaagggcaaaatgaatgaataaagttttcctatttttaaagacatttcactacatgcacacagccacccacacatatgttatctctatgtaaatgtacaagtacacatacacacatatgtaggtgcctatgtgaatatgcactagtcatgtacttacatatgtgtatgtatatgtgaatatacacaaggtatttatatgtatttgtatgatctctaagccaaacagataccctgaaaggtaaaagaaaaatccaacctatcgattctgtsgtatgttagtattttgattccccttggcaattcaaatatcatttttcaagaaacattttcaattattttaaaataaattttcagctttattacaaaagtcttctcacacattgaggtatactaaagtgtaaacacaaattttaaaatttaaatttgacacaatacctaaaatccccttcaaattttcagttcc

SEQ ID NO: 101870 - DNA, 618 bp, Homo sapiens
agaaattttatagcgaatattgtcttattttaaaagaatagtgactttttgtttgtattatacatagtagaatatcttcacgaccctctgggttgataggatattttaaacattttggtactgattgttttcctttccaagtacaactcagttaagcagaaaagatattaaagtctaatattaaaaattattcttttctgaagaagatacaatctaatatatctttctgtgaccatttcttgtgttttggttactttgaagttatgtttaataaaccatacacatgagagaatagtacttaaaacttggcataaattaattgatagggtagaatagcttaacatctaaaccytaagctaaaaataaaataaaataaaaccataagcctttgaggctgacagatctttattcaggtcacagctgtatcagttactacctgtgtggtctcaggcagtttactccacctctttattttttatttatgtttttttttaaactcagtggttatctcttacacagtacttcacccctttaagcctcagttttttcttctgtagaatgggaatcataaaatttagttcataagttattatgaaagttaaaagcattaaaaaacca

SEQ ID NO: 101871 - DNA, 579 bp, Homo sapiens
aaacaataaaagttttagaaacaaaacacaggartaaatcttcagagacttgggccacacaaagtcttaaatatgacatcaaaagcataaatgacaaaagaaaaaaataggtaagctgatttcatcaaaatttaaaactttaattaagaaagtaaaagaaacaccatagattaagagaaaaatatttgcaaaccatgtatctgataagggacttgtgttaatatctagaatatttaaagaatgcttacaattcaacaataaagacaactgaattttaaaacttggcaaaggatttgaatagccatgtctccaaaaaagacatacaaatggccagtaagtacataaaaatatgctcaatatcattaactatcagggaaatacaaatccaaatcacagtgaataccacttgacagctgttatgaatgttccttgtagcattattcataatagttcccaaatggaaacaacccaaatgtccatcaactgatgaatggataagctaaatgtggtataatccatacaactgattattattcagcgataaaaaggaacaaagtactaatacatgtcacaacatgg

SEQ ID NO: 101872 - DNA, 616 bp, Homo sapiens
ggtctcgaactcctgacctcaggagatccacccacctcagcctcccaaagtgctcggattacaggtgttagccactgtgctcggccgttttttaaaatatttctaaagggtttgtaaacacatacacacagtgtgtaccccaaaaagcctaatatatatattatctggtcctttatagaaaagtttgcagacccttgatggaatccactctccacactttgcacaagaaaatggtgaattaacctgttcaatgtcaaytacttatcaaagttagagtgcgagacctggattcaaaatgatttttttgctttttgtatgaactggggtccaaattttttcaaagtacacgtaaaaaatttagatatatgaagtttgcattagcaattccatttattctaagaacgattaaagcaaactttttttttaaaaagcggtcccctaaaaaaaagtatgggctttgtaagcaaaaaacagaaattcaaaaaccacctagtcccataatactaacttttttatagactcttagaaagttatctaaccttttttgagcctctgtagtcttaactataaaatgagggtaatagtacctttacgacaggtttaaaaagattgcgag

SEQ ID NO: 101873 - DNA, 537 bp, Homo sapiens
aagtcttactgttcagtgttccttccaacacaccctgcaatcgaaagtccctgtaggttttctgaagaaagaagakaaaatttgcttagctcacttagattatatgcgtgtacatagatatatactcagttggcatttcaaaaatgatcttggggaatccactgataggttcatgtggctgtccatgccaatcatcttcttggtgtatttctggggagtaaatggaatgacagactctggctattgcttcaaactacaattactatgactacatcaaaatgttgttactatcagatgacaaattcactttcccctcagaacattactaattgcacacaatttaccttttgaacaacctgtagcaaaaataaaatatgtacctgtgtaagtttttaataagaaattattagtttttttaattgagggggctttcctttaatactgaaaaatacattatattttataaaatgcattaattttgaggggtcagttgtgtggaggaagaagattaatcctattatcggtaaaagaagttca

SEQ ID NO: 101874 - DNA, 582 bp, Homo sapiens
acctttttcaatttagcaagtgtatttctcagttccatggtttctgtttgattttttttttwaattttaacctctatgctacatttcccagataaatttcttaattgcttttctgtgttatcttggagatcactgagtttccttaaagctgttattttgattacttagagagttcacatatcaccgtcttgttagtgtcagtgactggttccatgctttttccatttgaggatgttatggttctctgtctgctattgtttcctgtggatgtatgtctattttttcacattgaaatatgaattatttatccatcttctctgtctggcttgttttggtttttattggatatgtttgcacagagattctttgtaatttatgtgttgattttctttattttgttcacacttggacactgtctcctttttggcattagatggcaccttaagcccaggtttgcctcagctctagttaaagactcagagtaccacccattccacatgggataagtccaaagcggggatagcctggcaatgtggaaggttagctaggggtttatgctcaagggacctgtcaaatgaacct

SEQ ID NO: 101875 - DNA, 607 bp, Homo sapiens
tgatattgatcccgactttgtggaggcctagtctagggtgtatatttgtgtcttcatttttaacaaaaaaagttttaaaagttaaaaaaattgtaatattaaaaaaaaaaagcttatcgaataacaatgtaaagaaaaaaaatcagcctgggcaacacagtgagaccttatctctaaaaattttttcaaattagctgggcatggtgatacacacctgcatcctagctacttaggaggctgaggcaggaggattgcatgaggccaggagtttgagactacagtgagatacaattgtgccactgcactccagcctgggagacaaagcgagacyctatctctaaataaaaaagaaaaaaaagaaagaaaatatttttgtacaactgtacaaggcatgttttaagctaagtgttaaagagtccaaaagtttttaaatttaaaagtttataaagtaaaaagattacagtaagctaaggttaatatagaagaaaaaaatgtttttctaaagtatagtgtagatgaagcatacagtatttacaaagttgtggtattatacagtaatgttctagagcttcatattccctgaccacttactcaatggctcacccag

SEQ ID NO: 101876 - DNA, 607 bp, Homo sapiens
tgatattgatcccgactttgtggaggcctagtctagggtgtatatttgtgtcttcatttttaacaaaaaaagttttaaaagttaaaaaaattgtaatattaaaaaaaaaaagcttatcgaataacaatgtaaagaaaaaaaatcagcctgggcaacacagtgagaccttatctctaaaaattttttcaaattagctgggcatggtgatacacacctgcatcctagctacttaggaggctgaggcaggaggattgcatgaggccaggagtttgagactacagtgagatacaattgtgccactgcactccagcctgggagacaaagcgagaccctatctctaaataaaaaagaaaaaaaagaaagaaaatatttttgtacaactgtacaaggcatgttttaagctaagtgttaaagagtccaaaagtttttaaatttaaaagtttataaagtaaaaagattacagtaagctaaggttaatatagaagaaaaaaatgtttttctaaaktatagtgtagatgaagcatacagtatttacaaagttgtggtattatacagtaatgttctagagcttcatattccctgaccacttactcaatggctcacccag

SEQ ID NO: 101877 - DNA, 461 bp, Homo sapiens
tatttttccccttaggatttcttttagcatgcactcacacatatattgttgttgttcactacatactttaatttctctttttacttatcaatgtcataggcatctttctgtatctgtatatagaattccacttcctcctcttaaagagctattttcagccacacactcttccactaaatgaataaactatcatttgcgtttgtgtgtttccctattgatgaacagtcaggatttataatttttttgccaggtttttactattataaactctgwggaaaacatgctcatttgttcttgtagtcttctgtggatttattttttagccttaaatctttaatccatgtggaatttattttgtacaggaggtgaagtggggattacagtgatttcttgactttcctcattctaatgattacccacctgaagagattcagtctccaggcacccaagtaaacacattg

SEQ ID NO: 101878 - DNA, 586 bp, Homo sapiens
gtgccagcatggtcaagtctggtgagggggctctttctggcttgcagagtgctgccttctccctatgtcctcacatggtggaaagagagtacaacctgtctagtgtctcttctcataagtgcactaatctcatcataagggcttcatcctcatgactttatctaaccctaataacctctcaaagaatcccatctccaaataaccagtacattttgaagttagggcatcgacattcaaattttgggggaacacaaacattcacccataatagtgatatattccaagaaaagtcactaagcaaaaggcaagtgtcacttaaaagggagagagagaggaagagtaaaggagagattgagagaggaattgggaaatggacctttctcttttatattgaagaaagattcaatttgcaaaagactgacacctctcatcagtatgaatttaatagcaggaaattctagacatgtatatcatatatgatagaaaaggtagtgagaagatttagtaaatagcagattcacaagcttgcrttggccataccatgtaaaggacaattattaatacttggaaatatctaaacttgctt

SEQ ID NO: 101879 - DNA, 619 bp, Homo sapiens
tcactcacatttgtgtccttcatgtctctgctctatgttgtttttgttccaggagccaggctaagggaatacactttttctgggatatgctagtcttggggatggtcttgcagtagaggaaagaatgtgatgatggaaccacatgatgggtctcaaagcttctgattggaagctgcttgtatcgcttctgctcaattttactgagcagagaaaatttcaagaccgaactgggacaccattgaagcaaagaagtcttcttctacagagagaggaagcaaaattttggtaacaataatgccataaatgacatagatctgtggaggaaacagacatatatrcacttaactagcagacactgtatgatagaggaaaatacatactccactaatcccaccttgcagtaagatgagtggggaaaatacgataaattgaaggtatgactcaggctcgcaagacattttgtggtcttgaagagagagatctcaggcaaaagtgagaaacagataaaagtgacaataagaactcttacttgggtaggacagaggaaataaggaaagcagtatgtttccatgacctagagaagaaacataatatataatattcctgaggaggtggatgt

SEQ ID NO: 101880 - DNA, 580 bp, Homo sapiens
attcgtaactctgagttctcataaaaggtgatatctggaagattagtaagtgttcaatttaagaaaacattaagtaagcttatcctgcattcctacacaaagagtacaacaacaatatattccacaacagtaaaggaaaattatcccaaataaactaaataggtaggcttttcatgaactgggcaactgctggaaccaagctaatatgaggttgctagctgattccagtatctgcccagaattagaatactgatctgaatttttacattacccattcctcttgttttttctgagctgcarttagagatcactggttggtgtgcaggaataagcagagttagttagtctaaattatagacaaaagcgtaaaacgtaaaaacaaccgatgagaccagaatttaataacaagtgtaccatagtttttgaaatataatttttctatctccagtttcccatttttactaatgagaaatcatggtaagactgatttgcattattatacttggcctgattatttgtataaagttcagcaagaatgattatttttcacataagctctttttattttattaattaatta

SEQ ID NO: 101881 - DNA, 598 bp, Homo sapiens
gaaccgcaattgtaaaatggcaaaaccttagctactgtgctacaacattagacagtttctattactcttccaagaaggagtctagagcagcttattttgaacttgcaaaggcttttagctgctcaagataatttttagggcaaactatgacatgagcctcctccaaggcagagaccaagagaaagtactgccacacggttataaggtcaagctcccaagaacatttttcaacacgtggtttctgggcaggatgaaagagtggacagttcccctgagtaacagaaaagttagaaaagagaaaggagaggaagagagagaaaaggatggcctgcagcagggtggggaaggtgaaatgctcagggaggccagagaaagacccaccygttacagcgttgctgaatcaaaagttcaggcggctgcttgtcagtctcgaagggacctgttccagcagtcccatcagctcttaagtattcccctttagggaggaaaaagctccccatgtcccatgatcctgtacatgcctaatcctgtcacccacagccatcagcaaagagtgagaagcagattaatccaaagagaatagcagttaacaccctgt

SEQ ID NO: 101882 - DNA, 558 bp, Homo sapiens
atctctgcctattaatcttcaaaaaccactgctttgttcatgttgttctccatttttaagagataacacatatgcctggattcatttcttctaatcacattgttctcatttccttaattacatgttattatcattctctgctcctgaaatattatccctgtttttgccattaatacaaattatggacttctctgagacccatcctccacagttgacctcttccatgaagcatgtcttgataaatcctagtccaacaatgatatggcctcattaaacgtttctaccacttttctatgccacacaatcattaccttttattatctagtttatctagatcatcagtctcaaaatataacacattgcatgatcccattcatatgatagtttcacaaaaacaaagctacagtgataaagaacagatcagtggctgccaagggttggggggagactatgactatgaarggatagcacaaggggcttttaggggtgatagaactgttctgaatcctgattgtggaggtcattacacaaatctattcatgtgttaaaattcataga

SEQ ID NO: 101883 - DNA, 555 bp, Homo sapiens
tgcctcttcaagtgagtctctgaccctcgtgtagcctaactgggagacacctcccagtaggggctgacacacacctgatacaggcaggtgcccctctgggatgaagcttccagaggaaggatcaggcagcaatatttgctgttctgcaatatttactgttctgcagcctccactggtaatacccaggcaaacagcgtctggagtggacctccagcaaactccaacagacctgcagctgagggacctgactgttagaaggaaaactaacaarctgaaaggaatagcatcaacatcaacaaaaaggacatctacaccaaaaccccatctgtaggtcaccaacatcaaagaccaacgcaaagatagggagaaaccaaagcagaaaattctaaaaaccagagctccccttctcctccaaaggatcgcaactgctcaccagcaatggaacaaagctggatggagaattactttgacgagatgacagaaataggcttcagaaggtcagtaataacaaacttctctgagctaaaggagcatgttctaacccattgcaaggaa

SEQ ID NO: 101884 - DNA, 555 bp, Homo sapiens
tgcctcttcaagtgagtctctgaccctcgtgtagcctaactgggagacacctcccagtaggggctgacacacacctgatacaggcaggtgcccctctgggatgaagcttccagaggaaggatcaggcagcaatatttgctgttctgcaatatttactgttctgcagcctccactggtaatacccaggcaaacagcgtctggagtggacctccagcaaactccaacagacctgcagctgagggacctgactgttagaaggaaaactaacaagctgaaaggaatagcatcaacatcaacaaaaaggacatctacaccaaaaccccatctgtaggtcaccaacatcaaagaccaacgcaaagatagggagaaaccaaagcagaaaattctaaaaaccagagcwccccttctcctccaaaggatcgcaactgctcaccagcaatggaacaaagctggatggagaattactttgacgagatgacagaaataggcttcagaaggtcagtaataacaaacttctctgagctaaaggagcatgttctaacccattgcaaggaa

SEQ ID NO: 101885 - DNA, 592 bp, Homo sapiens
tttgcatgagtaacaagaagccaaatgttaatcgccaagacaatgggaaaaatgtctccagggcatgttaggggtcttcatggcagcccctcccttcataggtctggaggcataggaggaaaaagttgtttcacgggctgggcccagaaccttactgctttgtggagtctcaaaagctggttccatgtgtcccagctgtggctaaaasgggccaacatacaattgaagccattgcttcagagggtacaagccccaagccttggaggcttgcatttggtattggccctgcaggtacacagaagtcaagaattgaggtttgggaacctccacctggatttctgatgatgtatggaaacacctggatatccaggcaaaagtttgctgcaggggtggagcattcatggagaacctctgctagggcagtgtgaaaaaaaaattgggagttggaacccctgcacagagcccccactggggcactgcctagtggagctgtgaaaagagggccactgtcctccagaacccagaatggtagatctactgacagcttgtactgtccacctggaaaagccacaggcagtcaatgccagcctgt

SEQ ID NO: 101886 - DNA, 592 bp, Homo sapiens
tttgcatgagtaacaagaagccaaatgttaatcgccaagacaatgggaaaaatgtctccagggcatgttaggggtcttcatggcagcccctcccttcataggtctggaggcataggaggaaaaagttgtttcacgggctgggcccagaaccttactgctttgtggagtctcaaaagctggttccatgtgtcccagctgtggctaaaacgggccaacatacaattgaagccattgcttcagagggtacaagccccaagccttggaggcttgcatttggtattggccctgcaggtacacagaagtcaagaattgaggtttgggaacctccacctggatttctgatgatgtatggaaacacctggatatccaggcaaaagtttgctgcaggggtggagcmttcatggagaacctctgctagggcagtgtgaaaaaaaaattgggagttggaacccctgcacagagcccccactggggcactgcctagtggagctgtgaaaagagggccactgtcctccagaacccagaatggtagatctactgacagcttgtactgtccacctggaaaagccacaggcagtcaatgccagcctgt

SEQ ID NO: 101887 - DNA, 602 bp, Homo sapiens
ctgttttctctactgtgtcagcaaaaataaaacagctgttaggacaaattatcagtagatattattaaaataccttaaaatatgagttttccatgctattcctgaaaatattgagtcagcattgaatagcaatgygcacagttcagcaggtgctccttatgttttaatggattcatttgcaaggcaaaagtgcacagtgtccaaattgtttcacatataactttccttttactctgaatccctcagaggaaaagtgatagtaaacaatagcttggacatgctgttcctgattagattcaaattttaaaagccctttcttatggtttgtcacgtggtcgtttatatcactctttagtaagggaaaataaaaggcacatcacaggtgagatgtgatgtcactgactagttgctgtgctgatgtactctccccatgtttttattgtttaaaaaaaaaaaggagagaaaatataaaactttgcatggcagagaaaggtaagatcttttagggaagtgtgtgtcaaactaaagctcatggcccaatagtggataatatttttctttccttaataaagcaaagacattcacagttgaatttctttttt

SEQ ID NO: 101888 - DNA, 602 bp, Homo sapiens
ctgttttctctactgtgtcagcaaaaataaaacagctgttaggacaaattatcagtagatattattaaaataccttaaaatatgagttttccatgctattcctgaaaatattgagtcagcattgaatagcaatgcgcacagttcagcaggtgctccttatgttttaatggattcatttgcaaggcaaaagtgcacagtgtccaaattgtttcacatataactttccttttactctgaatccctcagaggaaaagtgatagtaaacaatagcttggacatgctgttcctgattagattcaaattttaaaagccctttcttatggtttgtcaygtggtcgtttatatcactctttagtaagggaaaataaaaggcacatcacaggtgagatgtgatgtcactgactagttgctgtgctgatgtactctccccatgtttttattgtttaaaaaaaaaaaggagagaaaatataaaactttgcatggcagagaaaggtaagatcttttagggaagtgtgtgtcaaactaaagctcatggcccaatagtggataatatttttctttccttaataaagcaaagacattcacagttgaatttctttttt

SEQ ID NO: 101889 - DNA, 590 bp, Homo sapiens
aattttattgaattttgtctagctagccacgtttaaaatatgttttatgttcctctaccaagtgattctgagacacactggaatgtacacactcracacatttttggaaatagtgaatcacagattttatctgtgggttcaaaatcaaattgattcttaaagactcatctccactacaacctcttctgtaaagggctttctggttctattctacttcatgtggttctgtgtgactgaccagaaacagctttaattgacaggacagagattctaggaatttttgttagaagctgaaaagccttctaggggatgacccattctaaggtaagagagcatgaaggtacagaaatttggtctgagtcattggaccagtattggatgagagaaaacagaatgcataattatccatttacatggatttgtaagtgaaacatagggtgagaaagattaaaacacctgagggagctagagcagaggaggaggaatatgagagtgcattttttaacagtgtctatactaagccttcaataataataataataataaacccacaattcaaatattattgtgtcctatatccagtaacaagg

SEQ ID NO: 101890 - DNA, 590 bp, Homo sapiens
aattttattgaattttgtctagctagccacgtttaaaatatgttttatgttcctctaccaagtgattctgagacacactggaatgtacacactcaacacatttttggaaatagtgaatcacagattttatctgtgggttcaaaatcaaattgattcttaaagactcatctccactacaacctcttctgtaaagggctttctggttctattctacttcatgtggttctgtgtgactgaccagaaacagctttaattgacaggayagagattctaggaatttttgttagaagctgaaaagccttctaggggatgacccattctaaggtaagagagcatgaaggtacagaaatttggtctgagtcattggaccagtattggatgagagaaaacagaatgcataattatccatttacatggatttgtaagtgaaacatagggtgagaaagattaaaacacctgagggagctagagcagaggaggaggaatatgagagtgcattttttaacagtgtctatactaagccttcaataataataataataataaacccacaattcaaatattattgtgtcctatatccagtaacaagg

SEQ ID NO: 101891 - DNA, 590 bp, Homo sapiens
aattttattgaattttgtctagctagccacgtttaaaatatgttttatgttcctctaccaagtgattctgagacacactggaatgtacacactcaacacatttttggaaatagtgaatcacagattttatctgtgggttcaaaatcaaattgattcttaaagactcatctccactacaacctcttctgtaaagggctttctggttctattctacttcatgtggttctgtgtgactgaccagaaacagctttaattgacaggacagagattctaggaatttttgttagaagctgaaaagccttctaggggatgacccattctaaggtaagagagyatgaaggtacagaaatttggtctgagtcattggaccagtattggatgagagaaaacagaatgcataattatccatttacatggatttgtaagtgaaacatagggtgagaaagattaaaacacctgagggagctagagcagaggaggaggaatatgagagtgcattttttaacagtgtctatactaagccttcaataataataataataataaacccacaattcaaatattattgtgtcctatatccagtaacaagg

SEQ ID NO: 101892 - DNA, 583 bp, Homo sapiens
attaaagtctataaggagtaatttttccaagaaaacataatttggggactttaagaatgtttgagtccaaattacaagtacaatagtaaaattgaacacctcttatctgtcagccatgtctttaaatggtttacatatataatttattcagttctcatgacaaccttgcatgtcacattgttaccctcacttttcaggttagaaaactgaggcacagggatattaatttacttgctcagkatcataaacctagtaagtgtaagaactgggatttgaagtcaggtagtctggttcagagcctatacacttaagcacaaaggcattatatttgaatttgaatttcattataggaggagtttatattcaaccctggacatcttgatgacgttgcactttattgctgaagtatattaatattgttatttcatgtaattgcagagcccctcatgacctatataagacaatgtggctggaggtgattagaacagggaatacactttcaatttcaaatagagtgtgacattggagttaactaattaagtacactgctcttattcatttcagtgccttctggagggcaaaa

SEQ ID NO: 101893 - DNA, 583 bp, Homo sapiens
attaaagtctataaggagtaatttttccaagaaaacataatttggggactttaagaatgtttgagtccaaattacaagtacaatagtaaaattgaacacctcttatctgtcagccatgtctttaaatggtttacatatataatttattcagttctcatgacaaccttgcatgtcacattgttaccctcacttttcaggttagaaaactgaggcacagggatattaatttacttgctcagtatcataaacctagtaagtgtaagaactgggatttgaagtcaggtagtctggttcagagcctatacacttaagcamaaaggcattatatttgaatttgaatttcattataggaggagtttatattcaaccctggacatcttgatgacgttgcactttattgctgaagtatattaatattgttatttcatgtaattgcagagcccctcatgacctatataagacaatgtggctggaggtgattagaacagggaatacactttcaatttcaaatagagtgtgacattggagttaactaattaagtacactgctcttattcatttcagtgccttctggagggcaaaa

SEQ ID NO: 101894 - DNA, 583 bp, Homo sapiens
attaaagtctataaggagtaatttttccaagaaaacataatttggggactttaagaatgtttgagtccaaattacaagtacaatagtaaaattgaacacctcttatctgtcagccatgtctttaaatggtttacatatataatttattcagttctcatgacaaccttgcatgtcacattgttaccctcacttttcaggttagaaaactgaggcacagggatattaatttacttgctcagtatcataaacctagtaagtgtaagaactgggatttgaagtcaggtagtctggttcagagcctatacacttaagcacaaaggcattatatttgaatttgaatttcattataggaggagtttatattcaaccctggacatcttgatgacgttgcactttattrctgaagtatattaatattgttatttcatgtaattgcagagcccctcatgacctatataagacaatgtggctggaggtgattagaacagggaatacactttcaatttcaaatagagtgtgacattggagttaactaattaagtacactgctcttattcatttcagtgccttctggagggcaaaa

SEQ ID NO: 101895 - DNA, 359 bp, Homo sapiens
cccaaattccacgctggatgtgcttcccttcattctgaatttagaatgtgatcttgatcttgaaggagagctgagagtcatcacaaagcctcaggtgcatctttatttcacaactacagaaaaactcctctttttctctattttatctatttttactaccattgtctgtttcttaaagagtaatktcataggtccaaccatgtgagggaactatctttattggccctgcagaccacaaatttcttctaagcagacatgaaagaattaagcagcctagagggaaaatgaaatagtaaggaaggtatagctatatggaaacaaatagatcttagctctttctttgggttttcataatcctc

SEQ ID NO: 101896 - DNA, 480 bp, Homo sapiens
ctacgtaactatctatctagagctacagttttcaaagtatggtcccctggatcagcagcatcagcatcatctgggaactagctagacatgcatattatctggctctgtcctgagcccactgactctgaaactggggtgaggaccggaaattggtgctgaacaatacctccaggtgattctgatataggttaaaagtttgagaaccactgatcttccaggaatactttcaagtcccataggatgtgacagatgtcttcgtttggggtagctgtcctatacattacaggacatctggcatctstgattcccactctctaaatactagtcacatttttagtaactgcaacaaccaaaaaagaatgcacccacagattcctaaagtgctctctagaaggtgctattcctcctactgagaaacattggattagaaaatggccagtcacgttcatgtaggcagcaggaacctaagagtcaatggaa

SEQ ID NO: 101897 - DNA, 539 bp, Homo sapiens
atcgaatgccttttctcaaaccaagagtttattgaaggcaggggctgagacttttttttwaaatttctgacccagcattgaatataagcctagctcatggtagctattcaataacgttttttgttctgagcaaaactgagactcagattggttctttacagaatagtagatcagtgacagcctggggaatcaatttattaataaacatttttaattttacttcggatagaaaaaagaaagaaagaacactttcgtttaccatttttttctttctttttttttttttttgcactgatatctggaaagacagagaaatggaagataagatttgcctgtcctgacccagtctaaaaagtagaagtaacatagaaagagcaacaacagggggaagctaaagagatcatgataagaatcttgtaagacttgggaaaagaagtactaattcagaggtcctcatggcagaattttacagaggtaagtacaaagtaaccatcctatgctaccatagtctcagagggttgagagtggtgacccatgga

SEQ ID NO: 101898 - DNA, 539 bp, Homo sapiens
atcgaatgccttttctcaaaccaagagtttattgaaggcaggggctgagactttttttttaaatttctgacccagcattgaatataagcctagctcatggtagctattcaataacgttttttgttctgagcaaaactgagactcagattggttctttacagaatagtagatcrgtgacagcctggggaatcaatttattaataaacatttttaattttacttcggatagaaaaaagaaagaaagaacactttcgtttaccatttttttctttctttttttttttttttgcactgatatctggaaagacagagaaatggaagataagatttgcctgtcctgacccagtctaaaaagtagaagtaacatagaaagagcaacaacagggggaagctaaagagatcatgataagaatcttgtaagacttgggaaaagaagtactaattcagaggtcctcatggcagaattttacagaggtaagtacaaagtaaccatcctatgctaccatagtctcagagggttgagagtggtgacccatgga

SEQ ID NO: 101899 - DNA, 458 bp, Homo sapiens
atgaattcaggggattagaaagtcataccatttasttttgaggggaaattattgacggagtttgcagtaatttggcttgtcatccccaacatctgttgcctttgccgttacaccacttagctcctgatgacaaattgaacaagatcagagtgagtgcatgataactaataagcatcttcatgggtaaaatcagttaacatcaaaaacaggccagtggcattagtgtatgcagtttcctggtagtagtctcttcattttcactattcttagataattctttcactcctcaaggattcctaatcgtctctatgccgtctagaaaagactttaattatactatcttgcttatagaagtggccctaaaagaaacacatgtgtaatacaattataagaatatctgatatatgttttctgatgtaggattatcaatcacagtcatatctataatgaaactggaa

SEQ ID NO: 101900 - DNA, 588 bp, Homo sapiens
actgaataaagaaaacatggtgcatatacaccatgtaatactatgcagctataaaaaagaatgagatcatgtcctttatagcaatatggttggagctggaggtcattatcctaagccaggtaacacaggaacagaaaaccaaatactgcatgttctcacttataagtaggagctaagtaacgagaatacatggacacgaagaggggaacaacacaacccggrggctacctgagggtggagggtgggaagaagagggactcacaaaaagtacctattggggactatgcttattacctggatgatgaaataatctgcacacacagacccccatgacacagtttacctatatagcaaacctgcacatttacccctgaactgaaaattaaagttataatagcatttaaaaaaacctgtcttcagcatattctatccttgcttgctccaattcccatctctcagatcccctaagcccctgggaaagggcttaattctatccacactattctaacttcataacataatccttatttccatagtctaaaactgaggtcataaattactgattgtgcctctttaagtctcaccctc

SEQ ID NO: 101901 - DNA, 570 bp, Homo sapiens
gaacattgctgtgtgttaataaagaatgaaatttaatttcctctattcagcgggagataaaaaaatctyttagtcctagaggagaaggtggacaaacgatttcttatgcagctgtggaggaattttgtgagtttccttggaagttctccacatctccagggaaggtgcctctcttaggctcagtcatggaccacactggtgccctggacctgctcacggtggcttcttcctggcaggcactccatcctgtgaaatcctgtggaccattgttcacatatgaggcgggtggggttagatcaaggccaagcccattaaagtccttccatagtaaagagtacaacacggcttgaaaaggaatattcataattagagtaagcagaactttcagttctgaggtggcccctgcagggatcatattgttgaaagggtcataagaccatgagctgcactcccagatcatgcagatttctcatccgttggggctgtgctgacccccagggttttgggtgtgcatccatgaagaactagaaaagtcctgaagagtggaatccatttactacctcagattct

SEQ ID NO: 101902 - DNA, 570 bp, Homo sapiens
gaacattgctgtgtgttaataaagaatgaaatttaatttcctctattcagcgggagataaaaaaatcttttagtcctagaggagaaggtggacaaacgatttcttatgcagctgtggaggaattttgtgagtttccttggaagttctccacatctccagggaaggtgcctctcttaggctcagtcatggaccacactggtgccctggacctgctcacggtggcttcttcytggcaggcactccatcctgtgaaatcctgtggaccattgttcacatatgaggcgggtggggttagatcaaggccaagcccattaaagtccttccatagtaaagagtacaacacggcttgaaaaggaatattcataattagagtaagcagaactttcagttctgaggtggcccctgcagggatcatattgttgaaagggtcataagaccatgagctgcactcccagatcatgcagatttctcatccgttggggctgtgctgacccccagggttttgggtgtgcatccatgaagaactagaaaagtcctgaagagtggaatccatttactacctcagattct

SEQ ID NO: 101903 - DNA, 579 bp, Homo sapiens
aaatacatattatgagtattcaaaatgtatctcagaagaataataaaatagtccaaaggtatgtgttgattattatcaacttcttggtytatgttattagcgatagaccatgaaatggagttaataacaaagcagaaaaacacaaaatgtgactatactagggaaatggatctttgtccttaacagattctcaatgccaggagattaattttgtaagcactaaaggacctcttgtgacactaggttaaactgactttatggaaataattcctatccagttttgtaatagaaggtgatttatgctaatgtaatccaactctatggctctccagcacaaactctgttggtcttattaatgatatggcccagttaataaccactccctccagctaggatcacactttccatttttatatattccactgcattagaggggtaccatctacttttcccctgctacttgatagctataccttttcatcaccttaagcatctttgctaataagtctttaatacaagaaaaatgctatggaaaaacacatcatgattttattaaaataggtgttacacctgagagag

SEQ ID NO: 101904 - DNA, 579 bp, Homo sapiens
aaatacatattatgagtattcaaaatgtatctcagaagaataataaaatagtccaaaggtatgtgttgattattatcaacttcttggtttatgttattagcgatagaccatgaaatggagttaataacaaagcagaaaaacacaaaatgtgactatactagggaaatggatctttgtccttaacagattctcaatgccaggagattaattttgtaagcactaaaggacctcttgtgacactaggttaaactgactttatggaaataattcctatccagttttgtaatagaaggtgatttatgctaatgtaatccaactctatggctctccagcacaaactctgttggtcttattaatgatatggcccagttaataaccactccctccagctaggrtcacactttccatttttatatattccactgcattagaggggtaccatctacttttcccctgctacttgatagctataccttttcatcaccttaagcatctttgctaataagtctttaatacaagaaaaatgctatggaaaaacacatcatgattttattaaaataggtgttacacctgagagag

SEQ ID NO: 101905 - DNA, 579 bp, Homo sapiens
aaatacatattatgagtattcaaaatgtatctcagaagaataataaaatagtccaaaggtatgtgttgattattatcaacttcttggtttatgttattagcgatagaccatgaaatggagttaataacaaagcagaaaaacacaaaatgtgactatactagggaaatggatctttgtccttaacagattctcaatgccaggagattaattttgtaagcactaaaggacctcttgtgacactaggttaaactgactttatggaaataattcctatccagttttgtaatagaaggtgatttatgctaatgtaatccaactctatggctctccagcacaaactctgttggtcttattaatgatatggcccagttaataaccactccctccagctaggatcacactttccatttttatatattccactgcattagaggggtaccatctacttttcccctgctacttgatagctataccttttcatcaccttaagcatctttgctaatragtctttaatacaagaaaaatgctatggaaaaacacatcatgattttattaaaataggtgttacacctgagagag

SEQ ID NO: 101906 - DNA, 254 bp, Homo sapiens
ggaagcaccatctaacatttattatttatattttagatwttaatatatattacctagaatgaaaaaataacacacaaatttaaataaacatacagtcatttatcttctaaattaatttgttgacagataaggtagcatatagaatttgtactcagtattcctaacatactttgaacttcttgaacatacttttctctgttcaaatcaatcatacttaattgtttattggattatgaaaattatgcaagacagct

SEQ ID NO: 101907 - DNA, 649 bp, Homo sapiens
acagaaacacacacacacacacacacacaagtatagacacgtatacttctctctttaagttatctacaaatggtaaaatgcaagattagcatctaatttctcatatgcaacatgggacattacagtagagtaaaaaaggctgcccaaagatattattcagcaaactgaaaaaattcaagaaaattattgttcactggattagtttattttgtgctgctatagtagaatacctgagactgggtaatttataaacaatagatgtttatttggcttatggccctgcatgctgggaagtcaaagatcaaggagctccatctgatgagagccttcttgtcacattgtctcatggtggaaggcagaagggcaagagagcacacacatgtgagagagaaaggggaccaaactcattctttcattaggaacccactcccacagtaactaatctacattcatkacaacagcattaatccactcatgatggcagaaacctgtgacctaatcacatcttaaacaccccacctctcaacattgttacactggggattaaacttccaacacatgaactttggagggcatattcaaaccacagcattcacttattttatcaaaggaaaatatttgattaaataccaccgtctactactaatca

SEQ ID NO: 101908 - DNA, 511 bp, Homo sapiens
ggcaaactgtatttattacaaagatggatgcaatactatcttcatatccaaagttattctataggtatgtcactcctccattaagaattggcttgtatgtctccttcccttgaaagtgagtgggaagcgatttgtgactaccctaaccaataagtttkgtaaaagtgttgctctgtgacttctaaggatgggatataaaaatgtcatgcacttcctccatgggatgttcctttttggaacccagacatcatgctgggaggaagtccaagaaacctgtggagagacccacaaagagtagagctgaggatcatgggcacagtcctggcatagcttcagccaatagtaccattttgcaagcatgtgagaatcattgtgaaagtggatcttccagccttagctgagctgttgcaactgatgccatatggatcagcaaagagctgtccccagctgaagtcctgacccaattaaagatgcatgagcaaaatcaatgcttaatattattttaagccac

SEQ ID NO: 101909 - DNA, 602 bp, Homo sapiens
gagtgggaagcgatttgtgactaccctaaccaataagttttgyaaaagtgttgctctgtgacttctaaggatgggatataaaaatgtcatgcacttcctccatgggatgttcctttttggaacccagacatcatgctgggaggaagtccaagaaacctgtggagagacccacaaagagtagagctgaggatcatgggcacagtcctggcatagcttcagccaatagtaccattttgcaagcatgtgagaatcattgtgaaagtggatcttccagccttagctgagctgttgcaactgatgccatatggatcagcaaagagctgtccccagctgaagtcctgacccaattaaagatgcatgagcaaaatcaatgcttaatattattttaagccactatatttttgagtgatttgttacacagcaatagacagccagaacagctagttttagtaaggccttaactgaggaataggcatgaatataaaagaaacaaactgtgcattcacctcagcataattcaccctttgcattctttcactagtctaaattatcccagttcccattgcctttccttatatcacctacttatttttcattgtttt

SEQ ID NO: 101910 - DNA, 636 bp, Homo sapiens
ttgccatttgcccaacaaaccacccatttaccttttttaatgaagccaaagattcccagtggagaaataattagaaccactgtcatttttctaaagtcatttgatgtttcaacagctccaatgagtggctgcacagcagtattattcacactactcttagcttggaaaaataaagaaactttgaaaaagagtatttttcttatgttaggttcttcttagtttctggatccaatagctgggcaagtgatttatttttcttttatcagatgtggatggaattggtagcagggtcatctactggatagtgaataaaataactcaggaaaaaagtcactgcattccaaacttacatgtaaataaatcaagtgaattctgtcttttttcttcttgtttcttgtgggaaggatccaggtaacctctgtcaaaatctcagtttttcagaaaaatggctttctatcttaaatggccaggtaactcttggacaaatgatttaaataatggatcagttttaagtataagtatcttaggactatgcttcttctttgtccaggctcagtaagttcaaacwtgctcagtaatgatgtgaatgctcaacttgaaatcacacaactaatgttttaaaatgtgaactttttt

SEQ ID NO: 101911 - DNA, 627 bp, Homo sapiens
ttttagctcaggtccaacttacagtgggtccagtgagtccccagactcatcctgtggtcacttctccagtgccagaatgcataattggcatagacatacttaacagctggcagaacccccacattggctacctgactggtaagatgacggctagtatggagggaaaggccaaatggaagccattagagctgcctctacctagaaagatagtaaatcaaaaacaatattgcatctctggagggattgcagagatcagtgccatcatcaaggacttgaaatatgcaaaggtggtgattcttggccgggcacagtggctcacrcctgtaatcccagcattttgggaggctgtcgtgggcggatcacgaggtcaggagatctagaccatcctggctaacacggtgaaatcccttctctactaaaaatacaaaaaattagcccggtgtggtggcgggtgcctgtagtcccagctattcgggaggctgaggcaggagaatggcgtgaacctgggaggcagagcctgcagtgagctgagatcatgccactgcactccagcctgggcgacagagcgagactccgtctcaaaaaaaacaaaaaaacaaaaaaaaacttgaaagacatggaggtggt

SEQ ID NO: 101912 - DNA, 614 bp, Homo sapiens
gagtttatgttaatgagtaacttttggaaggtctctaaggatagagactggttgccatgggaatcaagtatttgaacacatttgattagagggttggaactttcaatcccctgycccatcaccaatggccagggatttaacctatcatgcctatgtaatgagacctccataaaacccaaaggatggagttcagggagctgccaggttgctgaacacttagaggtgctgggaggatggtgcacctagagagggcatgacagctctgcacccatccctcatatcttgccttggcatctcttccatctggctgttcctgagttgtatccttttataataaaccagtaatctggtaagtaaacttttcttgcgtgatgtgagccattctaacaattattaaacctggggagaagattatgtggacctctgatagacagtcaatcagacagcactggacttggaactggcatctgaaataggggcagccttttcagacggagcccttaacctacaggatctgatgttgtcaccagttagctagcaccagaattgagtttaattgcaggaaactgaagaaatacctggtatgaaaaatactccatatctgatgtcagaaa

SEQ ID NO: 101913 - DNA, 605 bp, Homo sapiens
aaatactgatttatgtgtctctgtcttggagattcagattcttaggtctggggtagaggcttttaacattatttaataaaaattccagttgattcttatgatcaagcagtttggggaactattgccatagttcccagatttgtctgtacattggaataccgaaaaaactttaaaaattacaaatgcttctgtcccacccaccccaatcctagagattataatcctacatttgattctaagatacaaacaagtttggagactactactttactatgctgtggagatctggtactcaaggaaggtgtcataaagtaaataccatccagtatgttcttaagctaatatatactgaaaacatacaatgttagaagcatttttcacatattatgtcttttaatcttcaaaataaaaaagctaatatrtattgaaaacctacaatattagaaatatttttcatatattatgtcttttaatcttcaaaataaatctatcaggttaacatgattattacctgtattttataggttagaaagtttgtttagaaacctcattcaagctcacagagtttgaaagtgactaagcaggtacataaaactaaatttgtc

SEQ ID NO: 101914 - DNA, 377 bp, Homo sapiens
aatcaaatcaccgatttaaagagtgcaatatataataatcatttttaaagtattggattaaatctgataggttttccagaaatgaacaaaaatcagctctaaaaccaaagctgatttttagaaaatttgaaaatgtaaatcagccctatccatactatagtttctctaaaactttatctgaaagagtcattttaaaataactattaaacaatgtaactgctatcttaatgttctgaaataagttaaaacattttaaaatatgaatactgtaaaggaaataaayggtgggaaggaaaagtagagaaagaaatgccaattccagtccaaagctttatttgccaagttttcttggaatgaattttaccaatttatgaatt

SEQ ID NO: 101915 - DNA, 489 bp, Homo sapiens
tgcacttacgtgaggatgcactcgggccagccagtggctttgcccacctccctcagacaccgctccagggtccgtcagcgccaggcccatgggccatggctgtctgcaactcccgacacaagctgcaaggcaagagagccgctgggaaaccgcaccgcaaggatgctgggattggaacaggaattaaaagaaatgaaaaaatgtgtaagcaaaaactcagctgtatgtaaaaaaaacccaattccccctgagaatgagaaagagccttagtcctttaaaaaaactacctgttttcctatggctagtgagccttatcgctcccttcccaggcattatcaaaaccctaattccctaactgtgcaactgcaaggtsactaaacaaacaaatgcaagtcacaaaacatatttttcctaaaaacgtaaaaaaaaaaaaaacataatgcgtgcttcaattaaataactctctgtttctcgcttctgtaatatgct

SEQ ID NO: 101916 - DNA, 593 bp, Homo sapiens
tagttatcccatgtaatgcacctagcacaatgccaagcatttttcagtgcttttaaaaatgttagtccttctcatttcccataaaatattttcttggtaatagtctctttccaggtgatgtgtacaaaagtcacacaaacagtactcagtggaaggtctttgcagatgcttctcacaataaatccggactaaagtcccatgcctaagttcttactgaggaaggggacaaagccagctcagatgttcagtagaagcagacggtgtgaagaaagctttttcctgccttctcctccatttgcaacagcagctcctccagattgtcttcyatgtcgtctgactgctgcaggcactggcaaatctcacagatgaggaaagctcccagggtggcatcttccagggtatcttggatgtccatgttgatcacgtgcacaggctgaaaggtctgctgttctctggaacacagatcttccaccactgtgtcatagacactctcctcacaggtgaagatgacatcaaaggaatcagtgcactcctgaaatctttctggaccgggcttgattctctcatttcttcccaagatgtgtaagattccg

SEQ ID NO: 101917 - DNA, 600 bp, Homo sapiens
cttaaaacttatgaattgtttatttctggaattttcaatttaatatttttagaccatggatgactgcaggcaactgaaacctcagaaaggaaaactgaggataagcgggggagtactctgtgtgtgtgtgtgtgtgtgtgtgtgtgtgtgtrtgtgtgtgtgtatgtgtgtgtgtgtgtacatttctaacaattgctccccacagcaattctattcattaggtaatagtattaactcgttaggtaattttgtagatgaggcaaattgcctaaagtcctgttgcagctgaattgtggcgaatctactattcaaacccagggctctctaaccaatatcaaaaggaacactcttatctcacatacatttctatttttgaaaatactgcacaagaaactccatagtataatatataatatagactctgtatcagctaattatcaaaattacctgagaagctttttgaaaaagaaaattacatatgtatatgtatatgtgtatgtatatgtatatgtatatctgggtttcacttctagagattctaactaggtagatctggactgacttacaaatctggatttttataaagctaccaagccaact

SEQ ID NO: 101918 - DNA, 613 bp, Homo sapiens
gacttttaacttcttactgtatgcaaagcacagtatattagaaattcatttatacagtcttggaaaaatgacttagattaatctcactatagttcaacatatatcttcaaaaaaaacagcatcagacatccatcaatcatttgaagcccttcttccagctagagaactgatcaatttaaggacattcacttatttctctgtgcacrgagagtgtgaacttttcattgcattttaattcatgtttttccctcttttattgtcacattacctgtcaaatatgaactttgtatccaaaggttccttttccttatatagcaaagtgaatattttgttaactatttttctttcttctcactttctttccccccataaaattgtataaaaatggcatttgacctatttgtttttttaataacaaatatagtgttaaactgagaaaaaataagattcttctttctgatgcctcttctagagaccattgaaaatatatagaatctatctgcttggctttaaactgtacaaatttgaatgtcattctgaagttaaagctgtccctgaggactgatgacatttgatctgagtaacagctatggtactcagttgaggtcgttct

SEQ ID NO: 101919 - DNA, 583 bp, Homo sapiens
ccagccaaatgatatgtatttttaaagataatgtagataattgttgaattaaactatcttttcataagaagagggcttatttactctaattgaatattaatagtctttgtttcttcatatgaaacatttgcagagccttcaaagtctccatgaataaaaccatcaaaaataaaagaacgcttaattcaaatttttcatgttcattgtcttggccagttagttttaattgtttcatttctactaatttatgaacaaggtttggctaaacaataataaacaatcttctagtataaacagagccctggagagtggggggtggtaactgtttgcgtgagtatgatgcccctttaattgaattcacagaacacattaaaaaaaaagtacaataatttgtctttgtaataaaaccccctcccttcactttatttctctcttcattcagggttactcctcataaatttaagaarttcttttattgttttaagcaggagtttacacatacctgggagtaattaatttaactttttacagatttctttgtagtgtgggggtaactttctgacctttcttctatttagaatga

SEQ ID NO: 101920 - DNA, 640 bp, Homo sapiens
tatatttaatgtaatctcaaccaaccgtaaaatgaaggtactgttttaactcctatttacggttgaagaaactgaggcataaagcctttaaggaatttgttcaagatcacatagctaggaagctgtatgtttggaatttgaacccagagggcctgataccagagcacagaataccctttgtccctacccccactaccaggagaaagcaagtgtccaggaaaacatttttttctcctttttttaattctatgagctgcaattacacaaaattggtttagygttttgtttgatgacacattcttattattgccatgcatggataatttattatttttaataatgtgataaataccccccagtgctaccccaaacacaaggtaagaccttgacaataatctaatttccaaaatgtggtacttttatttatttcctttcccctatttccctgaagtaaccattattaagaatttacttttctttttatatagtcttattactattatatgtattcttaaaacatatatttttatgttagatgcttttcacttcaaaaaacctatcgtggtgcatgtaatcttttgggacatattattgctaaaattgatctacattattatactctgattactagataataagc

SEQ ID NO: 101921 - DNA, 640 bp, Homo sapiens
tatatttaatgtaatctcaaccaaccgtaaaatgaaggtactgttttaactcctatttacggttgaagaaactgaggcataaagcctttaaggaatttgttcaagatcacatagctaggaagctgtatgtttggaatttgaacccagagggcctgataccagagcacagaataccctttgtccctacccccactaccaggagaaagcaagtgtccaggaaaacatttttttctcctttttttaattctatgagctgcaattacacaaaattggtttagcgttttgtttgatgacacattcttattattgccatgcatggataatttattatttttaataatgtgataaataccccccagtgctaccccaaacacaaggtaagaccttgacaataatctaatttccaaaatgtggtacttytatttatttcctttcccctatttccctgaagtaaccattattaagaatttacttttctttttatatagtcttattactattatatgtattcttaaaacatatatttttatgttagatgcttttcacttcaaaaaacctatcgtggtgcatgtaatcttttgggacatattattgctaaaattgatctacattattatactctgattactagataataagc

SEQ ID NO: 101922 - DNA, 582 bp, Homo sapiens
gggcaggtacctggcattaaagcttgggaatcagggtagagcaggactaggagaatgaaaggggaagggcatcaccctttcagggggcagaactgtgtgtctggccacacagggttccacagggtgcctctgattcagtgatctcttactttttgcctcttgaaccccctcaagattctgcctctctgagctttattctgggataaaacaggatattaagggtcaaagrtccagggctcagagtctgggagcttggtctcctttactctctaggaaggtggccaggggttctgtgggtgaactaggccttggattgcccctggtttccaagtgacacaggttgtgtgccctgtgctgagcaccagcctcagcaggaattcccagagctccctttgctaccttgaggctcaggctaactccatcctcacagcagtaagcccagatgctctacttccttctttgcatgggtgattgtcattaagaggtctcaatgagacctaagctatagacttgatgtcctggatccagtggaatcagggatcatttgagccaaagggtcttttgtcatgttcctgtccaatt

SEQ ID NO: 101923 - DNA, 584 bp, Homo sapiens
gtaatcacccccagggaatatattcacgtgttcaaaaaagaacatttactgagttccttgtatgtgctaggcactgcgggagacacacaaagaccagtgagccaacatcagggcaatagagggtgacagggagatgacacgtgaacagatccattacagggcagcatgcacatgcccccacacagcctgctgggaggccccagggtccaggcagcatgcccaggaggggcagctgggactcaccctgtgcccagggcatggctggccgggcttcacctcgmaaaggtctactgggggaaatgacagagggagtcttgggccagacggagcctccagagggagtctccttgggaagggcctccttgggggtcctgctaagctgctgtcccactgttgcaatcaagggcaccatttggctttgtaattgtatcttaacctttcgtttatcggagtggaatgacaatggcaggtgtgtaagccagcagcacagccattgccagctctgagcgggcttcttgtggcctgcgccccactctttcctctcccctcagccgggcctccctatgggtctccacaagggacag

SEQ ID NO: 101924 - DNA, 673 bp, Homo sapiens
tgttaaacctgaaatattaatgaaagttcatcaaccggaagggtacaaagataggagcctgttctaggcagaaggaatcaactaaaaatatgagggtgggagggggaagggggagagagagaaatgcaatgaaacaaaaacagaaaattcattttttaattgtcctacaaataaaacaagtatactcctgcttcctgcccttttgtagtgtttgtcytctccctctctaccccctcaccttttccttacccttctaaatctgaccgtttacttttcccagcccaactgagaggctcttgcctgcagggctcttctctggctctcctgttctctctggctgtcttctgagtggccccagtgccagcatccagccctaggttgctctttttcctgcacctccgcggggttttagaatttgaagtgcattttcacctgcagtctcctttgagtgtcctgatagccacattaggtcagcaggacgtaccgtattatctccactttacaaaagagaaaccaaggcacccggagatccaccaaaggcccaggctcactttgctgtgagtgacacagtcagaactatcatcctactttctattcccagacaaaagcattttatttccatttagttggacttgcacatgtgatactcacaccagcccttcagcccagttgc

SEQ ID NO: 101925 - DNA, 468 bp, Homo sapiens
agcagtttctcagatagattctgcctagttcttctctgaagatatttcttttccagcataggcctcaatgcactccaaaatatcccctaactgattctataaaaaatgtgtttccaaactgtttcatcacaagaaggactgaactctttgaggtgaatgcacacatcaaaagctgtttctcataatgcttctttccagtttttatctgaagatatttccttattccccataggctttttatgctacctaatatggctasacagattttgcaaaaacagtgtttccaaactgctctttctaaagagaggtttaactctgtgagatgaatgcacacatcacaaagcagtttctagataccttctttctagtttttttccaaagataatttctttatcaccacaggcttcaatgcactccaaaaaatcccattgtagattctacagaaacagtagttccaaattgctcaat

SEQ ID NO: 101926 - DNA, 468 bp, Homo sapiens
agcagtttctcagatagattctgcctagttcttctctgaagatatttcttttccagcataggcctcaatgcactccaaaatatcccctaactgattctataaaaaatgtgtttccaaactgtttcatcacaagaaggactgaactctttgaggtgaatgcacacatcaaaagctgtttctcataatgcttctttccagtttttatctgaagatatttccttattccccataggctttttatgctacctaatatggctagacagattttgcaaaaacagtgtttccaaactgctctttcwaaagagaggtttaactctgtgagatgaatgcacacatcacaaagcagtttctagataccttctttctagtttttttccaaagataatttctttatcaccacaggcttcaatgcactccaaaaaatcccattgtagattctacagaaacagtagttccaaattgctcaat

SEQ ID NO: 101927 - DNA, 481 bp, Homo sapiens
atcataaagcagtttctcaggaagattctgtctagttcttggctgaagatattttcttttgcaccatagtcctgaatgcaatccaaaatattcctttgaagattctacaaaaacagtgtgtccaaagtgatcaatcaacagaaaattttaactctgtgagatgaatgcagacatcacaatgcagtttctcaaaaatcttctttctagtttttgttcaaagatatttcctttttcactataggcttcaatgcgctctcaactttcattcacagattctacaaaaacagtgtttccaaactgctcagtcaaaaagcaggttaaactctgtcacttgaatgakcccatctcaaaagcagtttctcaaaaaaatttctttctagtttttatccaaaaatatttcatttttcaacataggcctcagggcactctgaaatatacctttgtatattctacagaaacagtgttgccaaacacatcaatc

SEQ ID NO: 101928 - DNA, 583 bp, Homo sapiens
cttaaaaagcttctttctggtgattttctgaagatatttcttttatcactgtaggcttcaatgcactcccaaatttcccrtctcagattctacaaaaacactgtttccaaattgctcaaggaaaaaacaggtttaactctgtgacttgaacacacatatcacaaaacagtttctcaaaaagcttccttctactttttatttgaagataattcttttttcaccttagacgtcaatgtgctccaaaatatccctttgtggatattacaaaaacagtgtttcaaaactgtttgattaaaagaagaactaaactctgtgagatgaacacacacaaaagaaagaaggttctcataatccttctttccagttttaatctgaagacatttcctttttcaccataggctttttttgcactacctaatatcagttcacagattttgcaaaaacaatgtttccaaactgctcagtcataataaaggtttcactctgtgagataaatgcattcatcacaaagaagcttctcaaaaagctactttcttgtttttatccaaagataattcctttatcaccctagggttcaatgcat

SEQ ID NO: 101929 - DNA, 583 bp, Homo sapiens
cttaaaaagcttctttctggtgattttctgaagatatttcttttatcactgtaggcttcaatgcactcccaaatttcccgtctcagattctacaaaaacactgtttccaaattgctcaaggaaaaaacaggtttaactctgtgacttgaacacacatatcacaaaacagtttctcaaaaagcttccttctactttttatttgaagataattcttttttcaccttagacgtcaatgtgctccaaaatatccctttgtggatattacaaaaacagtgtttcaaaactgtttgattaaaagaagaactaaactctgtgagatgaacacacacaaaagaaagaaggttctcataatccttctttccagttttaatctgaagacatttcctttttcaccataggctttttttgcactacctaatatcagttcacagattttgcaaaaacaaygtttccaaactgctcagtcataataaaggtttcactctgtgagataaatgcattcatcacaaagaagcttctcaaaaagctactttcttgtttttatccaaagataattcctttatcaccctagggttcaatgcat

SEQ ID NO: 101930 - DNA, 575 bp, Homo sapiens
ctgtgtctaaacacaggcaaaaaatagacgtttaaacatgaatagagtaatttattttgtcaggatcttcataagttgaatggctctgcccattgctctgagatttaattcaagtgtgcaggtggataaacagatcttaattctcagctttgatgaccatgtttatttgctctctgtgagcttcaacttttccaaccctaaagcccgctgagatccagagccttatcattccaaccaaaacagttttctaaatctagacccacccaaaattctaaagatgaaatatatctcataaaacatggaaaatcctgaaaatagtcataaacagtgattctagcacaaacccacacatatccccttgatgggaaaaggaatattatagggatttagcaaacaagaaaaaccatgagactgaaacaaggtaacactacctaratcacaaacagttatatcaagagagaaaaaagcagcataggtattactctttattattaattctaattagttgatttgtgttccccttaaattataaagtaagtttagcctttttatgaattctggtattctaaagtctg

SEQ ID NO: 101931 - DNA, 586 bp, Homo sapiens
tgtactgcagagtggagaattcttagtaccagtcatcagtgctctgttcacagaaaaccaaaggagttcagagaaaggtaggattaccctcagctgaagggtgcacaaataaaacttcatggcttacattggagctgggctctgcagaccaggtatgacttgaccaygggagtgaggaggagaaggaggagaaaggaatattccagacacatcaaaaaggcacagaagcaggaaaatataaggagtaggtgggaaacagtgaatagtttggtattagacttgcaagtgcttagggatggtagaaaataaaacaaagagtaagtatgagtcagagtagcaggcactgtataccagggtaaggatttggagatatattttatgggcaatggggagttaatgatggctttgagaagatgggcgctgtgatgaaacctgggcaaaggaacaaggtcatgagcatcatggagaatcagctgagtggaaacaggcctgaagctcaaagggcattgcagaggagaattgcaactcccagcctcacgttggaaaactttagtgcctcttttagatagtacagctgtaagagaaa

SEQ ID NO: 101932 - DNA, 416 bp, Homo sapiens
tggacaccccagaggggtcgtgatttactctaggcatgatttgttcatgcctagagtaaagcctactctagactactcctcacaaagtttgtttttttggttttttttttttkgttttttttttttgagacagtctcactctgtcgcccaggctggagtgcagtgacgcggtctccactcactgccccctccacctctcaggttcaagtaatcctcctgcctcagcctcccaagtagatgggattacaggtgtgtgctcccatgcctggctaattgttgtatttttcgtagaaacgggatttcaccatgttggccactcctgacctcaagtgatccacccaccttggcctcccaaagtgctgggattataggcatgagccactgcgcccagccttcacaaagtttaaaaagataat

SEQ ID NO: 101933 - DNA, 594 bp, Homo sapiens
ttttacaaaacctcatagaattcaaataaataaaattttaaaatacaacaaataaatttacaaatagaattttaaaaagaaatgcaatattggcacacaaaaaaaccacaaaacattgttgaaataaatttataaagatctaaataartggaaagaaccccaagttcatagttcagaagacttaaccttgttaagatagcaacactccccaaactgctctatagattcaacataattcctaccaaaatctaaaatctaagctgggtgttttttttttttaataaattgacacactgattctaaaaaatttatatgaaaattaacaggacccagaataaccaaagcattcttgaaaaagaccaaatttggaagagtcacacatcccaattgcaaaatgtattacaaagctgcagtgatcaagacagtgcatcactagcacaggagatcgattatagaactgagagtccagaaataatccatcaaatttatagtaaattgatttctgacaaaggtgccaagaaagagaaaagaatagtcatttcaaaaagtagtgctgggacaactggatatccacatgcaaaagaatgaaccagg

SEQ ID NO: 101934 - DNA, 594 bp, Homo sapiens
ttttacaaaacctcatagaattcaaataaataaaattttaaaatacaacaaataaatttacaaatagaattttaaaaagaaatgcaatattggcacacaaaaaaaccacaaaacattgttgaaataaatttataaagatctaaataagtggaaagaaccccaagttcatagttcagaagacttaaccttgttaagatagcaacactccccaaactgctctatagattcaacataattcctaccaaaatctaaaatctaagctgggtgttttttttttttaataaattgacacactgattctaaaaaatttatatgaaaattaacaggacccagaataaccaaagcattcttgaaaaagaccaaatttggaagagtcacacatcccaattgcaaaatgtattacaaagctgcagtgatcaagacagtgcatcactagcacaggagatcgattatagaactgagagtccagaaataatccatcaaatttayagtaaattgatttctgacaaaggtgccaagaaagagaaaagaatagtcatttcaaaaagtagtgctgggacaactggatatccacatgcaaaagaatgaaccagg

SEQ ID NO: 101935 - DNA, 499 bp, Homo sapiens
aaacacacaaatatataaatgactggagataagaaaatcaagtatcacagccacagaagaacaagaaacaaatatgcttttttttttttttttttgagacaggatcttactcggtcatctgcagctcactgcagcctcagcctcttgggctcaagcgatgctttcacctcagcctctagagtagcgggaatacaggcatgcaccaccacatttgttttttwttattattattattattattattattattattattattattattattattttgtgcagcagccagttcttgctatgttgcccatgctgatctcaaactcctggactcaaaagatcctcctgcctcggcctcccaaagtgttgggattacaggcatgaggcactgtactggccagcaaatgcattaattctgctttttttgtgtacttctgctttcagagctaattatttgttctttagatgagactggcagccttgtgtgaaatgtagaatctgtaga

SEQ ID NO: 101936 - DNA, 520 bp, Homo sapiens
cctctcacccttcaccctcaggtaggccccaggatctgttgttcccctctatgtgtccgtgtgttctcatcatttaactcccatgtataagtgagaatatgcagtatcagaaattttttaaatattttatttaattccatgtttagtctctcaccaatactaagaccacagaggggaaattataatttttttcctatttttattaaagaaataattaaagcatttttatacacattcttagtcttggttatccatttgtactatyttctttttgaagctaaagcttctatctatatctgacatgacagaatgagtctatacccacatgattagaactagttgcagaaagtagactcagagatctaagttattatatatatgtgtgtatcataatcctacaaaatatatattttgtatacaatttgggggatcctctttagaaaaaatataaaattacaaaaacaattaaggcataggatcttggaaggaagccttgcaagtgacgttccctgaagcttaa

SEQ ID NO: 101937 - DNA, 588 bp, Homo sapiens
ctgagggagtttctttcacctgatcacgggtacctgtaccacaagasatcaaccctggagaagtcacttatttcctttctgttttaagcaaactaagcaaatagcctatatgtaacgatgtttttatatttccataaatattctacaattgtgcaatacagagagtgcaactgtggcctgatgagtgtattatgttatgatcaatgtttaccgatacagatttatacttgtcattttcaaaaaatatactattatattataaaacaatgtaactgaacaatagaaatataaaagcatagtgtagtgtgtaagcttaaagttaaaaaagaaatttaaaactgagcaatatcctataccacagacaattttgagagaatcataatgaagccacaagtcctgactgttcacacttccgtagagattgcagaagatgctgttacatataacattcctcgtagaggaataatgatccagcatctgcacctctatttccatgaaacagagggccactaagacctgaattcttccatctatttattcattaaacaaatatttaatgatttgttcatcaatatatttatgagctag

SEQ ID NO: 101938 - DNA, 588 bp, Homo sapiens
ctgagggagtttctttcacctgatcacgggtacctgtaccacaagagatcaaccctggagaagtcacttatttcctttctgttttaagcaaactaagcaaatagcctatatgtaacgatgtttttatatttccataaatattctacaattgtgcaatacagagagtgcaactgtggcctgatgagtgtattatgttatgatcaatgtttaccgatacagatttatacttgtcattttcaaaaaatatactattatattataaaacaatgtaactgaacaatagaaatataaaagcatagtgtagtgtgtaagcttamagttaaaaaagaaatttaaaactgagcaatatcctataccacagacaattttgagagaatcataatgaagccacaagtcctgactgttcacacttccgtagagattgcagaagatgctgttacatataacattcctcgtagaggaataatgatccagcatctgcacctctatttccatgaaacagagggccactaagacctgaattcttccatctatttattcattaaacaaatatttaatgatttgttcatcaatatatttatgagctag

SEQ ID NO: 101939 - DNA, 564 bp, Homo sapiens
aaactgccataatcttgggcagccctgtgtgatagtgattgacacaagttttccacaaagtaagatttaggatgttctctttggcactgcttatggtcaaatattttagctcagaaaaattaaagacagatagatgcccatctcactcccatgtcagtcagatcttcctggaatttgacatattttaatgaaacatagagttttactttttggaaagaaaaatcagtcatattcaaggtttattaaacaagagataactgtttgcctstctctcaatttcctatggcccaaggagctcaaaggtcaaactcctgatttggattagaggtttcccatatggcaaggcaatgtttaatcctcaatcagggcagctgtaaataaagcttctatcagattttctgaattttttacttaaaaaaaccattattttcaaattcacctgatctcccctttacagcatttttatgaatttaggcaaaaagacttgatacacagtgtgaacaatttctataaccctggctccagacatctgtaaattacaataatcacagatgtgcagcaact

SEQ ID NO: 101940 - DNA, 564 bp, Homo sapiens
aaactgccataatcttgggcagccctgtgtgatagtgattgacacaagttttccacaaagtaagatttaggatgttctctttggcactgcttatggtcaaatattttagctcagaaaaattaaagacagatagatgcccatctcactcccatgtcagtcagatcttcctggaatttgacatattttaatgaaacatagagttttactttttggaaagaaaaatcagtcatattcaaggtttattaaacaagagataactgtttgcctgtctctcaatttcctatggcccaaggagctcaaaggtcaaactcctgatttggattagaggtttcccatatggcaaggcaatgyttaatcctcaatcagggcagctgtaaataaagcttctatcagattttctgaattttttacttaaaaaaaccattattttcaaattcacctgatctcccctttacagcatttttatgaatttaggcaaaaagacttgatacacagtgtgaacaatttctataaccctggctccagacatctgtaaattacaataatcacagatgtgcagcaact

SEQ ID NO: 101941 - DNA, 564 bp, Homo sapiens
aaactgccataatcttgggcagccctgtgtgatagtgattgacacaagttttccacaaagtaagatttaggatgttctctttggcactgcttatggtcaaatattttagctcagaaaaattaaagacagatagatgcccatctcactcccatgtcagtcagatcttcctggaatttgacatattttaatgaaacatagagttttactttttggaaagaaaaatcagtcatattcaaggtttattaaacaagagataactgtttgcctgtctctcaatttcctatggcccaaggagctcaaaggtcaaactcctgatttggattagaggtttcccatatggcaaggcaatgtttaatcctcaatcagggcagctgtaaataaagcttctatcagattttctgaattttttacttaaaaaaaccattattttcaaattcacctgatctcmcctttacagcatttttatgaatttaggcaaaaagacttgatacacagtgtgaacaatttctataaccctggctccagacatctgtaaattacaataatcacagatgtgcagcaact

SEQ ID NO: 101942 - DNA, 564 bp, Homo sapiens
aaactgccataatcttgggcagccctgtgtgatagtgattgacacaagttttccacaaagtaagatttaggatgttctctttggcactgcttatggtcaaatattttagctcagaaaaattaaagacagatagatgcccatctcactcccatgtcagtcagatcttcctggaatttgacatattttaatgaaacatagagttttactttttggaaagaaaaatcagtcatattcaaggtttattaaacaagagataactgtttgcctgtctctcaatttcctatggcccaaggagctcaaaggtcaaactcctgatttggattagaggtttcccatatggcaaggcaatgtttaatcctcaatcagggcagctgtaaataaagcttctatcagattttctgaattttttacttaaaaaaaccattattttcaaattcacctgatctcccctttacagcatttttatgaatttaggcaaaaagacttratacacagtgtgaacaatttctataaccctggctccagacatctgtaaattacaataatcacagatgtgcagcaact

SEQ ID NO: 101943 - DNA, 646 bp, Homo sapiens
caagtatatgttttatttggatatactgacaattttctttgaggaatggaagttaagttctagaccaaaatatacaagtgaaattttgaaattgaaagtctctcacaacaaaaacaaatttcatatttctgaattcacaaattcatttctggatattggatgttaattgcttctctcgtttcgaagtattttgccttattgaaggtttaaattattctctaaaatggctaaggagtactcctggtagtgttgcagggtcagcaatcaatcaaaacagattatgtgcataggcactagcacaaggggaagatagagttttctgcatgagactaaacatatttttaacccaatgaaatttctccataacacaaaaggtagattcttttttattttatagctgaatttctaagttattactttgtatcttctagtccaatttacagttcgtctgagttgatcaataacttaaagaaataaaactggggcaagaaaattgtctaaatttagtcatttcaatttaatttactgaatacaatttccaatagcaattgagttcaattgcatcactatcaatgaactttaaaaamgttatccaagttcaatatccaatctaggcctcaaactagaacataaattaaattaatga

SEQ ID NO: 101944 - DNA, 570 bp, Homo sapiens
tggtattagcaaagaaaaagaggtaacggctaccagatagacagccaataaaatctgccagatgttcagaaaggcaaaattaacctggaagtggtgtgyggaatggatgaaggggataagttataaggggcagtgctggagaacatacggaggaagggcatcaaccagagcattgatggtgagaaactctctaatatttgtgtaaatgtaaacttggaggacataaaccaccattcaatgtgaagttatttttaaacattagaaagaaatggagatcctacttggctttcactatgcaccaccagattgtttaattgctttaatttgctcatatccacatgagattacttaaaattgtctaatgtgcctctcatttaatttctattgaatacttttaaacctccttcttatactcctaacaaacccctttggcttctctctctggcaaaggcagtgtgcaaaagcagttttaatgccatcttttacatattaaaattttttcacttccaccaacttaattcaacgttcagcatttggccttttgttctttagttatttttttctgcttga

SEQ ID NO: 101945 - DNA, 570 bp, Homo sapiens
tggtattagcaaagaaaaagaggtaacggctaccagatagacagccaataaaatctgccagatgttcagaaaggcaaaattaacctggaagtggtgtgcggaatggatgaaggggataagttataaggggcagtgctggagaacatacggaggaagggcatcaaccagagcattgatggtgagaaactctctaatatttgtgtaaatgtaaacttggaggacataaaccaccattcaatgtgaagttatttttaaacattagaaagaaatggagatcctacttggctttcactatgcaccaccagattgtttaattgctttaatttgctcatatccacatgagattacttaaaattgtctaatgtgcctctcatttaatttctattgaatacttttaaamctccttcttatactcctaacaaacccctttggcttctctctctggcaaaggcagtgtgcaaaagcagttttaatgccatcttttacatattaaaattttttcacttccaccaacttaattcaacgttcagcatttggccttttgttctttagttatttttttctgcttga

SEQ ID NO: 101946 - DNA, 529 bp, Homo sapiens
gttgcctctccaagcctaaatttcctcatctgaaaaatagggcaattaatacctgcaataagcaattctgagggtagagtgagataaagtaggcaaaatactaaaacatcttaattattattattttagatttgacaggtaaggaaaggaagaaacaataaaatgaagtgacttacttgaagctaaattgctgttagtagaggagtcaagaagagcttaagttgaaattgctgacatttaattctaggcctctaaaatggaaattttgcatgcttcaatctaataggtcttctgctccaagttctgtgctcaatttactgaaycacagattgtgattatttgagagctagtgtgggcagctagctcttcataatcttgatataaagatctctctcaggattctctagttgtcagttacaataggaaaagagaatggaggcacttttaaattctaatattacctcaaatttagcagcttaaaatatcacgtatttatgatctcacaatttctatgcagtgggagtctagg

SEQ ID NO: 101947 - DNA, 639 bp, Homo sapiens
tacggataagccttaaagcccttgaagaagttttaatcaatagaggcaggtgttgaagaaaagaaaactgagtttggctgcagaaattttaaatttctactttatcgggtcatttgaaaaagtcacttaaattctgagccccagtttcccatccaaaagtgatgaattcctgccttccaaggtaattttaagcattaaatacaattcagagggtggcacattgaagaaagtaaatctttatttggagaacagctatgtgccttgtgtccgatgtgtgtttttgtgagttcccatgcattcatcactacgttaggattccagcaaagagcaaacattaaaatcaagtctacgattatgaggtcttgasaagtggagttctcaattcctggagaaagacagaatttaattttattgcaaaagatgaatgactgcaggatatcaagatatttgctgccagggagatgaaacagtgagtatcattccccagtatcctcattgtattttatcctgttagctccaaagctgggtctcaagctatgcatacccctcccccagtaaaaaatagattattctctgaaaagcaaaaattaccttcatgtattttctgaatgatatgctacgctatcattctcatgaaat

SEQ ID NO: 101948 - DNA, 590 bp, Homo sapiens
cctgctttcttgttcataaatggtaccttctcactatgttcctrcatgctggaaggggtaaggtcacttagaatctcttttataaggacactaatcctcatcatgaggcctctgtccttatgacctaattacctcccaaagcccccatctcctaataccaccttaggtattagaattatcaacatatctccatgcagactattcaaaataacaaagacatggaatcaacctaaatgcccatcaatgatagacttgataaagaaaaatgtggtacgtatacacaatgtagccattaaaaggaataagatcatgtcctttgcagggacatgaatggagctgaaggtccttatctttagcaaactaacaccgggacagaaaaccaaataccacatgttctcacttataagagctaaatgatgataactcatggacacatagaggggaaaacacacactgggacctatcagaggatggagggtgggaggagggagaggatcagaaaaaataaccaatgggtactaggcttaatgcctgggtgatgaaataatgtgtagaacaaattagataagcaagtttttccaacatttcag

SEQ ID NO: 101949 - DNA, 590 bp, Homo sapiens
cctgctttcttgttcataaatggtaccttctcactatgttcctacatgctggaaggggtaaggtcacttagaatctcttttataaggacactaatcctcatcatgaggcctctgtccttatgacctaattacctcccaaagcccccatctcctaataccaccttaggtattagaattatcaacatatctccatgcagactattcaaaatarcaaagacatggaatcaacctaaatgcccatcaatgatagacttgataaagaaaaatgtggtacgtatacacaatgtagccattaaaaggaataagatcatgtcctttgcagggacatgaatggagctgaaggtccttatctttagcaaactaacaccgggacagaaaaccaaataccacatgttctcacttataagagctaaatgatgataactcatggacacatagaggggaaaacacacactgggacctatcagaggatggagggtgggaggagggagaggatcagaaaaaataaccaatgggtactaggcttaatgcctgggtgatgaaataatgtgtagaacaaattagataagcaagtttttccaacatttcag

SEQ ID NO: 101950 - DNA, 590 bp, Homo sapiens
cctgctttcttgttcataaatggtaccttctcactatgttcctacatgctggaaggggtaaggtcacttagaatctcttttataaggacactaatcctcatcatgaggcctctgtccttatgacctaattacctcccaaagcccccatctcctaataccaccttaggtattagaattatcaacatatctccatgcagactattcaaaataacaaagacatggaatcaacctaaatgcccatcaatgatagacttgataaagaaaaatgtggtacgtatacacaatgyagccattaaaaggaataagatcatgtcctttgcagggacatgaatggagctgaaggtccttatctttagcaaactaacaccgggacagaaaaccaaataccacatgttctcacttataagagctaaatgatgataactcatggacacatagaggggaaaacacacactgggacctatcagaggatggagggtgggaggagggagaggatcagaaaaaataaccaatgggtactaggcttaatgcctgggtgatgaaataatgtgtagaacaaattagataagcaagtttttccaacatttcag

SEQ ID NO: 101951 - DNA, 608 bp, Homo sapiens
ctcaactaggaaactagaactcataaggggaaccttaagtaaaagtgggtaccctggtctctctctgggcctctggccttgcatctggactttgggacatgcttaaacttgcccactgggtagtaggggagaaatgagctcagctagggagcagtctgtaggggcatgtgctctagatcatatggatacaagttgtagtatgtgagtgtttccattctgtcacccttgtgcatttagtagcatgttgaatgtttacacataacagtctaggctcagctgagtggttcttttgctcatctagctagcaggcattcttgtgattgcattcagttggtgaattagctaggggctggcttcagctggagactttgggatagctaggattctctctcacaccctctccgtatcatctcaaggcctcttcttttttatgtggcttctccatgtttcttccccacatgctttctccagtaatgtaatctgaatttctacrtggtagctcagaggtcccaagaaagcaaaagcaggagatttacggctttcttaggacttaaacccagaacttgcatggcaccacttcactgtattccattggtttaaaagggtca

SEQ ID NO: 101952 - DNA, 568 bp, Homo sapiens
ctcagagaattcagatgcaagtgcacagctcagagatgcagaggtgccttggtcaatgatttcaagggtcaataaggagaagcttaagaactttcagtgaatagatgcatggaaaaaatattcagactagcttttgcctggtcttagctctatgaaataagccctcacaaagttcttagtttaggagacagaaactgacttcaaacacactgtatgtgctttacagcaatgatttttaccactagctgcacttatcctgggagcgtgaataaatgcctaaggctgggccccaacccrggtcaatgcaaacaggatctttgggagaaggggtcccagcctccatgttgtttagaaactccccaggtgattctaatgtgtggcccatgtgcaaacctctgttttaatttggggtatgtatgtatacttagtaaactgtataccattttcaatagagtattatccacaataaagcgtcatacacagtgaatccagttagcattttcattcactccagcaatccctgcaggtatgggtacttacggatatgtggactcagtgtaaactactc

SEQ ID NO: 101953 - DNA, 621 bp, Homo sapiens
attatatatgcaccaaatattgaaccacttaaatatataaagcaaataatagatatcaaggcagagataagactgcaatacaaaagtagtaggggacatcaacatcctagttgcagcaaaaaatcaacaaagaaacatcagatttgcacaacaaaggaaataatcaacagagtgaagacacaacctacagaatgggagaaaatatttgcaaactatatatccgataagggattaatatttaaaatatataaagaacccaaacaaatatacactgttgatgagaatgtaaattattacagccattatggaaaacagcatggaggtttctcaaaaaattaaaaataaaactaccatatgattcagctatcccactactgggtatatagccaaaggaaatgaaatcagtaatatcaaagagatrtctccattctcatgtttattgcagcactatcacaatatccaagatatgaaatcaacctgtgttcctcagtggatgaatggacaaggaaaacgtgctatatatacatagtggaataatgtgcagccattaaaaagaatgaaatcctgtcatttgcagcaacatgagtaagcttgaagaacatgttaaatgaaacaagccag

SEQ ID NO: 101954 - DNA, 586 bp, Homo sapiens
agaattgagtaatgatacatttacacatatttcaaatagcatgtctaagtttacttatatagccttttgcaactactacatgatgatgataccacatgaacctttggacctgatcaaagttaagtcaaattatgtaatgtttatttaaatgtggagaaaaaaagattcatagacttttaaaatcatggagtgaattcctaaagtatatgaaaataaatcggaacacattatcaagatttagagaaaaaactggaaaaaatacattatttttttcattgttaagaccaatacaaacaaaaccttyaaaacttatcaccaggctgggcgtggtggctcatgcctgtaatcccagcactttgggaggctgaggagggcagatcacctgaggtagggagttcgagaccagcctgaacaacatggagaaaccccgtgtctccaggttctttgatgtttccaagtcttccaacacagctagtgtgtttgcctagttctcttggaaattgtcctttattttaaaaataattttaataagtcagttaatattattctgtacctacataattgaaacagtcaggtttttctcctt

SEQ ID NO: 101955 - DNA, 586 bp, Homo sapiens
agaattgagtaatgatacatttacacatatttcaaatagcatgtctaagtttacttatatagccttttgcaactactacatgatgatgataccacatgaacctttggacctgatcaaagttaagtcaaattatgtaatgtttatttaaatgtggagaaaaaaagattcatagacttttaaaatcatggagtgaattcctaaagtatatgaaaataaatcggaacacattatcaagatttagagaaaaaactggaaaaaatacattatttttttcattgttaagaccaatacaaacaaaaccttcaaaacttatcaccaggctgggcrtggtggctcatgcctgtaatcccagcactttgggaggctgaggagggcagatcacctgaggtagggagttcgagaccagcctgaacaacatggagaaaccccgtgtctccaggttctttgatgtttccaagtcttccaacacagctagtgtgtttgcctagttctcttggaaattgtcctttattttaaaaataattttaataagtcagttaatattattctgtacctacataattgaaacagtcaggtttttctcctt

SEQ ID NO: 101956 - DNA, 583 bp, Homo sapiens
agtgcaatttacatgccatgtgacatgcatataatcagttttagaagatgttcccaaaacatttccagaatagatgtactaaactatgctcttactagtaggctaagagatttctgattgttccatcgaattgtawtttctcatatctatcaactttgagcacttataatagttactgttcagtgagtaagcaatttgcatagattatcaattatccttataacaatcttacaaagtggaatgaaactttcactctgcaggagaagaattttatgtcataaagggtaatatatttttcaaggtcaaatacccaatactatcagttcagggactgtaattgtggtcttcctgaccatattgcttgctaatccgaatattatcgtaatcctattagtacattaaattagaatttaacaagataatatctgtggcagcctgctgtacagcttacaattcaacagccattgtttcttcaagttttatagtttcctacatcttttatatactatatgcacagaagctttgtgaggaagttttattctctccattttacaaatggggaaaatgagattcacaagagata

SEQ ID NO: 101957 - DNA, 583 bp, Homo sapiens
agtgcaatttacatgccatgtgacatgcatataatcagttttagaagatgttcccaaaacatttccagaatagatgtactaaactatgctcttactagtaggctaagagatttctgattgttccatcgaattgtattttctcatatctatcaactttgagcacttataatagttactgttcagtgagtaagcaatttgcatagattatcaattatccttataacaatcttacaaagtrgaatgaaactttcactctgcaggagaagaattttatgtcataaagggtaatatatttttcaaggtcaaatacccaatactatcagttcagggactgtaattgtggtcttcctgaccatattgcttgctaatccgaatattatcgtaatcctattagtacattaaattagaatttaacaagataatatctgtggcagcctgctgtacagcttacaattcaacagccattgtttcttcaagttttatagtttcctacatcttttatatactatatgcacagaagctttgtgaggaagttttattctctccattttacaaatggggaaaatgagattcacaagagata

SEQ ID NO: 101958 - DNA, 328 bp, Homo sapiens
ggcactgtactggccaatgagaacaatgctagcaagactggtaagtccttgaaattaacttttaaatcatatttatatactatgattgtccagtatatagcaaatgagttatttttataaaacatgaaggatttttgaggcccaaatgawtgaatagattctatattttatatgcagacattattctatacattacaataaaattagcttatctcctgaagttattacatgttatgtaattttattttatttacacagtaccgtgtctcccatgacccaacaagtaatgttttcagaaatcacttcaactctctttgaagtgaaggct

SEQ ID NO: 101959 - DNA, 567 bp, Homo sapiens
atttcctgttcagtgtgtgttaggagacaattgtataataatattttgctcctctttctacatgggaaatgcctgaactgcatgggttagatagaatttacacttcattcttcatattcagttagagctcagtcctgcttgggcccagtgaggagccaaatactgtacacctcacaattgtatgccctctggacaacagaaggaaacatatatgyaccagattccacataatcctgttcccattgatccaagggttgccccacaaggcattaataaatgtgcactttcagattctgttgcaattttgcatttataggacatggaagaactaacaactaaaaccttccttgattagtcatctgagttttagttttacttctttctgtgacatacggcactgagattcagttgcctctaacaacatgagagactagaaaatgaccgtgtgtagttgttgtgttagagtcagtagaatcattactacatcatctggtgaaaatccagttgattctgttggacagagcctcaagctgagggtacacaaagtacaaattcccaaagtgggtt

SEQ ID NO: 101960 - DNA, 180 bp, Homo sapiens
cattatttcattttttatggctgagttgtattccacagtgtgtgtgtgtgtgtgtgtgtgtgtgtgtgtgtggggatcacattttctttagccactcatccattgayggggacttaggttgtttcagtgtctttgcaattgtgaattatgctgtgataaacatattcatgcaagtgtctt

SEQ ID NO: 101961 - DNA, 180 bp, Homo sapiens
cattatttcattttttatggctgagttgtattccacagtgtgtgtgtgtgtgtgtgtgtgtgtgtgtgtgtggggatcacattttctttagccactcatccattgacggggacttaggttgwttcagtgtctttgcaattgtgaattatgctgtgataaacatattcatgcaagtgtctt

SEQ ID NO: 101962 - DNA, 660 bp, Homo sapiens
tatcactctgttagggcagaaatgcttttcccaaatcatccccatgatcctaggttagggctcactggtatgtcgtcggtctccttctagctacaagggaggagggaccttgtcaagaacatacttaaatacaatttgttgccttaataactcaccaatgatggtaattgagggagagacagaaagagttagctgtagctcacttgaatgaagcccggaggcttatacaaacttaatgtactttgaggagaaatttgactgtgattaagatctgctttagagagatggattttggcatattctggctgagagttgaaaatgcttcatcttgttcaatttctttcccaactcatcaaagcaaggctaggtggaaacttctttacttagaatgtgctattttcagctcaccctgaacttattcaaaattcattttgtcttaaaattaattgagactaccccatattcaggctgcctctgcactggaaatcaagacttctaggcaaacatttttcatgattgtattttccttttaaacaattttatttgtaaaaatttataaaatacaaatgtaattttgttagacagatataytgggtagtggtgaagtcaggacttatagtgtttccatgaccagaataacatacattgtacctattaagt

SEQ ID NO: 101963 - DNA, 578 bp, Homo sapiens
gatgtattttgagtcacgcaataaaattttaaggcataattattattcttcataaaatagctgatgttcaggtatcctacaaatctttcgtgtgtataattatctttgtaatcttagccttaaatatgtctcccaaaactaaaatatttaaagcattttataatttagttcaatattcatatccccaaccttcttggaatttaaaaactactcacattttctcaaaatatatttatacccataaacattgttrtaaattaattttttattagtatttacattgtaatttccaagcacatatgctacaatcatctcagtaaaattaacaatgataaaattagctaaagggcagataaagaaaggtgttaggaaatactattttgatctaaaattctaagttccccaatttgcacaatgaagatatgtgtgtgtgtgtgtgtgtgtgtgtaataggatgataagttattctcaattttcacatttctgctgggcttagtggattatataatgtgataataggccagtaatttccagctttctttttgtagcagtagcatctttattgaaaaaaaatttat

SEQ ID NO: 101964 - DNA, 578 bp, Homo sapiens
gatgtattttgagtcacgcaataaaattttaaggcataattattattcttcataaaatagctgatgttcaggtatcctacaaatctttcgtgtgtataattatctttgtaatcttagccttaaatatgtctcccaaaactaaaatatttaaagcattttataatttagttcaatattcatatccccaaccttcttggaatttaaaaactactcacattttctcaaaatatatttatacccataaacattgttgtaaattaattttttattagtatttacattgtaatttccaagcacatatgctacaatcatctcagtaaaattaacaatgawaaaattagctaaagggcagataaagaaaggtgttaggaaatactattttgatctaaaattctaagttccccaatttgcacaatgaagatatgtgtgtgtgtgtgtgtgtgtgtgtaataggatgataagttattctcaattttcacatttctgctgggcttagtggattatataatgtgataataggccagtaatttccagctttctttttgtagcagtagcatctttattgaaaaaaaatttat

SEQ ID NO: 101965 - DNA, 472 bp, Homo sapiens
ccaataaaaattagaatttcttaccttattcttcagatctcatcctttatttcatactgtctcaaatcttttgtttcccagggctatgttmtgaatctttcaattcaccaatttctccttcagctgcattgaatctgtatactatttgagtctccactgagtttttaactttagttatatttttaattgaacttctatttgttctttttaaaaacatgcttggtcatttgttatagtctctttttctttgctcattattttcaaggttcctttttatatctgcaagcatattaaacacactgattttatattctatgataatgttaatatctgaaatatttagtgttctgatactgctgttatttctgctggatttcacttatagtactttgtttcatatgtgttttataatttttgatgataacttcatgtttcttgagaattcacctggggaaattatttgaggcctcag

SEQ ID NO: 101966 - DNA, 575 bp, Homo sapiens
atattacatacaccaggtgcctctgacctttagtttcttcatctgtgaaatgggcttgtggggaagattaaaggagatgatatatgcaaaatgctcagtgtgcagtctgcagggaggcattcaaacagtaaatacacaatacatgttagcagttactgttaccattactattttgctatcattattttsttattagttgtctgcactatcacttccccttccaggaagcaattagaacccaagacttaatattgaaggagaaaaagggagaggcatgctggaagttgaaggacatccaattataaataatttgatttaactattattcactcctcttaaaccttgattcttatactctcacacatccagtgcaatctctctgaaaccctatgaatcttggtatgttagtaatattaatatggtaagaaggaatatagaacagtggttaagattgattctgcagcctcaccacctgggtttgaatgcacttttgtcatttattagctatgtgacccagagcaggttacttaacctctctatgtctcaatttcctcatctagaaaactggctgttat

SEQ ID NO: 101967 - DNA, 575 bp, Homo sapiens
atattacatacaccaggtgcctctgacctttagtttcttcatctgtgaaatgggcttgtggggaagattaaaggagatgatatatgcaaaatgctcagtgtgcagtctgcagggaggcattcaaacagtaaatacacaatacatgttagcagttactgttaccattactattttgctatcattattttgttattagttgtctgcactatcacttccccttccaggaagcaattagaacccaagacttaatattgaaggagaaaaagggagaggcatgctggaagttgaaggacatccaattataaataatttgatttaactattattcactcctcttaaaccttgattcttatactctcacacatccagtgcaatctctctgaaaccctatgaatcttrgtatgttagtaatattaatatggtaagaaggaatatagaacagtggttaagattgattctgcagcctcaccacctgggtttgaatgcacttttgtcatttattagctatgtgacccagagcaggttacttaacctctctatgtctcaatttcctcatctagaaaactggctgttat

SEQ ID NO: 101968 - DNA, 566 bp, Homo sapiens
ggccatttttaaacaccttcttttggagtaggctgttctttgacatggactgcaaagttttacttatgcagttattttatcacctttatcgcaaatgcataaaaagtaaagactcaaggaaagaaggaaggttctaaaaatattcttcatagaggcagacacaaactggggttgaaaagcccaattatcttctgtcacttatatcactctagttggaaacagctttaacatcgggagtgaccacatattacctatcctgctcagagtcaccactgcatttactttctagtagatgatttaacagacagacagagaatgtgagtgccactggttagaacatggtttctaggtgtcacactatttcatcaggcratgatgaatcacactgcggctctcacatcgactttcccacgacctctgagcaactagagaaagccaaagaacaattctgggagtttgatttccctaacaaagcaacagaaggcccagattaaactggcctctttgaaacttaaaaggaaccaccattttgtcaccttttaggggggcaagctgattaatgggca

SEQ ID NO: 101969 - DNA, 609 bp, Homo sapiens
gcaaataatcattatgaatacagagacctaatttatatttgagtgtgatgcttctttgaagaagtaatacttaggttaagacctaaagaatgagttggagtagccatagggacagttggaggttacagaaagagaacacaatgtatgcaaaggccctgcaatgggaaagagtttccygcaggaactaaaaacagaagaggtgtggtggaccactgtggtgggagaggacgggagagaggtatttggggttggaccatgcagactatgtggatgactttgtaagtcattttcaatatatcatttataactatgaatcttcagtttatcttatgatttcagtgaaaataactttatttaagtcaaaattaattttcctagacacctgctctaactcaaaacatagttatccacataccaagccaccctactatgtctccttcaccctttgtatatacacatctcttgctgcattcagctaactctgggccccaattcccctcatcctagattagaaaaaaaagcacacatcctctggtagcagatggcaagtgacagaatactcagggtagcactgctgttccaataactaagtttatggaaagcagcccc

SEQ ID NO: 101970 - DNA, 609 bp, Homo sapiens
gcaaataatcattatgaatacagagacctaatttatatttgagtgtgatgcttctttgaagaagtaatacttaggttaagacctaaagaatgagttggagtagccatagggacagttggaggttacagaaagagaacacaatgtatgcaaaggccctgcaatgggaaagagtttcccgcaggaactaaaarcagaagaggtgtggtggaccactgtggtgggagaggacgggagagaggtatttggggttggaccatgcagactatgtggatgactttgtaagtcattttcaatatatcatttataactatgaatcttcagtttatcttatgatttcagtgaaaataactttatttaagtcaaaattaattttcctagacacctgctctaactcaaaacatagttatccacataccaagccaccctactatgtctccttcaccctttgtatatacacatctcttgctgcattcagctaactctgggccccaattcccctcatcctagattagaaaaaaaagcacacatcctctggtagcagatggcaagtgacagaatactcagggtagcactgctgttccaataactaagtttatggaaagcagcccc

SEQ ID NO: 101971 - DNA, 639 bp, Homo sapiens
ggtgtaaaattacaaaaccattatatttggtaaagaaaataagaaattttaagggttgttaacccatcgtgtttttatcacgaggaaaacctgtgtaaagttatatagcatgggtccttctgtagttatgatgcactgagaaagtatgtagtaagtggaggtccaacctggtactagcaaaacacaaagcaggacagagatactccaggacatagtgatattattttaaaatggatgtttagatgtgggagaggcaataaataaaatgggtttctgtagctctatttctttatttttatattagctaaagagtctgcttatatacataaagtatataaagaaggtaacagctacaatgctttgatgctttggcaaaaactacccagagtgkaaaaggaccctgtaaataaaagccttacctatgggttgcaggtgcttacttttcctcaggacagtatgagaaaataaataagtaatgtgcatatagcatataatgacattctgatgaatgtatttccctcaaggctcttttaagcacctgttgccgtacagtgtatgtttctttgttctgggtgcactaaatgagtaaatcatttaaggggtctgaatcgaaaatttccaatattttataacaatatt

SEQ ID NO: 101972 - DNA, 636 bp, Homo sapiens
acctctgataggggaagttcaggaagttcttaaagtttcagaagtgatgcttggatatgtcatgaaggatggttacacattacctaggtgtgggtgggaraaaaaggattccagcaaaataaattccaggcagtggccctaaggccattaggtgcagagtgattttgagtaatcaaaaaaaaaaaaaatctattgtgacttgtgctcagaaagctgatgaaaatgtcatgtgtcacgtcatgttgagctttgtggccatagttaagggggcaaagaaaaagcaattgtaagaactgtggaagccagtaaatgaattgtagcacgggagggaaaagattagatttgtatgttgcacatgcacacagactacagacaccacctcccttttttaaaaaatctcttcattggtacagtttgcagatccttcattgaaaatagatctttctttatctttctcccccacgtctgttctatcaaaattttaccagctttaagtcaacatgaaaagtgtttaacagaatagggttaagaaaagacttccaggcttgccaaaaactttcttttctctaataaaactggcctaaaattaaagatgaaagaaaaatatccagctgcatttccccccttgtaggcatg

SEQ ID NO: 101973 - DNA, 636 bp, Homo sapiens
acctctgataggggaagttcaggaagttcttaaagtttcagaagtgatgcttggatatgtcatgaaggatggttacacattacctaggtgtgggtgggagaaaaaggattccagcaaaataaattccaggcagtggccctaaggccattaggtgcagagtgattttgagtaatcaaaaaaaaaaaaaatctattgtgacttgtgctcagaaagctgatgaaaatgtcatgtgtcacgtcatgttgagctttgtggccatagttaagggggcaaagaaaaagcaattgtaagaactgtggaagccagtaaatgaattgtagcacgggagggaaaagattagatttgtatgttgcacatgcacacagactacagacaccacctcccttktttaaaaaatctcttcattggtacagtttgcagatccttcattgaaaatagatctttctttatctttctcccccacgtctgttctatcaaaattttaccagctttaagtcaacatgaaaagtgtttaacagaatagggttaagaaaagacttccaggcttgccaaaaactttcttttctctaataaaactggcctaaaattaaagatgaaagaaaaatatccagctgcatttccccccttgtaggcatg

SEQ ID NO: 101974 - DNA, 627 bp, Homo sapiens
gttggtgtcagagaattgattggtgtgaagaaaaaaactccatactcttggcgccagaattggtgttataaaaatacttcagagaaggaaaatgaaaaaaggtgactgagttttgaaatatcaattatatctcttcctaactggagtttagaaccattgagggagagtggcaggatagggattaggttcctaacaggaaaagwcacattggaggagaggttttggtagtgcaaatacatgagcttgctaactttgctttgcgttgtgcttagcacccagattgatgccttccagggtgcagggcagacctagctccactacatttaacaagtcaccaagggagcagacaagagttcaacatctctgtagtcagggagtgaaggctgagccagccattctcaccagataagtcacatcctatttgagttgaggtgtgaggttatctctaagaaggctgttgtaacttgaatgaagagtgttaataccctaatggcaataagccaacctgaagacctaaaaccaggggtaagcggtctgctgaaaaaacacattccacagcaaaatgtttcagcctttaaccaatggatttggctattgatctaaatgaaaatcattcagaagatgact

SEQ ID NO: 101975 - DNA, 612 bp, Homo sapiens
ttgctttgctattgaaaatctttgcatgaaaaaatctgtaaaacacattttcacttcccctatagtacaaatttagcaataagcaaattcttcatctatttgcctcatagatttccttcctgaatatcacctcattttattctgagtatttagtgaaagttaaattccaacagatgagtcatcttcagtagctgttggttccctcatggcttctaatttgtaaatctgtattggaatctgtacttgacttatatttatcgcctatatttagctcaagttcaatgtggactacaaaaccacatctggtctccagagctcccagatctaaccactggcacaaatcttttccaactgataaggagcttcacttaaacaccttcagctggaagcacagtgcaaatgttctcagctgtctggcttggcacctggaactgtccccattacattttggtatgacgtgagtgggtgtcactttctgaataccttgaaatgaaagaaatccttgaattctaaaatgtgccagaatgtgtagcatttataaaggataataaatttaatttcgtatttatratagaaagtaaataatgtgatgaagtaatatttagaattaca

SEQ ID NO: 101976 - DNA, 562 bp, Homo sapiens
gaaatgtttaatctcaagtctctttctgatatgaagttaaatactaaagacatctatagtcagtaaataaatgttggtttaattcctgggattttgcttgttcacttgtttatttgtattccacatatgcatgcatgctctgcttgaaaaatatcctatatatttttattttacttgaaaaataaaaatctgagacctttattttataacatgctttatcaatgtgacatgaaatagagaaaagccattcaaattttcaaataatgaatttatatatcaaaaaattctcctgcatgaatcaaataatccattyacaattttatcacccaagaaaatcagagtgactttgagttgtggtaacaacttttaattagttcaataagacatattaattttaaactctcccctatgtgaaacatcaagtcacctatacttaattccttcacttttaacattttgttttctgcttccttctcaggcattggctaattctgtttgtcctactctctagttttctgatttttccaccttctcaggacacaagtcaaaaactggtgatggg

SEQ ID NO: 101977 - DNA, 617 bp, Homo sapiens
gtctcctgcctgaactataccgcatcttgtaacaagtttccctgcttctgccttcatctttctacaaccagaatagctcctaatatggtttgggtctgtgtccctatccaagcctcatgtcaaattataatccccagtgttggaacaggggcctggtgggaggtgattggatcatgagggcagattttatgttagctgttctcaccacagtgagagagttcccacaagatctggttgtttataaaagtgtgtaacactttccccttctctcttttcctccttctctagtcatgtaagatgtgcctccttcctcttcaccatctgccatgattgtaaatgtcctgaggcctcctcagccatacagcctgtggaactgtgagccaattaagcctcttttctttataaattgcccagtctcaggtagttctttatagcaatgtaacaacggacgaatacagctcctgttttaaatgttccagttatactctttctttgatcaagcctcacaggtctttctttctgatgcagggtagaayataaagcccgtataatacagtttggcctcatattctacaactttgccctttgactgcttggcttttgagttgcgtaggaca

SEQ ID NO: 101978 - DNA, 618 bp, Homo sapiens
cagtgaaatactatttagcaatttgaaaatggaggaaattctacatcttgtgaaaatgtgaatgaacctagagggcattatgctaagtgaaataacccagtcacagaaggataaatactgcatgactacacttatatgaggtatctaaaatagtcaaactcacagaagcagagaatagagtggtggttgccaggtgtttggggaaaaagaaagtgtgaaattgttgcttaatgggtacaaagtttcagttttacaagatgggttacttctagggatcttctatataacacagtrtctatagttaataaaatattgtgcacttcatttttttgtgtgtgcctgtgggtaagataggggtccaatttcattcttttggaggtggacatccaattttccccacaacatttgttgaagaaaccattctcttcaacaacttcaactctgtcacctatcctctttgttaaaaggatagatctcatgttgcgttcttaccaccaccacacactcacacacaagaacatggggaaaagttttaagatgattaatatgtttaattctttgattgtaatgacaatatcatgtgcatatgcatatgtccaaactcatcaaaatgtgcat

SEQ ID NO: 101979 - DNA, 613 bp, Homo sapiens
acactctagactacatttccaagtctcctttgcattcagatgtggctgtgtgactaaattctagccagtggaatatgattcaaagtaacagataccactccagaactgatgcataaaaaatctccctcgtgcagtcatccatacacgttcttggtgaccttgaaggcactatgttgaagattgtggaaacacaaaatgaaagatgactttatgtgagtgagaaataaacttctttataagatttggagttggtttgttgcttcaactaatgctaacctaactagtaaaaagcattatcaggggatacttgggtgtagarggagcatagtctcagtatggaaatgctaagttggtaaatacatctggtccccctgatgagacaaataatgtacagcaaacattattttgctcaatatgggactgagttccaagaaagtctgcaaagagctgagaagtaacaagtgcaaaaggctagacagcttcacaggcaagtccacacaaagggcaataccctactgaattcaccacagtctgagcttcatatccacaagctcaaatccttgatttgtcagctctcagaactgagattgtattaaccagttttgtgaagcca

SEQ ID NO: 101980 - DNA, 670 bp, Homo sapiens
taccttgtgtggccttaggtcttgtttataatttggtatcttattgccacaaatagtctttttgtcagccttatgatctctattttaacatcaatgctggtcagttgttatgtctaaactccaaaaaggaagaggtacaatgagacatgtccaacctcctttccatttatggccaggagctcaattttttaacgtttctttggagtccccttggacaaaagcgtgtctgttcagttggtggggggcttaggattctatttttaatttacaatcagttgacttttagtgaatctttaaagagcaaaggggaaggtttctcttaacccctagagctcccgaacagaggttcccatgatgmcctccttgtgttcaatcatttgctagaacagctcacagaactcattaaaacacaacatattggattaccagtttattaccaaaaaatacaactcaggaacagccaaatgaggggacatgtagggcaagggatagggaaggtgtgtggagtttctgtgccctctcagggcaaggccaccctcctgcacctccacgtggtcactaaaaggaaattctgtgaacctctttcttttgtctccttcttgtgggttttttggaggatgcactacacaggcatgatttattaaatcattggctaatagtgatcaattca

SEQ ID NO: 101981 - DNA, 584 bp, Homo sapiens
ggagctcaattttttaacgtttctttggagtccccttggacaaaagcgtgtctgttcagttggtggggggcttaggattctatttttaatttacaatcagttgacttttagtgaatctttaaagagcaaaggggaaggtttctcttaacccctagagctcccgaacagaggttcccatgatgccctccttgtgttcaatcatttgctagaacagctcacagaactcattaaaacacaacatattggattaccagtttattaccaaaaaatacaactcaggaacagccaaatgaggggacatgtagggcaagggatagggaaggtgtgtggagtttctgtgccctctcagggcaaggccaccctcctgcacctccacgtggtcactaaaaggaaattctgtgaacctctttcttttgtctccttcttgtgggttttttggaggatgcactacacaggcatgatttattaaatcattggctaatagtgaycaattcaaccttcaacccatcttccctctccagaggtcagagggtggggctggaagttccaaccctgtaattatgtggttggttcccctggcaccc

SEQ ID NO: 101982 - DNA, 591 bp, Homo sapiens
gcagtgacagatgaaaaagtacttgtgcaaacaattaaattaaccagaagctcaaaatyatgtcatatggaagtcttttttactgctttcagattgaatggttcttgctgaccatgttccctctcctcagtgtcttgggtttgagtttgttcattcagaggatgtccaccatgctgaggtcaggctacaatctttgctcagcaacaatttgatttatggtggaaagtgcattcaatagtggttctgaatccttgtcaataggatatgaaatgtgaagcttcagataacaaaatgaacccttctttatctgatccttgttcactcctcagaccttgtctactgactcagccattccaactgaaatgcttttcactggttgctaaatagtcacagcgtgtgttcctagagtaacctcccaccacttaactgtttatttccctaaaacttttcagcatttcccaagactcattaactagtgatgcctggccctaccaggcatgtcctgttcttgttggttggagtttgtggcagacagagatagtcagcccagatcctccttcaataaagaatttatcatttcattgccaggaa

SEQ ID NO: 101983 - DNA, 502 bp, Homo sapiens
tgtggtggctcacacctgtaatctcagcaatttgggaggccgaggtgggagggtcactggaccccaagagttcaagactagtgtgggcaaaatggcaagtctcaaaaaagaaaacaaaacaaagacacacacagtatagataggtaaaaagacattttaaatagtacgtaggaacaatatgtatgtgcaaagcaaagaaaattctaatcacaatttgtacctctatacaatatgcaatctagccaaygaggcttacacacacaaagctagtgagttttaaaataaatagctggccgggcgcggtggctcatgcctgtaatcccagcactttgagaggcccaaggtgggtgaatcacttgaggtcaggagttcaaaaccagactggtcaacatggtgaaaccccgtccctaggaaaaatagaaaaattagccaggtgtggtggtgggcgcctgtaatcgcagctactcgggaggctgaggcatgagaatcacttgaacctggg

SEQ ID NO: 101984 - DNA, 670 bp, Homo sapiens
tccctgagttctgtgagctactccagcaaattaattgaactcgaagatggggtcctgggaaccccaccttgaggccaatcattcaggagttccataggcctggacttgttactggtatctggggacatcggaggtcagtcttggagactgaagcctcaacctgtggaatstgacactatctccaggtagaatgcctccagggagaatgccacccagctggtgtctgctgcttagtttgtggggagaaatccccacacatttggtcacaaaagtcttcttttgtgtcgtttattgtggtggtggtggtggtggtgtgagagcagaggaaaaatttggtctgagagttttcccaaagcaatgtctaataaagatagccccacacaagcctacatgagcacctgctagagtgaccctgttaacatgtgagtccgatcttatcaatgtctttctcaagagcctcctgtggtctccatctcacccagaataaaaaccaaagtcctcacaatgaaccataaagacatacaggacctgtcaccctgctacctctgcaacatcctcttctcgcattcttcctgccacaatggcctcttgctattgcagaaactctcctgcatgcttccatctcaggtctcttaaagtggctgttcctgtgcctggagcatttctcccc

SEQ ID NO: 101985 - DNA, 565 bp, Homo sapiens
agggccactaactctgatttttctcggtcctctttgtggtctaagaggaaaggcaagggtgcaggtttttgagaatgcatcggtaagggccattaaatccgaccttcctcagtcctccttgtggtctaggaggaaaactagtgtttctgcttctgtgtcagtgagcgcaactataccgatcagcagggtccgyggaccattgtgagttcttgggtggggagtggggtggggtaggggggaaacaagccaaaaatgtgggcagttttttctttcagatgggaaacactcaagcatcaacaggctcactctttaaatgcatcctaagccattgggaccaatttgacccacaaaccctgaaaaataggtggctcatttttttctgcactatggcctggccccagtattctctctctgatggggaaaaatggccacctgagggaagtataaattatgacactatcctgcagcttgaccttttctgtaagagggaaagcaaatggagtgaaatacattatgtccaagctttcttttcaatgaaggataatccacaactaagcaaagcttg

SEQ ID NO: 101986 - DNA, 565 bp, Homo sapiens
agggccactaactctgatttttctcggtcctctttgtggtctaagaggaaaggcaagggtgcaggtttttgagaatgcatcggtaagggccattaaatccgaccttcctcagtcctccttgtggtctaggaggaaaactagtgtttctgcttctgtgtcagtgagcgcaactataccgatcagcagggtccgcggaccattgtgagttcttgggtggggagtggggtggggtaggggggaaacaagccaaaaaygtgggcagttttttctttcagatgggaaacactcaagcatcaacaggctcactctttaaatgcatcctaagccattgggaccaatttgacccacaaaccctgaaaaataggtggctcatttttttctgcactatggcctggccccagtattctctctctgatggggaaaaatggccacctgagggaagtataaattatgacactatcctgcagcttgaccttttctgtaagagggaaagcaaatggagtgaaatacattatgtccaagctttcttttcaatgaaggataatccacaactaagcaaagcttg

SEQ ID NO: 101987 - DNA, 578 bp, Homo sapiens
gtgacttgtagtgaagctgtatgaagaaaaaacccaatcagccagtcaagaagccaggttttcctttacagagctgtgtctaaagtaatgtaattaagttgatgtaatcagagcaattctacagagaacacactaggaagtcctgaaaggtcctacagagacctggaatcaactcctgacttcaagtgatccacccacctcggcctcccataatgctgggattacagccataagccactgcagccggcctgtttcttgaccttgctgcaggaacaccttggtatgcaggagtcaaacattagtcattatggcagttttacttcaagatggtattattcttgacatgcaactggctgttttcctacataawttttttttatccaatttagtgtcaatattgtcaacctaaatgacagaggaagctctctaaaagaaaaagacatttatttgggaatagaacattgccatgggaatacatgtgccatagtaaactatatgcatattcaaggaggattatgcatataggcttttaaagaaaaaatataggcatatatgcatataggcttttaaagaaaaag

SEQ ID NO: 101988 - DNA, 644 bp, Homo sapiens
aacccaatcagccagtcaagaagccaggttttcctttacagagctgtgtctaaagtaatgtaattaagttgatgtaatcagagcaattctacagagaacacactaggaagtcctgaaaggtcctacagagacctggaatcaactcctgacttcaagtgatccacccacctcggcctcccataatgctgggattacagccataagccactgcagccggcctgtttcttgaccttgctgcaggaacaccttggtatgcaggagtcaaacattagtcattatggcagttttacttcaagatggtattattcttgacatgcaactggctgttttcctacataaattttttttatccaatttagtgtcaatattgtcaacctaaatgacagaggaagctctctaaaagaaaaagacatttatttgggaatagaacattgccatgggaatacatgtgccatagtaaactatatgcatattcaaggaggawtatgcatataggcttttaaagaaaaaatataggcatatatgcatataggcttttaaagaaaaaggaagacaaaggcttttaaagaaaaaatgaaaaagattacataattgttttgagatgattatccttggctacgaatatcagcaatgaggataatgcc

SEQ ID NO: 101989 - DNA, 448 bp, Homo sapiens
agtgctggagtacccagcgcccccaccgcaggtgctggcccggttgctaagcccctcactgcctggggctggcagtgttggccagcygctccaagtgcagggcccaccaagcctgtacccacctggaactcgtgctagcccatgagcaccgcatgcagccctggttcccacctgtgcttctccctccacacctccccgcaagcagagggagctggctccagcctcagccagcccagagagggactctcacagtgcagtggcaggctaaagggctctcaaacgtggccagagtggacgctgaggccaaggaggcactgagagtgagcgagggccactagcacgttgtcacctctcaatcctcactctaaacaggacaccccacctgattttgggaatgtggccgatgactgctctagctacttcctgctagataagggtgaagaagggg

SEQ ID NO: 101990 - DNA, 615 bp, Homo sapiens
ccacctctggggtaggaagcggccatctttcaaaacagtctcagaaaaataccagccaccaggcaggtctcatttccacaatgccccttattcacaaaggagacagaagaaacatggttcaggatagaataatttgggattcccaaagcatagtgtggctactactggggatggtaagcaatgtgcttctaagcaatacatagacttttttttggtttttatatttatgtatttatttagtgaaygtcaaaaaacataaccatcatatcctacaatttcatagatattcaaaatctatttagattacaaagtaagtgtatgtaaagcattaagtaaatagtgagacaagggatctggagatatggttagaaaacagtcatgacttcctgtgactggcatttggtgtgactttggcattacggttgagaactcaggcttcagagtccaacaagtgatagaggtctcacccagccctaccacttttctggctgtataagctttaacatgttcttaatctatccaagcctccatttctcattttgttcatctgtagaaagcagctctatcacgagaggattatgaaaattaaacacacacacacacacacatacgcac

SEQ ID NO: 101991 - DNA, 615 bp, Homo sapiens
ccacctctggggtaggaagcggccatctttcaaaacagtctcagaaaaataccagccaccaggcaggtctcatttccacaatgccccttattcacaaaggagacagaagaaacatggttcaggatagaataatttgggattcccaaagcatagtgtggctactactggggatggtaagcaatgtgcttctaagcaatacatagacttttttttggtttttatatttatgtatttatttagtgaacgtcaaaaaacataaccatcatatcctacaatttcatagatattcaaaatctatttagattacaaagtaagtgtatgtaaagyattaagtaaatagtgagacaagggatctggagatatggttagaaaacagtcatgacttcctgtgactggcatttggtgtgactttggcattacggttgagaactcaggcttcagagtccaacaagtgatagaggtctcacccagccctaccacttttctggctgtataagctttaacatgttcttaatctatccaagcctccatttctcattttgttcatctgtagaaagcagctctatcacgagaggattatgaaaattaaacacacacacacacacacatacgcac

SEQ ID NO: 101992 - DNA, 614 bp, Homo sapiens
tgagctttcaaaaacaggcattagagggtgaactcacttacctccctttatccacagaatctcaaactgacgatttttttcatcatcatcttatctgcacttgcagtttcccattctcaggggaattttcttccagcaagggatagaaatattcactaagaagtcttacatgttgaggtcagtatgtcttaggyaaataaactctgaccatacgaccaagttagaagtctcttccctcttatctgtccttttataaatgtattcttccatccaaaagtagcaactggagtctcccagttatctctctgttctgagcattcctgatttccatcttggagctagctacatattattgaatggttagtactaaaagccagatactgtgctaatatttttttctgataacaagtcctatgagatactttaaataatattatccctacttggttgatgataaaactgatatggtgagagcttaagtaaaaggctcagagtcatacaaagacagagctaggatatgaacctggagttgtcactctaaagacctagactctctcccatgacgatttcaactatgggatttctgcccctattacacaataagtagaaataag

SEQ ID NO: 101993 - DNA, 414 bp, Homo sapiens
ggcatttggagaacagtatcagtcacagtgttccctttgctgctccatgtctgagtcctggttccagcrccctccacagccctagagatgtgggccccacccctgaggcagcaagccctccctcagcgtcaggacctcttgcaaaggaggagggcagtgaagtcaaggagagcacagggaaagacagcggctaaaagggcggaagcagtccctgctgagccaggcttcctgctgcacactggatctgcatcttctcatttcatcctcacaacaacccgatggggcatctctcttaacagcctcattttacagaggacatcggggctcagaaaaacaaaatgacttgcccaagcaagctcacactgctgctcagtgtaggagccgggatttgaacacaggcaaccagaccacatg

SEQ ID NO: 101994 - DNA, 414 bp, Homo sapiens
ggcatttggagaacagtatcagtcacagtgttccctttgctgctccatgtctgagtcctggttccagcaccctccacagccctagagatgtgggccccacccctgaggcagcaagccctccckcagcgtcaggacctcttgcaaaggaggagggcagtgaagtcaaggagagcacagggaaagacagcggctaaaagggcggaagcagtccctgctgagccaggcttcctgctgcacactggatctgcatcttctcatttcatcctcacaacaacccgatggggcatctctcttaacagcctcattttacagaggacatcggggctcagaaaaacaaaatgacttgcccaagcaagctcacactgctgctcagtgtaggagccgggatttgaacacaggcaaccagaccacatg

SEQ ID NO: 101995 - DNA, 548 bp, Homo sapiens
ggttttagcgaagtggtcgacagccggaaacctgctccaaattctggctctcacccttgcaagctgaataaccctgaacttaaccgtggtgggtcttgcttactcatccctaacatgggggttgtgaggattaaagagataatgcatagatggcacctggcacaaagtcacctgcaatacrtgagttgtgattactctttatcttggtacaataaacaaagatcgattgggcttctgctccctgatggtttcactgcagctagctagctcaacctccctggctggctggtaggaaggaaggaaggaagggaaggagggctaaatagacagctgaaaggatggatggacaggtagatagaggatagacagatggatggaaaagtgaacagatagaggatggatggatggaaggatggattaatcaactgatgggttgatgaatggatgggtgaagagatggatgaacaaatggatagatggataagtgaataaatcaaatctcccaaaagacagtggcttaccagactacaccttcctctactttctaa

SEQ ID NO: 101996 - DNA, 548 bp, Homo sapiens
ggttttagcgaagtggtcgacagccggaaacctgctccaaattctggctctcacccttgcaagctgaataaccctgaacttaaccgtggtgggtcttgcttactcatccctaacatgggggttgtgaggattaaagagataatgcatagatggcacctggcacaaagtcacctgcaatacgtgagttgtgattactctttatcttggtacaataaacaaagatcgattgggcttctgctccctgatggtttcactgcagctagctagctcaacctccctggctggctggtaggaaggaaggaaggaagggaaggagggctaaatagacagctgaaaggatggatggacaggtagatagaggatagacagatggatggaaaagtgaacrgatagaggatggatggatggaaggatggattaatcaactgatgggttgatgaatggatgggtgaagagatggatgaacaaatggatagatggataagtgaataaatcaaatctcccaaaagacagtggcttaccagactacaccttcctctactttctaa

SEQ ID NO: 101997 - DNA, 548 bp, Homo sapiens
acagggaggtcagagggaggggtgccacagctgggcctgtgcctcaagagtcagagcagaatgggtgggtctgattcagaaggtagcagggatgtgaaatggagcctgctttccggtccctgtaaagaaagggaactccaggtggctcgtccccatgtgtggggttgttccccaatcacatggggaatcagaaagcaatctggccatgaggcaggggccagggagctgtggcttgtctggaagctgcacagcaagtccagtgtgcggttatttgtggaggcttgagggagaattgatggaaactgtggggggcagccccaaccccaagccacctggaggctgcctactttwgacaactacaatatccctgccaacaagctcaggggcaagggtgttaccaggtctgctctgtgcctgaaggacttcagctcagagaggctgagctcctactcagagtcacacagcactgctggctgccctgagcactggccacagccttcctgactccctttccagggctcccctcccagagtcctgccctcccactg

SEQ ID NO: 101998 - DNA, 561 bp, Homo sapiens
aaactactgtgaaagaaagatagtgtagtcatggtagtctatctggctatatagagaatatttataacaacttaaatattgatttaactgaaaatacgatgagctgtaagagacgtgtgaactacagaactggatctaygaatgacaggagggcagaccacagtgcttttcacatcctcccctccttcccttgggcataagacctggctataggaaatctagctaattacaagaacgtctttataatttggagggaaactcttggaactgtgagtgctccccgtccagtgttaccatcccctaccatccaattaaaatgtttccaacccacctccaaaaaaaatacatatgtgagctaaatcttcatctgcaattacaggaaatcgacatggctaaaatttgtaactcaagaaacagtatgaaaatattttaaaatactgagattttaaaaacaagttgttaaaattaaagtgattgccattagatattcgggagtgctggcaagcaactgctttatttcataatgagcattttatactattacattgataaaacttgaaa

SEQ ID NO: 101999 - DNA, 477 bp, Homo sapiens
ttaattaaatgtctcattcagtgaacagattgtaataattgatgaaattgaaggcttatttaaatgctattcagaatctatatcctggacattttcagtagggatttaataaagagtgttttacaatttaccagacttgaattgttagagagaaaataaaagagtcatcaccttatatattaatcattagatttcatagttgatcatagttattttatttattaccattmtctgcataaaatacagtattcaaatgcatatagacagtcacatgtattcaggggcttgtaacctaggaaaaggaagctcggtttctctgtgtgccctttgtttactttcatgaacccaaagatgcatttctaattatgtggggacatcacccaataatgcaactgctgttaaaaggtcacaaattaaatggcaaaaccgaaggcaacatggagttttttgacagcaatcttagagcttggagaattc

SEQ ID NO: 102000 - DNA, 607 bp, Homo sapiens
ggaatgttcattccacatggctgggtttttctcttccttcagatgtctgtgtaaaagctatgtcctcagagaggccttcacaagcctttctaatgacattattcctgatcccagttcattattctctatcacatggtattcatttcctttatagcatgtgtcacaaattataaccatagtgatagggacaggagacagggaaattctgggcagatgaaggagggtccctggccaggatcccaccctcaagccaaaaggcctaataccaccgtccaaagtgagaacttgcatccttgtttttacactcaaatgttgccttttccaaaaccacccatgaccccactctgccccaccccccatcctgtgcccataaaakccccaggctcagccagtggagagagtagaagcagctggacattggaaactatggtttgatgtcagagagaagtggcttgaattcagagggacagcttgatggcataacttctgagaggagtctggccaggaatggccaaactccaggggaagattaccttcccgctctgccctcttttcatttccccttctcaccaagagccgctttcatcagttataaaatcaccttcat

SEQ ID NO: 102001 - DNA, 649 bp, Homo sapiens
cctttttaagactagataatattccattgaatggatatattaataccacatttttttattcatctgctaatggacactgtggttgtttccactttggggctactgctattaatactggtgtatgaatttttgttcaagttattgcttttaattctttcagcatgactctttttttttacaaagctaaacacagtcttgctatataatccatcaattgtttttgtatgtatttatccagcttatctgaaaatttatgtccacacaaaacccagcccacagatgcttataggaactgtattcagaattactaaaactggaagcaacaaagatgtccctcaaaaagtgaatggttagtgtaatatatgtaatataaaatataatatatctttataatggaacaccactcagtggtatataaaggaatgaattgtcaatccaagcaaatacatggatgaatcttaaatgtgtatggctgagtaaaagaaccagactaaaaacaacacataytatatgattccacttacatagtattctggaaaaagcaaaagtagagagacagaaaacagatcagtggttgctagagacctgcagggtaggtgggtagaacggaatatgtgaagcacgtaagatttcttaggatgatgaaact

SEQ ID NO: 102002 - DNA, 651 bp, Homo sapiens
ttgccctcttctattatcatctggcaattcgcctaatcttaggaattatatttggaaaatatcttgggatataagcccagccattaaggagctattcagtgttagaaccacaactcactctcttataatcttgccaaccttctagggtctcagttcccacatactcagtgtcacagacttcagtccaaaaaaaaaaaaaattctttttacaaaaaagaccaaaggaagtgagtgtattttgactttatatgcattgttatgataaagaagaatcagataaagagctctagatattcagaaraaaaccttagccttggcaccacatggaatttgcagcattttctccaccttggagtctcaccaggagattgttactctgacatgaggtgagatcaacatgtctaccattcatttactgactgtagtcacagctttaattgtatgcttttctggagcttgagttatatatgtgtgtttcttagaaacatgtgaccaggtttgagcagagaagaggagaaaccctcaatagatattgaacatggtttccacaagtggatcaaaagcaaaattgagaatttattgacaactttttcatctcacctccacttctccctccttaagctctcccaaggagagaaaatcccttctttt

SEQ ID NO: 102003 - DNA, 602 bp, Homo sapiens
aactgtcacatctcttgagttaaatatgagccctgtcatttggaagtcagaaagcagctcctaaatttctcaatttcattagcaattgattcaaatcatttcccgaaaatagtctgaattgacatatgaattgtagtggttcctcagcttggtgattaattaatcaagccatcaggttcacattaaactatttatcaatcttacgattccctgcttttcagaaaaaattaaaaagcactctaatcatattttatgagtttcgagaamaattaaaatgggaccagagaaagtaatctgtgcttcctaattcagaagctccacagtatcaatttctgtaactcaagacactaaaaagaggagatggggctcaaatctatataccaggaaagacactagagttatttctgcaggcttccgtttcttcgtctataaaataagaaaattgaattataattgaactaaataatctagtttttttctcacgttaaaaatttttagtccatgcaaaacagtaatatgttattgttagttttattagtttgatgtgtgcccaattgtctttacattaaagcaaccaaactcctggttattgatagagcctc

SEQ ID NO: 102004 - DNA, 576 bp, Homo sapiens
acaaatctctgcagactcaagcatgggaagtttaactcccaggaggtaatgagcatgctacaggttgtgggagcttagctgtcagatacacacacacatacacatgcacacacacacaaccctccccaacccctccttctacccccagcctctgcccattctaaggccagagcaggcattacatatcggttgtaagaactgaacagcatttgcgcttaattggaagatatacattattcatgagccttgagtctgtgatgactttggcattcattaggggggaaaaatgggcattagttttcttggtacaaaacattttcgtattaaacctcatttgcaaccctcttttcaatatgaggaattagaaatgcttttaagcaaagtttggaaccaagaagtagctgggaaacaagcagcagcaacttytaaagatggaaaagaaagtagtaagaactgggaatttttaagctctgagtacaggagaggaagagtcagcctcaaattcaaacaggttaataataataactacaatgataataatgagaaatgtttgtatgactacacatatgcttatgt

SEQ ID NO: 102005 - DNA, 439 bp, Homo sapiens
aatgttttaattaataatggctgagatgttactgaaattgatgacagatactcaaccacagtgtccagaggctcagagaataccaagcaagaaaacacaaccrtagaaaaccaaagatagtgagaaaatctggacacaaatcagaggtgggagaaaaaccttccctatataggaacaaggataagaacaaagcagacttctcgtcagaatccatggaagcaagaagagagtgcagtggaatatttaaagtgttgaaagaaaaaaacaaactgtcaacatagacttctacattcagcaaaattattcttcaaaagtaaaggagataaagactttctcagacaaacaaaaacaggaaatttattgccagcagaatagcactacaaaaagatattgaaacgagttcttcagacagatggaaaattacacaggccagaaattt

SEQ ID NO: 102006 - DNA, 588 bp, Homo sapiens
aatgtcatgcatgactgttgctgcactttgagtattaagaggcgagccttaagattacagttgagaacacatctggtttaaagtgagtcctgcaaaaaacaaaacaaagcaccttccaactgaatccagccagagattacatccccctttcttcttggcacaccrtataagcagtttgactggcattttttgttttaagcatttgtattgcttttggataaaaacagtttaccagctactccccaaaagcaggattctaaatatgttttattggtgagattccatcaatgctgaatttgtgcatgttgcttcatgttgccatggtaaaaaggaaattaaattgtgatacagtggtgctataaataaaatacctttctccttaagttcactcattgtgtaatcagcccagtattttcagcatcacatgcagcaatcaggcttttcataacacatatcatttaagccaatgtaaaattacaaggacagcaaggaagatggacaaattctacacatcagagtgcaagaattgagtccatgtaattctttttttttatgctgtctagaacaatggcgcttagaacatgcctt

SEQ ID NO: 102007 - DNA, 588 bp, Homo sapiens
aatgtcatgcatgactgttgctgcactttgagtattaagaggcgagccttaagattacagttgagaacacatctggtttaaagtgagtcctgcaaaaaacaaaacaaagcaccttccaactgaatccagccagagattacatccccctttcttcttggcacaccatataagcagtttgactggcattttttgttttaagcatttgtattgcttttggataaaaacagtttaccagctactccccaaaagcaggattctaaatatgttttattggtgagattccatcaatgctgaatttgtgcatgttgcttcatgttgccatggtaaaaaggaaattaaattgtgatacagtggtgctataaataaaatacctttctccttaagttcactcattgtgtaatcagcccagtattttcagcatcacatgcagcaatcaggcttttcataacacatatcatttaagccaatgtaaaattacraggacagcaaggaagatggacaaattctacacatcagagtgcaagaattgagtccatgtaattctttttttttatgctgtctagaacaatggcgcttagaacatgcctt

SEQ ID NO: 102008 - DNA, 607 bp, Homo sapiens
cattcatagcaaactgacaagcagggcgagagggcagggatgctcagtgagattatgggagagttaaagctccttcacttccagcctaaactactctttggagctgcctgaaaatcatagcctcatggttgggatccaaaacagattaaccctttcactaagcgctgctccataacaaatactttatcataaagcttcaatgtatctgttatgttttttcagaataggctaggtcagtatggtgacctttatttaggggtgtgccaatgaaggagttaactcttacattttatgttaataatgggaacagtaatataatggatcccagaaaaagaactgttcaaaagtaatttattaagataattatattggcacatatgtgtttgtaatgctttaatgatagtttttggtgagatagactgttgctacacaataatttttattccttaacaaaacaactaatatttgatgtggcaaggtgcttagctaaaagttcacatttctacttcctttgcagcttgatgtggccatgtgattaaatttcaaccaatgatatgaaaaattgttgggtgagtctycttgaaaggcttcttaagtggggctagag

SEQ ID NO: 102009 - DNA, 652 bp, Homo sapiens
gtgcatatttttatgttaggatttttaataaatatcctatatgtattttatagacaaagggtgtagcatgcgtagtttttgctttttagaatttttcaacaatttgtctatggcctaatataggattgattttgtttggctacatggaaatttgaaaataaagtgttttttctaaataagttacaagtttagtatgtaagttaatcttattagttctatcacttaaatcsaatatgtttatattatttatcatttgaatctccttgtatttataatagtgttcttaaaatttgcatgtacattttctggctcattcaggaccattctttttttttttaatctgtgatgtacattttcttaccatttataaaacgaatcctctacattccatgtatcctctttgctttgaattctgttgagtatttctgcttttcatttgctattatatttgcctgacattcttctcattttatttacagctttatgtcattttaaacataatgactaaaaacttttaaacttttctcttgtaaatagcatatatccggaatttttttttgccccaatcttagagtctttgatttttgtattgtttttccttttttgacactgtccttgaagaagtgtaatcatcacatttattatagtgtat

SEQ ID NO: 102010 - DNA, 576 bp, Homo sapiens
acactagtctttaagtaaaaaaataaaataaaataaaataaaatagcagatacacatttgaaacctctacttagttcctatccactactattacattggtcacagaaaatcatatggcctagcacaacatcaactgacatggcagtatgctctatcacagtaggaatagaagataaatgaaaatttgctgaaaaacaaatccaaactatcaaaagttttttccaagaagaaaaattgaacagtgttaattagtgatgaaaggtctagtaagataacatctgaaaagtattcatasaatttatgaaataaggatattttagtgacctagtaaagtgcagctttaataaaataataaaaagcagatttcagaggtatagagtgaattcaaggcaaagaaccgtgaagtaagcatagatgaatgtttaaagaaatttggggctgggcacattggctcactcctgtaataccaacactttgggaaactgagacaagacaatcacttcaggccaggagttagagaacagcttggaaaacatagcaaacatagcaagacctcttctctacaaagaaaaataa

SEQ ID NO: 102011 - DNA, 576 bp, Homo sapiens
acactagtctttaagtaaaaaaataaaataaaataaaataaaatagcagatacacatttgaaacctctacttagttcctatccactactattacattggtcacagaaaatcatatggcctagcacaacatcaactgacatggcagtatgctctatcacagtaggaatagaagataaatgaaaatttgctgaaaaacaaatccaaactatcaaaagttttttccaagaagaaaaattgaacagtgttaattagtgatgaaaggtctagtaagataacatctgaaaagtattcatagaatttatgaaataaggatattttagtgacctagtaaagtgcagctttaataaaataataaaaagcagatttcagaggtatagagtgaattcaaggcaaagaaccgtgaagtaagcatagatgaatgtttaaagaaatttggggctgggcacattggctcactcctgtaataccaacactttgggaaactgagacaagacaatcacttcaggccaggagttagagaacagcttggraaacatagcaaacatagcaagacctcttctctacaaagaaaaataa

SEQ ID NO: 102012 - DNA, 545 bp, Homo sapiens
agtactactttagtgtacacacaaataagaaagacaatcagacttattgctgataatggagaaagtttgagtagccttgatagaagtcaaaccagccacaacattcccttaagccaaagcctaagccagagcaaggccctgactctcttccattgtatgaatgctaaaagaagagctggaagctagcagaggttggttcatgaggtttaaggaaagaagycatctccataacataaaaatgtgaagtgaagcaggatgtggtgatgtaaaagctgcaacaagttattcagaagatctagctaagctcactgatgaaggtggctacactaaacaacataatttcaacgtaaacgaaacagccttatactggaaaaagatgccatctaggactttcagagctaaaaaggagaagtcaacacctgggttcaaaatttcaagacaggttgactttcttgttagtagctaatgtagcttctgactttaatctgaagccaatactcatttagcattctgaaaattctagggcacttaagaattacgctaac

SEQ ID NO: 102013 - DNA, 545 bp, Homo sapiens
agtactactttagtgtacacacaaataagaaagacaatcagacttattgctgataatggagaaagtttgagtagccttgatagaagtcaaaccagccacaacattcccttaagccaaagcctaagccagagcaaggccctgactctcttccattgtatgaatgctaaaagaagagctggaagctagcagaggttggttcatgaggtttaaggaaagaagtcatctccataacataaaaatgtgaagtgaagcaggatgtggtgatgtaaaagctgcarcaagttattcagaagatctagctaagctcactgatgaaggtggctacactaaacaacataatttcaacgtaaacgaaacagccttatactggaaaaagatgccatctaggactttcagagctaaaaaggagaagtcaacacctgggttcaaaatttcaagacaggttgactttcttgttagtagctaatgtagcttctgactttaatctgaagccaatactcatttagcattctgaaaattctagggcacttaagaattacgctaac

SEQ ID NO: 102014 - DNA, 628 bp, Homo sapiens
ttaggtgtaaataaataaacacccaatttctgacagagttcccatggctgttgcatacctgcaggtatggatgataggagaggggaggcttaagaaagtccatgaaaagaggacagagtaaatatatgcattaaggaaaaagtattcctaagggggcaagaaaaggattcagcagcaaatgcacaagtattggcctgatacttggtaattcacattactacaggaaagatacttgaaagtgagaactgcagtgacagcctgagagaagaactacttctagggaagagagataaacagagaagggtgatgyctcttgggaaaatatggtagtagaggaaaacaaaaatacaaagaggagggaattaacaatcttgcagaaacaaaaggagaaaaaataaaccatcaccaaaataaacataaggaaccattaacaaaactacatttccataaactaagagatagctttcaaacaaagaatcttgtcctttagatgctcacaaatagaaataaatcaaacaaattttatatatggcattgaagtaagaaaacaggaggtgtgaatcaagatttcagttgaggaaatttctccttaaaaataaaacaagccacaaagcagaataaacctata

SEQ ID NO: 102015 - DNA, 525 bp, Homo sapiens
tcccaaagaatccaactggcagtgcaagtcccgaacttttacaaagtaaatgaatgcttcctttaacaactttcaaaacattgtcatttgatttctagctgaagttttctaatgacaagaaacaatgacaagggattttttggcgtaagatttctccccttgcaattttgatgaatgaaaatgctttacattgagtcaaattcctctttttaatttttacttattgattgtagatttgtcttcttgactaatacaaaattaaactaattactcatctacttaccattgttctatatatttgaatacaactagcatttctcttgaatatgttgtgttctacagtstaaacacttgtaggtccttcagtgcttcctcatgttaacgtggtttccattttcttcctcatatcacttaaattccattggaggtgccagtgtttgcagatgtctctatttaaacatgacatcaattactaaacataatattccagatgtatcatgaccactgaggattaaaattattttg

SEQ ID NO: 102016 - DNA, 525 bp, Homo sapiens
tcccaaagaatccaactggcagtgcaagtcccgaacttttacaaagtaaatgaatgcttcctttaacaactttcaaaacattgtcatttgatttctagctgaagttttctaatgacaagaaacaatgacaagggattttttggcgtaagatttctccccttgcaattttgatgaatgaaaatgctttacattgagtcaaattcctctttttaatttttacttattgattgtagatttgtcttcttgactaatacaaaattaaactaattactcatctacttaccattgttctatatatttgaatacaactagcatttctcttgaatatgttgtgttctacagtgtaaacacttgtaggtccttcagtgcttcctcatgttaacgtggtttccattttcttcctcatatcacttaaattccrttggaggtgccagtgtttgcagatgtctctatttaaacatgacatcaattactaaacataatattccagatgtatcatgaccactgaggattaaaattattttg

SEQ ID NO: 102017 - DNA, 568 bp, Homo sapiens
gtatttcctataaatcaaggaggatagaaaaatgcaaactagttgtattagtccattctcatgcggctataaagaactgcccaagaatgggcaatttataaaggaaagaggtttaattgactcacagttccacatggcttggagggcctcgggaaacttacaatcattgtggaagggaaagcaaacacgtccttgttcacatgatagcaggaaggagaagtgccaagcaaagagggaaagtttccttataaaaccatcagctcttgtgagaactcacttactatcacaagaacagcagcatggtgacaaccagccccatgattcaattacctcccactgggtccctaccactacatgtagggattatggaaactacaattcaagatgagatttgggtgrggacatggccaaaccatatcattctttccctggccccttccaaatcacatgtcctcacatttcaaaacacagtcatgccttcacaacagtctcccaaagttttaactcattccagcattaacccaaaatccaagtccaaagtctcatctgagacaaggcaagtccctgt

SEQ ID NO: 102018 - DNA, 633 bp, Homo sapiens
agacacagcagtgatatctttgaagaaggaaacgacagtaacaataaagacaactgtcaatccataatctgatacgcagtgaaaatctttcaaaaatgcaggcaaaataaagacagttttcagattaagaaaaaaaagactgagataatgcatttccaatgcacctgatttacaagtaatattaaaattatttctttaggccaaaagaatgtgatgctggagagaaatttggcctatacattaaaaaaatataaagarctcttaaaatggtaaaaatagccagtccactgtgctccagttaccctgagataaaattctgaagaccctataacctgaatccattaaaatttgcctttcctaccctaagccctgctctcttgatgcatcttaaatcttaccctcccctctatccatcaacccatcctgttattaacagaggcatgtgactgcaatccctcagtctaatacggggtcaggcaaccatctgctcttgtaccagtggaatattaaactggtttcccaaccttcttttcaaacatacagtctcttgaagggttttcaaaacaacaactgcgaaatggcaatagtacctgaaataaaattttatggaattattaaataaaatgactagca

SEQ ID NO: 102019 - DNA, 590 bp, Homo sapiens
ctgttcctgtgttagtctgctaaggataacggcctccagttccatccttgtccctgcaaaggatatgatcttgttctttttttaatggctgagtggtagaatatagacttttataccttgggccttcgtaatccattgctctggggaacacccttggctatcatccacctaaagaacttcctttgcattatttgtgctgcaggtctataggcaatgaatttgtgcagctttgtttgtctgaaaaaaagtctttagttgggcaagattgactaagaaagtacagtaagtataggaaaacaaaagatagtgaatctgtctgtcccactccatttgattaaacctctggggctgtgtcacacaatcaatgactcttcagtagcaacatctcamctggcttctgagacacaggctctcctccttttctttttgcttctctgtccattcatttgcagtctcctttcccagtgcaacatttttattatcatgctttaaagtttgaaggataagaatttttttctcatttcatcctctctccctagatattttcatccactctaataacatgatctatcatgtataatgcatccaaa

SEQ ID NO: 102020 - DNA, 566 bp, Homo sapiens
acacatccatgcatatgaaaatctaatggctgtattttaacaaaagtttaccatagaaatgttctgattccatttatatatgctttattactgaaaattttattattctagtgctagttttatttccagttccagataatattgcatctaagttggccctttagaaaagactcaaagagattttaatgatttcctctgaaaattttctgaatgcaaccctgggcctgagggctgttctttctctggatcactgatttggtgaatgcctctccagaataactgaggttacaaagactgccaatttattctccaaggaaccccctctttccaggtaacagtggcatactctgaggygctaaaaaaagttgattgctttataaagagggatttggtagtatttaacaaaatacaaagcttggcatgactaaggctatagagctcctccaatctcaatagggttacagtttttgtttcactacctgtcaaaagaacactgtgcctgagtgcaaaacaacctaacagaactctcttctcacttctctgcaacagagttcataggcccttag

SEQ ID NO: 102021 - DNA, 520 bp, Homo sapiens
agtttgctgggatgcaaaatattacaatgtggagtgtccataaatgtttcaaaatctacagaagacacaatttttaagcagatataaagaattacattgtaacaggaaattaaataacctttgcaattattgtctcagtaatttttacttcgaaaaagaccaaggtctttcagttggtaggtgttcagtaactggttgcagaatttaaaatggtgacatatttctcttcaaatctcctataaaattctcagaacaccaacaaatwaaaaaaaaaacactttgttttgaacttcaaatattctgaatatataaatagaaatcaactactgtataaaatattcataacaccagaggcttaaaaatgtaaattattagaaacattaaatcactgatgtgattacagaatggcattttataaaaatagggcagcaacaattagaatcatactagataataactatctacaatgtggaaaaaatttctttctctaaggcaccaaattaaagtgtaagaagatgaa

SEQ ID NO: 102022 - DNA, 591 bp, Homo sapiens
tgtgcaggggaactgccctttataaaaccatcaaatcttgtgagacttattcagtatcacgagaacaacatgggaaaacccacccccataattcaattacctcccactgggtccctcccacagcatgtggggattatggaagctacaattcaagatgagatttgggtggggacacaataaaaccrtatcaggaggggacaagaggaagctctcagagttatttcagtgctagagatgaggctgaagagggaggccaaggctgggccctaaattgtcttttattccatgttaccatgcctgacatttgccaaggatgcaatgaagaggcattaaactattttatgtaaggagttgacacattttgtgtttatgatcaatcattttggctaaggttttaggagaaacttgaagaagaaaatactgtaagtatgaacagcagttagagttactataatttccagaagaaaggtgacataaatctgaattggggcaaaaagtaaaaagataaggaggatggcatagattttaaaatatactggggtaaatctgcattttgcaatgattgacacaattttacttctatagccatcc

SEQ ID NO: 102023 - DNA, 557 bp, Homo sapiens
ttagtatttctcttcatttgaattatcactgtgtatttcttgggggaattgcagtagtctactttgttctcaacagtcataaaagtcatctttcaaatgtggygctctaatgagcttactctttgtgtgatatatgttaattatctcccattccataaagtataattaataccaccacctttgcatggcacacacaacttttgtcatctggttttatcatttggtccctgcctacatatccagtcttttctcctttcacttcaaatcttttctaacttaagacactgtaattcagaaatactgaactatattcaaggtctcaaatatgatatgtcctttcactctttttgttcctttacacatttcctgaaatacactcatcattcagctatctacctgatgtttaactgttaatttattacttctttggaaatgccatgttctttatgaaattttctctgatttccacaggcagacgtgaatgctccatttactgctgatgatttgaatttgtatgtactggcctaatggcactaatcccattcaggaggactcca

SEQ ID NO: 102024 - DNA, 490 bp, Homo sapiens
atatccctccctccctccttctctccctccttccctccgtccttctctctcttccttccctccttccttccttctcttcttccctctctccctccctccctccgtccctcccatccatgcatccatccatgcatccatccatgcatccatccatgtatccatscatccatccatctgtccatccattcacatccatccatcagtctgtctgttatggactgaactgtgtctctcatcaaattcatattttgaagccttaaccccaaggtgatagtatttggagttaggacctttaaggagataattaaggttaaatgagcttagaagggtggggccataatctgataccttatacaaacaggaagagacaccagagagctcatttcattctttctctgtgagtgcacagagaaaaagtcatgtgagcattcaacaagaaggcagtgacctgcaagccaggaagagaggccttgctacatactaaccctga

SEQ ID NO: 102025 - DNA, 621 bp, Homo sapiens
ttgttcaagaaaaaagagtaagtgttaggaaaaatgtaaagaaattaaaactcttatttaatgctgctgggaatgtaaaatgacacagccactttggaaaacaaactggcagctccttaaaaggttaagcatgaagttaccatatgacccagaaattccagtcataagtatatactccagaaaaataaaaacatacacaagcacagaaactcatacaaaaatgtttacagcagcattattcataggagtcaaaaagtagaatgaaccggaacgtctatcacctttgggtgggagagaacccaaaggtccatcacctggccaatggataaataaaatgtttgatgtatccatacaatggaatattactcagcaataagaagaaattaagtacagatactgtattaggaggagacagcaaaattcctaggcagatacggaagggtccccagagaatctcccaccagccccacaagtgtttacaccagatgttatgtgcagataagagaacctggacttgtcttgyctggacatgcctgcagcagaccggaggcccacatgtactggggggatggggtggagtcaccaggaattcacgccttatgcagaggaggaacctggccg

SEQ ID NO: 102026 - DNA, 557 bp, Homo sapiens
acaagttcgtacctcagtggcccagagctcccagaggaaggggcaggctatcatcttccctggaaaatacaaggcaartagggactggaggggatacccagcataccagcagcctgacagaaaagtggccagacagtctacttgatgagcaggtcctcctggcctgggtctccagccagtccaccattggagctatcaagccagtagcaactcagcaattccctggacagagcttccaggagcaaatgaaattctctctgccactgtctctgcagtggaactgcccttgctaccctcagaatatcaagggagcaaagaccctaagtgccatatcgacacctccaataagctgcagttgacccaacgaacaagccagtccatctcccacgggtaccacacaccccacactgctcatcaccagagagggaaccctggcttgggctcacaacacagaccctccatcctgggctgattacgctaactcacatctctctgggatggagcacccaggagaaaagcagagtggtggagcagcaagtcaggtgatgtggagccca

SEQ ID NO: 102027 - DNA, 593 bp, Homo sapiens
  misc_feature (1)...(593): n = A,T,C or G
nnnnnnnnnnnntgaaatattttagaaagtaaaaagagttagaaaatagtccagactgttttcatatatactgtgtccctaccctcttctaatgttcacatcttacataacaacagcacattggtcaactactactaattaaaccttagatattatttaggtttctccacttttctactaatgtcttctttacacttcctagatataacactgtatttctcttagtctccttaaaccaaygtgtgtaacaattttaacttctatgtctgtaattggtaatgttatagacatgctactcagtaactaaacttgatattcagtaagtttttaaaactctcgtacaaaattttatctcaatctgtatttttcttcaaattgcgtattttagcattttcagtgttttacattatcacaaattattactaatttacatctatttaatttttaaatgactaagcctaactttaaaataaatcccctatttttttcttttgtgaattaacaaaaattgaaaatataaagattaatttgaagaaaggtaaggttatctcaagtaccttttgttttaagaccatctggctaaaaagatattt

SEQ ID NO: 102028 - DNA, 593 bp, Homo sapiens
  misc_feature (1)...(593): n = A,T,C or G
nnnnnnnnnnnntgaaatattttagaaagtaaaaagagttagaaaatagtccagactgttttcatatatactgtgtccctaccctcttctaatgttcacatcttacataacaacagcacattggtcaactactactaattaaaccttagatattatttaggtttctccacttttctactaatgtcttctttacacttcctagatataacactgtatttctcttagtctccttaaaccaatgtgtgtaacaattttaacttctatgtctgtaattggtaatgttatagacatgctactcagtaactaaacttgatattcagtaagtttttaaaactctygtacaaaattttatctcaatctgtatttttcttcaaattgcgtattttagcattttcagtgttttacattatcacaaattattactaatttacatctatttaatttttaaatgactaagcctaactttaaaataaatcccctatttttttcttttgtgaattaacaaaaattgaaaatataaagattaatttgaagaaaggtaaggttatctcaagtaccttttgttttaagaccatctggctaaaaagatattt

SEQ ID NO: 102029 - DNA, 593 bp, Homo sapiens
  misc_feature (1)...(593): n = A,T,C or G
nnnnnnnnnnnntgaaatattttagaaagtaaaaagagttagaaaatagtccagactgttttcatatatactgtgtccctaccctcttctaatgttcacatcttacataacaacagcacattggtcaactactactaattaaaccttagatattatttaggtttctccacttttctactaatgtcttctttacacttcctagatataacactgtatttctcttagtctccttaaaccaatgtgtgtaacaattttaacttctatgtctgtaattggtaatgttatagacatgctactcagtaactaaacttgatattcagtaagtttttaaaactctcktacaaaattttatctcaatctgtatttttcttcaaattgcgtattttagcattttcagtgttttacattatcacaaattattactaatttacatctatttaatttttaaatgactaagcctaactttaaaataaatcccctatttttttcttttgtgaattaacaaaaattgaaaatataaagattaatttgaagaaaggtaaggttatctcaagtaccttttgttttaagaccatctggctaaaaagatattt

SEQ ID NO: 102030 - DNA, 588 bp, Homo sapiens
gatataacactgtatttctcttagtctccttaaaccaatgtgtgtaacaattttaacttctatgtctgtaattggtaatgttatagacatgctactcagtaactaaacttgatattcagtaagtttttaaaactctcgtacaaaattttatctcaatctgtatttttcttcaaattgcgtattttagcattttcagtgttttacattatcacaaattattactaatttacatctatttaatttttaaatgactaagcctaactttaaaataaatcccctatttttttcttttgtgaattaamaaaaattgaaaatataaagattaatttgaagaaaggtaaggttatctcaagtaccttttgttttaagaccatctggctaaaaagatatttttagtttaaaaggaggaaaaaagctcactaattttgtacattttacccacatactgtgtatcattaacatctcatataggagaaatttctagtatcttaagcgttaggtaataaaaggtattaaaagattttttttttcaattttacaaaagcaccagcttatcttttgggatataatggcataaacttacgttta

SEQ ID NO: 102031 - DNA, 590 bp, Homo sapiens
tttaatgcacaattaagtcgaacctagtgaaaatctaaattatgcatttgaatactgatatagctgtttgaaagtacactcaaatcagttatatttctacctgacagtctaacttgataccaatatttccacacccatcctatttctttttccctgtttgtcaatataagaattttaaaactatcagaaaaagactgtatatttctgaactctgcatttctatctcaagggcttgaaatgtctttctgaagatcttacatcattatcytattagatgtcatttaagtaaatgggtggaccactaacatgttttgcaacatttccacgtgcaaaatatttaagatgtccaaagaagacattatcaagcactaaacttcaaatgcaaatttctccttgtagtttcttccacataaagcaatctttttcaataatatgttagcacatttttctatatgaagatgaaaagctaaattgttggaaactaactgatgttgggaaaaacagggaaacagggagtgcatcttactgggataagagaaaacattatttaaattttggtaaaagagatcaccaaattcactttatttcta

SEQ ID NO: 102032 - DNA, 590 bp, Homo sapiens
tttaatgcacaattaagtcgaacctagtgaaaatctaaattatgcatttgaatactgatatagctgtttgaaagtacactcaaatcagttatatttctacctgacagtctaacttgataccaatatttccacacccatcctatttctttttccctgtttgtcaatataagaattttaaaactatcagaaaaagactgtatatttctgaactctgcatttctatctcaagggcttgaaatgtctttctgaagatcttacatcattatcttattagatgtcatttaagtaaatgggtggaccactaacatgttttgcaacatttccacgtgcaaaatatttaagatgtccaaagaagacattatcaagcactaaacttcaaatgcaaatttctccttgtagtttcttccacayaaagcaatctttttcaataatatgttagcacatttttctatatgaagatgaaaagctaaattgttggaaactaactgatgttgggaaaaacagggaaacagggagtgcatcttactgggataagagaaaacattatttaaattttggtaaaagagatcaccaaattcactttatttcta

SEQ ID NO: 102033 - DNA, 579 bp, Homo sapiens
gttggtctggtggaattatttatctctggctttctccctgtatccggttacagcaataaattctcttctttcctagtttgtctgcttctcattattgggcctggagaaaaatgaggctggacccggcttggttcttggaatactagtgttgtatattttatcgactttgaaaatgtctaatgacatatatccaccaatgagtatcacatagwatagtttcaatgtactaaaaactttatgttctatttaatcatccctccctccctctacccctggcaacaactgacctttttactgtcctcatagtgggtttttttttttccctagaatgccacatagttggaatcataccttttccaatcagcttctttcactcagtaatatggatttctgtttcctccatgactattcatggcttgataactcatttcttttccacactgaataatattccattgtctggatgtaccacagtttactgatccactcacataccaaaggatatcttggttgcttccctgttttgacaatgatgaataaagctgctagaaacatcattgtgcaggtttttgtgtggac

SEQ ID NO: 102034 - DNA, 555 bp, Homo sapiens
gattggagattaaaatatctatggcaccgaataacaggaaaaatgtcttttaaatcaaagttaactcttgattctctggtaattagatttaattttattatagtcattaatattgactagtccctgtaggtgagttctccttacaggacacttatgcatgcttatatgggacttactttaaagtaggccacttaygatgtaacttatgtatatttatatacttataaatattgtaatttaccctattctccctaaaggctacccatttcaacttcttacatggatacatttctttgtttatagtttatagcttatcccatatagtttcatatatagatgatgattggaaaaagcaattggaaaataatataaagcttagctcatccctaagaagcagaaaaatcattatataatatgtaaaattttgcacacagtaaatacccgtttaatatttaaagaaagagagtagaattcagaatcagtcttgccaacatatatccaagctactacaaaagaacatttatgattgccataaaatttaccaagaatttctgg

SEQ ID NO: 102035 - DNA, 587 bp, Homo sapiens
tgtgccctatatgcaagtaaagccagaagtcctggagtaatacctccagtagcagcccctattgggaaacagaagccagtgagtaaatgcccctgcctcctgtcctcagggtgataattttggaaattgtagtagacattctgtcacttctcaacaggacctagtagaatcaagtgaatgctgtgcacaggcacaaactcaataatacatctccctgttagcttttttcgccatccctgtctcacyttggccaccctttcacccctactttcacatcaactccagtataaactactcacacctaggtctttgtctcaagggaatacaaactaagataggttactttgttaacaacttgctattcctttagaacagggatcagcaatttttttctctaaaggggcagattgtacatgtttgtggttcatatggtctttgtggccgctactcaattctatcattttagagtgaaaacagccataaacaatgcacaatgaatgggtgtgactatgttctaattaaaatatatttatgaaaactggtggtggaccgcatgctgtccgtgggccatagattgccaatctcta

SEQ ID NO: 102036 - DNA, 587 bp, Homo sapiens
tgtgccctatatgcaagtaaagccagaagtcctggagtaatacctccagtagcagcccctattgggaaacagaagccagtgagtaaatgcccctgcctcctgtcctcagggtgataattttggaaattgtagtagacattctgtcacttctcaacaggacctagtagaatcaagtgaatgctgtgcacaggcacaaactcaataatacatctccctgttagcttttttcgccatccctgtctcactttggccacmctttcacccctactttcacatcaactccagtataaactactcacacctaggtctttgtctcaagggaatacaaactaagataggttactttgttaacaacttgctattcctttagaacagggatcagcaatttttttctctaaaggggcagattgtacatgtttgtggttcatatggtctttgtggccgctactcaattctatcattttagagtgaaaacagccataaacaatgcacaatgaatgggtgtgactatgttctaattaaaatatatttatgaaaactggtggtggaccgcatgctgtccgtgggccatagattgccaatctcta

SEQ ID NO: 102037 - DNA, 587 bp, Homo sapiens
tgtgccctatatgcaagtaaagccagaagtcctggagtaatacctccagtagcagcccctattgggaaacagaagccagtgagtaaatgcccctgcctcctgtcctcagggtgataattttggaaattgtagtagacattctgtcacttctcaacaggacctagtagaatcaagtgaatgctgtgcacaggcacaaactcaataatacatctccctgttagcttttttcgccatccctgtctcactttggccaccctttcacccctactttcacatcaactccagtataaactactcacacctaggtctttgtctcaagggaatacaaactaagayaggttactttgttaacaacttgctattcctttagaacagggatcagcaatttttttctctaaaggggcagattgtacatgtttgtggttcatatggtctttgtggccgctactcaattctatcattttagagtgaaaacagccataaacaatgcacaatgaatgggtgtgactatgttctaattaaaatatatttatgaaaactggtggtggaccgcatgctgtccgtgggccatagattgccaatctcta

SEQ ID NO: 102038 - DNA, 334 bp, Homo sapiens
ctttctttaactatgaagttcacgtgtccaaaatctgtggtagttgctgtctgatttttgatcactgatggtgatacagatatttatcatcaactcacaacttcccaaatctttgaaaagtcttactattgatgrttcaactagtagaaacatgatgtaaaatatctgaaaataaagtttttatttattagaatgtaaataataatacaaattgtaataaggtgtaaaagttctttcttcactgaagcagtaccatgttgtcctgtaccccacaaatgcactactcccccatggtctaatgtattttaaaagtcctgtaattgctattaactca

SEQ ID NO: 102039 - DNA, 334 bp, Homo sapiens
ctttctttaactatgaagttcacgtgtccaaaatctgtggtagttgctgtctgatttttgatcactgatggtgatacagatatttatcatcaactcacaacttcccaaatctttgaaaagtcttactattgatgattcaactagtagaaacatgatgtaaaatatctgaaaataaagtttttatttattagaatgtaaataataatacaaattgtaataaggtgtaaaagttctttcttcactgaagcagtaccatgttgtcctstaccccacaaatgcactactcccccatggtctaatgtattttaaaagtcctgtaattgctattaactca

SEQ ID NO: 102040 - DNA, 334 bp, Homo sapiens
ctttctttaactatgaagttcacgtgtccaaaatctgtggtagttgctgtctgatttttgatcactgatggtgatacagatatttatcatcaactcacaacttcccaaatctttgaaaagtcttactattgatgattcaactagtagaaacatgatgtaaaatatctgaaaataaagtttttatttattagaatgtaaataataatacaaattgtaataaggtgtaaaagttctttcttcactgaagcagtaccatgttgtcctgtaccccacaaatgcactactcccccrtggtctaatgtattttaaaagtcctgtaattgctattaactca

SEQ ID NO: 102041 - DNA, 559 bp, Homo sapiens
aggttactgtaagctatgaccgtgctactgcactccaggttgggcaactgagtgagaacgtgtctcaaaaaaaaaaaaaaaaagactccaaggctttaagaaaattaaagggtgtttttttcctcagaggttactgtcttataactactcttatgaactactaaatacagacagaaactatttattttagagagagagaattgcaatgcagagatgtaargtttaactgtaaatatatttgtgcttgtttatgacaatgattaatttaagataagatttgtagtaaattttactaatccttgagtatggggaccatatttgttctgcttataagggtagtcccagtgcccagcacagtgcctggcatatattgtacacacaataaacctttgttgcatgagcaaaggcgtaatagttctagcaccagcttggtaatgtttctttaagaggaatgtatataatttcctattacatatcattgtgcttctggtaagtaattttgaagataactactttcctctcctgatgcttgtaaatactagataagatgttttgattc

SEQ ID NO: 102042 - DNA, 603 bp, Homo sapiens
ctggaaagccagtgagacagaagtcttcactcccctggaaaagggggctgaagccagggagccaagtgttcttgctcagtggatcccacccccactgagwctagcaagctaagatccactggcttgaaattctcattgctagcatagcagtctgaagccaacctgggatgcttgagcttggtgggaggaggggtgtccaccattactgaggcttgagtaagtggtttttcctcacagtgtaaacaaagccgccaggaagttcggactgggcagagcctactgcagcatggcaaagctgctacagccagactgcctctctagattccccctctctgggcaggctatctctgaaagaaaggcagcagccccagtcaggaactaatagataaaactcccatctccctggaacagagcacctgggggaagaggtggctactggggcagctacagcagacttaaacattcctgcctgccagctctgaagagaacagtggatctcccagcacagcacttgagctctgcttagggacagatgcctcctcaagtgggtccctgactcctgtgcctcctgacttgagactctcccaagcaggggttgtggtg

SEQ ID NO: 102043 - DNA, 603 bp, Homo sapiens
ctggaaagccagtgagacagaagtcttcactcccctggaaaagggggctgaagccagggagccaagtgttcttgctcagtggatcccacccccactgagtctagcaagctaagatccactggcttgaaattctcattgcyagcatagcagtctgaagccaacctgggatgcttgagcttggtgggaggaggggtgtccaccattactgaggcttgagtaagtggtttttcctcacagtgtaaacaaagccgccaggaagttcggactgggcagagcctactgcagcatggcaaagctgctacagccagactgcctctctagattccccctctctgggcaggctatctctgaaagaaaggcagcagccccagtcaggaactaatagataaaactcccatctccctggaacagagcacctgggggaagaggtggctactggggcagctacagcagacttaaacattcctgcctgccagctctgaagagaacagtggatctcccagcacagcacttgagctctgcttagggacagatgcctcctcaagtgggtccctgactcctgtgcctcctgacttgagactctcccaagcaggggttgtggtg

SEQ ID NO: 102044 - DNA, 603 bp, Homo sapiens
ctggaaagccagtgagacagaagtcttcactcccctggaaaagggggctgaagccagggagccaagtgttcttgctcagtggatcccacccccactgagtctagcaagctaagatccactggcttgaaattctcattgctagcatagcagtctgaagccaacctgggatgcttgagcttggtgggaggaggggtgtccaccattactgaggcttgagtaagtggtttttcctcacagtgtaaacaaagccgccrggaagttcggactgggcagagcctactgcagcatggcaaagctgctacagccagactgcctctctagattccccctctctgggcaggctatctctgaaagaaaggcagcagccccagtcaggaactaatagataaaactcccatctccctggaacagagcacctgggggaagaggtggctactggggcagctacagcagacttaaacattcctgcctgccagctctgaagagaacagtggatctcccagcacagcacttgagctctgcttagggacagatgcctcctcaagtgggtccctgactcctgtgcctcctgacttgagactctcccaagcaggggttgtggtg

SEQ ID NO: 102045 - DNA, 603 bp, Homo sapiens
ctggaaagccagtgagacagaagtcttcactcccctggaaaagggggctgaagccagggagccaagtgttcttgctcagtggatcccacccccactgagtctagcaagctaagatccactggcttgaaattctcattgctagcatagcagtctgaagccaacctgggatgcttgagcttggtgggaggaggggtgtccaccattactgaggcttgagtaagtggtttttcctcacagtgtaaacaaagccgccaggaagttcggactgggcagagcctactgcagcatggcaaagctgctacagccagactgcctctctagattccccctctctgggcaggctatctctgaaagaaaggcagcagccccagtcaggaactaatagataaaactcccatctccctggaacagagcacctgggggaagaggtggctactggggcagctacagcagacttaaacattcctgcctgccagctctgaagagaacagtggatctcccarcacagcacttgagctctgcttagggacagatgcctcctcaagtgggtccctgactcctgtgcctcctgacttgagactctcccaagcaggggttgtggtg

SEQ ID NO: 102046 - DNA, 507 bp, Homo sapiens
gaattcttgacatgtttattgaggacttactgcacgttgacactaagcaaagtaatgctcagattacacacaaagttatcagacaggtcctggtggaaaaacagctgtggccaatacgtgaaattcatgaaaatttgttttgagggtgtttgatagaaatgaacataaagacaaaagaactttatagttttcctagagttgaacctgatggctcattttgaagctgtggattgatttatgaaactagaaaccttcctgttcgctttgcagtgctactatcagtttggcacgtgtgaatttctgaataacatttatttgtcctatccctttaaagagcaaatagtcaatttttttcttaggcactttggtattttaaaagtatattttggcaagtgctrtactttacgtagtatactttatgagatatcttataaacaagtgtactttaaaaatatgtctttgtcattaagtcgaatgcattggtgggtgtagaatcatttgcctggg

SEQ ID NO: 102047 - DNA, 333 bp, Homo sapiens
gaattcgtgtttagaaacggagttttgaaggaacatgtcttgtatttatgcacagatcacggttgctttcttattacttactcaaatggtgagcttagaactaggagcaaaatatttagtacctttgcggagcagcctagctagggtctgctgtggagcagacattgtaaatgtgctttatgtgtgtgcacactaactttttgtttggccccagagtgggggttgggagaggagaaagccctgtgttgatgatgtgattatgtatgcagatgtgctggtggggaagagtttagtatcggccacttyttgctttgcatagaaattttcaggatt

SEQ ID NO: 102048 - DNA, 558 bp, Homo sapiens
tgggggtaggagaagtattgtttaaatacaccatgagacagggtgaagaatgctcctggaaggttcttggccacaatacacagacttatgtgtggtgtcgaaccttagcagaagaggaatttggaagagtagtgaggagaacattagatttcattggagtagatgaattgaaaaccctaaagaaaatcttaggaagcagaaaaagtataattatctcacagtgacactttgctgaaktgtagggcagaaaagtgattttcaaaaaagcttttgcactataaatatttatgtatttattttaaattaacttctgtttctaatgccttaaatctcactgagttactctgctaacaaaactgaagataatctggaggctttttctcaaagaaacttcaaataaatttttttttcatatttctccacatgtctgtttgatctttcagcatactatggattataccagacatgctcaaatataaagaagtagggaagactgatcttagctaacttttaatacaacaacaccaggcaaaattcacttcccttttgaaaagtaca

SEQ ID NO: 102049 - DNA, 409 bp, Homo sapiens
aggaatgaatgaatggatgaattaatattactcccaaaacttgcatgcaagtgtataaatgtcttcaggaagtaaggccaccttgcaacattataaattttaggaagaacttgacatatatacattggctatagcaaacatcgtatttaatctaaataaaagtgttattttaaagtgggttagcaaatctttttagtgttaatggtgcatgccatgattatgcacattgaagtgaagcagtgtgcttggtcactattgtgttgttcttgtcatgtgaaggaactaaaattcaaacaaccaaaggggacagttgagtcctatgtaacaatatattatgtgttttcttttttcaagtmtaaaaaacgagcacttggactctatgtatgtaaggaacttatatgttttctgg

SEQ ID NO: 102050 - DNA, 650 bp, Homo sapiens
gccccttgcttaactattgtaagacctatttcaaagagacaggtagaagatttgctaattgttctttggataccagcagaaaaaatagcttaasttttctaatgtttagcatttcaaaagagagcagaggtgagttataaaaagagaatgaataccatctcatcttgttctctcagaactccatcctcaagacactaatgtggttgatttgcctaggtagctgagggtgtgctataggaactgaacagaggttcacagagagcgaaagtcaccttatgtgggggtatttgtagtttaaactttcttgaagattaactttgtatagctagttcatgcctttcatatctataagaacattcatcacaacatttcctgtatttaaaaaatagagatctgttctgatttgtgttagagtttgtattttcaaagtgaggaaggtaaataagctttttttaaaatttttatttaattttttttttggtaaaaggaattgtagtccagtgactacagaattgcattattgtggaattgtggaatgcagtttgtggacatgaagatctgacactaagaattttcctttttttagaagaatctgaaaaaaaaagtaaaaacaaaaattattaaaaggaaagaaaaggaaagtaatagac

SEQ ID NO: 102051 - DNA, 650 bp, Homo sapiens
gccccttgcttaactattgtaagacctatttcaaagagacaggtagaagatttgctaattgttctttggataccagcagaaaaaatagcttaacttttctaatgtttagcatttcaaaagagagcagaggtgagttataaaaagagaatgaataccatctcatcttgttctctcagaactccatcctcaagacactaatgtggttgatttgcctaggtagctgagggtgtgctataggaactgaacagaggttcacagagagcgaaagtcaccttatgtggrggtatttgtagtttaaactttcttgaagattaactttgtatagctagttcatgcctttcatatctataagaacattcatcacaacatttcctgtatttaaaaaatagagatctgttctgatttgtgttagagtttgtattttcaaagtgaggaaggtaaataagctttttttaaaatttttatttaattttttttttggtaaaaggaattgtagtccagtgactacagaattgcattattgtggaattgtggaatgcagtttgtggacatgaagatctgacactaagaattttcctttttttagaagaatctgaaaaaaaaagtaaaaacaaaaattattaaaaggaaagaaaaggaaagtaatagac

SEQ ID NO: 102052 - DNA, 551 bp, Homo sapiens
tactcgggaggctgaggtgggaggatcgcttgagccaaggakgttgaggctgcagtgagctgagatcatgccactgcactccagcctgggtgacagagtgagaccctatcttaaaaaaaaaaaaaaaaaaaaaagtcctaaaactctcatacgatgaccatagagttgatagttttccttctctgcaggaaacaaatggaactggcaaactgtgactattgcctcttgttcttaagtaagatctgtgtgtccttctctagaagatacatttcaatatagtacagagaatgagatgttaggcaacctcctgtaagaaacatctctgtccaaaattatgctaggttagtgttgaatatcactattgaaaagcagaaagtggcctgcctctggaaccaccactatagaggcatgcagtcatgactggatatcgttcctgccagttacttctgtcgcaggagagctcaaaaaagaggtaaggtcacctaagccccatgaaggaatgattctatccctccctccaccaaaaaaaaaagatccaaatctagttgtat

SEQ ID NO: 102053 - DNA, 573 bp, Homo sapiens
catggcataaccagtcagtgatagtgtattggtggaagaaattgttctagaacttgcagtgacctggaggcctgaagtccatgggctcccccaccaaccccacttcccacacaacatgcccactcttctggtgtcccatctctgcattttgcaactttctaaggctgagctaaggcaaccactggacacttgkgtctgctctgactcaatcttaacacctaggaataagcaagtccttcctcaaagatatcccaaaaacagggacatcacctatgttttgaccatgaaaatgaaaatcaaaaaccattttggacacaccaactactgcattcactaggaggagaaatgggtgctgcctacatcaagcgtaacaataaccacaacaacaaaaaaagatgggggcccgaaggcgcttctaatctgtcgttaggataaagttagctagcattttgtttaaagtttttctatctatgctcttgagagagaaaggcctgtagtttttagtctctcatgctgtccttttctaagtttggtgtcaagagtgtacgtacctccattgctattccctggaaa

SEQ ID NO: 102054 - DNA, 542 bp, Homo sapiens
gaaatgaaaacatccagctagacatacagcaaatattacagatttgaagaagtagtcagtgttagcaaggtgaatgccagaagttctggggaagcaacatttctgaatgaacagcaaacaggattttggtcaacgtttcctccagtgcgatgcttctgatttcagctgtaatgagtgtaagatgacagtgttaaaagatgcttttcttcaacytttctgagtgtgaactctgatcagatgaatgggagtcatgaaattgagttcacacatctattgtcagcagggctagaggttgcatgagcacaaggatgtgctgtagaaagagaagtcgaggctagtactacccagaatatatgtgggaaacataagtttctctcctctttggagagactgtagtagactgctgataagacagatacaaaggcgatggaccaactgtgctcaggacagccctagagtcttcttaagtgaagtctatgagtattaaacatggtagatatatgatttacctaaatatgtgctagcttatttttcctctaccg

SEQ ID NO: 102055 - DNA, 551 bp, Homo sapiens
tggcgcgccaccggaagggcgttatcctgggggaactgagagtggaaactttcctcccgggaaaggaagaaacccgactggagaaaggtattagcgggactgggaagtgggccctaaggatttttaaagatttttgaaataaaarattatttgttcactcaaagttccaaactacatcactactactaccaccctaaaataagaaaaaaattgttttttgacagttaggctcactcagtctaaaccgcagcccccgaaattgggaggaaaacagctgtgctgaattaactagggatctggggccgaccatttgaaagtctgctcttcttccaaagagagtttggggccttgcctgctggactcttacatggtaagagagtgagtcacccaaagagagaggcagcggggagacaggaaagtggaaatacaaagatgccttggaaagctaatttggttcacgttacatttcagtcaccttaggttcatgagtcaacatttcggatgattcaggctttctgggagtcaggaagccccatagtcattggtttgat

SEQ ID NO: 102056 - DNA, 616 bp, Homo sapiens
aattggaagcttttcacctaaaaccctgaggcaactaaggaccaaacacacttgtgtaatagatgcacttgttaatgacctctgtatttatatgctaaatagggttttaactggggaggggagatagaagccagagtgaaattcagagaataatgcaactgtctaatccacgagtattttccaagcggtgcctacctcagaactatatttattttctttttttctttttctttttctytttttttttgagatggagtttctctcttgtcgtccaggctggagtgcaaaggcaagatctctgctcactgcaatctccacctcccgggttcaagtgattctcctgcctcagccttctgagtaactggcagtacaggcgcacaacaccattcctggctagttttttgtattttcagtagagacagggtttcaccatgttggccggggtggtctcgaactcctgacctcagttgatccacctgtcttggcctcccaaagtgctgggattacaggtgtgaaccactgcgcccgatcagaactgtatttcgctgtttgaaataattagtaaaagctaaggtgtaaattgtgttagatgatgttgacctattcttaattgatg

SEQ ID NO: 102057 - DNA, 616 bp, Homo sapiens
aattggaagcttttcacctaaaaccctgaggcaactaaggaccaaacacacttgtgtaatagatgcacttgttaatgacctctgtatttatatgctaaatagggttttaactggggaggggagatagaagccagagtgaaattcagagaataatgcaactgtctaatccacgagtattttccaagcggtgcctacctcagaactatatttattttctttttttctttttctttttctttttttttttgagatggagtttctctcttgtcgtycaggctggagtgcaaaggcaagatctctgctcactgcaatctccacctcccgggttcaagtgattctcctgcctcagccttctgagtaactggcagtacaggcgcacaacaccattcctggctagttttttgtattttcagtagagacagggtttcaccatgttggccggggtggtctcgaactcctgacctcagttgatccacctgtcttggcctcccaaagtgctgggattacaggtgtgaaccactgcgcccgatcagaactgtatttcgctgtttgaaataattagtaaaagctaaggtgtaaattgtgttagatgatgttgacctattcttaattgatg

SEQ ID NO: 102058 - DNA, 616 bp, Homo sapiens
aattggaagcttttcacctaaaaccctgaggcaactaaggaccaaacacacttgtgtaatagatgcacttgttaatgacctctgtatttatatgctaaatagggttttaactggggaggggagatagaagccagagtgaaattcagagaataatgcaactgtctaatccacgagtattttccaagcggtgcctacctcagaactatatttattttctttttttctttttctttttctttttttttttgagatggagtttctctcttgtcgtccaggctggagtgcaaaggcaagatctctgctcactgcaatctccacctcccgggttcaagtgattctcctgcctcagccttctgagtaactggcagtacaggcgcacamcaccattcctggctagttttttgtattttcagtagagacagggtttcaccatgttggccggggtggtctcgaactcctgacctcagttgatccacctgtcttggcctcccaaagtgctgggattacaggtgtgaaccactgcgcccgatcagaactgtatttcgctgtttgaaataattagtaaaagctaaggtgtaaattgtgttagatgatgttgacctattcttaattgatg

SEQ ID NO: 102059 - DNA, 627 bp, Homo sapiens
gcattcctacatgtgatgttaacgttgttcttgaacagttgctgatcaaagattcatttgatgaatctgatttttccgaaatagataattctyatgattcagacaattctgatgttagttctggttagaaataactctgagaacagcttatatattttattttcatgttgaaaatcaatcagatttgcttcagcctcaaagagcatatttatgtgaaattgttttggcagtgagctgcacttttttttctaaaccggaaaagggttaagtcttcgttttatctttgttcacctaaatttttaccgttatgataaatttactgtttacatattaattccttgtttttaacctgactctatctttcattttacttaacatgtcttctctatctttcatcccatggactttcttacattctttgaaatttctccatatctctttccagttcactaatttgctcttcatctttgtctaatctgctaataaacccatcatattcggattttgtattcagtcaatttttacagactctctcgtaacttattttcaaatcattgttttatatgttgtgtctgataattccaacatttaacatcttttttcagatttgattctgtgatttgtttt

SEQ ID NO: 102060 - DNA, 627 bp, Homo sapiens
gcattcctacatgtgatgttaacgttgttcttgaacagttgctgatcaaagattcatttgatgaatctgatttttccgaaatagataattcttatgattcagacaattctgatgttagttctggttagaaataactctgagaacagcttatatattttattttcatgttgaaaatcaatcagatttgcttcagcctcaaagagcatatttatgtgaaattgttttggcagtgagctgcacttttttttctaaaccggaaaagggttaagtcttcgttttatctttgttcacctaaatttttaccgttatgataaatttactgtttacatattaattcctygtttttaacctgactctatctttcattttacttaacatgtcttctctatctttcatcccatggactttcttacattctttgaaatttctccatatctctttccagttcactaatttgctcttcatctttgtctaatctgctaataaacccatcatattcggattttgtattcagtcaatttttacagactctctcgtaacttattttcaaatcattgttttatatgttgtgtctgataattccaacatttaacatcttttttcagatttgattctgtgatttgtttt

SEQ ID NO: 102061 - DNA, 592 bp, Homo sapiens
tctgctgaaatctaaaattaaaacccctattattggggactgctggataggtagccagaaaggcaaaggactcctcaagaatcaagaatcagatccacagaacaaatatgcatgcgtttgtgtgtgtgtgtgtatgtgctcttcccttgagctccatgcttgcccttaccaaggggtaagatctatagaaacagaagttgctattatttaactctgatataaggtgttcttccttaatttcagctgctgtggctgcagctgtgatggtatctacctgtgtcagcatttgtgttgcctctggctccctccctcagcgtatttgcactgcatgtgaaaacaatctctcagtcaagacaagaaatcctatgattcctgtgatttgtccaccttaggacatttgggtctgactggttcattttcaccacccagtactgcccactgggattttcaragttcacactatcttctgagcatctgcttctcaaggcagcatcctttactggctccctgtcccccatcccatccccaagaagtgcccagtagatcttgggtattattacggcttcaaaattctgtgataaatcacaagctt

SEQ ID NO: 102062 - DNA, 595 bp, Homo sapiens
tgctcttttcttttttcctttcttttctttttttttttttttttgagacaaagtcttgctctgtctcctagaatgggatgcaatggcaacagagattatgctcttttcaaagtgagtagaagcagtacaaacatagagatctcaaagtgcagtaataaagtatatcactgagctcatattggtactcagtaaatattaaacagtcaatcaaggacctatgttttttttaataggaaaataccacaaacaccataaaaatgaaatgtctatgtctaattgtcatttccattcctttactcatacgctgtaaacctgccgtatytcacatgcaaatccactaaaaggaggttaaaagacagatgtggttaccaactacttttatcaccatctgagaagaatgctttggaaaattcttgatcagagagatcaaataaataagtataaaatttatattttatatgctacattttttaaaagagtgcatttacacacctttcctcaagatgttcaaggtgagtaatttatctctttaggccaaaagtgttgtgtttctccataagtcgcaagctgttcttaccaaaatgtatgaaataca

SEQ ID NO: 102063 - DNA, 609 bp, Homo sapiens
cagtgttgaagtaggtcttaaactgaggctgctggtcctctttaaattttatatactacacaatgttgtttctcattaaaagagaacccaaaactaatatttaaaataattttcattcttgtccaacattttgtctmtattaaaaagaagaggtcaaatgataagtactggtttttgttttgttttttaagtaggagaaaaggcatatacatttatttaacatttatacatgagagccttcagaatgaagacccaaattctcgatgagttatagaatcttatctagcaacttgaagttacagaaataatgggtggcttgaattatggtaaaacaggttgtgagagtggtggaaaaaaaggaattctcttgaggggcaatagattattgctatgaagaaagactgagtcaggaaactgagactaacttgtaaatagttgatatgattaggctttgtatccccacccaaatctcattttgaattgtaatcccgtaattctcatcatccctgtattaagggagagaccaaatggaagtaactgagttacggggatggtttccccctgctgttctcctgatactgagtgagttctcatgaggtctgatggttt

SEQ ID NO: 102064 - DNA, 609 bp, Homo sapiens
cagtgttgaagtaggtcttaaactgaggctgctggtcctctttaaattttatatactacacaatgttgtttctcattaaaagagaacccaaaactaatatttaaaataattttcattcttgtccaacattttgtctctattaaaaagaagaggtcaaatgataagtactggtttttgttttgttttttaagtaggagaaaaggcatatacatttatttaacatttatacatgagagccttcagaatgaagacccaaattctcgatgagttatagaatcttatctagcaacttgaagttacagaaataatgggtggcttgaattatggtaaaacaggttgtgagagtggtggaaaaaaaggaattctcttgaggggcaatagattattgctatgaagaaagactgagtcaggaaactgagactaacttgtaaatagttgatatgattaggctttgtatccccacccaaatctcattttgaattgtaatcccgtaattctcatcatccctgtrttaagggagagaccaaatggaagtaactgagttacggggatggtttccccctgctgttctcctgatactgagtgagttctcatgaggtctgatggttt

SEQ ID NO: 102065 - DNA, 622 bp, Homo sapiens
ctatcttcaagaaccagctctttaataaaagcattctctctgtactcaaattcacgcaacaatgtttccttttactgtttgaaagactaggaatctgtgccttaaaaactagctcacctttcctactaattgcaagctcataaagataaaagactgcatattttcactttgatatcccctgttcccttgacagtaccatacagaaatgtctagacaataattatttgttcaaaatacagamaaaattatacccaatacattaataaaaataacatagttacacctaatttggacccccgtggatcatctctgggccatctctgttctaaaacacagcaagccttcttaacctcctgtttatctgattagatattcctagtatacatatttgaagttaaagttgctgtaagaaaaatctaaatatttatgaatattttctgcactgtgcatacacatttattttatctttatctttaggttccatttcaatgcactgacctagttattttgactcagtacaaaacaacaacaccaccacaccaccttatttatagtagttacattgtagagtataaatgggaaatgcctgcttctctcataaatcgtcaaataccacagggaa

SEQ ID NO: 102066 - DNA, 659 bp, Homo sapiens
tccagaatcccaaaaaagtattattaccacaaaagggatcactggtcccaggaggaaatacatattagcattccaggaccaacaggttcctatgcctgctgtgaagtaaamgaccaacacattgagacagccaggtgtgcagcagaagaagagttgaatgatcacagggcagatgggtgaggagatgtgaggagaccctcaaatctgtctccctgaggagttctgggttgaggtttctaagcggatcatggagggtgaggggctggaaaattaggggcattgattggtttgggtaagggggaagaaatcatcagaatgtggaaactgccttctttgatgagtcagttccttctggggtctttcagaccagctagcatcagtagtttcactgacatgcatgaccagaaagaatatctcaaagggaaaacttaatgtttcacaataattaagttgttatctacagagcagttaaggggaactataatcttgtgtcaggatttccatgattccggggtggcagacagcaaacaactataaggaagcaagtcagagagaataagctgagctagtaaatgctgagtgcgctgcaagtttggtttattttcatttctccccctcccatctttcctgataaattctataatgtttatagaaatggt

SEQ ID NO: 102067 - DNA, 659 bp, Homo sapiens
tccagaatcccaaaaaagtattattaccacaaaagggatcactggtcccaggaggaaatacatattagcattccaggaccaacaggttcctatgcctgctgtgaagtaaacgaccaacacattgagacagccaggtgtgcagcagaagaagagttgaatgatcacagggcagatgggtgaggagatgtgaggagaccctcaaatctgtctccctgaggagttctgggttgaggtttctaagcggatcatggagggtgaggggctggaaaattaggggcattgattggtttgggtaagggggaagaaatcatcagaatgtggaaactgccttctttgatgagtcagttccttctggggtctttcagaccagctagcatcagtagtttcactgayatgcatgaccagaaagaatatctcaaagggaaaacttaatgtttcacaataattaagttgttatctacagagcagttaaggggaactataatcttgtgtcaggatttccatgattccggggtggcagacagcaaacaactataaggaagcaagtcagagagaataagctgagctagtaaatgctgagtgcgctgcaagtttggtttattttcatttctccccctcccatctttcctgataaattctataatgtttatagaaatggt

SEQ ID NO: 102068 - DNA, 606 bp, Homo sapiens
gtttctctgcctcattgactcttgatcttgtttcagaatgatcattttccacgttccctcttacccttttatattttagttctgtagtttaattatttaatttcgtaacggcatcatctgattgagggactttggtattagctctgaaaagcatttttgggggattcatttggcctgaaacaccacataaaatgtgattttattatgtgtgatgaggattactatgattagggtggaccattttcaaaaacaaattagttcaaggaaacagaggtctgaggctggctctttcctctttagagcccttgggctccagtaaaactgtccactgctcatgttttatttatttattctagtcatttagtcatttctgtttttaaatttgaggaaaaaactcatcatgctacagcatggtgtggtgaaaatacatatgcataggacatcaggagacctggagtcttctctgagcttttctacccactatttacttgtgtaaattataggaaatcatctattttggactcattatccctgtttataaagtgagggtattggattgartaccttttactttttcatttgcataaggcatttaaagattctatg

SEQ ID NO: 102069 - DNA, 533 bp, Homo sapiens
  misc_feature (1)...(533): n = A,T,C or G
tgaaatttgcctgtgccaaaaattaattgttcatgcatgggtttatttttgaagtgtctatactgttccattaatctrtcttgacactgataccccactatcttccatactgtagctttatgataaatcttaaagtattctttgtcctccaattttgttcttttttttcaaatttgctttggctattctaggtccttggtctttccaatatgaattttataatcaatgtatcagtttccacacacatcacagaagagccttcacagattttcactgggagtgcaacgaatctatagatcnattaaggaaaattgacattttgccaatattaagtcttctgaaccattacctctagttatctctctatttatgtcttctttcatttgtttcaacattgttttgtagcttgcagtgtacaggtcttttacatcttttggcagatttatccttaagtttttacatttacattgctattgtaaactatattattaaaaattttcagtgatgtatttccaataatttgttgcactatg

SEQ ID NO: 102070 - DNA, 636 bp, Homo sapiens
ccagtgccatccctcaacaatttctctgccttattaaagtcaacagcaaagtgtaatgtaagaaaaaaaatagtggaaacacatattaattgatttgtctcttatggagctgatttttaaaaggtcaagtagggaaaaatgttcaaaattgttattaatagctctgttatttatttataagatgattgatacattttaacacaaataaagtcagctcacattgccagaagtgagttataactatcccatagccaaaaattccatcatgttaaagtatcactatgctttgagacactgtttttgcaaattttacagtcaaatccttttctatccatatacctaatctatatttgtaagacccagtcaagtcaataaactatcccagataagtttttgtaaakgcatcaacttcttatgttatgaggaattatcacagtatagtctattttacaaatgaacatggttagcaattaccatgagtagatagataattcagctttgcttaatttagcacattatgttaatatcttacttttagttggatttattttttcatttttttttttgattgacaagacaggattgtatatatttatggaaatgcttttgtataaattgtatatattgtggaatagc

SEQ ID NO: 102071 - DNA, 622 bp, Homo sapiens
tcttgccggctctcttcctgcttctgctaccttgctgacgcacgctgctgacgcaagtggccttgcgtcttccggctgggcctgagaagggaggagtttttcatctacttaagctttcaggcccgggagagcttagaactggcccttctgtgtctcatttatttaacttagtataatgtcctccgtgttccttcatgttgttgcattgcagaatttcctttttttaaaggctgaataaaattccttgtctgtatataccacattttctttacacatttatccatcaatggacacttttccacatcctggctgctgtaaataatgttgcaatgaaaataggggtgcaaatactrtctcttcaaaatctgagtttcaattcttttagataaataccgatcagtgggattgctggatcatacagcagttctatttttaagtttttgaggaaactctatactattttccgtagtggcagcactatgttacattcccaccaacaatgtacaagggttccagtttctacataacctcaccaacatgtatctttttaataatgtatttatattcatcaatgatactctattgtacacttaaaatttgttaaaagggtagatctcattta

SEQ ID NO: 102072 - DNA, 622 bp, Homo sapiens
tcttgccggctctcttcctgcttctgctaccttgctgacgcacgctgctgacgcaagtggccttgcgtcttccggctgggcctgagaagggaggagtttttcatctacttaagctttcaggcccgggagagcttagaactggcccttctgtgtctcatttatttaacttagtataatgtcctccgtgttccttcatgttgttgcattgcagaatttcctttttttaaaggctgaataaaattccttgtctgtatataccacattttctttacacatttatccatcaatggacacttttccacatcctggctgctgtaaataatgttgcaatgaaaataggggtgcaaatactgtctcttcaaaatctgagtttcaattcttttagataaataccratcagtgggattgctggatcatacagcagttctatttttaagtttttgaggaaactctatactattttccgtagtggcagcactatgttacattcccaccaacaatgtacaagggttccagtttctacataacctcaccaacatgtatctttttaataatgtatttatattcatcaatgatactctattgtacacttaaaatttgttaaaagggtagatctcattta

SEQ ID NO: 102073 - DNA, 532 bp, Homo sapiens
gctatcagccaggtatatacacagagactggaggaggtggtgtctgatttgcatagggctcaggggattggtttgaccaggcatgtcattcacgtagccgtgaaaaagctgtccctcctaccctagcattttaatatgyaaatgcaggacaccatgatgttctgcacacgtggggatatgtgtgggtggccatgttgccagaaacatgtggggcaagggcaagaaggctgagagaattgcagtattaggggagacccagtttctaaaggctggcatttgcatactaaagattgccagctcagccatgttgggtggacccagtttctaatggccagcatttgcatatcaaaggttatcagcctggatctaagagctggggctttacaagaaacttttccagagatgctttaaaaaatgaaaacttcccaaggacaccttttcttctctatctgcctaaaataatttcttaactcctacaacattccccactgtggagatgtcacactaaccgctattaggtggttttggatga

SEQ ID NO: 102074 - DNA, 422 bp, Homo sapiens
gtgactgttaaagtgacatacaaaaatatgctacaggccacagagatgtcttgaggaatatttccaaggtctcttaatagagttaacagatttttttcaacatcacaaagctttccaaactttctcttcttcttctaattaccatatgtaaaatgcctacacacaaccgtctcatagtctctcttctttctgtatttatgtctggaggcaagaggaggacagggtggaagctaaaaagaacactaaataatgttgagtcttaacttttggtaacaacatctatactttatgtktgtgtcatactgtttttcttccctgcctatcagttttctaggaactgcattttataactatgaaaataaacaacacaaatcacatgtacacatatatatgtgtgtgtatgtgtgcatgtgtatatacat

SEQ ID NO: 102075 - DNA, 531 bp, Homo sapiens
gttctgggataagtcttaataaatatctgttaaataactgattggttaccactccagaggagtgatttagkttttcttggtatctgtagatgtacatcttttttaaaaattgcaggtaaaataacttttttttcattctccaaggatatgaagattgccactggagtctgctcttccttttagaaaacagctttcttgatatataattcatacaattcaactgtttaaagtataaaattcaatggtttttagcctagtcattaaaatagactaaaaccattaaacttttctaatctttaactatcaccacaattaactttagaacattttcattacctacaaaaataaactgttacttttatcctttctgtgatggttaattttatgtgtcaatttggctgggccatgatgcccaggtaagtggtcaaaaatgttgtactggatatttctgtgtagatgtttttggatgagattaatatttaaacgaatggacttggagcaaaacatattgctctccgtagtgtggttggg

SEQ ID NO: 102076 - DNA, 613 bp, Homo sapiens
atattcttaaataatagtgatgataacagatttactaagtccttactatgcaccatatccagtgcagaacgattttataatcgttgtctttttttacttacaactctcctgtgttgtattattgattccattttatagatggtgaaagtgaggcttagagaaggcaaagagagagaatgcatgtatgtactgaatgcattttatgatgtcatttagttaggtaggtatcattacccaccgttttacagacaatgaaacaggctgcagaagacttggggaaagaacacttactgaatccttataatgtgtcaggcattctgttaagtgcattcctggcactgttattcgatttcatagccccataacaagcctgccagataggtgtcattatccctacattgcaaatgagaaaactgaggctcacagacgytaggtaattggctcaatttcatacactcaataaacacaaacaacacaaactggtgggcaaagcactcccatctttctctgaagttcatgttacctcaaagatatgatgtgctctctctgatactcaatttagtcaaggtcacagagttagcaagtagactaacattttgactccaagtgtgga

SEQ ID NO: 102077 - DNA, 613 bp, Homo sapiens
atattcttaaataatagtgatgataacagatttactaagtccttactatgcaccatatccagtgcagaacgattttataatcgttgtctttttttacttacaactctcctgtgttgtattattgattccattttatagatggtgaaagtgaggcttagagaaggcaaagagagagaatgcatgtatgtactgaatgcattttatgatgtcatttagttaggtaggtatcattacccaccgttttacagacaatgaaacaggctgcagaagacttggggaaagaacacttactgaatccttataatgtgtcaggcattctgttaagtgcattcctggcactgttattcgatttcatagccccataacaagcctgccagataggtgtcattatccctacattgcaaatgagaaaactgaggctcacagacgctaggtaattggctcaatttcatacactcaataaacamaaacaacacaaactggtgggcaaagcactcccatctttctctgaagttcatgttacctcaaagatatgatgtgctctctctgatactcaatttagtcaaggtcacagagttagcaagtagactaacattttgactccaagtgtgga

SEQ ID NO: 102078 - DNA, 613 bp, Homo sapiens
atattcttaaataatagtgatgataacagatttactaagtccttactatgcaccatatccagtgcagaacgattttataatcgttgtctttttttacttacaactctcctgtgttgtattattgattccattttatagatggtgaaagtgaggcttagagaaggcaaagagagagaatgcatgtatgtactgaatgcattttatgatgtcatttagttaggtaggtatcattacccaccgttttacagacaatgaaacaggctgcagaagacttggggaaagaacacttactgaatccttataatgtgtcaggcattctgttaagtgcattcctggcactgttattcgatttcatagccccataacaagcctgccagataggtgtcattatccctacattgcaaatgagaaaactgaggctcacagacgctaggtaattggctcaatttcatacactcaataaacacaaacaacamaaactggtgggcaaagcactcccatctttctctgaagttcatgttacctcaaagatatgatgtgctctctctgatactcaatttagtcaaggtcacagagttagcaagtagactaacattttgactccaagtgtgga

SEQ ID NO: 102079 - DNA, 433 bp, Homo sapiens
tacccagacactgaagaacatctactakcattaacaccatccgggaaagcatgacctcaccaaatgaactaaataagaccccagagaccaatcctagagaaatagaaatatgtgaactttcagacagagaattcaaaatagttgtgttgaggaaactaaaaaaaatcaagatgacacagagttggaattcataattctatcagatcaatctaacagagattgaaataattacaacgaatcaagtagaaattctggagctgaaaaatgcagcaggcatattgaagaatgcattagagtcctttaatagcagaattgttcaagcagaagaaatagtcagcttgaagacaagctacttgaaaatacacagaggagaaaaaaagaataaaaaaaatgaagcatgcctacaggatctagaaaatagcctcaaaatgaa

SEQ ID NO: 102080 - DNA, 477 bp, Homo sapiens
gtgtttcaatgcaactttatttatggacattgcaattctagttttgtgtaattattaacttttttttattttcatcaattcaaacatacacaaaccattctagttcatggactatacaaaaatgrgcagctagccagatttggactgtggatccatacatagtctcccaactccttctctatatagcaaagaatgtggtagctggtagctcatcatcctgtgtcttacaacttacatcaacatgaagttttcaattcttgactaaaaatccttattgatgatgagccagaggtcaggaacatgtacaaaataatcttatgtacaacagacgtacagaaaaggatctgagcatgtgggaatcagtgggaaacatggattgagttttcatacaagtgggaagtctgagaaggtgaaatattgtgtccagttcaaacattaaataagctatttggtacagatacttggagagattgcagt

SEQ ID NO: 102081 - DNA, 581 bp, Homo sapiens
ttaatataattataatttaagtctcaatatttttagttggaaaagaaagggagaattgcatgaaatcaaaatcagactgaagtgggaaaatccatgtttaaatatagacaaaatattttgaaattagaatgataattgtaagtacttttctgtaattattattataatattccataaagttatatactgtaatcgtaatagtatagcattgctatggaaaataaactaaattagtaaaacagagtagagaatccagaaataaaatcatatatacacatgtgggtgtgtatatattagaattatatgttatatattattatattatatattaagattatatattataatttatacatatatacacattctaatatacacatatatattggaattttttaattaaaatgtttagaattcaatttagtggggaaaatgyttatttaatccatagggttaataaaactggctgcctagaacaaaataacattgtatctcatatcacatactatataaaatacaaatcagatgaattataaactcaaatattaaatgaataaaataaataatttgcaggaaattag

SEQ ID NO: 102082 - DNA, 612 bp, Homo sapiens
gcaggtcttcctgaggctgtcatttaagctgaaatataaaggatagaaatgggttggctatgtgaggacataggggacaagattcaaattagatggaacaactaacataaaagtcttaaagacagagtgtgataagctcaaaataaaaaataatttgagactagaggtggaaaataaaacaagtggaagtatataaatctaatgattaataggagcaagatttcaaaagacctcaagactgtgtgtcatggcctgttgtcataaattgcatcttcacttctttcttacaggtagaatttcagttttgttgaaatatacacccttttatgagttcaaaagagttaatctgcttttcaatccamgtgctgaatctttgtaaaaagcttatcatggagttctaatttttctgaccatggacttgggttaggcatgttagtaaattctagctactctgacatgaaaggttttctactaaagtgctatggactgaactgtgtcccactcaaaagaaagaacaaataccctgatcacttcacaggtgcctccagcacaccatagctgccacactataaggagagtagcccagtctctcttccctgttagccctcaccc

SEQ ID NO: 102083 - DNA, 630 bp, Homo sapiens
agtaaatctatttctgattgtgatactctgaacaactatgtgtccctcactgagcagttgttgatacaccggtgtaagaaacattaaacaaaacaccattgcataagtaattttcaaactgtagaagatgcatcaatgcccggacttactaagccacatatctatagagtaggttctactggtaagtgacacataagttcttggtgtcactgatctgactcatattttcaatgaacttttgttttagaacagttgtggaattacagatcaatgaagaaatgagtgtagagagttctcatagattccacaatcatttctcctatcattagtatttgatgtatgccatgtcttataactagtgaattaatattgataagttattacctaatatccaaattgtattcagaattcattagtttmtgcctaatgtcatttttctgttctaacatcctatgtaggagacacattacatttagttgtcatatcttttgttgttgtttgtttgctgcctagtttcccacttccaacttatttgtagagatgaaaacttttttcattcacttatcacccacacaactgcagaaggctgtgttacatatcactgctaccttctaaatcaaacctgagtgc

SEQ ID NO: 102084 - DNA, 578 bp, Homo sapiens
ttgcataagtaattttcaaactgtagaagatgcatcaatgcccggacttactaagccacatatctatagagtaggttctactggtaagtgacacataagttcttggtgtcactgatctgactcatattttcaatgaacttttgttttagaacagttgtggaattacagatcaatgaagaaatgagtgtagagagttctcatagattccacaatcatttctcctatcattagtatttgatgtatgccatgtcttataactagtgaattaatattgataagttattacctaatatccaaattgtattcagaattcattagtttctgcctaatgtcatttttctgttctaacatcctatgtaggagacacattacatttagttgtcatatcttttgttgttgtttgtttgctgcctagtttcccacttccaacttwtttgtagagatgaaaacttttttcattcacttatcacccacacaactgcagaaggctgtgttacatatcactgctaccttctaaatcaaacctgagtgcagtttcctggtcataatgtacataaagactattagctatcagtgtg

SEQ ID NO: 102085 - DNA, 630 bp, Homo sapiens
agtaaatctatttctgattgtgatactctgaacaactatgtgtccctcactgagcagttgttgatacaccggtgtaagaaacattaaacaaaacaccattgcataagtaattttcaaactgtagaagatgcatcaatgcccggacttactaagccacatatctatagagtaggttctactggtaagtgacacataagttcttggtgtcactgatctgactcatattttcaatgaacttttgttttagaacagttgtggaattacagatcaatgaagaaatgagtgtagagagttctcatagattccacaatcatttctcctatcattagtatttgatgtatgccatgtcttataactagtgaattaatattgataagttattacctaatatccaaattgtattcagaattcattagtttctgcctaatgtcatttttctgttctaacatcctatgtaggagacacattacatttagttgtcatatcttttgttgttgtttgtttgctgcctagtttcccacttccaacttatttgtagagatgaaaacttttttcattcacttatcacccacamaactgcagaaggctgtgttacatatcactgctaccttctaaatcaaacctgagtgc

SEQ ID NO: 102086 - DNA, 652 bp, Homo sapiens
tgtaatcccagctactagggaggctgaggcaggagaatcacttggacccagaaggtagaggttgcagtgagccaagattgcaccactgcactccagcctgggtgacagagtgcaactctgtctacaaaaaacaaatgaaagaaagaaakagagagagagagagagagagagaaaggaaggaaggaaggaaggacggaaggaaggaaggaaggaaggaaggaaggaaggaaggaagaaagaaagaaagaaaagaaagagaagagagagaaagaagaaagagagaaaaaaaagaaagaaagaaggaaagaaataaagaaaagaaaagaaaatatgcaggtttctaaaaaattcaaaatatggtaggagacagaaaagaataaggaacttttagttaacagatttgaagttacagctataagagaaatgtaagttctctagtgttctatagcactgcagagtgaatatgattaataataatttatattttcaagaagctagaagacaggattttgaacttacacagcacacagaaatgataaatgtttgaggtgataaatatcctaattactctgatttgattattacacattatatacaagtattgaaatattactctgtattccataaatatacaactgttacatgtcaacta

SEQ ID NO: 102087 - DNA, 572 bp, Homo sapiens
aaacagtatcatacatatcaaaaattataatactagaagtaaaagaagtatgactcctaaaacatttcattgatattttactagacattatagccagtaccataagacaaaaaaaaaaggattaaggaaaaagttataaaagagtaawtttcacatatgacataatatctttcatagaaaatacaaacaatctataagaaaagtgttaagcttaacacattataaaagataggtgcaaggccaattagaaaaaaaggcataaaaaatttaaaatgtaatttaaaatagatgacttttaaatatcataaaacaccaaatacctaggcacaaatgtaaccaaccataaacacacaatatttctatgaaaaaaatttaaaataatattgagagaattttttaaacgtgcataagttgaaagacacaatagagtcatagattgaatactcatttttcaaagacatcaatttttcacaaactgatctatggttttagtgtaatcttaaaatttctagtcattttaatacaaaaatcaatgttgattcaaattttatataaaaatataaagtgtaaca

SEQ ID NO: 102088 - DNA, 573 bp, Homo sapiens
tcattaatgggaaaagaagcagtaatttcatagctttgggaattgttgtaacatggatagcctgatattacaattttgtcatacatattttagtgcatcttggcatcaaacacattgtttcatgtagtaaattcttcggaatacttgacttcaacagaggtgaaatgaaaaatgtacctgaagtccagagtgtctgccatgtaattagttcccttgctgctgggatggtagaatgtgaaattatggctcatatatctgctgaatcagtctttctggtccaatcttagtattattactactaatccttttctctttccttggctgttcacagtcccatgaggcttttcaatcaagagtctcaataaaagactgagcagctccayatggctgtgcagcggtgaatgtagaatgggttattgggaagaatattcagacagaagagaactaatagattctgtgccttcaaaggctgtaatttcaagtgataattagaggacatcacaaaagagactcatgtccagtggtacaatatgctctacaattgaaatttctcctaaaataaagaatgaatcc

SEQ ID NO: 102089 - DNA, 617 bp, Homo sapiens
accttcccttaagctcataatgctctcaaattggattcacaagtacaaaaaagaagctaaaaataaaggttgactagcatttaaaaatattttaactcactctggcaattctgatattcataaaaatatagaattgtartaatcattattcctagagataagattacagcaggcttgaattttgtgtagtttaatgttcacttcattgtatgcctatggaacacatactaactatatgataaacactgtgtaagtctataagaacaaaaacattgataaggcattttgtctatctacagaaagctcctagtattatagggaggaaaaaagtagatgcaaaatttctaatatatcttaattattatgacagaggtctacagcaattgctgtactggagagtcttaattatttgcatggtattttttatattattttaatcataagcagaagtagtcaatatttaatagcagataaaacataggcttgaccaatccgaatggaccctatggaaaactattaaaaatatcttggtgcaaacttgatgcatgtcagccctgattatgagctatgggctatcatacctctattttcctagaaatcataagctcttgagtcta

SEQ ID NO: 102090 - DNA, 459 bp, Homo sapiens
tggctggggaggccccatgatcatggtgaaagtgaaggaagagcaaagtcgcatctcacatggtggtggacaagagagaatgagagccaagtgaaaggggaaatcccttataaaaccatcagatctcataagacttattcactaccgggagaacagtatggggraatccgccccccatgatttaattatctcccactaggtctctcccaaaacacgtgggaattgtgggagcttcaattcaagatgagatttgggtgaggacacagccaaaccatatcaacacactattcaataaatggtgctgggataattgtcaagccacatatggaagaatgaaactggatcctcatctctcaccttatacaaaaattaactcaaaatatatcaaagacttacatctaagacctgcaaccataaacattctagaaaataacataggaaaaaaaaacacttttagat

SEQ ID NO: 102091 - DNA, 459 bp, Homo sapiens
tggctggggaggccccatgatcatggtgaaagtgaaggaagagcaaagtcgcatctcacatggtggtggacaagagagaatgagagccaagtgaaaggggaaatcccttataaaaccatcagatctcataagacttattcactaccgggagaacagtatggggaaawccgccccccatgatttaattatctcccactaggtctctcccaaaacacgtgggaattgtgggagcttcaattcaagatgagatttgggtgaggacacagccaaaccatatcaacacactattcaataaatggtgctgggataattgtcaagccacatatggaagaatgaaactggatcctcatctctcaccttatacaaaaattaactcaaaatatatcaaagacttacatctaagacctgcaaccataaacattctagaaaataacataggaaaaaaaaacacttttagat

SEQ ID NO: 102092 - DNA, 451 bp, Homo sapiens
tgtgtattttgtttcctttttctgcctaagagccakgacaaagctaaacaaatggacttagaaaaaggacatgtaatctctgattgaagcaacatcttgttgacagtacagttgtcccttgaacaacacaggattgagcttcacgggtctacttatatgtaggtatttttcaaccaaacatggatcgaaactacagaaacccacacataaggaggaatgactgcaacacttgagtattcatggactttgatatacataggtgtcatggaaccaatccccaggtatattgaagaatgactctattcactttctaatgccttgaaatttagatgaaattggatttagtattcatttgacatcttgtgaaatgaccttaagatacatgcaaattcctgagtccttagtttctcacattaatataatttgcacaattactacaaatctcctgcct

SEQ ID NO: 102093 - DNA, 623 bp, Homo sapiens
gcagagtgagatactgaaaaaaaaaaaatgggatttttaccaatgtgaaatggcccaatctacgtggaacccaaaatgtaatacatgaagttttgaggctaccaaattattaaaatatcaaaagtagaatttctgaaatgctaaatatcttctgaaactcaaatttgagttggaagagatcttagacataaaaaaatcgactccctttgtctatttgtttcatgactaataaaaacagaaatgagctctagatgttttgggactctgtttaaatacgtcaagataccttaaaagtctcagaagcaaaaagagagaaaaagagaaaatactaaatgaaagatgtaatcttttatttactcattatctgaatctcctacctgtgctttctttttttttcaatcagaaaaacttagaccatggacaacagtaaacaatgataaaaacagcagaatatttttctgtatagactgttttccttataattatttgaatgccttttaaaatttttcgtaattttctgatcataaaagtaatgtgtttataaaatacatacatrtaaagattttaaaaatcacttataaccccactcccataaaagaatactttgacattttggccttcat

SEQ ID NO: 102094 - DNA, 606 bp, Homo sapiens
atgggattggggctaatcaattttttcctgggaggaaaagaataaatggagatgaggtttccctaaagggaagccaatgcattctaagagctattaatgaacttgggactgtcagatgacaaaggaacattaagttctctctgttgtacagtggagagattttttaaacttagagattatgtcatataagggacagtgccctgacatttgtgccagagacatctgacaggtgaaaaagatatatgataaaattagtgatgtggaaccaaaaaaacgccagaggttagatttaagattaatcgagttcttgttcagagagagagccaataattttttttttttttttggtgagctatcttcttgtggagtccctgggacaagatttgtctagtgtagcagcataattaaagttctgccctatcaaagaacaagtgtttagatacattctcttctgaactagtttaatgcttgttcatacccaggcacaagaacaraactgttacaaaacaaaatcaccccagaataaaagaaaatgaaaggctcctcttccattctgggatgttggggggcaggtctggaagataagcaggaaggggagtaaagtca

SEQ ID NO: 102095 - DNA, 569 bp, Homo sapiens
acacatataccgatgtaacaaacctgcacattctgcacatgtatcctggaacttaaagtaaaattaaaaaaaaaaaaagaatttagggaagtactttaaccttcctccagtcattaagacaagatcaaaaccctaacccaccttccccaacctctcagcattcaccatatttaaacaggcaactctggagacagataaaatctactgsagtctcatgctggtaattccttaagctgaagacttgaaggcaagtcctttctcatggaggaatttcactttcctggtccaacagagatacagcccagagggcaaactccccagttgggcataattctttgggtgaaatgtttaaaagagtcctgacaacatagagcagcaatttccatgcaaatgtgtgcctgtggggggaaaatgcaattggcccaacaatcttgtactgatggtgcacccccttcccactccactggggtgtggaaacatgacttgaagaaatctatctatttgttcagcttttctccctctgagcgtgccaaacataaatgacttctgtgtttcaaaagaggtgcttg

SEQ ID NO: 102096 - DNA, 584 bp, Homo sapiens
ttggaaacttaatccccaatgcaacaatgttgggaagtgggtcccaataagaagtgatttcggtcattatgagggctctgccctcataaatggattaatgttgttattctggcagtcggttagttattatgagagtgagttggatataaaagcaatttttgccccctcttgccctctagaaatctattccccttccaccttgcaccaggggatgacacagcaagaagacccttgcaagatgtcagctcctcaaccttggacttcccagcctccagaactgtaagaaataaatctctgtcctttataaattactcaggtattttgttacagcagcataaaatggactaagatgcatactacagtttaagatcaagagtcctgaaacatgataccaatccttgctttatcccctcacttgtttcagcactccctgattctggtgaatatgtctgggctgcttgttagcaagaaatcctaattccattgcaaagcagaatctccactccttccattctcaaagtcttggttcacgttttgagaggtggcataacactgcagtygagagcatgcaccatggaaacaga

SEQ ID NO: 102097 - DNA, 544 bp, Homo sapiens
taccattatttaattcttttagggctctttttgagagtgagtctccaataaaactctattaggatgtgctatggttgttttttgtttaaggtggaaacagagttttgctatgttgtccaggctgatctcaaactcctggactcaagtgctgagcctcccatctcagcctctcaaaatgctgagcctcccatcctagcctcccaaaatgytgagattacagcatttgtaatgccacattaaatcttgtgccatggatttaatcaaacacaaacacatcaggctgagcgtgatggctcatgcctataatcccagcactttgggaggctgaggcaggcagattgcttgagcccaggagtttgagaccagccggggcaacatgttgaaactctttctctaccaaaaatcacaaattagctaggcgtggtgcggcacctgtagccccagctcctcaggaggctagggtgggaggatcacctgagcctagggaggtcaaggctgcaatgagccaagatcccaccaacctgggctgtgtgcctggagctgt

SEQ ID NO: 102098 - DNA, 620 bp, Homo sapiens
ttttctgctttactccatagtcatatctaatttctaagtgttcattggccccatataggcttcaggaattcctagtactgccttccttggagtttactgtcattggatcgattagcaaagggtaaatgcatgaaactttccatttctctttatgcttgtgtctataatttgggtaagatggcaggtgatggtttggggatctaggctgaggtctcatgagctaagaggattggctgattaggagcacatcatgatacacttgtttcctttcataccttctctgtttctctctctctctctctctctctctctctcttttctaggcaccttgacctacttttgtccttaatcttgccaagcacgtttccccctcggcccttttaccaggtatgttcccccagtaatctctctcatctgttcaggttttttcaatgttatcttcttcattgacccctctctctgaagtgctacccsctccccaggccaatctcaattctctaatcttagtttatttttgcttcatggtgctgctcattactacagaatattatgttcaatagctctttatctatgtgcagattttctatcctcttcactagagtgcaagactttgagagcac

SEQ ID NO: 102099 - DNA, 620 bp, Homo sapiens
ttttctgctttactccatagtcatatctaatttctaagtgttcattggccccatataggcttcaggaattcctagtactgccttccttggagtttactgtcattggatcgattagcaaagggtaaatgcatgaaactttccatttctctttatgcttgtgtctataatttgggtaagatggcaggtgatggtttggggatctaggctgaggtctcatgagctaagaggattggctgattaggagcacatcatgatacacttgtttcctttcataccttctctgtttctctctctctctctctctctctctctctcttttctaggcaccttgacctacttttgtccttaatcttgccaagcacgtttccccctcggcccttttaccaggtatgttcccccagtaatctctctcatctgttcaggttttttcaatgttatcttcttcattgacccctctctctgaagtgctaccccctccccaggccaatctmaattctctaatcttagtttatttttgcttcatggtgctgctcattactacagaatattatgttcaatagctctttatctatgtgcagattttctatcctcttcactagagtgcaagactttgagagcac

SEQ ID NO: 102100 - DNA, 616 bp, Homo sapiens
ctgctgttcgaagtcctgaagtcttggtgggttgtatatgtccagaaatttagctatttcttctcaaaatttttggcatatggttgttcatagcagtcyttcataataatttgtatttctgtgacaacagttgaaatggtccttttttaatctctaattttatttatttgggtcttttttttcttagtctagctaaaacactaccaattttgtttatttttcaaaaacaactcttaaatttgttgatattttgaaacttttttagtctctaattcatttatttctgctctgggctttattattttattccttctgccaaattggggtttagtttagttttgtttttctagtttcttggggtacatggttaggttattagaaatcttttttgatataagattttattgtcatacacttgcttctagagccacttttgctgtgtctcataggctttggtatgatgtgttttcattcttattttccaaaaaaaatttcaattagaaaatgtattcattgacccattagttatatacaagactgttatttaatttccatatattagtaaggttttgttgttgatttatcattttatactactgtggcttgaaaatgtaat

SEQ ID NO: 102101 - DNA, 599 bp, Homo sapiens
tctgttaggtccatttggtgtagagtttagtttaaatctgatgtttctttcacaatttgctgtctgaataatctgttccttactgtaaagtggaatgtggaagtcctctactattattgtattgcagtcaacttatttctttagatctattaatatttgctgtatatatgtaggtgcctcaatattgggtgcatttatatttatgattgtcacatcctcttgctaaatgatcccttttatcattatataatgacctttttmtcttttctatggtttttaatttaaagtttattttacataatacaagtatagctactcctgctctcttttggtttccatttgcatggaatatcttttcccatctcctcaccttctatctacatatgtcattactagtgaaatgtacttgtaggcagcacatcattgaccctggtttttaattcattaagccaccctttgtcttttaattagagtctttaatccacttatatttaaggtgattattgataagtaaaaactttttactgccattttgttaattgttttttagttgttttataaatcctctattcttttctgtcttcctttgtgactaagtt

SEQ ID NO: 102102 - DNA, 636 bp, Homo sapiens
tttagggtgtgtgccctcctgaatcctgagaggatttagttccaaagacacatctaggtattgctgtccccaaggagactcatgctcattgtcctatggggccactgctaggacacaaggagccccagttctgagcctgtgtgtgggcagaatgacctcctggaccccatgacactggaggctgagggtcctctgccctctctccatggctgcagcttcatgtttcctctccccagtgtccacatcaccagcagtggctcctccccgtagctcagcgagctgggactgagcagataccccagagacatgcagttaccaccaggtccatggtcttctcttccctcagctccagggagaagaattatttaaacaccactccccttcacaaggagttkggggccagtctttctctgtgagccccaaatccccgcaaagagaattcctcacacacccagtcccgtcttacatctctgattgtctgaccttactcatttatggagacacagaaagtctcactctaaggaaggaaacttcttagaactcagttctggaaaatttagtttaaaaagtttcagaaacaaaagatctaaaccggaatcatgcatctttctgtgcactggaatgcaggattcaggc

SEQ ID NO: 102103 - DNA, 636 bp, Homo sapiens
tttagggtgtgtgccctcctgaatcctgagaggatttagttccaaagacacatctaggtattgctgtccccaaggagactcatgctcattgtcctatggggccactgctaggacacaaggagccccagttctgagcctgtgtgtgggcagaatgacctcctggaccccatgacactggaggctgagggtcctctgccctctctccatggctgcagcttcatgtttcctctccccagtgtccacatcaccagcagtggctcctccccgtagctcagcgagctgggactgagcagataccccagagacatgcagttaccaccaggtccatggtcttctcttccctcagctccagggagaagaattatttaaacaccactccccttcacaaggagtttggggccagtctttctctgtgagccccaaatccccgcaaagagaattcctcacacacccagtcccgtcttacatctctgattgtctgaccttactcatttatggagacacagaaagtctcactctaaggaaggaarcttcttagaactcagttctggaaaatttagtttaaaaagtttcagaaacaaaagatctaaaccggaatcatgcatctttctgtgcactggaatgcaggattcaggc

SEQ ID NO: 102104 - DNA, 360 bp, Homo sapiens
cttttataccttggtttaggagggggtgggggtctagttaaaacaattttacagaagtaaagtagtcaaaaagttaaaaggataaatggttacaggaaagtaaacagttccaggtgcaggggctttaagactattacaaggtgatagaccyggggctttgggcgttatcaatcagacgaattcctgggaactgcggatatagcttgccacagtatcttatcagttaattgcattcttggatgtgctgggagtcagcttgcacaagttaagtccttgaggaaggggctgccagtgaaagagccaagatggagtctgtcgggctctcctagctaagggagagtcaattcaggtggaaccatg

SEQ ID NO: 102105 - DNA, 360 bp, Homo sapiens
cttttataccttggtttaggagggggtgggggtctagttaaaacaattttacagaagtaaagtagtcaaaaagttaaaaggataaatggttacaggaaagtaaacagttccaggtgcaggggctttaagactattacaaggtgatagacccggggctttgggcgttatcaatcagacgaattcytgggaactgcggatatagcttgccacagtatcttatcagttaattgcattcttggatgtgctgggagtcagcttgcacaagttaagtccttgaggaaggggctgccagtgaaagagccaagatggagtctgtcgggctctcctagctaagggagagtcaattcaggtggaaccatg

SEQ ID NO: 102106 - DNA, 360 bp, Homo sapiens
cttttataccttggtttaggagggggtgggggtctagttaaaacaattttacagaagtaaagtagtcaaaaagttaaaaggataaatggttacaggaaagtaaacagttccaggtgcaggggctttaagactattacaaggtgatagacccggggctttgggcgttatcaatcagacgaattcctgggaactgyggatatagcttgccacagtatcttatcagttaattgcattcttggatgtgctgggagtcagcttgcacaagttaagtccttgaggaaggggctgccagtgaaagagccaagatggagtctgtcgggctctcctagctaagggagagtcaattcaggtggaaccatg

SEQ ID NO: 102107 - DNA, 574 bp, Homo sapiens
gaaatacatgctgtaagggcttactaatatgtgggttaagccttaaataattagtagactaataggcagagaatagaatgagttgggcagggtgagggcagggcaggggcaggatatctggataggggtcttcctaaatctcagaaacataggtgtacacagaatgttatggagaagtcaagcagtctggtgaggggaagacagattgcawgtgggagaaaaggcacagtggtggttgctgaagttgaatggatgggttagtagcccatggccagatcatgcaagccttgaatgtaatgtcagtttaagtagtttggacttcatcctatgaaaaacagcaagccttcaggtggatggaaacaggaaaactccattgtcagacttatgtcatagttgcctctcttctccagccttttgacttggagcccaacaacctcactgtgccttctggctgcttgtgactgatacctgcagactccattctgtcctccactctcctgctgtgctctcaattctcaatatcttaaatcttttcgcagctacagggctgaaaaacaagtttacggtaagagtg

SEQ ID NO: 102108 - DNA, 574 bp, Homo sapiens
gaaatacatgctgtaagggcttactaatatgtgggttaagccttaaataattagtagactaataggcagagaatagaatgagttgggcagggtgagggcagggcaggggcaggatatctggataggggtcttcctaaatctcagaaacataggtgtacacagaatgttatggagaagtcaagcagtctggtgaggggaagacagattgcatgwgggagaaaaggcacagtggtggttgctgaagttgaatggatgggttagtagcccatggccagatcatgcaagccttgaatgtaatgtcagtttaagtagtttggacttcatcctatgaaaaacagcaagccttcaggtggatggaaacaggaaaactccattgtcagacttatgtcatagttgcctctcttctccagccttttgacttggagcccaacaacctcactgtgccttctggctgcttgtgactgatacctgcagactccattctgtcctccactctcctgctgtgctctcaattctcaatatcttaaatcttttcgcagctacagggctgaaaaacaagtttacggtaagagtg

SEQ ID NO: 102109 - DNA, 586 bp, Homo sapiens
cacccaggttggggtgcagtggcatgatcttggctcactgcaacctccacctcccaggctcaagtgatcctcccaccttagcctcctgagtagctgggaccacaggcgcatgccaccatgcccagctaattttttaatttttggtagagacagggtttcaccatgttacccaggctggtcttgaactcctgagctcaagagatccacccaactcagcctccaaaagtgctggaattacaggtgtgagcaatcacacccagcccaaactcaattttcacctggatggaggcaactctttttttttttttttaatcttcctgtttttttagagacrgggtcttgccacattgcccaggctggatacaaactcctagccccaaacgatcctcctgcctcaagcacctgagtaactgggactacaggcacacacacaccactgcacctggctcaattctaataatttatacaactctagagctgatttctcagcaatttacagtttcatacttctgctctctagtactattttacttttgtcctatcaaatgcaacctaactgaaatcaaatttagtattttagtactta

SEQ ID NO: 102110 - DNA, 519 bp, Homo sapiens
tcaggtttaccattatctcctcagagcttaaaacagtatctagaacatagtagtaattcaacaaatactgaaaggacaaataaacaaaataaaagagaaaacttaatagattatagtatacatcattctttcttgggacaccaagacttttgctaaagcaaataaaaagagaaatcagttggtgagctccatgtggttgaaggagaggtcgatctatctcttgaagtctaaacttacagtagtaagtctgagacctccatgcagttagaagatcagcactgacaccaggaagcaatcagtcaggggtaaaccgcagtgagaagccaaactggaaatgcaaatgggagaaatagaactaggtttacaaagaaagaaacagattcaaactaaaataaaagcaactttggactcagaattttatcaacagatacatactgttatagctactttgtaatagtatgtatatcwtctacatttattcttaaattaacagataataactgaaataaatttaaattt

SEQ ID NO: 102111 - DNA, 621 bp, Homo sapiens
ctatctcaaaaaaacaaaatgttaccttagtttaggtaataattacttacttttataaagtgcttttataaaagaaaaactgataaattgcactttatcaaaatttaaaacttctggtcttcaaaacacagtgttaagaaaatgaaaagataaaccacaaactgggataaaatgcttgaaaaacaggtatctgatcaaatacttgaatcargaatatatgaggaactcttattgttcaatcagtaggcaaaataattaaataatcaaaagatttagacacttcacccaagaagagaagtagatggcaaatatgcacagaaaatgatactcaacattactcttcattactgaagtacaaaataaaaacaaaatgaaatactactatacatctaatagaatgactaaggttttttttaactggcaataccaatttccagcaaggaagtgaagcaactagaacattcatacattgctcttaggaatgcaacatgatatttggaaaatagtttggcaatttcttatgaagttaaatattcatctaccatgcaacccagcaattatacttgtggacatctaccccagagaaatgcaaacctacatccacacaaagacttccacatg

SEQ ID NO: 102112 - DNA, 541 bp, Homo sapiens
tctgtactggctaaggctctaggggcaaaaagggcaaatccatatacaaaatatatgtcaattatgaccaaaatgaattgctgccccctccaggaaagaaaaggtcccatatagtcaacttgccatcaagtggcagattcgtctcctcaagggacagtactgttacaggggttcagccttgatctctgttgctggtaggctggayatttggcagcagcagtggctaatcagtcttggtgaatgggaaccctttctttacagcccgtgtgcagactctgccctggtcactgtggctactccattcacaagcccgtttttctgacactggggtagccaatgacaacagctggctgagttcaaatgcctgagtcagtctacttgactgttttgtgcctctcttccatccattatatgggtggtctctgttccatacaattgtgatgtaaagatctcataccagcttccatggattcatccacattcccctctagacctcctcaatcttccaatctttctctccctaggcccctacccaactcat

SEQ ID NO: 102113 - DNA, 580 bp, Homo sapiens
tatctttccccagtgattacagggtatttccacataggctgtcattttaaggtgaaaaattcgcaaggacagtcacaccatctgtcatcaactgggttccctgacacccagagctgctctgaaatggccagcggcttcacgcataacaaagwccttgccccttggcattgtttattccttgacctgtgcagagagtccttcaaaagaggctttactgaaactatttcagggttgctttccaggggcagaattttctaaagagaaaaattatttatgcatatagaaagtttgaaatgctctcgccttaaaactaaacaaatagaataaaccccagaagaattttgttcttacatttgtttctttgattcctgaatgaacacttacttagcattatttttatcctttttgcttttgaaagtttatttaagatataatttaggtgttaagcaagccatacataaagatcagagtgttaaatgtaactggaccattgaaatacagaagctgtgccataataactgaaaaatacaccttctgaccaacaaaaccccagtgcctctccctgtggaagtcacagaca

SEQ ID NO: 102114 - DNA, 501 bp, Homo sapiens
ctttggatagttcattcgagagctttctggattcacttgcatatctctaaattggggatcacacccctggatctacttaatgtaatggacgctatgtcaatgaatgtaaaaatttgtctaaaaagatgaattcaataaaaatactttctattttataatcatgaygcaaagggcttcctttagctcctttacaggtttttaataataaaatataaaaataattttattttttaatataaaaataatttctgaatctctactttttaaaagttaatattatgtttaatggacaaatcataattgtatacttttatgggatataatgtgatgtcctgatatgtgtaaacaatgtgaaataattaattcaaaatgattaacatatttatcaccttgcttacctatcaatttttgtggtaagacatttgaaatttagttattttgaaatatgcattatttattattcactatggctactctgttatgcaatagatctcaaaatgt

SEQ ID NO: 102115 - DNA, 659 bp, Homo sapiens
cacacttaaatctaaacaactttcagaacagctttttaacatgttgaacctgattagtaacatatgcaacaatgcactacattacagatatagaaggctgaagagtgataggaatgaaaacaagaccattgcaaatgaaataagtaatgagctacagacagaaaasgttcactgtagcagagatttgagttcccagtgcttttttgtcaccttagcacagttctgcacataggaataaaaaggtgaggtaaccatttctgaaaataatgtttggactttatgagagcagttatggaatagtatactattttgttttgtgttaaacaatattacaagtggccacacacacttaaaaaatcatatgatagaacagctaatttagaatgttaatatactgaagtacaattggccatatctgtaaggaagcctcttatttttcttcctttccttcactcttaactcttcccctctccctcccttcttccttctttcattcctttctttcttgctcttccttacatttttgtaatataattgtcaatataaaaggcaaatcctccaaatttagtttattgatccaaccatttgtacattccctaaaaatcacggtaacctgcaaattacaactgaactccatccatatctcaaaaaatgtaatt

SEQ ID NO: 102116 - DNA, 540 bp, Homo sapiens
gaattcaaattagttctttttttcaaagttgccctttgttcataaaggatggttcttttattatggtttttattccttcttttatgttaaaaaaaacttttaaacgtaattagcttatagatcctgtcagattattctcttactgtaagttcttagaggtgctaattcttctgctcattgtgtacgtggcttctccttctgactggcttcattctttgtgggtttattcagcaggaattgtttattctgagggagtcttgtaggtcctgagttatgaaaatatttctacagaacaatttgagtttgcttcttccctggktctgggaacatttttatagtgatctattagttcaagatacttacacagcctaaacaatgtaaatttgtgcaacacacttgtgcatgacataggcttggtgttctatttagtttttttaatcggatgcattttttttcaccctgatactggagcacaattcagacttacttcccccttccctgagctacttggagcagtggtagttcttctagtcctgtttt

SEQ ID NO: 102117 - DNA, 584 bp, Homo sapiens
gaattcttcttttgctttaccctgacagacatcttgattatctccatgataatgactcatgayagcacaaagatcaaaaagaagaaaagtaggctggagtcaggagaaggaaaaagaggaggaaatggagtgtaacagagaaagtagctcctaataatacgttcttccaaaagaccacaacagtagcaactgagggcaaatcacagaggtgagcaggaggttgaagactctcatagtgaaggtggacggtgatggtttttactgaccgtaacatctcaccttggaaaagttaaacagagaaaatggaaccctatggaagcaaggtgcaggaaatatccaggaatgaaaacaaaaggattcagaaacatttgtttaactttgctctgatcaccagaatcatccatgtgctgggcctttataaagattatttttccatccaaacatccatccacccacccgtacatccatccatccatccatccatccaataacttgaaagttaccaggactagagttagtgggtgatagtcagatgaattagacatattgcataatttaaagagctggccttctaatggatgaaa

SEQ ID NO: 102118 - DNA, 607 bp, Homo sapiens
tacaggctctgagcacttaatcctaccaccaccaccaccaccactgtgatgcattcccactttaattcataataaaataaaatcacttaaaatgacagaaaacttaaatgcaagctgaaaggaaaataagttcttttttttttcatttggatggaaaaatcaaaatcctcagaaagttctttaaatgtgaaatcctctctgcttttcctggagtgggtgatgggggtggtgttcgatttagttgcatgctaagcacctgcttagtttgcgccttggttaatccagcactgcaggtgcctcgggctgaagtcacccagccracaggaagtcctacatcaagcctctgcttctctaggatacaggctgagccatcatccatgacagcagtcagcaggttctatgtgcaaaagccttggccacaataatggaagctttgaacttcctgctgtaaccccaatgtcttgagaaaataccagcctagagctaaaactagggtaatacaatatcaaagcagtttttctggctctgttctctcatatcaggcaagccttctatcacccttcacattccacctacatgctcggagagttcacttagctatttaggg

SEQ ID NO: 102119 - DNA, 583 bp, Homo sapiens
ctattcaataaataaatgtgtagatagatagatagatattaataagacacagataagtaaataaatcttggaaaggggaaataagggtaatgaaaataaaaccaggatttaattcagtatatttaatacatctcatcaagtgcttcacacttgctagaaataggctatgactttggcttcagaagcctagcagccaatacagaaaagaaacctcagtcggggaaaatgtatcaatcycatggaggaacttgcagttagaaaagactatatttgaatcccagttctaaccagctgtgcggccttgagtgcaagtcattgaacattctaagtctcagtttcctcttctatataatgggaatgataatacctgactctcagagctgtcaactatacaagtcaactctccagcagaacaccttacattcagcaaatgtttaatatgagtcatcagttaaacagttcacactatcaatagaataaaaattaaaccagttgctggggaccagctagcaaatagctaaccgactagtaccagcagcaatccaatgagactcaagtaaggagaggaaaaagatcctacaca

SEQ ID NO: 102120 - DNA, 599 bp, Homo sapiens
ctgggtggcgtaaacaacaaacacttatttctgacagttctggagactgggaagttcaaggtcatggtgcagatctactgtctggtgaggacccattccctagtttgcagatggatatcttcttgctgtatcttcacacagtagagagagagagaaaaagagaaaagaagcaagctctctcttgtctcttgttataagggcactaaacccatcataagggctctactctcaggacgaaattatcccccaaaggccaaatacctttccaaataccttcaccttggagatcagagtttcaccatatgaatttgggggaagacacaaacattcagtccatagcatcatgtggttctgcrtggtatggtgtgccgcttccttgtaccccttctttaggaaatgtaagtaatgaaaatctttcaatggtattagcctctgatgagtatcatcactcaatcacctctatgataaatttaaatcccgcagatacaaccactgatacaaactcccattcactggtgcttctgaacatgatgctaaatataaatgtgcagtctctgttctctccatgtccatcttccagtgagcctggaccgggcttt

SEQ ID NO: 102121 - DNA, 534 bp, Homo sapiens
aacatcattatgtttaaactcatttcaaccaccatttaacaatcaagagatttcacatgaaaatctaggtttccagcttctttcaaaatttgaaatttttggtgacagtggcctgttttcctacatggcagccaccagctagagctgaggcaagggtgcctcccagctagggcataacttctccagcctcccatgagccccccaactccagcttggttcaggacactgagggcaaatgtaagcagccttttaaacttgtgcttgctcagttgattaacttgtaatctgggcattttttctaccctcaatcatatcatgcaatggtgaaaaacaaagggctctggagccagacactgcctgggttcaaaccttgggccaccattctgatcacaggtttgacctcagccagcttcactcacctccctgtgcctcaaaacaycattgttaaaggacagtacaaagcttgtggagtgattgtgaggaaaaaagatttagaagcacttagaagagtgtctggcacaaagtaagggtaca

SEQ ID NO: 102122 - DNA, 556 bp, Homo sapiens
agaattaagggcatgtgtgataataccagaatacccaagtaagattagacccattttgttaatgaaatgattgtatcatagcaagttaagaatgaaattggtttcccaaagagccttccatggaacacttgtctcatgagatggatgttctctgaactaacatatatgggatagaaacagacacctctagtgcacaattccagattctctcagcctcagctgtctcttcaagccagcaactgtggtgtgactgcctctgtgcaggctttgcccagcttcctgcaggtgctgatgttgtgcttacacagtggggatacctgggtctggagggtacagtcctgcmgggtgaactttaattaactgtggagagaatcagtagataactgccaccccttcctttctccagtagacagccccacacccatttcctccagctcttggagacatctccccagaggtgcctggatctaggacacacttagcactggctctccctctgctggcccaatccctggccttctctcaggctccctggaccacagtagccaatggaaag

SEQ ID NO: 102123 - DNA, 544 bp, Homo sapiens
caaaatgtttgtgggatgactcaagttcctgaatatagtttttattatacaagatctagagctaaagggggatatgattttatcaagtcccttttcttcatttttcagaaatgattaaataattactccgaggtcttagagcagcaaggctagaastagggtctcctgatgtcaatgtccaccctgcatcatcttttaaaaatagactttattttatgtctattttatattttagatctatttatttaccagttttcggttcactaggacctacaatttttttagaagaactgagcagaagatacagagagttcccatatatcccctgcccccacacaggcatagcctcccccattgtcaacatcctccaccatttgttaccattcatgaacctacactgacactgacacatcattatcacccaaagtcgctagtttatttcagggtttactcttggtgttgtcccttctatgggtttaaacaaatttatattgacatgtatccaccattatagcaccatatagaatagtctcactgccctaaa

SEQ ID NO: 102124 - DNA, 537 bp, Homo sapiens
cagaagacagaaacattctttctccagaatcccaaaacagtaacatttcctagcaaatmcatgaataagactcagcaaaaaaaaagggcctccttaaccatgtgcagttttttaggcaggctcttgaaatttattagatgaagtccctttgccctgttttgcaacaagaggagcaacaacgctcatctgaaataaacaagagaactgctgccttttggtgtacaaagagccaaagttcatcctaactggctgggagataactaataccaacggattaaaccatcatttgccaaagggaaacactgataaggctgggagttctattttacaacctgagcacccaaaatactcatgtagtctgtacagtttccaattctacatgctctccaaccacaaagaacgtatggggatctgctagcacacacagaggctcccacactgattaaaaatgtccatctgccgctcgatgccaaagaggtttcccagtcctaaattagcctcagcacaaaaaagggggggagggagactcaaactcat

SEQ ID NO: 102125 - DNA, 549 bp, Homo sapiens
caacatggtgaaaacccctgtatctaataaaaatataaaaattagccgggtgtggtggcaggcacctgtaatcccagctacttgggaggctgaggcaggagaatcatttgaacccaggaggcagaggttgcagtgagccgagatcacaccactgcactccagcctgggtgacaaagtgagacttcatctaaaaaaaaaaaaaagaacaacaacaacaacaacaacaacaacaaaaacccagagacccaaaatagcaatgatccaaataagacagaatttatttgtgtctcttgagggtccagagacagggaatcaagggaaggtaygtagctctgcttcacaaagtcctcagagacctggccacctccatcctgttggtcacacatgtggccttatttgcacaatcacctcatgtcccaggagggctatagcagactctgacatcatgttgcattctggtcattaatgaggaagggatgaagaaaaggataaaggataagtagcagtcatctatttaggaagattaggttcctgggaatgttatgtgaa

SEQ ID NO: 102126 - DNA, 633 bp, Homo sapiens
tcatttatcagcacccaaacacatctttcatcttaaaaacaaaaacaccttcccttatcccacttctcaagctgcctttctatttctatgctcctctttatgcagtgtcctcagaagagttctctgtactcactctctctattctttttactcgtttttgactcctaaaccctctgtaggctacatgccttccgccccactgcaaaggtgtttatcagagtcaccaactcaactttgccaaagctaatagttctcaagtctctttttttaaattctccaatagaatttgatgtaagtattccctcctccttgaaatactttcttcacttggtttctaggacacaatagagaacctctttgttgatcttcctcgttttcctaaccctaaatgtttgagtgccccgaggcaatactatcttgtctctatctctgctgccatggtgatctcattcaagagtcatggttttgaaaatcatccatatatgctgatgactctcaaatttatatctccagccctgacctgtcacctaagctctagacttatacartgaactgccgactcatctcctcctcttggatgtatagtaggtatctcaagtttaacatacctcaaactaatatcttgattttcat

SEQ ID NO: 102127 - DNA, 582 bp, Homo sapiens
ttggatatatatttagaacattcagataaaaatgcaaatatgatttttgtttgctttttatggaaagttatggtgaatattttaattatattgaatagttctttgatataatttatgaaaccacatacttaaaaatctaaaatgatgtagattattagaatctacaactttattggcaaattatttttctataataaccatttccctaaataaacatacttttgaaaacaatcatgtgccatactttaaacaaatgatttctctgtttataggataaacaaacatggtcctcttgaggttatattttggagtatacatttaaaaactgtcagtaaaaactktctggtgttcagctcattagccagtgttcattttaattatttaaaaatttatttttaaatctcaatagctttaggggtatcggtagtttttggttacatggatgaactctatagtggtgaaatctggacttttagtataccagtcacccaaacagtgtacattgtacccagtaggtaaattttcattccttaccccccttccatcctccccctcattttaattcttgagcattgattagta

SEQ ID NO: 102128 - DNA, 548 bp, Homo sapiens
tgagacctgtgaaagcaccatatggtctgggaagctctagaaagggcatttttggcataggatatggcctgtggggtccaggtgcatcacagttgaagttrggtaaggaccattagttggggagcaggatggtccagaaagaggaagagttcttgggttcccagaggcagtccagtgggaggcacagagggatgcaatcctgttagcaaaggtccgaaaggtacaatgaagagtgttgcacttggcgggagtccagatggcatagaaggcacagcacatgggttcttccaaggtttggaatctggccggccttaaggaggttgactagatttctattaatcacagcaggacctggtcagggaagtgttcaggtagagcatttgccatagaaaattcatcagacattttcctggcaagatcctagtcttcagtagaagtggcaaagggtttgagacaactgggtgctgaagaatcaaaagcagcctgacagcactaataccaacagcacatggcgcctcctccatccaacttttttctgagacagagtc

SEQ ID NO: 102129 - DNA, 664 bp, Homo sapiens
aatctaacacaatattaaatacactgccaccaccttacttacacttacagactgattacagagcatattaaagtgtccygaagtcatcctgttaactagggcttttcaggctagtgattttagactggaatgtgcattccaaacacctggggatcttgttaaaatgcagattctgattcagttaagtcttggtgggacccataactgattccttgtttcttttttctaaccttcttaaatttgtatgtgtaccatacagtatttttttttgtagtttttttttttaatttttaatttttggccgggcatggtagctcacacctgtaatcccagcgctttggaagaccaaggcaggaggatcgcttgaaaccaggagctcgagaccagcctgggcaacatagcgagaccctgtctctacaaaaaatagataaataaataaataaataaataaataaataaactatttaaaaagaaaaaaatttttttaattgttgtgggtacatagtaggttatatatttatggggtatatgagatattttgatacaggtataccatacataataatcacatcagggtaaatggggtatccaccatttatgctttctgttacaaacaatccaattacactcttttagctgtttttaaactgtacaacaaattatt

SEQ ID NO: 102130 - DNA, 617 bp, Homo sapiens
tgagcagcatttgtagtcacagcacctattccagcaggacccgtaagcacaattgctgcttctctaggggaagaataacttaagcatttaatttacatagcaggtcccatcccagcagggrgattaggcagtctgacatatagagaaagctgtgtcttagttccgggtctcccagtttgtactctagaggtcgtaagaaagttttttgttgtatccctcctgcaactcccattataggtactgttattttggtgctttttgcttctggggtgttaagaactgagtgagtagcacctgtgtcaaccaggaaatggattagcttgttccccattgtcatttataactggaagctcctgtggggaaattttaattggttccaagagatttaagggagcctccaggcatccctattttttgtcagggccacagctttgtcctgtcatttatttgcctatgacttcttgggtggattctgcttttctttgtccacctggcccctttacttctgggcagctatcttttccaatggccttcctctatacagtaggcacattggttgtgacccagaggcttgcctggtttctccagtatggaggctttcctgcctatgccacatg

SEQ ID NO: 102131 - DNA, 557 bp, Homo sapiens
aaaataaaataaaatgtcaaattctttttagttatcatattgttagcagtaatgtaggcaytgttattcagagactattatgtataatagagcaaataagtaattattggatatctttaatatttttaactctatcattctcactgtaattgataagattcttggcataggcaaaaggagatacagataaaagaagaattacatacaaacattgtaatcttgaatttgaagtatcattttaaactcataatttattttatctttttttaaaaaacagcataaaagaaaccatttcttagccctgtgcccttaaaaggccacctggattgtgttctctaaataccattccccactgaaaagaaacaaggctctttaaaaaatggctgatcccaggtctgaggcaggaaatgcacaagatcatgaggaaacctccaaagacaactgcagtcatgtgaaaaggatgcagaagctgactgaaagagactcccactagccaaagaagggatactttgaggctcaatgagaataacaactgcaatgtattgaaacacatcaaa

SEQ ID NO: 102132 - DNA, 557 bp, Homo sapiens
aaaataaaataaaatgtcaaattctttttagttatcatattgttagcagtaatgtaggcattgttattcagagactattatgtataatagagcaaataagtaattattgratatctttaatatttttaactctatcattctcactgtaattgataagattcttggcataggcaaaaggagatacagataaaagaagaattacatacaaacattgtaatcttgaatttgaagtatcattttaaactcataatttattttatctttttttaaaaaacagcataaaagaaaccatttcttagccctgtgcccttaaaaggccacctggattgtgttctctaaataccattccccactgaaaagaaacaaggctctttaaaaaatggctgatcccaggtctgaggcaggaaatgcacaagatcatgaggaaacctccaaagacaactgcagtcatgtgaaaaggatgcagaagctgactgaaagagactcccactagccaaagaagggatactttgaggctcaatgagaataacaactgcaatgtattgaaacacatcaaa

SEQ ID NO: 102133 - DNA, 557 bp, Homo sapiens
aaaataaaataaaatgtcaaattctttttagttatcatattgttagcagtaatgtaggcattgttattcagagactattatgtataatagagcaaataagtaattattggatatctttaatatttttaactctatcattctcactgtaattgataagatycttggcataggcaaaaggagatacagataaaagaagaattacatacaaacattgtaatcttgaatttgaagtatcattttaaactcataatttattttatctttttttaaaaaacagcataaaagaaaccatttcttagccctgtgcccttaaaaggccacctggattgtgttctctaaataccattccccactgaaaagaaacaaggctctttaaaaaatggctgatcccaggtctgaggcaggaaatgcacaagatcatgaggaaacctccaaagacaactgcagtcatgtgaaaaggatgcagaagctgactgaaagagactcccactagccaaagaagggatactttgaggctcaatgagaataacaactgcaatgtattgaaacacatcaaa

SEQ ID NO: 102134 - DNA, 544 bp, Homo sapiens
ttctagtacagcctgcagaagtgtgagccaattggaccttttttctttataaattaccctgtctcrggtatttctttatagcagtgcaagaacagactaatacaattgatacaatatcaattattctatagcatcaaatcctccataataaaacatttttaatgcaattactagctttcctttcctaagaaaacatgcaaaatggttgaaacacattagacacctaaggaaataagaagtttgagttttctcagttaagtgctgttttgtactcaagtatgttctcaatcatcatctaagtaaaggattccttctagctcttgctttttcctaagtcacaaggatgaataactgaaataatattttttaaaagttatttgtatatgtatacatgtatattcatatacatatatgtatacacatgtacatgtatattcatatatatatacacatatatgtatatgtatatatatccaatcctccatgtgatgtgaaggcctgactatagaatgcacctgacttgggcaatgatgattacagagta

SEQ ID NO: 102135 - DNA, 544 bp, Homo sapiens
ttctagtacagcctgcagaagtgtgagccaattggaccttttttctttataaattaccctgtctcgggtatttctttatagcagtgcaagaacagactaatacaattgatacaatatcaattattctatagcatcaaatcctccataataaaacatttttaatgcaattactagctttcctttcctaagaaaacatgcaaaatggttgaaacacattagacacctaaggaaataagaagtttgagttttctcagttaagtgctgttttgtactcaagtatgttctcaatcatcatctaagtaaaggattccttctagctcttgctttttcctaagtcacaaggatgaataactgaaataatattttttaaaagttatttgtatatgtatacatgtatattcatatacatatatgtatacacatgtacatgtatattcatatatatatacacrtatatgtatatgtatatatatccaatcctccatgtgatgtgaaggcctgactatagaatgcacctgacttgggcaatgatgattacagagta

SEQ ID NO: 102136 - DNA, 573 bp, Homo sapiens
aatgttgtgtttgttcttttgcaatgcaatactaaaatggggcagttgtgtactatatacactattcaggattgctggagaagggttatacatatttgtcagtgttctagatcatagaaggttatatatttaagcaccctaacgtaaatattttwaaaaatacttctgatagaaatctatctggtctgaaacatataccacatttctccattcttcataatcagagtagattcaccataatattttcttttttaagtcaagtttacctttataagtattaatttctgccctgtgttgtaggaaggagttgagtcttcctctacccacattgctgccacctataaaagaagaaattctatcaacacttcatttctcagtaactattgggtcaaagctagtgcagccttgtctttttatccatcaccaactcctctccagcatcttagaaaggctttaccagaccagcaagatggccaaagtctgatatccaagttcttcttgtggacagggctagcacaggaatagcctgggtcttttacggtgtggctgggaatgaagacccccttgatgaac

SEQ ID NO: 102137 - DNA, 560 bp, Homo sapiens
gttgtctttttttttttactcaatttgtataagaggaacaaaggaacacttgttttttgttgttcgttgaatttttgttttttaagacagggtctcactctgtcacccaggctggagtgcagtggagcaatcataactcactgcagcctcaagctcctgggctcaagcgatcctcttgcctcagcctcccgagtagctgggaccacaggcacataccaccattcctggcaagaacacttgcttattatttgtgttatgaaatatttttttcccagtctactgtatttggttttagacttcgtaatatctcttgtatccttttatttcatgttttcatgtagtcaaatttatctattcttattttaaggtttggggttttctttatttcttgtttttgtaaagaaattcttagtatcaagtaataagaatatcttcctaaaatttaatctaattagtgtrttatcttgtttataatatttgagatcttcaatccatctgaaaaatatttgtgtatgtacatgaggtgagggcataacttttcttatagatggatggataat

SEQ ID NO: 102138 - DNA, 592 bp, Homo sapiens
ggtgtgcatttatttatttattctccccctctacccgccaggattttatttactgagttgaacagttcaggcttcagcccactaggggaggtgtttatgggtaaaaatcagctgtggttaaagcagatgggtaaatgccatattcagtggtggacagaggttccagacttgacagaggcagctcrgggagctcttagtgaaacagactgaggtattttcaggcagaaaggagagaaccacctcagctcccctaccaagccagtaatctgcctcccagtcacacccttgacccaatgtttggctattcagatcagacaagtgcctctttttatctgtaggaatgctgatgttctttgtagagaaggattatgactctaacctttatacaagcctgaacttggaggacactcctcctatggggatgcaatcactctgcagtgtttcaaagaggctgtctacaggtgcacccatgctgagatcccatgggagaagccccagtgagctgtttctgcagtggtgggtgagggaaataagaagacccttttccaagacctttcatgaacaccaggctgcctgactgttggggaagagc

SEQ ID NO: 102139 - DNA, 592 bp, Homo sapiens
ggtgtgcatttatttatttattctccccctctacccgccaggattttatttactgagttgaacagttcaggcttcagcccactaggggaggtgtttatgggtaaaaatcagctgtggttaaagcagatgggtaaatgccatattcagtggtggacagaggttccagacttgacagaggcagctcagggagctcttagtgaaacagactgaggtattttcaggcagaaaggagagaaccacctcagctcccctaccaagccagtaatctgcctcccagtcacacccttgacccaatgtttggctattcagatcagacaagtgcctctttttatctgtaggaatgctgatgttctttgtagagaaggattatgactctaacctttatacaagcctgaacttggaggacactcctcctatggggatgcaatcactctgcagtgtttcaragaggctgtctacaggtgcacccatgctgagatcccatgggagaagccccagtgagctgtttctgcagtggtgggtgagggaaataagaagacccttttccaagacctttcatgaacaccaggctgcctgactgttggggaagagc

SEQ ID NO: 102140 - DNA, 660 bp, Homo sapiens
ccattcccatatgttaagatagataataaattagtcattttggcagttgcattccttccaaaagatggcatatgtaaggttgaatataaacatatgcaagtcatcagctgagakgtgatcatttaataaatgctaattgagcccattttacgtatctgacctgaggtaggcattaggtatatgtagtaagcaaaacaagatagtcacttccctcatggagcttagagcctatttcaaggggcacacttcagtttcccctgcaactagataaacaaccacaagaccaaacaccacagaattgtattggcatacgaattatatcggcacttttctgggcttgttttcaacaccatccagcatatcccaaatatgtctccatgtcagcaactctcattcccaatgtgattacttcatcagcacacctccctagcatggcaacagaataatgatatttttgttggtattttgccaaaaatcattgcttttacttgtatagaataatggaaagattaaaaagttcatttatctaataggcaaccaaattacctttgggtttttaagtagagattcagacttatcattttggaaaatatactatgaccagcaagggctagagttaaggaaatatatatttttcccttaaaatggttttgagagact

SEQ ID NO: 102141 - DNA, 596 bp, Homo sapiens
  misc_feature (1)...(596): n = A,T,C or G
acacgtttacctatgtaacaaacctccatatcctgcacatgtatcccagaacttaatattacattaaattttaaaatatgtaaattatcataactgcaaaacactcccttcatccgattcccatccctcctgctctagaattacccatggtcatgaagtattggctttcacaatcaactgtacaatatattttcaattcattttatattttttattttgttntactctgtattatccatttctcttcaaaagacttgtaccaatttacatcttaccagtacaagccctgcttccccacatcctcaccaaaattctattttgagatttttgttaaacaatgggtatgaaatagtgttccacggttarttgtaatttgcatatttctgataatagtgaggttgagcatcattttatatgtttattgactctcaatttttttctcttctgcaaactgccttgttctgcaaactgcctattttacctgtctattctaccagtggatcatttatctttttcttatgatttgtagaaattcctgtatatcctggatagtaatcatttgccaatgtgcaatttgcaaaaatctcccagtctat

SEQ ID NO: 102142 - DNA, 581 bp, Homo sapiens
cagaaacagtcaactatttcttgcgcatatttgctttctctcacagaaataaatttgttccaggaagaataaaatgaaagcattctgtattctttaaagatataatattgaaatgaaaccattttgtattactcagttatgaagccataaaaattactattcctatcttaatccatttctctccaagagtaaatcacacgctagaattgaaaagatagattgttaatcaaaatgtctcagtcacttgacactgcataaaccagaacacagtatcttttctttcacagctaatgaatatagacttgaaggattgtgtagggaatgcaaaaattaaatggtggaagttgtaataaacgttacccctttccatttcagcgtgattctgactgcaagttaaccaattttcaaactcttgtcattgttttaaggtgcagcacaaaattggcaagattttctcctcttgtcactgttctaagaaccataaaaccccaactgaaaagaaaccactayatttctatagataaaaaattaataatataatatgagaaatgaatagcagcaaccccagaacattttaaacc

SEQ ID NO: 102143 - DNA, 617 bp, Homo sapiens
aagaacgctattgaagtacattctaaaatgatcccacctgcaatttggatttttggagaatcgggatcggtgtaaaattctacatgcatacacgtatttgcacaagaatatttatagcaacgtggtttttaataggaaactatctaaatgttcattacaagtgaattacataaagctcaatacatccatactacgaatcactgaagagctgctaaaatagatgaaatatatttataatggcatgaacaaccgacacaagacagttgcagagtaatgtgtatttgtgattacatttatgtttttaagttatacaaacgcgtatgtgcctacgtgtatgtaaattcataggaagacaaatcagaggacggtggttacctggggaaaagcatgtgttggtgagtaacaggattttcaagttttgatgtgtctacttatgtgttttgaatccttaacaatgagaatttattagggttttactcttgtaatcttaaaaagtaccgaaaagaactaatcaatgtaggcaaaaggtctattgaagagcattcttctgaggtcattggatctgccctgrgttaaatgtttattgagtgcccactgggtaccaggcaccaggctag

SEQ ID NO: 102144 - DNA, 424 bp, Homo sapiens
gcagaaaacaactgctcaaatgcrcacaaattattctttcctttcccccaaatctctagtctactctgattatagctgggaggacactgatcatcaccatggttcaaaagaaataacaaggttcaattgtcagttcagctcaatacatggatatccacctctacacattatttaacctttcctggggtcagatttcttgtctctaaaatgggaacaatacaacacggggctcttgtgaagatgaaacggtttaaagaatttgaaagattacatgtaataatatgatgatgataaaattctgtttgcaatgtacattcctttaaagagaatatacaaagttgtattcatttttggttttcactagaaattagttttagtattctagttaatttttggctggtcagatggtagtgggttatcagaa

SEQ ID NO: 102145 - DNA, 424 bp, Homo sapiens
gcagaaaacaactgctcaaatgcacacaaattattctttcctttcccccaaatctctagtctactctgattatagctgggaggacactgatcaycaccatggttcaaaagaaataacaaggttcaattgtcagttcagctcaatacatggatatccacctctacacattatttaacctttcctggggtcagatttcttgtctctaaaatgggaacaatacaacacggggctcttgtgaagatgaaacggtttaaagaatttgaaagattacatgtaataatatgatgatgataaaattctgtttgcaatgtacattcctttaaagagaatatacaaagttgtattcatttttggttttcactagaaattagttttagtattctagttaatttttggctggtcagatggtagtgggttatcagaa

SEQ ID NO: 102146 - DNA, 577 bp, Homo sapiens
tattggaaggaattgggaatgctggtatatcttcttgcatctaccccatctaatccaatctaataaactggaccccaaagcaccaccaacctccctctgggaacttggtaatcagctacagtatatgggaataaagcttgttttgctagatttagagttactacacttctacaccaagaatacctacatgaagatacttcagactaactttattgcctgccttttttgcctttcaaataattcagccattcaattagaatttattcagttgttcaattttttaaaaaaagtttttcatgaataaccatgctgaacctaaccatgtatttatgaggaaaacaaaattatattgtgtacctgctatatgtttggcactttgacagatgctgtaagcaaattatctcaagattaagtaataacatttggagataggaaatattgtcccyattaaatagagaatgaaaaggcacagagatgctaagtaactttctctagatcacagagcctgtaatcaacatctatgctgatcccaaactgtatagtataccagtgacttttgcctccaataaggcagaaa

SEQ ID NO: 102147 - DNA, 529 bp, Homo sapiens
aatatagacagattttatatcatagatacatagattttcacttactagaaattctaaaaagatcaaaaggcaatagaatcatggtatacaaagaagcacatttggacaaaatgaaataatgtggatgctggctcgcttctggtaaaagctgacttaatttagagttcttgaagaagctagctgaagaatgaaaygtcattgtaacacacatctgtttcttgaaagagtttatacttgaatgtaactagtcactgttagctctggctaattttgaagttgatttaaattaatatagaggttgttctggtacttttttttttggtcagtctttttctgttctccatctctatctacatgcacattttctttcatttcattttctttttacctaatagagtcttctccctccgaatgtgtttaaaattttaaggaatgccattctgtctctcccagtaccttgttagaatattgaaataattttatgcaagaatcttgtggttttggtttaataggattttagtaaaaattt

SEQ ID NO: 102148 - DNA, 529 bp, Homo sapiens
aatatagacagattttatatcatagatacatagattttcacttactagaaattctaaaaagatcaaaaggcaatagaatcatggtatacaaagaagcacatttggacaaaatgaaataatgtggatgctggctcgcttctggtaaaagctgacttaatttagagttcttgaagaagctagctgaagaatgaaatgtcatygtaacacacatctgtttcttgaaagagtttatacttgaatgtaactagtcactgttagctctggctaattttgaagttgatttaaattaatatagaggttgttctggtacttttttttttggtcagtctttttctgttctccatctctatctacatgcacattttctttcatttcattttctttttacctaatagagtcttctccctccgaatgtgtttaaaattttaaggaatgccattctgtctctcccagtaccttgttagaatattgaaataattttatgcaagaatcttgtggttttggtttaataggattttagtaaaaattt

SEQ ID NO: 102149 - DNA, 529 bp, Homo sapiens
aatatagacagattttatatcatagatacatagattttcacttactagaaattctaaaaagatcaaaaggcaatagaatcatggtatacaaagaagcacatttggacaaaatgaaataatgtggatgctggctcgcttctggtaaaagctgacttaatttagagttcttgaagaagctagctgaagaatgaaatgtcattgtaacacacatctgtttcttgaaagagtttatacttgaatgtaactagtcactgttagctctggctaattttgaagttgatttaaattaatatagaggttgttctggtacttttytttttggtcagtctttttctgttctccatctctatctacatgcacattttctttcatttcattttctttttacctaatagagtcttctccctccgaatgtgtttaaaattttaaggaatgccattctgtctctcccagtaccttgttagaatattgaaataattttatgcaagaatcttgtggttttggtttaataggattttagtaaaaattt

SEQ ID NO: 102150 - DNA, 566 bp, Homo sapiens
agtgctgggaaattgtgggagctgagcaacaagtgtgagatgagacaggtgggggccaaatgatgcagggcctagctctacttgtcaaggattttgaaatgaaccttaaaggaagctatttaaaggcttagtcaagggcctattatggtgtgatttgtgttttaaagtagccattcacctgcattatggagaatgaaatgaaaggaagccaggagtaaatgtgggaaaaccagcagccaggacagtggaggagagcatctttgaccagtgtgatggtacgggagrgtgaaaatagatggactttagagacgtttagtaatagttttaaactcatgtgctgtaaattcgatttgattttaagaggtgacaggaaggcaggaggcaacaatagctttcaggtttataccttgagtagttctgtgaaaggtgatgatagataacagaatgtgattcctgagatgagaaaaactggccaaagaacagattctggagagacggcaaagaggaattctgtgatattatacattattgtatgttaatatatagtgtaatatttatgtatacgt

SEQ ID NO: 102151 - DNA, 421 bp, Homo sapiens
gctgaattcttcatctggcaattcagagagttcttcttggtttagctagtgtgatcttttggggtgttatagaacctttttttttttttcatgttatcagaattacttttctggttccttctcatttgggtcgactctttcaatggaaagatttggaactcaagggctgctgttcagatttttatgtcccaagtggtgatcccttaatgtggtgctctctcccttcccctagggatggtgcttcctgagagctggactgcagtggttgttactgtgcttctgagtctacccacccagtggggctactgggctctggattgttgttgcagaatgtctgcaaagaatcctgttatatgattcatattcggatctcccagccatggayaccagcacctactccagtggaggtggcaggggagtg

SEQ ID NO: 102152 - DNA, 553 bp, Homo sapiens
ctattgttttaagccactaaatgtgatgcaatttgttaaaacagtctcaggaaactaacatgctccccagccatcatccgtggtagatagcctcaggaggtgctaagggttcaggctctcaagaggcagaagggctgagagagctgcgcatgcccagatctggctttcagactcacctttcaggcagatcactccactttttgtgggacagagtgactaaagagcagggagagccaaggatacgtttagagtaaattcctcttcatagagacttctttttaaaaagttattattcataagcatccctaaattctagctattgcaatgttgaaataatttttaatatttaaatattatggtcattgttaatgctggacaaaggctgaagytgacattaacttatacatcagagagctttgaaggccaatattgagattttatgtttgtttttttgttcaataacaaaggttatccataaagttgaaatttacttatctctctgcctcaaaaccaccttctttgttgcatgtcctcagcaaagaaggcaggggca

SEQ ID NO: 102153 - DNA, 598 bp, Homo sapiens
aattctcctcagactttgtgaatgaaggccaaggaagaagaaatgttgcagtgactccctttgarctcatatttctttcttgttgcaaaaactgcttatttcagcattcatcatctccctctttgttgggtagacaatccgccctgtcggaggatttgtgctgttattatgagtttgtttattattagatttatttctcctataagcaaatgtgttcacaacattccatcggggaatcttcttaattgtcacataaatgtcatcttatgtaaattgaatatttatcttcccatggaagggggtggaggggaaaggaagaataaacaatcttcagtcttggagagggaaggcgactccggtgtccattcacaactcacccacgtgccttcaaagccaaaggtgagctgaaaaattattggataatctgaggggcagccgaccatgagggggaagaaaaagttggccacgatgctttggggatgttgggccaggctccccacaacctcctcccgaggccagacccaccccctccccagctagaggcattccgaggaggttggagcttgacccccgattcctccccaaccaggaggccagt

SEQ ID NO: 102154 - DNA, 606 bp, Homo sapiens
aggcaacagccaatcggccaacctgaaaatctgccaattcaatttgacagctgccaatccaagggggttcaggaaaaacaaaacatgttttaatgagaaaacaatttcagttactgaaaagatatacacaagataaatggccygcaaaaacagaatttctgaaagctctgtgatactatcagccttccaatttttatgttgtttgctttttggcaccagcaaagtcaaaataaagagtaattgaaaacttggttatttaaagtacaaaatagagaaataggggttctcccccgccaaatattgtgtattttatagttacagtctatttatacaaaaatatattccacaggtgaatgattcaattatttgcacatactaaaactataaatttgatatgatttcacaactggagggtaaaaattatggtctgtttaccagcaacttatgtaaccatataacattgagaagccagtataatgcataataatgacaatatcatgatatttctcttaaatgcagtactccttgatggtagagatatataaattacaattaaaatatctttaaaaatgttaatcatcattggaattcaagttttactagtag

SEQ ID NO: 102155 - DNA, 606 bp, Homo sapiens
aggcaacagccaatcggccaacctgaaaatctgccaattcaatttgacagctgccaatccaagggggttcaggaaaaacaaaacatgttttaatgagaaaacaatttcagttactgaaaagatatacacaagataaatggcctgcaaaaacagaatttctgaaagctctgtgatactatcagccttccaatttttatgttgtttgctttttggcaccagcaaagtcaaaataaagagtaattgaaaacttggttatttaaagtmcaaaatagagaaataggggttctcccccgccaaatattgtgtattttatagttacagtctatttatacaaaaatatattccacaggtgaatgattcaattatttgcacatactaaaactataaatttgatatgatttcacaactggagggtaaaaattatggtctgtttaccagcaacttatgtaaccatataacattgagaagccagtataatgcataataatgacaatatcatgatatttctcttaaatgcagtactccttgatggtagagatatataaattacaattaaaatatctttaaaaatgttaatcatcattggaattcaagttttactagtag

SEQ ID NO: 102156 - DNA, 606 bp, Homo sapiens
aggcaacagccaatcggccaacctgaaaatctgccaattcaatttgacagctgccaatccaagggggttcaggaaaaacaaaacatgttttaatgagaaaacaatttcagttactgaaaagatatacacaagataaatggcctgcaaaaacagaatttctgaaagctctgtgatactatcagccttccaatttttatgttgtttgctttttggcaccagcaaagtcaaaataaagagtaattgaaaacttggttatttaaagtacaaaatagagaaataggggttctcccccgccaaatattgtgtattttatagttacagtctatttatacaaaaatatattccacaggtgaatgattcaattatttgcacatactaaaactataaatttgatatgatttcacaactggagggtaaaaattatggtctgtttaccagcaacttatgtaaccatataacattgagaagccagtataatgcataataatgacaatrtcatgatatttctcttaaatgcagtactccttgatggtagagatatataaattacaattaaaatatctttaaaaatgttaatcatcattggaattcaagttttactagtag

SEQ ID NO: 102157 - DNA, 596 bp, Homo sapiens
actgttacttcttatctcacccctttcctaaaatcccgaagtctttataagctgtacaagctctattacatgaaaatgytcctgttacaactactatttctagaaatcaacttggcatgataacaacatagttcactctgacataactgtttaaactgaaatgactgcccagtaagttaaaaagttagatgcataagttaaacctgtaaaacaaatagaaggtctctcaaacaatatcagattttccaccttcattatgtctttgctatttttaaatataaaaattgggtacagtatcaagtgatttataaataatatttttaaagaaaaattgctttgaacatgctcctgcaccatactcatgataaattagcaactattttaagaggtgactagcatatcatcaagaaagtagtattgctgcccatggatttctattattactttgaattaggaggcattatgtttccaggtactttaggaaattctcacattcatgcagtatcgcacatctcatatatatatatatatatgaagcagtaggggaatccataaattatttagggtaagtgatccagcttacagatcaatatata

SEQ ID NO: 102158 - DNA, 596 bp, Homo sapiens
actgttacttcttatctcacccctttcctaaaatcccgaagtctttataagctgtacaagctctattacatgaaaatgctcctgttacaactactatttctagaaatcaacttggcatgataacaacatagttcactctgacataactgtttaaactgaaatgactgcccagtaagttaaaaagttagatgcataagttaaacctgtaaaacaaatagaaggtctctcaaacaatatcagattttccaccttcattatgtctttgctatttttaaatataaaaattgggtacagtatcaagtgatttataaataatatttttaaagaaaaattgctttgaacatgctcctgcaccatactcatgrtaaattagcaactattttaagaggtgactagcatatcatcaagaaagtagtattgctgcccatggatttctattattactttgaattaggaggcattatgtttccaggtactttaggaaattctcacattcatgcagtatcgcacatctcatatatatatatatatatgaagcagtaggggaatccataaattatttagggtaagtgatccagcttacagatcaatatata

SEQ ID NO: 102159 - DNA, 596 bp, Homo sapiens
actgttacttcttatctcacccctttcctaaaatcccgaagtctttataagctgtacaagctctattacatgaaaatgctcctgttacaactactatttctagaaatcaacttggcatgataacaacatagttcactctgacataactgtttaaactgaaatgactgcccagtaagttaaaaagttagatgcataagttaaacctgtaaaacaaatagaaggtctctcaaacaatatcagattttccaccttcattatgtctttgctatttttaaatataaaaattgggtacagtatcaagtgatttataaataatatttttaaagaaaaattgctttgaacatgctcctgcaccatactcatgataaattagcaactattttaagaggtgactagcatatcatcaagaaagtagtattgctgcccatggatttctattattactttgaattaggaggcattatgtttccaggtactttaggaaattctcacattcatgcagtatcgcacatctcatatatatatatatatatgaagcagtagggraatccataaattatttagggtaagtgatccagcttacagatcaatatata

SEQ ID NO: 102160 - DNA, 596 bp, Homo sapiens
accacaactacacagagtgtgaattacaactacacttgggctgtgcacaccacaactacacagcatgtgaattacgcatatcaatatatgaaattgactcttggagttgtgaaatacacagggcctgaatgggctcaaaaacaaaagagaaacamtattatttagaaaggggtttctaatcttttcaactgtgcttgcttccatctgtgttgtgttgaattatcattcctgaattggatcctagttttgttaactcattgactcctagcattggatgatactatctgaaacccaatcccccagtgtcctcaccagcctggttcccagctcttattctcttatcaaagttattggttgaggatagtaggtgattaaatattattgcataagcaatagcaaacatatagaggggctttatttcaatccctattttaggtcacataagtaacagaggataaggaaatctgtagtctttttggtagtattacagcctgcatgattttggctatagcctagggttaatttcacatttttctttcagaagctacccattgtacacagagataatactctcattttaaaaagttaaataatgt

SEQ ID NO: 102161 - DNA, 596 bp, Homo sapiens
accacaactacacagagtgtgaattacaactacacttgggctgtgcacaccacaactacacagcatgtgaattacgcatatcaatatatgaaattgactcttggagttgtgaaatacacagggcctgaatgggctcaaaaacaaaagagaaacactattatttagaaaggggtttctaatcttttcaactgtgcttgcttccatctgtgttgtgttgaattatcattcctgaattggatcctagttttgttaactcattgactyctagcattggatgatactatctgaaacccaatcccccagtgtcctcaccagcctggttcccagctcttattctcttatcaaagttattggttgaggatagtaggtgattaaatattattgcataagcaatagcaaacatatagaggggctttatttcaatccctattttaggtcacataagtaacagaggataaggaaatctgtagtctttttggtagtattacagcctgcatgattttggctatagcctagggttaatttcacatttttctttcagaagctacccattgtacacagagataatactctcattttaaaaagttaaataatgt

SEQ ID NO: 102162 - DNA, 596 bp, Homo sapiens
gcctgtaattggggacctcaagagggcatttggtaccctaccccactgctgcccagctggtacctaaggtacaagaaaaagtctactttatttttctctctcaggaggaatctctccccatggccaccagggccgggaatgtgctgagtctcacctgaaaccagcgaatctcagtctcacccaaggcccatagcatgttacttaggtattgctgctggttattcagggcccaagggctctttagtcagcagatgatgtgtcctggcaggactgggtccttcacttcaaggaggcaggttcccttctggcccagaatatgtctagaaatgtcaggcaggagctagggcctggaaagtgggactcatgactctcactggtaccctatcctgctgtggccaagctggtatctgagatgtaaaacaaagtcctcttttctcttctctcctctagcagaaggaaggagtctcttggagctgcaagctgtgcagcctggggttggggtaggggtggtgcaagcactccmttagctgcctccactggtgtctcagcagttcatgtgtccgctgtctctgagcccatctcagtactagaactca

SEQ ID NO: 102163 - DNA, 576 bp, Homo sapiens
actgattaaatcagctctaccttggtgcacttcgtatttttgttgttgttgttgttgttttaagaaacagagtctcattctgctgctcggggtagagcactgtggcatgatcatagctcactgcagtcttgaactcctggactccagggaccctcccgtctcagtctttcaaagtgctgggattacagggatgagccaccacacccagctgacattctgtatcttaaagtcaattcactgcaaagtttcttcacataattttttaggttagtgtttgaataactggagaagatgagtaaatatgagggacagggaatattggatggatatcttagaattctgcctaccacggcctggtgctgtggctcacgcctgtaatcccagcactttgggaggctgaggcaggtggatcacctgaggtcaagaattcgagaccagcctgcccaacatggtgaaacccggtctctactaaaaatrgaaaaatcagcccggcatagtggcaggtgcctataattccagctactcaggaggctgagacaggagaatagcttgaacctgggaggcggagattacagt

SEQ ID NO: 102164 - DNA, 460 bp, Homo sapiens
attgtgaataatgctgcagtgaacatagaagtgcacatatctttttgaagtggggatttaatttcctttgggtatatacccaraagaggaattgctgggtcatatgatagttcttttttttttttttttttgaaaagcagtagtcaggtttaatagcagattaacacaaatgtatcagttttctatagttaccatagcacattaccaccagttttctggcttaaaatagttgttgtttttaatatcattaggaatctccatactgttttccataatggctgcaccagtctacatttccaccaacaatatacaagggtttcctttttgccacacccttgccaacatttgttgtcaatctttttgtttttttttataaaggcagatatacagagaaagagaataacacagtgggtaccaaaggtagaggcaggggggtatgtaggtcagagtatgcaaattg

SEQ ID NO: 102165 - DNA, 518 bp, Homo sapiens
ccctccacatttataaatgaagacggttttaatattttgataagaattttcaacgrtcataaaataatcacaattttcccattggttattaaaatcatattgcattatttcaaattgcacagtcatttttatggtcttgcactaccctgaaaattgagtatttcctatagtttattataggtcagaatcaacctcctgctaagaacaactagaaacgatggactaaaacaacagatactttttttttagttgtctgtttaaagctattaaacagaggcattattagtgaacagcagaggcattgaggactttttgacacaggattggagtgccaagtacgtggaagttctagggaactagatagtctctagatcactaaaagtgctcagtacatgattgtcaagtgagttaatgaattaataataaatgaaagaaggaaagaattcagcttccaattattaccattacctaggttaagaaaagcagcactgataattattctttgtgttgacagaaat

SEQ ID NO: 102166 - DNA, 390 bp, Homo sapiens
aatggtctccaactcatttccccagatttgtgccctgggagattactggtcaaagtctcctttatgagcctaaagcccactgatattaccatacatttaataattttttttccagaaaaaaatatagaaatattagacaacctctattaattattataatcaagtaagtctcaccaaaagatcaaagaaaaattacaccagatggaattaaacaggcaaggaagacattattcaagactattgcaayaggggagagagattgaacccagctctgctcaaacaaagctggagagtttttaagtactgagatgagctagaggaaaagtactacagaacattaacagggaggttggccaatgtgattagaccatctatatttgctaatgggca

SEQ ID NO: 102167 - DNA, 593 bp, Homo sapiens
tggtctgtggattgcaaaaaccgtggaaaaagcatagtatctgggctggatagcacagtccctcatggcttcccttggctgggaaagggaggccccctgctccttgcacttcccaggtgaggtgatgccccaccctgcttctgctcgccctccttgggctgcacccactgcctaaccagtcccaatgagatgaacagggtacctcagttagaaatgcagaaatcacctgccttctgcattgcacctttgactttggggcatacctttaaatygaaaacttttagccctagcattttagtgattatcctattgttcaaatttctttccacccgccaactcccaaaaaatatttcttctatattgagaaagttttccaaatatatagattttttaattgatagtcaaggattttacctctatttagacatattttagaagaaagaatactatgaaagagaattagaaaactagggaaagacttgggcaaatctgcccatcttaaactggaaacattcaaccccatcaacctatccatatgtaaaatttttatgcagtcaattaccttcagaaatacatgtattatgggatcatct

SEQ ID NO: 102168 - DNA, 615 bp, Homo sapiens
aatctcccccgatagcaagctgcttgctgctgggtttgacaactcctgtataaaactttggagtttacgatccaagaagttaataattgatagcccccccgagtagacgtgtcccgcatccatttggcttgtgatattctggaggaggaggtatgaataccatttttttcttccctgcacccgccttcctaatttccttagaatgtccttaccaaacacgacatatcttagaatggacttcctagtttccctcatcatatagctaaagccagactaatgacatgttacctgtagccattgaattcctgcacatgcctaacctaagatgcaaaaacaatttttagcagcattaacttcttattaatgaatggtcagtatttatactatgtgaaatgtggatagcaacactaarcctaatgaaagacctttagctaatattgactttagctgagatttgcagtaaatatacacttatgtgtgtgcacatttgctcaggtacaaataatcggtagtaggataactgagtcgaagggcctccattgtcaactgtaatgaatattattttccccacagaaggttgtgccatttcacagtctcagcaacagtagtaagaat

SEQ ID NO: 102169 - DNA, 489 bp, Homo sapiens
atctgattttggcttcactgggttaattttctccctcaactttaaaattcatttaaatctttctatatagatcatcaaggtttctgccaatgtatatccttcccagtccttacaagatgcactccatcccttgccagaagcccgtcatcctggctctgtwgaacacagtccagaaaactttttaaataccatctacataggcatgcatgtttctcaaagcttcccttctttgctgtagttactgccatcacatggaacgagagataaaaacaccacctgtgctttcaaatctttcagtttgttactcagaacttatgtcattaggaataaaaccccaatttcttctgaatgtgccatttgttccccaaaggaagcaccaaatgtgggtgacagttcatggggttaataaaaggttcatggtaggctctctataatatcttggatattggctcctgccctctcccaattttctacatcatatccacataa

SEQ ID NO: 102170 - DNA, 520 bp, Homo sapiens
ctggcccttggcaagttaatttagatgagctaatggttgttcctggcataagggatacactcaataaatggtaactattattgttactgcaaaaatggagtgtctgttggatgttctcatctagtcctcccacacatcctaaaatcggctgtgccaatcacttgcacatctgggaacaaagctccacatgaggctaaggatgaggcagctctttctttgggagcccctctctgggaggaggcaggcttccctgtgggagcccttctcttggggagaagaccaccacctatctmtgctggtatgtgctaggtgggcctgaccttgagcttaggaggaggactctgcgccccattttgccccttctcccctctttcagcagcagcctctgcaatggggctcacacaggtaaggggccatacagggacccagtgtgggcacatccacaaggaaaagcttgacagtgtttccagtttccagcccatacaggatatatctgcagggcttagaaagaacttgatga

SEQ ID NO: 102171 - DNA, 507 bp, Homo sapiens
gtttgttaggagctgcaggagataagtacaaagaataatactggactcctgcctgtaaggggttcacaggcttctgagggggaatagatacataaatgattaaggctccttgcatgtgtaatggaagtgcagagattagagttactaattytgcttgggaaagctgtgggaaagcctcacaaagaaaggaacactggagctgggtgtaggaaaatgaataggagctcacagaccaaagagggcaggtatggagtgtgttctaggtaactgaaatagcacagagacattaagcattcacataataccaccacatttggtgcagctgaaacataaggagctgaggtagagggataggaaatgggcaggagagtaatcagagatgaggtaggggtccagctataacccggttgaaacaagccaagaaggctagacttcattgtttaggcattgagtagggggacatactgatgtttgtatatttcagtattaacacagtagtactgcaaa

SEQ ID NO: 102172 - DNA, 621 bp, Homo sapiens
gctctcaataacttttctataaaggacattttgggggccattagygaagtttaagaaaggtttataaattagataaaatatattcatattattttccgatttcaataactgtactatggttataacaatgaaaatttcctcattttggtaactgtactttcataactgtccttgatcccaggaaaaatacactaaaatatttaggagttagaaaaaactttacagtttttgagatccctcatgtataactccttcatgatctagcagctccaacttgcctcttggatttctcagaactcatatcctacctgccacttccttttattagtattcaacaaccttggctttctttttgctcctcaaagattccaagcttgttctactttcaaacctttgtacttgctgttttctctgcttacagcattctcctcccagacctgtacatgctggcttcttgtcatcattgggccctaactcaaaagtgacactttaacacctcatctcacagcagcagttttttattattcagacaaaagtagttctccatacattatcaattacattaacctgttttcttatcttcatgtgacttatcactatcttaatgtatgttgtttaagt

SEQ ID NO: 102173 - DNA, 621 bp, Homo sapiens
gctctcaataacttttctataaaggacattttgggggccattagtgaagtttaagaaaggtttataaattagataaaatatattcatattattttccgatttcaataactgtactatggttataacaatgaaaatttcctcattttggtaactgtactttcataactgtccttgatcccaggaaaaatacactaaaatatttaggagttagaaaaaactttacagtttttgagatccctcatgtataactccttcatgatctagcagctccaacttgcctcttggatttctcagaactcatatcctacctgccacttccttttattagtattcaamaaccttggctttctttttgctcctcaaagattccaagcttgttctactttcaaacctttgtacttgctgttttctctgcttacagcattctcctcccagacctgtacatgctggcttcttgtcatcattgggccctaactcaaaagtgacactttaacacctcatctcacagcagcagttttttattattcagacaaaagtagttctccatacattatcaattacattaacctgttttcttatcttcatgtgacttatcactatcttaatgtatgttgtttaagt

SEQ ID NO: 102174 - DNA, 621 bp, Homo sapiens
gctctcaataacttttctataaaggacattttgggggccattagtgaagtttaagaaaggtttataaattagataaaatatattcatattattttccgatttcaataactgtactatggttataacaatgaaaatttcctcattttggtaactgtactttcataactgtccttgatcccaggaaaaatacactaaaatatttaggagttagaaaaaactttacagtttttgagatccctcatgtataactccttcatgatctagcagctccaacttgcctcttggatttctcagaactcatatcctacctgccacttccttttattagtattcaacaaccttggctttctttttgctcctcaaagattccaagcttgttctaytttcaaacctttgtacttgctgttttctctgcttacagcattctcctcccagacctgtacatgctggcttcttgtcatcattgggccctaactcaaaagtgacactttaacacctcatctcacagcagcagttttttattattcagacaaaagtagttctccatacattatcaattacattaacctgttttcttatcttcatgtgacttatcactatcttaatgtatgttgtttaagt

SEQ ID NO: 102175 - DNA, 440 bp, Homo sapiens
tgaattcactcctgcatgccaatyctgccctcagattcaagagtctggagagaacatccaattggctgcgcttggctacgggcccttctgttagccagaggcagctggggcacttttattaaagtgcctatcaaaactgcaaaactgggggaggagtctttcctcatcaggaaatcagcatttggggctggatgctgggcaagcaaatacagacacccaaagcaacaatgagcactgcctgaaaacaacacagaagcagcacatggagcaaacaggattcatagaatgtaacaataaaataacttttcttgttttgcttcccatgtctctttaaatctacttggtggaggaaacctaccctctgactgtaaactctaccccgactgtaaactctacttacttctagatagtaaaacaggccatggtcactttaagatgca

SEQ ID NO: 102176 - DNA, 594 bp, Homo sapiens
gagtcagactagtttggataaaactcggtgggggtgtggggatggggcagggagaccaagccaaaggaaactggctcggtctaacagaacatggtttttccatctctaatttctgagtttgtgactcttgtgggaatttttcaacccataaaaagtgccctttttctgtccctggtaatggcctaatgaaataaacactcataaatatatgaagttcccagagataagatctgaacatcagccgccttttacctggcagtggatgttttatcaccagtgaattggtcatgtgatctctttcagcyttttttctcccctcaaactgaaggtcagaattcttgtgattgggttcttttaaacgttctgaagcctaagtgcctagtgattaaataaatttacatcttatacactttctaacactcagtaaagagatcattggattttatcagctgcttgtgatgttcagctgaatctcagcaaccctggcctaggacagagagaccgtttagagacaaggatagaggatcataaacaggaagcagaggtagacagagctccctggctgtcaatgttgaattaaaacaacaacaaaaa

SEQ ID NO: 102177 - DNA, 560 bp, Homo sapiens
ctatggtccacacaaacaaatgaatgagtatgtgatttcatgtgattcattcacttgttcttttcttttctgtgaaacatctattgaccgctgactatgtaaaaggcaaccctctaataccttgaaaagaagctctgaattgcttgtcatgatattttggttctaatcttctggtttctccagtccaagattgttactagactctagcaagcctttccacttgtttcctcaactctayaataaacactaaaacaattatcctatctgtcacatagggctgccatccacctgatctaagagatatgaatgccctttaaaaacttagacatgtgtgaagtgtatgattgttactggggaaaagaaagcttccaaatacgaacctacaggcaacactacccccaacccatgagagttcttcactgcttatgaagaaattgagtctcaattgcaaatcagtttcataaaagaagagaagcttcatccagccatcgaaatgctgagctattctactcttgttttaatcgaaggcttaggtttctgagcagtcttagatttgcctt

SEQ ID NO: 102178 - DNA, 550 bp, Homo sapiens
ggctaatgcccaaataaaggaaaaacaaatacctagcagtcaacagttttgtagcacgtggcagacatttctaatccattatgacactgtatttttctttggcttagtctcagacactttctcaatgtgacattccagagagccacgagcaatcaactggagctggcctttgaggtggggacattctgtcatctttcttctctatgggtttccttttacaccattgtaatagtcatttgttatctttcctctgcagcatccactcttcctttctatgataacatcctaattttcatttgaggaccacttctcttcccttccttattgtcaaccagtgacactgactccctacccgagtctggggctacagcgcatgaccagttggcttcctccactcccctagcccccgggattggttcgaggatgggatgagtcaggccaatccaagccaatgctcttggayttttgttgagctggtagggaaactcaccctcattctggacgtgtcataatcatgagaacttagagtagccagtcaaacaccaaggag

SEQ ID NO: 102179 - DNA, 646 bp, Homo sapiens
atgtgatgtatgaaggaagaaaaagtaaagacatgggtaaattagtaggctgatctaaacaaatattaatcttataaagtgataataaaagtaatatcagatgaaatgcagcaaagcaataacacaagctgaaacaaagatgctggactatattagtaaaagaactccagctgaaaccaaactaataaataataatgaaagaaggatgatctggaaatgaaatcacccaaaagtctgtggattattcaggaggatgaaaaccatattaattaaatttggattttgttaagctaagtatgcttatgaaaactgtgagtgtaactactaaaagaatgagcwtggaacatacatccactgaagaagtagcaactaaagatgaaataaagaaaagaagtcaaaagagggcaaaaagaagaatcagaagacgtaagataaatcaaaagcacataatgaggttgtagcaataaacttaaatgcatcaggattcacaatttatacaaatggattggtatttctaaataaaagacaaaaacttccaggcagagctggatttttaaagctcaattgtatgctgatataaaaaaaacaaaaaacttagacatggaagaagtagacaaatccaccagtataacagaaattgttttaa

SEQ ID NO: 102180 - DNA, 608 bp, Homo sapiens
taggcacaagggcagttattccagctgattgtaatagaaagcaattaacagcagtatcagttatctattgctgcatatcaaaccactgcaaatgtagcagcttaaaacaacacacacttagtatctttttctgtggattgagcatctgggcagagcttagctgggtcctctgcttaatggtctctcacagcacatgaagatgttggccagggctggggactcatctgagactcgaatggggaaggatccacttccaaactcatggttattggcagaattcagttacttgtgggcttttggccagagactgcccttagttccttgccacatgggyccttctgtaaaccagcaagagaagagtctgttagcaagaggcaagttacaatgtcttgtactctagtcacagtagtgacatcttatcacttttgctccattctattgattagaagaaagtcatgaggccagcccactctcaagggcaagggatttcacaggggcatgaataccaggaggtagagatcatggggagggggtcatcttagagcttgcccccatgacaacccaaatgtccattcagaaggacaaggttaaataaattattatggtag

SEQ ID NO: 102181 - DNA, 561 bp, Homo sapiens
gctattcaacaacaactagtgtgtgagcatgtgagagagtgtatgtatatgacctcttttaaaagtttcctgctgccagttgattccatttgagaaatcaagctttgtgttgttaagcatggttcctcactgagtcatgaattactaaatatgtacttattcttttttataacttcaaatgccagtgacagtaattacctggcaaataaagatagaagctcttattataaagaccagccccttaaggaagagaaaattgcattytactcactacagtcatttgtcatgtaattcaatcattagtttcatttcatgtttcttgcaggcaagtcctaataaaccacttcattttgggcaaatccccaggggagaaacatattatgccaaattatgtagaactgtcctggtagattcagaagaacctgactaaattatatatacggcacacctggattcactgactgccaaaaggagaaaaaaaaaaaaaaaagtcccaggcaagaagcaacaaatcccaacccagacccatattccttccaatagagggaaataatttttccc

SEQ ID NO: 102182 - DNA, 561 bp, Homo sapiens
gctattcaacaacaactagtgtgtgagcatgtgagagagtgtatgtatatgacctcttttaaaagtttcctgctgccagttgattccatttgagaaatcaagctttgtgttgttaagcatggttcctcactgagtcatgaattactaaatatgtacttattcttttttataacttcaaatgccagtgacagtaattacctggcaaataaagatagaagctcttattataaagaccagccccttaaggaagagaaaattgcattctactcactacagtcatttgtcatgtaattcaatcattagtttcatttcatgtttcttgcaggcaagtcctaataaaccacttcattttgggcaaatccccaggggagaaacatattatgccaaattatgtagaactgtcctggtagattcagaagaacctgactaaattatayatacggcacacctggattcactgactgccaaaaggagaaaaaaaaaaaaaaaagtcccaggcaagaagcaacaaatcccaacccagacccatattccttccaatagagggaaataatttttccc

SEQ ID NO: 102183 - DNA, 600 bp, Homo sapiens
tatagaataattccatttcataagcaagaaagagcgggtctagagacaaacagaatattctaaattctcaggcacttcattgagaatcctaaatttatctacccattcctcacactaggtgtgagaggagcaaggggaaagcagcagcagaataggttctttgaactctgctctctttgaaggaggattcctcgtacccagatgcccccagctttggagaattctttcataacaggaaggaatgttgtcccttggggcttgaagttaccagtattttggagtggaaaatgktcaatctccatcagctctgataaagtctaaaaaggagctcttaggacttctttgcttttgaggttatatggaagagacttttctccaatgttcccctcaagaagttagaatatggaattttttcctaaagcgtctttatgcagtcaaagagaggtgggtgtagatctgttatcagtacctcttgtctgctgcttagagttagaaagtcacaggggaggtgatgctcaggtgtaaggactgtgggtgtttagctttcttattcctaacctagaaagtcaccaactatttcctatcacaaagaaaacaaaa

SEQ ID NO: 102184 - DNA, 620 bp, Homo sapiens
gtaagtgtattacttattctaaaaattaaatgataaaagctgttattgcattatttaaatatataaaaataaactttaaggcaaaaaatttaatgaggatgaagggggccaccatgttatgaaaaaggtgtaattcactaggaatgtaaaagtttcaaatgcgtatacacttagtgtaggtgagtcgtagaaatctattattgactaaatttggaagagtattttacaaattttaacatatttttktccttagaagatcaattacaaaaaatctcaaaagtataatttgaaaaaaaaaatccattggcttgagtgtcatacacgttcttttcaaacacacaaaactatagaaattatttaaatgagaccataaagtaggctcaagaaatttaaacaaattgtcatacagatgactttctctgcaaacagtgcaattaaacaagaaatcaatgacaaaaattaaacttagaaaatagaaatatatatatcttctaaataactataacaagaagttattcattatacaaattataaaatgcagtaaaaatatttaaaattatgtatatttacacttgtgagatttggtctaaatgatactagagaaaattcatagttgtgaa

SEQ ID NO: 102185 - DNA, 595 bp, Homo sapiens
aagagaataataaaagtgaatagtaaattaaatgaaataaagcatataaaatttcgtaaaatacccaagagataagaactcaatgcaggttaattgttactccattattagtgttaatgcttcaagtgcttagaacatagacagtaaatacatgtagttactttcattttttctagttctgagtgacttcaaggcaggtgactgaactctattcattcaggtatgtagtgaatgcttgtgatgagcctcccagagcttcccttccagatggagagtgctcattcttctagcttctgaaagtgttgttggctgtcaattcccaactaagtttctgtctgagaattgccctcggcaaaagaaagccacctcactcaatgccacacatgctctttggaataacttgcatgcaatgaytgatgtctggggaggggtgggaggagaaatctgaagatcccccacagctcctgcagtcttggctgaggcctttgttctgactgcatcacagtccaatttcttcctctacatagttctgtttcctgtactctcccataggtgttgatcccaagagaattcgagagtaaaccttctgcacaca

SEQ ID NO: 102186 - DNA, 479 bp, Homo sapiens
gttcatctaccttatgactgaggcatgcatttcattgctgctctgtgatctaattcagaggagagatagctgctgcatttacaattgatatataaaaatagctggtttcactagacactatctgacgtcaacggaaacattaaaaagcagtgaccagtctgcagaaagtcttggttgaagctagtgcagctcagtctgcagatacttaagccataccrttttttccttttgacaaacagccatcttttcctattgcaaggtaattttcatcaatcatttagcaaatatatggtcaaagttcaagctcttttcactacaccatagtgcataattctgtgtcgaagtttagccacgtttgagaatgattcatattctgtggatatgttaggaatggatttatgaggacccttggaaatttctcagtagaatcctatgtaatctgaagcccacagactaacttttactatattagcttccac

SEQ ID NO: 102187 - DNA, 607 bp, Homo sapiens
gctaggtgcctgaagagcataggacagttttagacaacaaagaattgtcctgtatctcatgacttctttgaacctcgctgaataattatgtacatagaaatcctgtttataatgagaaaggaagagcaacccctacagctgtcagctggaagctgatttagccctaatggctaggctattatattctgttgaatataaacaatgttatrtaacaccaacatctgacaagtccactctgagtgtggtggaggaagacaaaaattaagacactccataggcatgttggaacttagcaagattctgtgtaaatcatagagcgaccaaacattcttgtctcttggcttatatgtgtgatatttgctccattacccattagatcactctgttccttcttcctcctagattaaaaatttcaatatttacactcatttagaatttcccttgctttctgaaagcacttaatccagagtaaaaccatgattcatggagcccttcttgaaatcacccaacacaaccccaaatcctttaaaaagcccttcccagcaccctcatactgaggcaccccatggttccccatggtgtgtgatctctcttgtgtaaaagtgtg

SEQ ID NO: 102188 - DNA, 549 bp, Homo sapiens
ttctgttggggctagcatcaaatctgggagctctctgcctccccactcctaaattcaatacttaaattctctgtttcttaagattttattagttgacattctgttatctgtagccaaaaccacttctaatatgctgtacttctctggagtgagagtgcagtaaagactgtggcatttattgtccattttctaatgaacaggtgctatggtctgaatgtttgtgtccccccaaaatccatatgttaaaacctaacccctatggtgatggcagtaagaggtagggcctcttaattaggtcatgagggctctgccctcatgaaagggattagtgctcttataaaagaggcctgaagtggcttcctcaccccttccgccatgtcacaacacatagaaggtgccatctatgaaccaggaaatgggatcccaccagacaccaaactgacgggtaccttgatcttggagttcccrtcctctagaactctgagcaataaatttctgttgtttataaattgcccagtctaaactattttgttccagtggcagtcaagc

SEQ ID NO: 102189 - DNA, 528 bp, Homo sapiens
ggcaacaacaatcaaaaaaagaagttctgttaaataaaggaactagttctgcaacaactccttgagtaaaaccattgtccttcagtatgcagcaggaccaagggtatttctatttcactacaaagaacattaaaaaggcatgagatttcacacgattgaaaatttttactactttgtcaagaacatttttcagttaaatgatcatttttcttttctttctttcgtgtgtgtcagtgaagatcaccacagcatacagcacaccctgtatgtttatgggtgctgaggtggcagcaattttacctgcctctgcttctaarccacagaagcaaatgtcagcactgagcaaaaaacatgtcagtgttcttgtgaaaatagctttgaattcacaaaggccctaaaggttcttagagacaccccctcccaagggtccatggaccacacctgcaagccactgctccggctgcctcttcccatgcatcacagaaccctctgggacggagggacagccacactcccactccaccccat

SEQ ID NO: 102190 - DNA, 588 bp, Homo sapiens
tggtggtctaatgagtgcttccaagttcacaaattaccaaaatattaaaactttgttttatatgaaatcgtaataggggtttatttggtacctccatgagttcacaagatccagagacatatatattccataaattgacaggctaatagaaagagatttactcaatttagtttcyatctagtgccataaattcagtggaagtcaaatgcaaactgcccttgaagcatatttaagctgtctttaaaatggagaagcaagaaaaggaatacaagaggaaccaaaattaatttacttgctgaaagaagtatgaataccatagttaggaattcataatgcaaacagtttcaaaatgtcattcaagtttcaagttcatattttttttctatgacttagtgtagttatgaaaacacactacacactattatattaaaatatacaaagtagaaacttgtattctgtaataattgggatcctctggaggtgagcagcatattcatatttggattaaataatgtgaaagtttcatttggtactactataaaatatgaaaaaagaaaactaaaacaaaaaaacaaaaaggcacacaga

SEQ ID NO: 102191 - DNA, 582 bp, Homo sapiens
tggcccaaactagaaaagtcaatttatgtgtgctgttatgtargcatgggaggaggggtgagaattggttcagagagagtgattccaaatggttttgataactatctgtttccctgcaggtattaaaacttcaatggctttttcaaaacaagattcaaataactcatgttctttccaggttgtggttttagttaattataaaaaacaaagaagaaaaaaatgtaagggcagctagaaataatcaatggtaatgaaagatgagtgatcaaatattcagctttaaagatttcaaagcatggaaaggtgatttaatctgtgataatacctttaatgtcacacatgcaaaattcaaggcatttattattggtacctgtcaaggttgaggaggtcatatacattttttaaataatgggataaatcatctttaatcattttcaaatgatcttctatagcaaacctgcaaattctgaatgatcaaaattttcctgaggtattgcgtgatcatcagctttattatgcaccataacaagtgagtttcatataaggtattactacttaaatatatgcatattatagcattca

SEQ ID NO: 102192 - DNA, 561 bp, Homo sapiens
ggatatatatccttgcagatataaggaaacaaattgaataccagaatactttatggaactcatamataaactataaatacaatgaacataacaaacactgctgaatattaaaatactgacatagagaaaagactttaagtacagtaaatgcagaagaaaaagacaaaggaggttaattagaagctaatagatatacctattagtttggtacaaactataagaaagaaatccaaaaatataatgacttaaataaattagtgtatttctcattctcaaaacagtccacaagtgagaagtccaaggctggcaggacagctctgctctacacagtcattcaagatacgatttctttcatcttgatctccatcagctcctcattacagtagttacaggacattctaatcccagtggtggaagctggctcctctccacacccacatttcagcccttaggaaggatgatgatagtactgccaagcactctgaggacatgacccagaggttacacagatcacttctgcttacaacttattggctggaatttggtcactggtccacattt

SEQ ID NO: 102193 - DNA, 555 bp, Homo sapiens
gtgtagggctttaagaaaagcacagtcataatttctagtgattycaagtagttagaaaaatgggagaaaaaaataatttgaaaatgttagcttggagacttgtagtcaggaaagaatgcaaggtacagtccagataaattgtaggcaaataataaaaactgaaaaacagacaaggctagaatctaataacaggtttactatagtttcttttgaaacatgatttttctctctccagttccccatttttaccaaagataaattatagtaggaccagtttatttgcaaaataagttttagtcttattatacttagcctgatcatttgcatcaagtgcagccagaataattattgatcaataggctctttttgaattggctttgctggagctttttcataaggaatctcagattagatttttaaaggcctctcaagcccagctgagaatttatctgtatctgtatgaattgggtaaattcctctcttctcaagatcccaaaataacttgagtttcccgggcctgtcagaaagtgaggcagggagaatcgcttgaaccca

SEQ ID NO: 102194 - DNA, 523 bp, Homo sapiens
gtttacagtattctctgatggttgtttgtatgattttcttagaaacattgtcttttctctagcttactttattatgactacaatatataatatatattatatacaaaatatgtgttaatcaactatgttatcagtaaagcttctggtcaacagtaggctatttgtagttaagtttttgagagtaaaaagttttatgcagaattttgacggtacagggggtcagtcagtaccctaatcttcatgttgttcaagggtcaactgtaattcgtatcttgccttttttcagaaagaatttaggttgactcacaaaaataggtaaaatatatcaaaggaatataaatcagtagtaggcaagaaagaagagacaaaaggaaaatgagatggaaacataaacagagccaggaatgaggcctatacaaaaacgcatgtcaagaaattccrtgcccttgctaagggttgactctaaacctttcggtgcctgaaaacgaaaagatgtttaaaaaaagtgttaagtcagagaaag

SEQ ID NO: 102195 - DNA, 608 bp, Homo sapiens
ggtgatgccatgttgataccatacacccttgatagaatgtgatgagattgataacttttgtgggcttttcttcaaaatctataatctcagtcttcttargtgaaaaatatcagaaaaatttcaactgggggacattttacaaaatacctgactgatactcctttcttcaaactcatcaaaaactagaaatgtctgagaaactatcataatcaagaggaaaataaagattcctatcaactgaatgttacgcgatatcctggattggatcctgacaccgaaaattaggcaaaaactatggaaatctgaataaaatgtgaacatgagttaataaaaatgcaaaaaaagtgtcctgggataagcttctgcagctgagttttactaaagtgtgactccaatggaaatggaagtcactaacagaaattaaatctgctcttaatagcatgtgaacaagatgggaaaaaaccaatggaggatgaaaggcagaggcttaatgaattagaaggacagaattaaaattactactaagaatattcagtagaatttttttgatcattcaacagtaaggcaagtgttataataaaattccaaaaaaggaaactgcattaagt

SEQ ID NO: 102196 - DNA, 575 bp, Homo sapiens
tccacaattgtactgggcacatgaaaygaagttactaagtgccaaacactttcatttaaacctaatttataatctggagttgaagtttaattgtaactacatctgctttatatgcagcacacatactttcattatcagtcacccatgcaagatcaggatcaaaaagaaaatgcatgtggggtggtgtcgactggtagatgttaggcattgacggtgtgccaggtactgagctgagaactggggatgcgaagacgaattaaggtatggttctgctcccaaaaaggttatagtctggcaagggagacaaatatgtaagcaaataagttcaatgttgaagaaacaggacattctggatctagaacaacacaaacaaaagtgcaaagaaggggctgagtatagtgtgtgtgtgtgcacgtgtgtgtgtgcgtgtaaaattgatagcagcttagaggaaggaaagaatgggccatatgaaggcaattgaaagtttaacaaaaaattgaaatagactgtcagtgctgtctaatagaattttcagcaataacaggaatgttctatatctgtgctgtccaatg

SEQ ID NO: 102197 - DNA, 537 bp, Homo sapiens
tttttcttcctgccttccaaataagctaatttatttttaaaataggtaataccttcaaatgttataaatgtcataagttacaaattaactcacaaaaagtaattcttcttcccaccccttctccctgtctctcatttttcctccaggaaacaactactattaytggtttcttgtgttactctttttagtttatttatttttgaaatagtcttccaggatgtagaaagtaaaactgagaccatatctaaaagtatttaaatgctaaaggagggaaagtctcacaaactgggaagaatcattctctattcttcccatcattctgtggcagacaatacttttccagggcaaacaacggctgcctccattcaggaactgcaggttctagtggagtgaaaagatgttattagcaagctgtgtcttgttgggcaagacctttaaccttgttgtacctattgggttgatgtctaccaaatctcccatccccatagttctctgattcttatctgaaaaagagtcgtttcacaaaatcagagaatc

SEQ ID NO: 102198 - DNA, 561 bp, Homo sapiens
gtgtctccatcttggataggggcctggtaaaataaggctgagatctgctgggctgcattcccaggcagttaggcattctaagtcacaagatgagatgggaggttggcacaagatacaggttataaagaccttgctgataaaacaagttgcagtcaagaagctggccaaaacccaccaaaacsaagatggtgatctgacctctggttgtcctaactgctacactcccaacagcaccatgacaatttacaaacgccatggcaatgtccagaatttaccctatatggtctaaaaagaggaggcatgaataatccaccccttgtttaacatgttgaaacaggagagttccctgacccccaacttgcaggacgtgcaacaggggtgtggtttgtctgtttggccaccatgagctcaaaccccttacgggaggaagagcatgcacataggcaggtgcaagagctggagaaagtgcttttgggctccagccccatggtaggatctaagggtgggtgtctgcaactcccaaagccccagtgtgcatgttacactgcctcttagctctgc

SEQ ID NO: 102199 - DNA, 561 bp, Homo sapiens
gtgtctccatcttggataggggcctggtaaaataaggctgagatctgctgggctgcattcccaggcagttaggcattctaagtcacaagatgagatgggaggttggcacaagatacaggttataaagaccttgctgataaaacaagttgcagtcaagaagctggccaaaacccaccaaaaccaagatggtgatctgacctctggttgtcctaactgctacactcccaacagcaccatgacaatttacaaacgccatggcaatgtccagaatttaccctatatggtctaaaaagaggaggcatgaataatccaccccttgtttaacatgttgaaacaggagagttccctgacccccaacttgcaggacgtgcaacaggggtgtggtttgtctgtttggccaccatgagctcaaaccccttacgggaggaagagcatgcacataggcaggtgcaagagctggagaaagtgcttttgggctccagccccatggtaggatctaagggtgggtgtctgcractcccaaagccccagtgtgcatgttacactgcctcttagctctgc

SEQ ID NO: 102200 - DNA, 584 bp, Homo sapiens
tatatgaaagggttatatggttctttgcaattctggtttatttgtcgtttgcccagatgttggtgtggaacaaaatggcacctccagtgcctacatgctagatcttgaattttatgatgacaacctaagatcaggaaggactgtggatgaggaamcattgatgggttttttgcagagtagtgccattgagagacttttattttaaataatctttgtggacttatggggatggagtaaaagaggatattttggaggccaaaaacaagtcaaaagctgtttcagtaggaggacttggatcagagcaggaacaatgggcatggagaaaagagactggattttagaaatagtagaggattgaatgtggctggtgatggagaaagaggaatcagaatgacaccaaagtttctagcttagatattgggctatgaaagacagtgccatgaactaagaaagaaaatcctgaagaaagagccagttttaagataaagataaaatctttcaaaccgtgatttcatttagcctgtattcctccatctgctctacaagaatatgataagaaagcttatgccaggatctattattca

SEQ ID NO: 102201 - DNA, 613 bp, Homo sapiens
aacattttgtttattcattcttccattaacggacaggtgggttgcttccactttttggttattgggaataatgctataatgaacatggatgtgcaataccttcttgaaaccctgcttttaattcttttggatatataccagaagtggaaaagctggattgcatggtaattctatacttaatgtttatgaaactgccatactgttccacagtggctgcatcattttatgttcccactagcaggacacaagggtttgaatttccttacatctttgccaatatttattttctggtttgtgtgtagtttttatttttatatatatattttttctgatagtatctgctcttatttgaatgtgtcccttccaaaattaagattaaaacttaatccccagtgtgatgatattaagaggtggggcctttttgaaagtgattaagtcatgagggcttcaccttcatggatggattagtgccttataaagggtagragaaaactacttaggccctgttgcccttccttcttctgccatgtgaggacacaatgttcatcccctctggaagatgcagcaccaaggggtcatcttagcagcatagagaatgagcactcaccagaca

SEQ ID NO: 102202 - DNA, 501 bp, Homo sapiens
gtctcaacaaatttttaaaactcaaaatcataccaagtatcttagaacacaattgaataaaactagaaatcaataacaagaggaactctggaaactgtacaaatacatggaaattaaacaacatgtgcttgaatcaccaataggtstattaagaaattaaaaaggaaatgaaaaaatttcttgaaacaaatgaaaataaaaatacaatatacccaaaccaatgggatgcaacaaaaacagcaccaaggggaaactttatagcaataaatgtccacattataaaagtaaaagtattttaaatatgaacaacctacttatgaacctcatggaatgagcaaagaaaatattacatctgaaattagtagaagaaaggaaataataaagaacaggccaaaactaaataaaatagaaacaagaaagcaataaaaagatcaatgaaataaaacattggttttttgagaagttaaatcaacacaccatcagctagactaggaaaaaaga

SEQ ID NO: 102203 - DNA, 558 bp, Homo sapiens
ataagcacacacctgttttggatccctgccagtgaatgtgtggggaggaaacaaacaaacaaaaaatctttgaawgatgttcattttttgagcattttcccttgaaaagggacagactgtcatgccagtgagacattttcatcataatgggacagaatccacaaaaacacctggatacatagggctactgttcacatcctccttttctttttatccatactcttattcttttggtgatttcattcatgcacccatcttgaaacaacttacgtaatgaggattctcatatttgtatatgcagactagaacactcccctgcatttcagatttataaactcacctgtcttcctggcaattatatctgaatattagaaatcccaacatgaatatgttcaaagaaactgagctcatgatctcactcccaaacttgttgtaccctcagccattaactgaaatgctaacatttcattgatgccaacagcattcttccagtttctcatgcaaaattctttcttttccatttttttcttttcactgtgtcctagatgtttatcatgc

SEQ ID NO: 102204 - DNA, 594 bp, Homo sapiens
gagcttaagtggtgttctagacatgagatcattttattgctaggttgcagtaggaggaattttccttaatgtcyggaaacaggagggcattgactctgtttctaatgcagggacacctaatagagctcaatttgcttgccaactctgcttgagtggtagtggctacctggagcactcaggaggggccttaaggccagagccaggctctggtggaacaatgcttgattgattagtgatgtctgtcttgggtgtgtaatggtaaaggcagcatgtgtgcctcctatttggaatttttgctttgggatgcttttccttctgtaggtgtatcaccaccactgacatccatttaacaatctatgcattagactccaagtcttttagctcttctgctaaggagatttcagcctaaaagggatggcaaaacagttcatcaatcatatttttttctaggtcctttggaatcggctaagtttacaattcaaggggcattggaatacttttccactggcttgcctcacttaccaaaatgcctacagaagttatgccggagagaacagaccttaatttttaggtttatcctccccaaatttacaa

SEQ ID NO: 102205 - DNA, 594 bp, Homo sapiens
gagcttaagtggtgttctagacatgagatcattttattgctaggttgcagtaggaggaattttccttaatgtctggaaacaggagggcattgactctgtttctaatrcagggacacctaatagagctcaatttgcttgccaactctgcttgagtggtagtggctacctggagcactcaggaggggccttaaggccagagccaggctctggtggaacaatgcttgattgattagtgatgtctgtcttgggtgtgtaatggtaaaggcagcatgtgtgcctcctatttggaatttttgctttgggatgcttttccttctgtaggtgtatcaccaccactgacatccatttaacaatctatgcattagactccaagtcttttagctcttctgctaaggagatttcagcctaaaagggatggcaaaacagttcatcaatcatatttttttctaggtcctttggaatcggctaagtttacaattcaaggggcattggaatacttttccactggcttgcctcacttaccaaaatgcctacagaagttatgccggagagaacagaccttaatttttaggtttatcctccccaaatttacaa

SEQ ID NO: 102206 - DNA, 594 bp, Homo sapiens
gagcttaagtggtgttctagacatgagatcattttattgctaggttgcagtaggaggaattttccttaatgtctggaaacaggagggcattgactctgtttctaatgcagggacacctaatagagctcaatttgcttgccaactctgcttgagtggtagtggctacctggagcactcaggaggggccttaaggccagagccaggctctggtggaacaatgcttgattgattagtgatgtctgtcttgggtgtgtaatggtaaaggcagcatgtgtgcctcctatttggaatttttgctttgggatgcttttccttctgtaggtgtatcaccaccactgacatccatttaacaatctatgcattagactccaagtcttttagctcttctgctaaggagatttcagcctaaaagggatggcaaaacagttcatcaatcatatttttttctaggtcctttggaatcggctaagtttacaattcaaggggcattggaatacttttccactggctwgcctcacttaccaaaatgcctacagaagttatgccggagagaacagaccttaatttttaggtttatcctccccaaatttacaa

SEQ ID NO: 102207 - DNA, 428 bp, Homo sapiens
cagctcccattgctgtcagcacagctgtacaacaaaaaggagaaccagtttcaggatgaggccaacaaggtgaacagtgcagtagaacacagcaaggatgtcagtcctggaggaggcacctgcagagccgggccctwccaagcagagtgaagaagtctttcagaggcaaagcctcccagagaggagttcagtacccagaagagtaggtggacgtgggcctggaagggccaagcatgagcccagagcctcctatgcctgcccaaagtcttaattttatccccaaaatgaacttttaaggattcaatgcttaggagtaacatggccagatatgcattttacaaagattactccagggaccatgtcggtgcaaggctggaaagcaggagaaaggctacagtaatccaggcaagaaattataaagtcttaaa

SEQ ID NO: 102208 - DNA, 638 bp, Homo sapiens
cactacattcttaattgagattatggtcattgtaaagcaartccatttaatagtaattttccaccttttttattctgctacacctcatatgtaaatatgtacaataagaattccatgggtacacctagcaagaggcatcattcaatataccctccaactcacattttagtttctcaaaaactttcatcccaagaagaaaacacatactgactaatgtgtcctccccactctatctcctccacttacgtcactggacatctgtccttgatcttttaatttgtgtcagactaggccagaaacactatgtgggcaaagaaaaagaccattactgttttacatttatctctcctcatctgggaagttgagatacacaggtgtgtgacaaaggaattttggaaaaaaaaaattagaagctaggggatgtcatttatgcattatccaaaatctattttattccaacagtaatttaactgtctaaatccacattcacctatgaaatggtttcatatgtgagcatatgtattacagtagaaaaaaggcaaagaaccacagttgttaggtaaatctcaactgctttgagatctcttagtgtagtcctgccaggaaaagcaagcccaactggaaaatgtttttccctc

SEQ ID NO: 102209 - DNA, 308 bp, Homo sapiens
gtttttgcatgttcaactctactaggtaatgcgaaattactttccaaatagtttcatcaatttatactcccattggcagtggaagagagttccatgcctccatatcctcaccaatacttggtgttgtcagactttttaatttttgcccatctcattagggtgtaattttgtatcwtgtggctttcatttgcatttccctcattactaatgaagttgaccctcttttcctacacttgtaagtcatttatgtttcctcttctataaaatctctgtttatgtcttttgcctttttaaattgtcattttctt

SEQ ID NO: 102210 - DNA, 368 bp, Homo sapiens
cttcgtgtagcagcagtaacataaaaatctgtcatacatacgatttttgggagaagagatagattgtgctgmaggctttttagaaataaacatgtcctcatcacagcatttttagctttttatctcatggaaggtagtactcataaatcaaactaccaggcctagtgattccagcctctgagctaacgggtctgtaaaaagttacttcatttctctaggcctcagtttcccatgcataaaattggaatttggattaaaacagtgctaattataaaactaaatgttcattggatctgtattctatgttcaggatagctatatttgtgaactatgaaatttagcctattcactgacaattttattttttc

SEQ ID NO: 102211 - DNA, 424 bp, Homo sapiens
acatacatcactgttataccttgacctgacatagccttaactcgaattcacttcagtatgctatcagcacagccatcttttgtagctcatctttcttccagattttccacccttaggatccttaatgctgaaattatacttcttgaccacaggtcaagtyccccacttcctcattctttctgaatgttgtttactgcgtcatgtattccagttcctcaactctctgtatcttccaggccatctgctgtttattcacctccatactgaacctagacgtcagagtcagctctttgaatcgtgttctcaacgctgctttagaatctctaactgccttaaccatctcccggcttggtaacccttagtcaattttattttaaaatcctagaggattctatgagtgttgttttagtatgttataaaaccg

SEQ ID NO: 102212 - DNA, 508 bp, Homo sapiens
ttagtgctggaccaaaaacaaaacaaaacaaagatcccgaaacttaaagaaattgttgtggatgcacgatgattttgtagctcactgtagctattggggacttagcactccagaaaacagcctctcagagtgatggtcactgtcagtgaatagactttgagtgaagggtgtaattgcagcctatactggaataaagtggatgtttctgtatcggtgccaagtcagcccacacttagtcagcatgcagaaggaggctcaccgtgatgctctctctcctctgggagctttgccaattaagcatcctcacttgcagaggttataatgayagatcttgagatgagaaaaaatgataatttcactgtattatataatagtcttaacgttctgcatctggggcttttaccctatttgcatttgaatatgtgtttttacaattcgggtgccacattgtgggagggtatttggcaacatttggaacatagaaaatatatccagtgtctctccttgg

SEQ ID NO: 102213 - DNA, 559 bp, Homo sapiens
agaccgggaatatttttccttctaccagagaaaaataaaattgttttcatcaatactgtttttaagttaattttttaattgacaaatagtaattgcatatatttatggggtacaatgttttgatatatgygtatactgtggaatgatgaaaacaagctaataatattttttaattttaaataaaagcactgtattttgcaatcccaatgtatgataaaattttatattgctagcatacttcagtactctactcagatgctaccttctttagaaaaacttttctggtggaatttaattaatcactccctccttcatgttctgcttggtgtagcactttacccgatctggtttgtattatggtttgatgaatgcttgcctggctttccacactagattttaacactggatttctacactagattttagcaatgcctagcacatgctctgtgtttgtttaattaaatgaatgaaggtaaccacactgtccttgagttttaccaactgtggaaataaaattaagtcccatgagcattagctgcctctgaactcctacctgttc

SEQ ID NO: 102214 - DNA, 295 bp, Homo sapiens
attccaggcaaaggttggtggagatgccagtataaaaattagagaaatggacaggtgaaagaaatttcagaggcagaattgatagagctaagccattgactggatgtagaaccagtgaggctgaagaaacccaaagacgactgatcaccaattcatctcttcactcacatcctacycactgtcaccttgtcgtaaacttccagactaccttcacctctctcttcaataacgtgagttatttgttcaaagtctgccttttctgttagaacatgagctcactatagcagggacagtg

SEQ ID NO: 102215 - DNA, 493 bp, Homo sapiens
gtgaattcagctttgggtctatttcatccattctggaaggtccttgggtcactgatctgaggcattcttgatgtggttaggacttcccagcattattttttttagatcctgtttatttaaaatgaaaaggattagcatgagggatggtaacattcctttttgatatctgtagcagcaagttttcttatgattcattattcttcttcttacagctttaaatcatctaggaacttcatataaaatttaattccagtttcaactagttgtggagcatttgatccaaaataaaatgaaagtcctctctgaagytgtagaggagactcaagaatcagaacaacctgaagttctttaagctgtcagttgaaggactaggtaaaaaacaaatatcatttagtgtgatcattaatgcacatgagtcattattccatgtggttgctgtcgactggtcaggggcacttcaagccctaatctgtactttgtcctgtctctctac

SEQ ID NO: 102216 - DNA, 527 bp, Homo sapiens
tttctacttttcccaattagtatttgtgtttcraccaccctgcatggaaacatgggttatgaaatgccttcacaagtatggtagaaaatatgctgctattgtgtgttgccttggacttctagaagtctaggtgttggtggttattatatggcgatagtaaagtaaaatcctccctactgttctagtacccacaatactacttttcatactttagctactttaccttcagtctctctgtcaacctctgatctaaagacttctttactaaataacattcttcttgcctaatactgtattatggacttcatcagggaagggactaatccatctttgcatgctaacgtttaagctgaaataaagtaatccctcaattaacattttgcagaaacctccttaggttcccctacaaacctgcccctattttagttaatagaatgcattctcactgacatgctggaaatttcagcattgtctttggtcctccctccagtctaatctgaatctcacaagtcatcaaggcctgtggc

SEQ ID NO: 102217 - DNA, 527 bp, Homo sapiens
tttctacttttcccaattagtatttgtgtttcgaccaccctgcatggaaacatgggttatgaaatgccttcacaagtatggtagaaaatatgctgctattgtgtgttgccttggacttctagaagtctaggtgttggtggttattatatggcgatagtaaagtaaaatcctccctactgttctagtacccacaatactacttttcatactttagctactttaccttcagtctctctgtcaacctctgatctaaagacttctttactaaataacattcttcttgcctaatactgtattatggacttcatcagggaagggactaatccatctttgcatgctaacgtttaagctgaaataaagtaatccctcaattaacattttgcagaaacctccttaggttcccctacaaacctgcccctattttagttaatagaatgcattcycactgacatgctggaaatttcagcattgtctttggtcctccctccagtctaatctgaatctcacaagtcatcaaggcctgtggc

SEQ ID NO: 102218 - DNA, 572 bp, Homo sapiens
taattttagggcagtagtacagtacaatgcaaagtataggcttttgaactaaattggcctgggttcaaatatgagccctctcacattctattaggttgaaccatataaaaatggagatattcaatcatttttttacagtttcacgtagttcatctctgtattctagwggtaaatcattttaacctaagtttcatttccttctgttgttagtttttttaatggtgctaatacccctacctttcagggttgtaaatgaaaagatgttaaaaaaaaatacctgacatatagtgggtgttcaataaatgttagttttcccaaagatagtcagatgcatgaatcataataagaggtatttctggtcaacactaagcttaagaatccaagaaaagatatatcaaaatgagacatctttgggtttggatagtgggggaggctgtatatacacaggtatgtatgtaggggcagggagtaaatgggaaatctctggctcttctgcttaactttgccgtgagcttaaaactgctctaaaaaacaaaatctgaccaggcctggtggctcacacttgtaatcct

SEQ ID NO: 102219 - DNA, 572 bp, Homo sapiens
taattttagggcagtagtacagtacaatgcaaagtataggcttttgaactaaattggcctgggttcaaatatgagccctctcacattctattaggttgaaccatataaaaatggagatattcaatcatttttttacagtttcacgtagttcatctctgtattctagtggtaaatcattttaacctaagtttcatttccttctgttgttagtttttttaatggtgctaatacccctacctttcagggttgtaaatgaaaagatgttaaaaaaaaatacctgacatatagtgggtgttcaataaatgttagttttcccaaagayagtcagatgcatgaatcataataagaggtatttctggtcaacactaagcttaagaatccaagaaaagatatatcaaaatgagacatctttgggtttggatagtgggggaggctgtatatacacaggtatgtatgtaggggcagggagtaaatgggaaatctctggctcttctgcttaactttgccgtgagcttaaaactgctctaaaaaacaaaatctgaccaggcctggtggctcacacttgtaatcct

SEQ ID NO: 102220 - DNA, 565 bp, Homo sapiens
tatggcactacaatcacaaaaatatttgtgtgtaaaatttctttccttgtcaattaaacaaagcatcccatcttgataaaccaatatgaaaycaataccaaatttataattaaaaaacaataaatcaattaatttttcaataaagtatcatggcagagagtaggggccactaatattaagtagactttcaagttcactttgtattctttgctaacactggaattcaatgcaataatttaaaaattgaccagattccatcccccctacccccaacacacagccacccactgtaggaaaactattttttagtcaaactacacatccttcaaggatattcccctgcactatctactttgttcaaatcatattcctaggttcatttgaacaattacactccttctgcaggatggtcctagagtattcctgaaaaacatttcacattagcaaatcggggtatgttaaattgttcacggtttatttcaaagattagactttgtttttatgtaatgaatagaatatatttcacttagcatgacctgcaactttattatctgtatcaccactc

SEQ ID NO: 102221 - DNA, 580 bp, Homo sapiens
agtattggagtaattggatatccataagtacaaaatcttttacaaaagatcctttaactaaaactcacatattttataaaaaawtaactaaaaatagggtcatgggcctaatttaaaatgcaaagctgaaaaactttttagaaaaaaataaaatagtaaagaaaaaatcttgtggctaagacatagggctaggtgaagagttcttggtcttaacactaaaagcacaatccataaaataaaaactgataaactgacatccacaaaatgaaaactttttttttctgtgaaaactcatgtgaagagaaagaaaatctaagctatagactgaaagaaaatattttcaatccatatatccaacaaatgtatttcatctaaaatatataacagactctcaaaactcaacagtataaaaccaaattgtccaattagaaaatgggcaatagatgaagagaaattttccaaatagtgtatacagttgataaaaagcacataaaaaagatgttcaacatcattaaccattagggaaaggcaaattaaagccatagtgagatatcactacacatttagaatgaggaaaatc

SEQ ID NO: 102222 - DNA, 528 bp, Homo sapiens
ttttcattctcctttacttcccacccactccttatcagtagctcttcaaataggagatgtttcactcaaataagcagaagactatgttagggtttcrggaaataacagagaattgtacagacagtgccaatcaggcagcgctcctgggggcatggatggagagcaccgatttttaccattccagattgctacatgccacccccatctggagcgggaggcaggagggggaaaggtaatgatctggttctttgagcccatgtttttctaactgaacacagatgtgttgttatgtgttcctctagcttttcctgggttttcttctggattttttttaggtccctttaaaaatgtcataggttttgatatgcattgaagggaggtaagaaactcatattcatatgtgtgtgtataatcattacccagaaacttattttagatacatgggtgaggaggaactctgaccactgcccctctgggctccccataccgccctgcacaggccaagccttctcaccttgctggcctttc

SEQ ID NO: 102223 - DNA, 528 bp, Homo sapiens
ttttcattctcctttacttcccacccactccttatcagtagctcttcaaataggagatgtttcactcaaataagcagaagactatgttagggtttcaggaaataacagagaattgtacagacagtgccaatcaggcagcgctcctgsgggcatggatggagagcaccgatttttaccattccagattgctacatgccacccccatctggagcgggaggcaggagggggaaaggtaatgatctggttctttgagcccatgtttttctaactgaacacagatgtgttgttatgtgttcctctagcttttcctgggttttcttctggattttttttaggtccctttaaaaatgtcataggttttgatatgcattgaagggaggtaagaaactcatattcatatgtgtgtgtataatcattacccagaaacttattttagatacatgggtgaggaggaactctgaccactgcccctctgggctccccataccgccctgcacaggccaagccttctcaccttgctggcctttc

SEQ ID NO: 102224 - DNA, 528 bp, Homo sapiens
ttttcattctcctttacttcccacccactccttatcagtagctcttcaaataggagatgtttcactcaaataagcagaagactatgttagggtttcaggaaataacagagaattgtacagacagtgccaatcaggcagcgctcctgggggcatggatggagagcaccgatttttaccattccagattgctacatgccacccccatctggagcgggaggcaggagggggaaaggtaatgatctggttctttgagcccatgtttttctaactgaacacagatgtgttgttatgtgttcctctagcttttcctgggttttcttctggattttttttaggtccctttaaaaatgtcataggttttgatatgcattgaagggaggtaagaaactcatattcatatgtgtgtgtataatcattacccagaaacttattttagatacatgggtgaggaggaactctgaccactgcccctctggsctccccataccgccctgcacaggccaagccttctcaccttgctggcctttc

SEQ ID NO: 102225 - DNA, 593 bp, Homo sapiens
gatctcctgtcttcttttaagtttttatttatttagttttgagtggagtaatcacactcagtgaaagaggcgtggagggttagaacacagctgaccagggagactctgggatctcctgtcttcttttaagtttttatttatttagttttgagtttacatacagtaaaacycactcatttggtatacagttctaggagatttgatgaaggtgtagaaacttaaccaccaccacaatcaagatacagaacaactccatcaccccagatgattccacatgctgcccttctgtggccagccctgctccactcatctatcctccacctctgttgccttttccagaaagaaaggtttcagaatgaaaccacagagaaggacatctttgagtctagctactttcagtggcataaggcaaatccatcagtcctgttgcacgcgtcaacagtgtgttcctgtttattactgagtagtgttccattgcatggatatgccacagcctgcttatccatttgcccacagaggagtttggtttaatcgattttcagtttgaagccattatgaatagagccgctacaaatatttacatacttagaaag

SEQ ID NO: 102226 - DNA, 593 bp, Homo sapiens
gatctcctgtcttcttttaagtttttatttatttagttttgagtggagtaatcacactcagtgaaagaggcgtggagggttagaacacagctgaccagggagactctgggatctcctgtcttcttttaagtttttatttatttagttttgagtttacatacagtaaaacccactcatttggtatacagttctaggagatttgatgaaggtgtagaaacttaaccaccaccacaatcaagatacagaacaactccatcaccccagatgattccacatgctgcccttctgtggccagccctgctccactcatctatcctccayctctgttgccttttccagaaagaaaggtttcagaatgaaaccacagagaaggacatctttgagtctagctactttcagtggcataaggcaaatccatcagtcctgttgcacgcgtcaacagtgtgttcctgtttattactgagtagtgttccattgcatggatatgccacagcctgcttatccatttgcccacagaggagtttggtttaatcgattttcagtttgaagccattatgaatagagccgctacaaatatttacatacttagaaag

SEQ ID NO: 102227 - DNA, 593 bp, Homo sapiens
gatctcctgtcttcttttaagtttttatttatttagttttgagtggagtaatcacactcagtgaaagaggcgtggagggttagaacacagctgaccagggagactctgggatctcctgtcttcttttaagtttttatttatttagttttgagtttacatacagtaaaacccactcatttggtatacagttctaggagatttgatgaaggtgtagaaacttaaccaccaccacaatcaagatacagaacaactccatcaccccagatgattccacatgctgcccttctgtggccagccctgctccactcatctatcctccacctctgttgccttttccagaaagaaaggtttcagaatgaaaccacagagaaggacatctttgagtctagctactttcartggcataaggcaaatccatcagtcctgttgcacgcgtcaacagtgtgttcctgtttattactgagtagtgttccattgcatggatatgccacagcctgcttatccatttgcccacagaggagtttggtttaatcgattttcagtttgaagccattatgaatagagccgctacaaatatttacatacttagaaag

SEQ ID NO: 102228 - DNA, 593 bp, Homo sapiens
gatctcctgtcttcttttaagtttttatttatttagttttgagtggagtaatcacactcagtgaaagaggcgtggagggttagaacacagctgaccagggagactctgggatctcctgtcttcttttaagtttttatttatttagttttgagtttacatacagtaaaacccactcatttggtatacagttctaggagatttgatgaaggtgtagaaacttaaccaccaccacaatcaagatacagaacaactccatcaccccagatgattccacatgctgcccttctgtggccagccctgctccactcatctatcctccacctctgttgccttttccagaaagaaaggtttcagaatgaaaccacagagaaggacatctttgagtctagctactttcagtggcataaggcaaatccatcagtcctgttgcaygcgtcaacagtgtgttcctgtttattactgagtagtgttccattgcatggatatgccacagcctgcttatccatttgcccacagaggagtttggtttaatcgattttcagtttgaagccattatgaatagagccgctacaaatatttacatacttagaaag

SEQ ID NO: 102229 - DNA, 584 bp, Homo sapiens
cttctgagatcttttttcctcaagccacaaagaaaaagtaaaattgtgattatcctatgagaagtttaaatatagcatagaaatatagatttactcaagagaaagggaactgaacccaatcctgccttctcccaatggtaagtcatgtgacctrtggctgattacttactgtccaagagtatcatcagtttacagaagaaaggctaacaagggataatgacacatctttccttttatttacctagttctcaagaaaattagttctctgtcatcttcaggtgaccaactaccttgagctttaattgatttcaattcttacccttattaaaaagctcaaattgtcccatgtagaagtcacttcatatcagctccttgaaactgtgtgcattgccctactagtcttttgcatgtcccatgccctctgatgtcaagatattctaggcacaagcaagaaatcagctgtttctccacgaatccttagttttcctattgaggaatgaattttaacaccagagtctggatttgctttttatactgggttggtcacatttttctaaattttcagtggacagaactaggtaaaa

SEQ ID NO: 102230 - DNA, 587 bp, Homo sapiens
tcatttataaaaagaaaaaagctgctaatatatgctacataatgggtggacctcaaaaacattatgctaagtgaaagaagtcaaacacaaaaaaatacataatgtgtgattccatttatatgaaacgtccagataaggcaaacctatagagagtagattaatggctctctgagctaggggatgggattgagtactgactgcaaacaaacataagagatattggggtaataaaatattctaacctggtttgagttgatggttgtaaaagtctgtaaatttcctaagaatcattgaactgtacacttaaaacaggtgaatttaatggcatgtacattatgctttaataaatctagtgagaaagagagagagattcaataagatgttcatccaatgtcaattgacactgagtamcctggagctggctcaggaattcagctagctgaagcaatgcagctgtgtcaggctgctactttcttaatttgggctgagtcacttccactccacccagatacataagattcatagcattcctgccagcactcacagtctttttacctgtaggctagcagtgtatgacagatgctgac

SEQ ID NO: 102231 - DNA, 592 bp, Homo sapiens
ggtttaaaggtcattcttgtgtgtgcatatgtgtgggtttgtgattttataggccggtaagtactgttacattactcttatctcagcaattagaaaaaaattcgtaatatagaaaagataatttttggcttataaaagctatataggaaatgtctttaatacataatgcattattaacaatgtgtattaacattgattgaaaaacaatgcacttatgtattatgagggtagtgggtagtgaattcaggcatagacagtgaaaatgtcctcaatatgtcctcaattatattttgccttttacacacrtttcaataatttatttctagaacttcagatatgttcttgtttgttatcttcttattcactgctgaacaaacacttgactggcataagcccaatgattttcttgttgatttaccacttttagcactcagagtaatttccatctttgtctcaactgtgttaggtttatgagatctacacttcttgtatcagcattttcatcttccatttgtttttataaaataatgaagacagaaggcaataaaatattccaaacatacaaacactgctatacgaatatcctgccaaa

SEQ ID NO: 102232 - DNA, 602 bp, Homo sapiens
atttaatactataaaattcttcaattttcggtgtagagtagaatgagttttcacacatttattcagcattgagatagccaccaaaatcaagatgtaaaatgtttcaacttccaaaaawtttcttcctgcttctttgtagacaatcctcttaccctatccccagaccttggcaacaactgattcatccttatgaaattgtctttgtaggactgtcatggaaaaggaattctgtaataagtgccttttgtttctggcttttatcactcagcaggctacatttgagattaatccatgaggttaaatatgtaagtagttcactcctttttttcctttttaatccattgtatggctgtaatacaattgagttgcttctggtttgggcttctatatttattctatatatatatataagatatataatatgtaaataaatataatgtatctataaagctttatctatagataaagatatattacacctttatacatatcttaatatataatatatataaagctttatctataaagatatattacagctttttacatatctataaagataatacacagctttatacataatatatatatttattcatatt

SEQ ID NO: 102233 - DNA, 585 bp, Homo sapiens
cccttcttctgctgtagagctaagaatgagacacaacttggtttctccccttttccctttccctcctgccagttctctacctatgtctcacattgtctaaaacccatggaaactagtcagcaaaggagtctgctagctggaatttgcaagctaaagagggagaatatatcttagttcaatcaggcaataactgactctaatggttagtgacagaaatgaccctgaataggatgatttccatggcacacaaaacttcaactgctcacttttagaccacaagtatttctcctctgctatcattctaaccttgtaattcctatagctcaggggccttgatgattcaatcctttgagtctgtctggttcttcagtggtcctacttacaggaggaagttattctaaaatctcccttccatccaattaattagaccaataaacacttttcaaaggttctatcttcccagtgtcatcagatcttttctggcayacaaagccatccatagcctgtcctcagcctaatgccccagagtcattttacactgctcttccttggtatatatttgctgctcttgactttacacaaaat

SEQ ID NO: 102234 - DNA, 604 bp, Homo sapiens
aaagatgatccatagtaggtaaaggggtgttatggaaaattttaagtagagaattggcatgctccagttcagactcttgaaagataatagtarggcagtgtgttagagcgacagggtaaaggaaagctgaaggcaggaagattagatataaggttttagaaagagtcagaaatatactcttgcacgtgtgtgtgtgtgtgtgtgtgtgtgtgtgtgcatgcacatgtgtagtgataggtaggttgtccaagctataggctcaagaaatagctcatctcagccctactgcacatctgcaaaattctcccccattaatatgtagttgcctgcctctaagctgaaaaatgatgaaggcatggcaaagaattgttgtaatctttatacattttaatttacttcttaaataaacatataagagccacattatacaaatatttaatagcttccaatgcccagatgatggaaaatatctccctcagcagtagcattccccacctgagttcaggtaattctttcattatgcaaaccaccttgacctccgaaaccatatgttattctaataatgtgtttgagaatatggttgtgattttcatgtctctcaata

SEQ ID NO: 102235 - DNA, 528 bp, Homo sapiens
ttcacagcatctttcccaggagtggattccattccaagaaacctgtttctttgctcatccagaagaagcaactcttcatccrttcaagttttattgtgagattgcaatgattcagtcacatcttcaggctccgattctaattctagttctcttgttatttccaccacatctgcagtgagtttcttcactgaaatcttgaacccttcaaagtcatccataagggttgtaatcaacttcttccaaactcctgttaatgttgatattttgacctcttcccatgaatcatgaatgtacttaatgatatctagaatggtgaatcttttccaggaggtaaacgttgcccagatccattagaggagtcactatctatggcagctatagccttatgaaatgtatctctgaattagtaaaagtagaaatgactccttgatctatggactacagaatggatattgtgttagcagacatgaaaataacattaatctttttttacatatccaccagagctcttgagtgatgaggtgtatt

SEQ ID NO: 102236 - DNA, 528 bp, Homo sapiens
ttcacagcatctttcccaggagtggattccattccaagaaacctgtttctttgctcatccagaagaagcaactcttcatccgttcaagttttattgtgagattgcaatgattcagtcacatcttcaggctccsattctaattctagttctcttgttatttccaccacatctgcagtgagtttcttcactgaaatcttgaacccttcaaagtcatccataagggttgtaatcaacttcttccaaactcctgttaatgttgatattttgacctcttcccatgaatcatgaatgtacttaatgatatctagaatggtgaatcttttccaggaggtaaacgttgcccagatccattagaggagtcactatctatggcagctatagccttatgaaatgtatctctgaattagtaaaagtagaaatgactccttgatctatggactacagaatggatattgtgttagcagacatgaaaataacattaatctttttttacatatccaccagagctcttgagtgatgaggtgtatt

SEQ ID NO: 102237 - DNA, 614 bp, Homo sapiens
ttattgtataacatggtaagtatagtaaataatagtgtactgtatacttaaaatttgctgagagattttaagtgttttcaccataaaaattacaattatgtaaggttatacatatattaattagctgtgcttagccattcaacaatgtatacctatatcaaaccaacaatgttgggccaggtgtggtggttcatgcctgtaattccagtacwttgggatacctagatgggaggatcacttgtgctcaggaattggagaacagccttggcaatatagtgagacctcatctctactaaaatccagaaaaattagccagacatggtggcccacacctgtagtcccagcaacttgagtggctgaggtggagaattgcttgggcccaggaagtagaggatgcagtgagccatggtcctaccactgcactctagcctgggtgacagagcaagaccttgtctcaaaacaacaacaacaaaacatgctgtacaccataaatatctatgagtttcatatatcaattaaaaaataataaaggggtctgtgccgtacccttggcgattaggactcaataagtctggaatgtggctcaagcatgcgcatttagcaaaatggtcctc

SEQ ID NO: 102238 - DNA, 614 bp, Homo sapiens
ttattgtataacatggtaagtatagtaaataatagtgtactgtatacttaaaatttgctgagagattttaagtgttttcaccataaaaattacaattatgtaaggttatacatatattaattagctgtgcttagccattcaacaatgtatacctatatcaaaccaacaatgttgggccaggtgtggtggttcatgcctgtaattccagtactttgggatacctagatgggaggatcacttgtgctcaggaattggagaacagccttggcaatatagtgagacctcatctctactaaaatccagaaaaattagccagacatggtggcccacacctgtagtcccagcwacttgagtggctgaggtggagaattgcttgggcccaggaagtagaggatgcagtgagccatggtcctaccactgcactctagcctgggtgacagagcaagaccttgtctcaaaacaacaacaacaaaacatgctgtacaccataaatatctatgagtttcatatatcaattaaaaaataataaaggggtctgtgccgtacccttggcgattaggactcaataagtctggaatgtggctcaagcatgcgcatttagcaaaatggtcctc

SEQ ID NO: 102239 - DNA, 614 bp, Homo sapiens
ttattgtataacatggtaagtatagtaaataatagtgtactgtatacttaaaatttgctgagagattttaagtgttttcaccataaaaattacaattatgtaaggttatacatatattaattagctgtgcttagccattcaacaatgtatacctatatcaaaccaacaatgttgggccaggtgtggtggttcatgcctgtaattccagtactttgggatacctagatgggaggatcacttgtgctcaggaattggagaacagccttggcaatatagtgagacctcatctctactaaaatccagaaaaattagccagacatggtggcccacacctgtagtcccagcaacttgagtggctgaggtggagaattgcttgggccyaggaagtagaggatgcagtgagccatggtcctaccactgcactctagcctgggtgacagagcaagaccttgtctcaaaacaacaacaacaaaacatgctgtacaccataaatatctatgagtttcatatatcaattaaaaaataataaaggggtctgtgccgtacccttggcgattaggactcaataagtctggaatgtggctcaagcatgcgcatttagcaaaatggtcctc

SEQ ID NO: 102240 - DNA, 614 bp, Homo sapiens
ttattgtataacatggtaagtatagtaaataatagtgtactgtatacttaaaatttgctgagagattttaagtgttttcaccataaaaattacaattatgtaaggttatacatatattaattagctgtgcttagccattcaacaatgtatacctatatcaaaccaacaatgttgggccaggtgtggtggttcatgcctgtaattccagtactttgggatacctagatgggaggatcacttgtgctcaggaattggagaacagccttggcaatatagtgagacctcatctctactaaaatccagaaaaattagccagacatggtggcccacacctgtagtcccagcaacttgagtggctgaggtggagaattgcttgggcccaggaagtagaggatgcagtgagccatggtcctaccactgcactctagcctgggtgacagagcaagaccttgtctcaaaacaacaacaacaaaacatgctgtacaccataaatatctatgagtttyatatatcaattaaaaaataataaaggggtctgtgccgtacccttggcgattaggactcaataagtctggaatgtggctcaagcatgcgcatttagcaaaatggtcctc

SEQ ID NO: 102241 - DNA, 558 bp, Homo sapiens
tggagactattattctaagtgaagtaactcaggaatggaaaaccaaacactgtatgttcgcaatgatatgtgggagctaagttatgaggatgcaaaggcatgagaatgatacaatggattttgggaacttgtagggaagaattggaggggggcaagggataaaagactacagatatggttcagtgtatactgcttcggtgatgggtgcaccaaaatctcacaaatcaccactaaagaacttactcatgtaaccaaataccacctgtaccccaaaaacttatggaaaaataaaaaatatatgataaaataaatgaagaataaatcattagtggatacatattamaaaaattagaacgtgggtcttcttctagaagcagaaatacctgagttcaaacccagctccacagatttattattttctattctcagggaagtttcataaccttttttcttcagttaaatcatctgcaaaatgggaatactaatagcacacaacacatagggagatagggagggttaaatgtgcccaggcatagtaggctatatatatacacacat

SEQ ID NO: 102242 - DNA, 497 bp, Homo sapiens
gtgtatactgcttcggtgatgggtgcaccaaaatctcacaaatcaccactaaagaacttactcatgtaaccaaataccacctgtaccccaaaaacttatggaaaaataaaaaatatatgataaaataaatgaagaataaatcattagtggatacatattaaaaaaattagaacgtgggtcttcttctagaagcagaaatacctgagttcaaacccagctccacagatttattattttctattctcagggaagtttcrtaaccttttttcttcagttaaatcatctgcaaaatgggaatactaatagcacacaacacatagggagatagggagggttaaatgtgcccaggcatagtaggctatatatatacacacatatatatatatgtaggtttatataatgtatgattgtgtttgaatcctaaaaatattgttatttataaaaattaaaagcaatctagtcatttattttcaaattgaaattaattccattttaaa

SEQ ID NO: 102243 - DNA, 574 bp, Homo sapiens
taaatgttagacttgtttggatagtatgaaaggacaaagtatcagcactcagaaatgtcaacctttgaacctcgaacactttctgatttataaaaagaatccttccaaaaagatgcaggagccctaatgtaatcgttagatctgaagggggaaatctgttgaaaaaaaaaaaaaaaaaaaaaaaaggtcattcacaaatgacccatttaatacttgcaagttgtttaacattgaaatgataatatttgcttccacaataaaaagtccaaggtacctagccaagtttcaaactatccaggctttaaaaagtcaacccttytcccaatagaaggttaaaacaaaaatcagattgaaattatcaaatcacttatgttgtaaataaattcactttactttcaaaacattataaattaaggactggcttcaataaactgttttgatttatgtggctttttctactaattaaacaaaattaaccccccactccttccctcctttttttttccccacacacttttctggtgttaatggcaaaacatctatcaaatatttttagaatttcctctcctcccac

SEQ ID NO: 102244 - DNA, 574 bp, Homo sapiens
taaatgttagacttgtttggatagtatgaaaggacaaagtatcagcactcagaaatgtcaacctttgaacctcgaacactttctgatttataaaaagaatccttccaaaaagatgcaggagccctaatgtaatcgttagatctgaagggggaaatctgttgaaaaaaaaaaaaaaaaaaaaaaaaggtcattcacaaatgacccatttaatacttgcaagttgtttaacattgaaatgataatatttgcttccacaataaaaagtccaaggtacctagccaagtttcaaactatccaggctttaaaaagtcaacccttttcccaatagaaggttaaaacaaaaatcagattgaaattatcaaatcacttatgttgtaaataaattcactttactttcaraacattataaattaaggactggcttcaataaactgttttgatttatgtggctttttctactaattaaacaaaattaaccccccactccttccctcctttttttttccccacacacttttctggtgttaatggcaaaacatctatcaaatatttttagaatttcctctcctcccac

SEQ ID NO: 102245 - DNA, 554 bp, Homo sapiens
cctagttgtttccatgctaggaggccatcatgcctgggagatgtgttggtccaggcctggaagtggccccatcatcccgtcacagcccattggccagaatgcagttgcatggctacacctcggagcaagagagtctgggaaatggagtccacctctttccaggaggaaggcaaggctggtttggtgaacagtcagtagtcctgccattctgtataatgatctgttaccttggagtaagaaagacaccttcctaccctcacagaattaacaagttcaggaagcaggcaggaaggcagacattgactcacaggatgagaaaggctaggaggagagtaaaaaggcaattgtgtgagcctggaggaggggaccctaatgcacgcagggagtgcatgggacttccaggataaagtgacaacgaccctgctctttgaaggttaagtgagagtcagccaggtgaagaatcagggagagcagctgggcagaagcagcaatgggcaagcacagtgggcacggggkctgtgtgtctccttcacaccttagttccaaggcgctca

SEQ ID NO: 102246 - DNA, 551 bp, Homo sapiens
gaggctagctcccccggggcaggcatgaaggagccaggccccacaaagggactgagactcaaggacccccaggtcctgcccacctggtacttctgtcttgccagggcagctgcctggcaaaccctgcccctcccagscctttgaaagctgtctgctccttgcagacttgatcctgggggcctctcagacctgggctttttgctgatgtgggcatccagccccaggccaagtttaggcctccctttaaatccacaaggagcgggtggggagtggagaggcctgctttggcactctgggcaaaaagagttgctaagatcccagagcaggcctgtccccaaaaaacggccatgtttggtgagatgaattaggtcatccgttaagctttgtaactcattgctaaaatccgtcttctggaattagcacaatgctattgaagggaaccaagtgggttggtgctatcaaagggaaccaagtgggttggctgcaggcttgagaccagaaccataagtctttctagtgagtaaccgtaaatggggtggggccgggggagt

SEQ ID NO: 102247 - DNA, 626 bp, Homo sapiens
tgtgttttctcatcttgttactctgtggtccttgtacctgtaggggaccctccttggtccccaggaatcctggaaccaaaatggggaacacctcaatgaaatgaacccctaaaatatctctccctatcgcccacccccagccagctatgtagctaatgcttatcctgcctaagttgtcttttgccggctcttctaaacatcctatcactggactcttttaaacagctgtattgaggtrtatttcatgtattatagaaattaattgaattgaattgaatttgaatttatataattcagcagtttttaatgtagtcacagagttatgcaactatcaccaaaatctaattttagaacattgtcatcaccccggaaagaaaccccatgcctgttggtagtcatgtctcattccagaaacaaccctccccgtgtcccctcgtccccagccctgcagcctaggcaaccatgaaactgttttcatacaataaatatattgtatttttgtgattgacttctttcacttagcataatgttttcaaggttcatctatgtatggctacttcattcctttttaaggctgagtaatattccatagtatgaatatgccacattttgtttatccattcatc

SEQ ID NO: 102248 - DNA, 656 bp, Homo sapiens
gcatccaaaagaataaaatacttagggataaatttagcaaaaaaaagtataaaacttatattctgaaaataacaaagcattgctgaaagaaattgaaaaagatctaaataagaagaaagacatcccatgttcaggaatgagaagagttgatattgttaagaggccaatactcctcaaactgatctctgaacttccacgcccagttcagggaacrcagccccagaaggatgcatggcgcagtacctccttgccagctctctctgagaggagagagaagggagacaatagtcaccgggtccccagggctgcctcggcatctggtgggtgcttgaacatgtgtatcccttgcctggttgtctgcagagagtctgcaagcccccttaaagcctggaatttatatgcataggaaggggtttagccaagcccattgcattgaagtgtgagaggaggcagagtgaggctttggcaacaggcttgggtctaggtgtgatttggctctgccacttgcttgctgcatgacctggcacacctcttatcttcgctgtacctctgtgtccttgtttgcaaaataggaagaataatatcttttttgcaggattgtcataagaattaagagagaaaatggacataaagtgctcagcgctctctgagtacta

SEQ ID NO: 102249 - DNA, 483 bp, Homo sapiens
gtttgcaaactcccaggatctcatgctgcccaggacatgtcattcagccaggaatgggcatggggtccrcaacccctcttggacagtgatctagatcagtcttttctgggctccctccaatgctccagtccaaaaagtgaggcaggaagtgcgtactacacggccatcacagcttgagccagaacctagacatgccatgctcagtgcttctaaccatcagagtaagacagctcccagcagcccaaggtccccagagtcaaagtagatgagactgacctctcctttctttttccttcccaacatccaatccatggagcaaggaaatcatcattattagttaaatggatttaccagcatggaaatacgatgtttaattagtgctatgattttataacttctttgttcatgtggccaggtgatcagctaaggacaaaattctctaacacttattttctcaaaataacatctaattagtaaaatgaa

SEQ ID NO: 102250 - DNA, 655 bp, Homo sapiens
tctaatccaaagtcataaaggttttctactagaagttttatagtctcagattttgtgtttaggtatatcattcwttttgagtatatttttatatatggtgtgaggtatgaattgagattcatttttttgcacacaaatatgcagttgctcaaccatcatttgttgaaacaatatcttctccaatgaattgcctttacacctttgtcaaaatcaattatccatatatggagacagatagatagatatggaggtatatgtgggtctattctgatctttctattctgtttcattaatctgtctattttaatgctaatatctcattgttttggttactgtagctttacaatgtcttgaaatcaagtagtattagaactccaacttgattattctatttcagaatgagcatactttccaatgtattttatgaggttagcattacccctatataaatctagccaaagacattacaagacaaagacactatagatcaatattctttgtgaacttagttgaaaaaattttcaaccaaattttagcatattgaatctaacaatacataaaaaagaaaatacataatgacaaagtggggtttatcccaaaagtccaaggttgatttaatgtttgaaaattattaatgtaattcatcatattaata

SEQ ID NO: 102251 - DNA, 492 bp, Homo sapiens
gcgtccgctttcgacagggcgttacgtagacccgactgtttttatttatttatttcgtggccgtctccctcccttcttggccaaactgcggcgctttgtgcaaacggggcaggtcccgcggggactccaccgggacgtggccccgtctccgcgcgttttggcaggcggggggctgcgtgtgtctgctcccctccctccccctctcccctcgctcccctctcccggtgacgattcgccgtaatgtggtggcaggaagcatgacgccgtgggccgaggctgcctctgctctcgtcgctcccggcggctgcaggcagcgggcgcgcagcgcgggcggcagccgagctacctggcgggggcagggccggagcgcggcgctgtcctcacccccgctcaggtgcagggggagtccgcgcggggcggggggccgagggsggccgcgggacccccggccctgctgtccgctgccagctggccggagcctctgccagcccg

SEQ ID NO: 102252 - DNA, 494 bp, Homo sapiens
gacacacacacaaaaggtagacattaaagcaagatggaagtatgttggaggcagagatggggtacatgctcattgcctgcatgctattttgcacacgtgtgtgtgtgtttgtgtcactccaagaaaccatgggtatacagtgttttgagtaggccagagttttacagctggacagacctagagtctagttctgcccacgccaacccccatcccttcccatcgttaactgtgtgggaaacagaataagggtagttataagtgtgggttcaggaatttagtttgcctgggttcaaattgtgcttgcattgcttatatcaatgaaatcttaggcaaattgtttggtctctctcaycctcagtttcctcacctgtaaaatggagatgataattatactgacctatatggctgttgtgacaatccagtgagataaatatgtttcaagtacttatctcagggcctgcagtgtaaacttgaatgaatcacagttgctagtt

SEQ ID NO: 102253 - DNA, 626 bp, Homo sapiens
ttctaccttggggccagtgtagttcaaggttgggctgatgatcttatgctaatttcctattttctctccatctatgtgtactttaaatcctttaaaatgtatgagatgtaaartgtaggagaaataaaaagaaattattttgcacacagatggtaatacatatatatgtaccatcaccccccaagatatggtcctaacataagtggatcccagagaggtctggacacttttgaaaatgatgaagccataaatggtagtgaatagagcatgcgagtgagtattgtgccatatcttcaagtttgatttcaggcaagcaaatacaacctccatggtatgagcctcagaattccttttggaagcagaaatccgagcaagattacagataaaaatgaccctccattggctacccagtgtcactgtagtgccttggttaaaataggctgccaaatcacttcaggagagttgtttaattccatcctgatcaaattttacaggtctgtgattcaaattattccatgttgtcggtttcaagacttcatcaggaatgaatttgttctgcttggagtccttagttagtgtttgagaaagacctctgtgattagccaaatcaaaacctttcagctgcg

SEQ ID NO: 102254 - DNA, 560 bp, Homo sapiens
ttatccctgaagagctgggcaatggactatgctcaaaaattttccccaaccaactttgaggccrtatttaaggctagggtctgttggcgggggtgcctgggggcgggtctgcattttaaacaagcaccccagttaattcagttacaagcaggacttggtcaaaaaaaattttatatggtgtgaaacttgatggagcagaacaaggaaaagattctccattgattctctgccaggtacttgatagaaagcaatactttttgagggaaatcctggctgtgcagggagatacctttataatccacttcctggtcaggcttctttctttccttcatgcaatatcactgcccttagctacccaaacacacataagatgaataaaatatacagctgtgcctaggttgggcacacagaatgccagccactgaggcttctgctaacagcatagccactcactgtctgccatccagcacccacccaaagccagcacaaagagatgatttcagagaggtttgtctaaagcactgtctatccactcagtcctttatatatcctaaaggaaa

SEQ ID NO: 102255 - DNA, 560 bp, Homo sapiens
ttatccctgaagagctgggcaatggactatgctcaaaaattttccccaaccaactttgaggccatatttaaggctagggtctgttggcgggggtgcctgggggcgggtctgcattttaaacaagcaccccagttaattcagttacaagcaggacttggtcaaaaaaaattttatatggtgtgaaacttgatggagcagaacaaggaaaagattctccattgattctctgccaggtacttgatagaaagcaatactttttgagggaaatcctggctgtgcagggagatacctttataatccacttcctggtcaggcttctttctttccttcatgcaatatcactgcccttagctacccaaacacacataagatgaataaaatatacarctgtgcctaggttgggcacacagaatgccagccactgaggcttctgctaacagcatagccactcactgtctgccatccagcacccacccaaagccagcacaaagagatgatttcagagaggtttgtctaaagcactgtctatccactcagtcctttatatatcctaaaggaaa

SEQ ID NO: 102256 - DNA, 632 bp, Homo sapiens
gcatttaccgagtgctttctcccacattgcctcatttgatcttccagagggtcatggggaagacaaggcaaaaattgttcttatttctatttaatagcaggaccaggtgagctggcaagataacacggctagtaagtggtaaacttgggccttcagcccctccatccaagctcagtgctcttaccatacccyatacaatcctacctttttgcttctcccctagcttggttttactttgttttgttaaatattacaagattcaatatctgcataaatgcctttaagaaatgggagattcgaaacaaggaagaatgaggcagcttgtgtcagtcacaggtcctggaaggaagcagaggacttgcttaaagaaggtgggcaaaaagagattcatgataatttgcaaagatacaggcagggttaaggaaaaccaagagatagcaatgtgccctaaggctcacaacaactgggggctgttacctgctcttggcctgaaagagcaaagaaagaggcagttaccagagtctggaaagtcctggtaagctgcaggagagggctgtggcctttggcattgccaacctgccactgtcagtgagggtgctggggacaaagtaggctcacctctcccctctccc

SEQ ID NO: 102257 - DNA, 516 bp, Homo sapiens
aaaaaaaaaaaaaagaaaagaaagaaaactggttttgggctccaaaaaattatgtaaccagctgcacagcctgaaatttgattttgtcctttttccaaattaattgcaggggkgcacgagtcaagcccacctgtctttgcataaacacacaggaagataaacaacaactacagcagaaaagagtctgacccaagggtcctctctgggcacagactctaagatgaggagggctcaacagctcccaaacttttgacttgctaggaaggtagcccctgctgccttgtaactgaaatgtattcactctttttgtcaagttggtgggatggctatagctttgtggcagcttgcactttgactttctgggagaatagcagagagctaggtgcaacaaggaaactgctatgtttgattaatgcacaagattctgcaccatggttctgccaaagcctcatttcaagattccatgttgtacatttgcaaggagcaaatattcagtacagccatcctctttgtaac

SEQ ID NO: 102258 - DNA, 553 bp, Homo sapiens
agtaattctccagaaagcagattgcataacaatagatgatccctctctacgttactgtctaaggaagctgggtctcrtttaattcagggtgtcagatggcattaaaagatattttaatcatcttagatataacaacaattctgtatttacatgagaacatttccctattttatgaagattcatattgagatacataggactgacatgacctattgtctgtaatttaagctacatcagcaagtaaaatagatgatgcaagtatcgcaaaaggttatcaattgttaaatacaggtagtagatatttagacgcttaattcacacacttttttagaataaaaagtaaaagaagagctgaatgaggtacaaaaattgggggacaaagtgcacaggttagaacagtagaagaaagggtgaggccttgctataagccatctttcttcactgtccttccctaaggcaacattcaggctactgtcttaataaacattggacaaatatttaaagaacatattttaggaaatactaaattatgtgtctggcttcaagtttggcc

SEQ ID NO: 102259 - DNA, 553 bp, Homo sapiens
agtaattctccagaaagcagattgcataacaatagatgatccctctctacgttactgtctaaggaagctgggtctcgtttaattcagggtgtcagatggcattaaaagatattttaatcatcttagatataacaacaattctgtatttacatgagaacatttccctattttatgaagattcatattgagatacataggactgacatgacctattgtctgtaatttaagctacatcagcaagtaaaatagatgatgcaagtatmgcaaaaggttatcaattgttaaatacaggtagtagatatttagacgcttaattcacacacttttttagaataaaaagtaaaagaagagctgaatgaggtacaaaaattgggggacaaagtgcacaggttagaacagtagaagaaagggtgaggccttgctataagccatctttcttcactgtccttccctaaggcaacattcaggctactgtcttaataaacattggacaaatatttaaagaacatattttaggaaatactaaattatgtgtctggcttcaagtttggcc

SEQ ID NO: 102260 - DNA, 491 bp, Homo sapiens
tttagttctatctctaaataccaaattcccagaacaaactggctaaattgtgtcagcttttctcttctattccaattccctgtgtggaagggttggattataaatagtcaaacacacttgttttcaaaatgcctatttttttttctatttgaatcaccagttagatatcatattttggaaaacaagtccacatccagttcactctgtttatcatgtcctttctatagaacgtagtaacattagtcattcactcaattgtygaattaacaaattaattgattttaagttggtgatataaaactattccagacaatatttagtactttctaaatatgatttactacttctatgcagtaggcctttctgaattctattactgtcagctggcaattggaaatgcaacatatttttaaatgagtacagttacgggaaagtactaatcaagcattaagaaaccacttcgtagttatacatttcatcacccaagttca

SEQ ID NO: 102261 - DNA, 594 bp, Homo sapiens
cctctgctacttcgttcaggctgcttactatctttcaagattaagatgcttttatgaaggagtgaactagaaatgtacaagctgtctttttataccccactaattatacttttataaaaatatttcttcatctacagagcacctcttatttgccacatactattctacatagtcagtatctatcatgtcactgagtcttcattagagtcctgtgatttgtattactatgataatcgtcattttgcacatgggaaatcttacgtagcagrgacttgacgaaagtgaagtgatcttaagttatttagcccacacttttaaacactatgttagaatgttacatggagtcacattttgccttgtgtatattcctttttgtccatattgatttcacacatagattaatctagaaaactgaatgagcatttcatggaaaacaggatataagacaagtatgaaggcatataaaaaattacgtgccatcttgaacagatctctactgacagcatatttgagagagattttcgatttgaggatctcaaacatggaagttcagaataaaacttaaaggacagcttttcaataatataatggtga

SEQ ID NO: 102262 - DNA, 640 bp, Homo sapiens
aacacttaatattatactatactcttcctgttaataatattgrtgctaaaatccaaaatttatatttatgagagtaatttagaaaaagaaagattcttaaactcaatcagtatttttagaaacttccattatcactacaaacgaaattacagtgtttgtatagtgtacatgtgcattttccatggtaacagctattgtcaaatggataaaagctgaacatgcagatatatacattgtatatctatctattcttcttaaaattaagattattgctaatttaaatgcaggcagagagccttgtgggggaacaaattctttcttggtttatcgttacatttggaaaatccacctggaaaaacagagagggaaggtagtaaatgagctggacaaaattcagaatgtatgccagatgtcatgcaagaaagctgaagtacaatctgaaatagtaatgggcggaacaccagacatagcaggtgccagagccaaggatagagaggggagtatccagtgaaggagaaaagccataactgggagaaagaaatcagcactcaagcagaaggctcaaacagacaaaagtaagtttaagagatgaagctctggctggggagattccttcctggaatgtgaattgaaacttgct

SEQ ID NO: 102263 - DNA, 640 bp, Homo sapiens
aacacttaatattatactatactcttcctgttaataatattgatgctaaaatccaaaatttatatttatgagagtaatttagaaaaagaaagattcttaaactcaatcagtatttttagaaacttccattatcactacaaacgaaattacagtgtttgtatagtgtacatgtgcattttccatggtaacagctattgtcaaatggawaaaagctgaacatgcagatatatacattgtatatctatctattcttcttaaaattaagattattgctaatttaaatgcaggcagagagccttgtgggggaacaaattctttcttggtttatcgttacatttggaaaatccacctggaaaaacagagagggaaggtagtaaatgagctggacaaaattcagaatgtatgccagatgtcatgcaagaaagctgaagtacaatctgaaatagtaatgggcggaacaccagacatagcaggtgccagagccaaggatagagaggggagtatccagtgaaggagaaaagccataactgggagaaagaaatcagcactcaagcagaaggctcaaacagacaaaagtaagtttaagagatgaagctctggctggggagattccttcctggaatgtgaattgaaacttgct

SEQ ID NO: 102264 - DNA, 619 bp, Homo sapiens
aggctgtaaagaccccaggccatgatttgtacatgacaaatttaaacccagagaaggcaaatgtcctgcccaagataataaaagatatttggtagtatatctgtgattcaaatcatttttattctgtgtttaaaaccacatcaccctttgatagaaagaaggaaagaaaaaaggaaagaaggaaggaggaagtgaggaaaaagagagagaaaagaaaagaaagaaaggaagaaagagaaggggaggagaggaggaaagaaaaaggcaggcaggcaggaaaacsaaggcaattaaggcagaaagactaagggaggtcacagttcaatctctttgtaggctactttcctgagacacacacacacacagtcagccacactctgattaaactaagcataaacctcactttcattattgagtagctgtatttacaagaaaagtcttccttatattgatacaaaagctacctgccttttttatccttagtcttctatttcctatgcaaaatatctgtagttccttcaccattcctattatgagatgggttccagatatttcatcatctgatctctctttcccagcacatcgataaaatatttcatgtttcaaattgatgcctaca

SEQ ID NO: 102265 - DNA, 566 bp, Homo sapiens
tatatctgtgattcaaatcatttttattctgtgtttaaaaccacatcaccctttgatagaaagaaggaaagaaaaaaggaaagaaggaaggaggaagtgaggaaaaagagagagaaaagaaaagaaagaaaggaagaaagagaaggggaggagaggaggaaagaaaaaggcaggcaggcaggaaaaccaaggcaattaaggcagaaagactaagggaggtcacagttcaatctctttgtaggctactttcctgagacacacacacacacagtcagccacactctgattaaactaagcataaacctcactttcattaytgagtagctgtatttacaagaaaagtcttccttatattgatacaaaagctacctgccttttttatccttagtcttctatttcctatgcaaaatatctgtagttccttcaccattcctattatgagatgggttccagatatttcatcatctgatctctctttcccagcacatcgataaaatatttcatgtttcaaattgatgcctacaattaaataccatgtatcaaatagtgtctggataccatcatag

SEQ ID NO: 102266 - DNA, 245 bp, Homo sapiens
aggaagaaaatggctagttattagtttataagaatcattttggctgccatatataaaatggattaaaagaggtcagaagggaagcaggaagaccagtgagaaggctyttacagtgacctaggcaagaatgacagtgcctagggtggtggcagaaaagtgatgaaaagtggctgtattcaagatacagtttgtaagtaagtccacaggctttcctgattaattagatatagggtttgggaaaaaga

SEQ ID NO: 102267 - DNA, 616 bp, Homo sapiens
cctgtggtattcatctgtgtgatggtatattatagtagtgtgctcctcatcattgttatatggtgccccattgtttgaaaacacactgaaaaatgttctcctgttgatggacaattgggctttttccaagttttagctattgatgataatgccgctatgagcattctaatatgtattaatatctgtatgtatctgttgctgcatatctgtacacattttggttgagtatataattagagtggacttgttaaacaatatgaatgcacgtggtcagagtttgtataatagattctgtaagttttccaaagtggtttttctacttttatttcaactagcagggagtgagagttcctgttgttccatatcttaacagttagcattgtcagattgatggattgatggattgatggataaaattttattcattctagtgggtaggtggtaatatctcatttcaaactcagctataattcttttatttatctcctcttttcacagattgtggtttagtattaatgatgtctcgtrgttctcatagtgttattgtttgttttcttatttttaccagttctattttgtttagtccaatttctgctaccaagtaccaccgagtatt

SEQ ID NO: 102268 - DNA, 631 bp, Homo sapiens
gaacattatgcttcctgatgcatttagcagacactaaacatttgtcatactctaaacaaagttacaaaggactagaagaattcttgttctgtatttagaaacccactcacattacttgatatttgggtatttaagtcatgaaaggtatttcttctaggaagcagtgattstaaagtgtatgcttaaccagtcagttgagtgtctactcttgtgtgttcacaagtgtacacaaagtttttggtaaattaagaatattatttcaaataaattaatttcatccccataggagccagtttatcagataattcgtttctcatttctgcaaatcagtacacaatgagctcatattcagataaatataatagtttttctttatttcaacattgttcattgattgcaacccatttctaaaacaaattatttaatataaccaaactcctttaacttctcaacttttcccactaaaactgtgaaacattatataaaatctttaatcaataggatatgatacatatttcatcattttgtttcaggttttggttgtgataaataacactgaaaaaccatcctaatatatgtattaactttatcattagaaaaggggattgttcaaaaaaaaaacaatacacag

SEQ ID NO: 102269 - DNA, 631 bp, Homo sapiens
gaacattatgcttcctgatgcatttagcagacactaaacatttgtcatactctaaacaaagttacaaaggactagaagaattcttgttctgtatttagaaacccactcacattacttgatatttgggtatttaagtcatgaaaggtatttcttctaggaagcagtgattctaaagtgtatgcttaaccagtcagttgagtgtctactcttgtgtgttcacaagtgtrcacaaagtttttggtaaattaagaatattatttcaaataaattaatttcatccccataggagccagtttatcagataattcgtttctcatttctgcaaatcagtacacaatgagctcatattcagataaatataatagtttttctttatttcaacattgttcattgattgcaacccatttctaaaacaaattatttaatataaccaaactcctttaacttctcaacttttcccactaaaactgtgaaacattatataaaatctttaatcaataggatatgatacatatttcatcattttgtttcaggttttggttgtgataaataacactgaaaaaccatcctaatatatgtattaactttatcattagaaaaggggattgttcaaaaaaaaaacaatacacag

SEQ ID NO: 102270 - DNA, 631 bp, Homo sapiens
gaacattatgcttcctgatgcatttagcagacactaaacatttgtcatactctaaacaaagttacaaaggactagaagaattcttgttctgtatttagaaacccactcacattacttgatatttgggtatttaagtcatgaaaggtatttcttctaggaagcagtgattctaaagtgtatgcttaaccagtcagttgagtgtctactcttgtgtgttcacaagtgtacacaaagtttttggtaaattaagaatattatttcaaataaattaatttcatccccataggagccagtttatcagataattcgtttctcatttctgcaaatcartacacaatgagctcatattcagataaatataatagtttttctttatttcaacattgttcattgattgcaacccatttctaaaacaaattatttaatataaccaaactcctttaacttctcaacttttcccactaaaactgtgaaacattatataaaatctttaatcaataggatatgatacatatttcatcattttgtttcaggttttggttgtgataaataacactgaaaaaccatcctaatatatgtattaactttatcattagaaaaggggattgttcaaaaaaaaaacaatacacag

SEQ ID NO: 102271 - DNA, 560 bp, Homo sapiens
tacaggtttctgcaatgtgtgtacactggagccattagaacgaagacccagacacaygatgcgtgcagaagcttatctaccacatgaagtttacagaaagaatggggtcttggatcacaggaaaaaaaaaaaggttatgtgagaaaaccaccctggctagcaacagtggactttttacataggtgaaacctcactgggagcagtcctcagaaagaatagacagaaaatgtttctttcagacctttggagacctcagatgctcagttaacctttcctagatccagacaagggggcagacctcagagaaagcctggctgcatcaaggcagattctctaccgatgcaaatctccccaagacagctttgcagctaagtttgcattcccagcccttctcaatagccattttgaaatatatcaaggaaatatatttaggggtaaaatatattagtttccttcatacagctataaaacatacaggaataatttttgtcaatgtctactacaaatccaatgtagcagtaattataaaacccaccagatattgaagaaaaaatatgtag

SEQ ID NO: 102272 - DNA, 560 bp, Homo sapiens
tacaggtttctgcaatgtgtgtacactggagccattagaacgaagacccagacacatgatgcgtgcagaagcttatctaccacatgaagtttacagaaagaatggggtcttggatcacaggaaaaaaaaaaaggttatgtgagaaaacsaccctggctagcaacagtggactttttacataggtgaaacctcactgggagcagtcctcagaaagaatagacagaaaatgtttctttcagacctttggagacctcagatgctcagttaacctttcctagatccagacaagggggcagacctcagagaaagcctggctgcatcaaggcagattctctaccgatgcaaatctccccaagacagctttgcagctaagtttgcattcccagcccttctcaatagccattttgaaatatatcaaggaaatatatttaggggtaaaatatattagtttccttcatacagctataaaacatacaggaataatttttgtcaatgtctactacaaatccaatgtagcagtaattataaaacccaccagatattgaagaaaaaatatgtag

SEQ ID NO: 102273 - DNA, 201 bp, Homo sapiens
gaaagaatagacagaaaatgtttctttcagacctttggagacctcagaygctcagttaacctttcctagatccagacaagggggcagacctcagagaaagcctggctgcatcaaggcagattctctaccgatgcaaatctccccaagacagctttgcagctaagtttgcattcccagcccttctcaatagccattttgaaa

SEQ ID NO: 102274 - DNA, 201 bp, Homo sapiens
gaaagaatagacagaaaatgtttctttcagacctttggagacctcagatgctcagttaacctttcctagatccagacaarggggcagacctcagagaaagcctggctgcatcaaggcagattctctaccgatgcaaatctccccaagacagctttgcagctaagtttgcattcccagcccttctcaatagccattttgaaa

SEQ ID NO: 102275 - DNA, 580 bp, Homo sapiens
attaaggctggagttcttttgttggttttggggtttctggatttggctgctaaatatgattagatcccaaaatgctaaggactctacttttaatagtgtagagaatattgacagttcttggcatgaaaggtttaaagagctatgcaaaacaaattcatttgacactaatgaatcatcgctcrtgagaggcaaggagtttagtgactctgtacctaatacccttgacaaacaccttgcaaaatagatttgtgaggacagcacctgcatctttgaagagccctgtaaaggctcttctctgtatgtcagatctaatggtgagaactgcagtcactcagttacaaaagttaaatacaatttggaataattggatcctgaagtggcaggggccaagtggtagcactcaaccctcaaaggcacggtgggcgtagctaccgtaatgggcagaaaagacaaagcagcaatctgaacagtctgactcacgtagagctctggcattggctaactaatcacagtgttcctggaagtgaaactgacaggaagactaatgcattcctacttaatttatgtaaggaggaaactt

SEQ ID NO: 102276 - DNA, 580 bp, Homo sapiens
attaaggctggagttcttttgttggttttggggtttctggatttggctgctaaatatgattagatcccaaaatgctaaggactctacttttaatagtgtagagaatattgacagttcttggcatgaaaggtttaaagagctatgcaaaacaaattcatttgacactaatgaatcatcgctcatgagaggcaaggagtttagtgactctgtacctaatacccttgacaaacaccttgcaaaatagatttgtgaggacagcacctgcatctttgaagagccctgtaaaggctcttctctgtatgtcagatctaatggtgagaactgcagtcactcagttacaaaagttaaatacaatttggaataattggatcctgaagtggcaggggccaagtggtagcactcaaccctcaaaggcacggtgggcgtagctaccgtaatgggcagaaaagacaaagcagcaatctgaacagtctgactcaygtagagctctggcattggctaactaatcacagtgttcctggaagtgaaactgacaggaagactaatgcattcctacttaatttatgtaaggaggaaactt

SEQ ID NO: 102277 - DNA, 580 bp, Homo sapiens
attaaggctggagttcttttgttggttttggggtttctggatttggctgctaaatatgattagatcccaaaatgctaaggactctacttttaatagtgtagagaatattgacagttcttggcatgaaaggtttaaagagctatgcaaaacaaattcatttgacactaatgaatcatcgctcatgagaggcaaggagtttagtgactctgtacctaatacccttgacaaacaccttgcaaaatagatttgtgaggacagcacctgcatctttgaagagccctgtaaaggctcttctctgtatgtcagatctaatggtgagaactgcagtcactcagttacaaaagttaaatacaatttggaataattggatcctgaagtggcaggggccaagtggtagcactcaaccctcaaaggcacggtgggcgtagctaccgtaatgggcagaaaagacaaagcagcaatctgaacagtctgactcacgtagagctctggcattggctaactaatcacagtgttcctrgaagtgaaactgacaggaagactaatgcattcctacttaatttatgtaaggaggaaactt

SEQ ID NO: 102278 - DNA, 594 bp, Homo sapiens
ctctctacccgttatgcctattctccctcttttgatactatagaatatggctttgtatggcaccaaaaagtacctgttaaattcttttcagcacactgtacacctcatctatttatcttttccattgcctatcatcaatcatcaattcyctatcatgaattcaattgtctttagggttacttacccaagattcttgctacttgttcaaggttgttctcatgggtaaggcttcccacatataatgattctgaggcaagtctctccactattttacaaaattcttaaatcttcttttttgaatacactctagtctgatggctaattcctctcaaacatgtttacctttttcacctccccaaatatcattctgagtcagtcacaagtctgatataaagggagggtaaaagccaaaagggtgtgtaatttatcaaattgcttcttccaaattcatttctagtactgttaacaagctggctaatagtcaatattgtcagtgtcagagatttagcttaggtctctataaggatataaaagtcaagtaataattatcattccttttatgccaaaaacgtttgctaaatagattgtgttctt

SEQ ID NO: 102279 - DNA, 594 bp, Homo sapiens
ctctctacccgttatgcctattctccctcttttgatactatagaatatggctttgtatggcaccaaaaagtacctgttaaattcttttcagcacactgtacacctcatctatttatcttttccattgcctatcatcaatcatcaattccctatcatgaattcaattgtctttagggttacttacccaagattcttgctacttgttcaaggttgttctcatgsgtaaggcttcccacatataatgattctgaggcaagtctctccactattttacaaaattcttaaatcttcttttttgaatacactctagtctgatggctaattcctctcaaacatgtttacctttttcacctccccaaatatcattctgagtcagtcacaagtctgatataaagggagggtaaaagccaaaagggtgtgtaatttatcaaattgcttcttccaaattcatttctagtactgttaacaagctggctaatagtcaatattgtcagtgtcagagatttagcttaggtctctataaggatataaaagtcaagtaataattatcattccttttatgccaaaaacgtttgctaaatagattgtgttctt

SEQ ID NO: 102280 - DNA, 594 bp, Homo sapiens
ctctctacccgttatgcctattctccctcttttgatactatagaatatggctttgtatggcaccaaaaagtacctgttaaattcttttcagcacactgtacacctcatctatttatcttttccattgcctatcatcaatcatcaattccctatcatgaattcaattgtctttagggttacttacccaagattcttgctacttgttcaaggttgttctcatgggtaaggcttcccacatataatgattctgaggcaagtctctccactattttacaaaattcttaaatcttcttttttgaatacactctagtctgatggctaattcctctcaaacatgtttacctttttcacctccccaaatatcattctgagtcagtcacaagtctgatataaagggagggtaaaagccaaaagggtgtgtaatttatcaaaytgcttcttccaaattcatttctagtactgttaacaagctggctaatagtcaatattgtcagtgtcagagatttagcttaggtctctataaggatataaaagtcaagtaataattatcattccttttatgccaaaaacgtttgctaaatagattgtgttctt

SEQ ID NO: 102281 - DNA, 539 bp, Homo sapiens
attgtacacattaaagataaccaataataatagctaccgaatgtctctctgtatagggcttttattagttcaggtcttacaaaataattcaaaacaaagtccctgaactataacttcatttgaaaagtccatctttgttttcaaaaggaatgggagtctccagaacagtcagcaaaatgactgttagcacatatttgagcatcattcatattgtcctgattgtcctatgctgatcagccttggctatggacaaagaagatatwaaagcaagctggaagacaaggcatggttgacagttaaggaagatgaagtcaacaagagttcagggaaaactgagaccacttgagtcagggaagacttcacataggaagcggggagagacagaataggctctatagaataaatttaaaaaaaaaaaaaacagaacaagaaagaactcagggattggcagagtgagaatacattatgagtaaagacaggaactgagaggatgcatccatgggaaagtgaattaaccatcctgggtaaagttagggaag

SEQ ID NO: 102282 - DNA, 539 bp, Homo sapiens
attgtacacattaaagataaccaataataatagctaccgaatgtctctctgtatagggcttttattagttcaggtcttacaaaataattcaaaacaaagtccctgaactataacttcatttgaaaagtccatctttgttttcaaaaggaatgggagtctccagaacagtcagcaaaatgactgttagcacatatttgagcatcattcatattgtcctgattgtcctatgctgatcagccttggctatggacaaagaagatattmaagcaagctggaagacaaggcatggttgacagttaaggaagatgaagtcaacaagagttcagggaaaactgagaccacttgagtcagggaagacttcacataggaagcggggagagacagaataggctctatagaataaatttaaaaaaaaaaaaaacagaacaagaaagaactcagggattggcagagtgagaatacattatgagtaaagacaggaactgagaggatgcatccatgggaaagtgaattaaccatcctgggtaaagttagggaag

SEQ ID NO: 102283 - DNA, 598 bp, Homo sapiens
tctctgtatagggcttttattagttcaggtcttacaaaataattcaaaacaaagtccctgaactataacttcatttgaaaagtccatctttgttttcaaaaggaatgggagtctccagaacagtcagcaaaatgactgttagcacatatttgagcatcattcatattgtcctgattgtcctatgctgatcagccttggctatggacaaagaagatattaaagcaagctggaagacaakgcatggttgacagttaaggaagatgaagtcaacaagagttcagggaaaactgagaccacttgagtcagggaagacttcacataggaagcggggagagacagaataggctctatagaataaatttaaaaaaaaaaaaaacagaacaagaaagaactcagggattggcagagtgagaatacattatgagtaaagacaggaactgagaggatgcatccatgggaaagtgaattaaccatcctgggtaaagttagggaagactgacattaggaaagagtcaaagagaagacaggaaaagaaagatggagtgcgaagaccctgaatatcagtctattaactgtgaactatattctgcaagcactg

SEQ ID NO: 102284 - DNA, 598 bp, Homo sapiens
tctctgtatagggcttttattagttcaggtcttacaaaataattcaaaacaaagtccctgaactataacttcatttgaaaagtccatctttgttttcaaaaggaatgggagtctccagaacagtcagcaaaatgactgttagcacatatttgagcatcattcatattgtcctgattgtcctatgctgatcagccttggctatggacaaagaagatattaaagcaagctggaagacaaggcatggttgacagttaaggaagatgaagtcaacaagagttcagggaaaactgagaccacttgagtcagggaagacttcacataggaagcggggagagacagaataggctctatagaataaatttaaaaaaaaaaaaaacagaacaagaaagaactcagggattggcagagtgagaatacattatgagtaaagacaggaactgasaggatgcatccatgggaaagtgaattaaccatcctgggtaaagttagggaagactgacattaggaaagagtcaaagagaagacaggaaaagaaagatggagtgcgaagaccctgaatatcagtctattaactgtgaactatattctgcaagcactg

SEQ ID NO: 102285 - DNA, 570 bp, Homo sapiens
ccagcaatcaatatatactttaaatatgaatacctagtagcttcattgataaggccatcaggtttctcttctgttaaatgctaaacaaaaaaaagtttgaataaagttactataatacaataaaaaatctaatgtcaacacaaaggattttactttagagacattttcttgcatttaataaaaacttcaacatgttctgttactgaatacacaaatccaaaactaacttttctagctgaaagcatttttcttccycatttgcaatttttttctacaagtgaacctgtggggttttatagggggaggaagagggcttaggatttcatactcctgaccttttcttttacttaaaaggaaaacccctttgattcacataatgtcataaaaacatagaagattacagttcagattttaggtattttccttcttacaaaactgttctggttctaaatattcattattacttattttaaaaaaaggataaccactgaaatatagtttcttagaatctaatatacttcccttcacaccaaacccccatattagaatctaaaatacttccctgcaccc

SEQ ID NO: 102286 - DNA, 623 bp, Homo sapiens
tgggaaattacacttttaccctcattacctcaaacctcaatagaggttccctgtcacaataaaaagctggctactgaggtttagaggcaactagattatagtaatactctatatttgaagccaactttacaaatgaattaaatccttgaatctaactttataaattatatacatttttctcatttagctttcataataattatgggagatggctattttcatttataaaggacgaaactaaatctaacaccctcatcatcacaggatactatattttatatrcaatcacagggacttttttttttaattgaacacacacccatcaagtaaaatgaacataattttaaagcctttgtgaaatcttttatgccacataaaatcagtctgtgtacaatgctacacaaatgtcaataaccatatatcagagccaaaccagtttcataattcatggggagatgatcattaggggtatctgaatagtttggaacctcagagcaagcaggtaataattttatttaacacgcttgattaggtctatagaagaaacattttttccttctaaaagttcagcaaattctattttgaggaaaacaaaactgaaataaaatcatggcaatgatact

SEQ ID NO: 102287 - DNA, 606 bp, Homo sapiens
taccgtattttaaaaatccattcatctgttgttggaaatctaggttgattccatatcttggctattgtgaacactgttgcaataaacatggggatgcagatgtctctgcaatataatgcttttctttcctttggataaattcccagtagtgggattgcttgargtgtttcaatactgttctccatactggctgctctaatttacattcctaccaacagtgcataagagttcctttttctccagctactcaggaggctgagggaggagaactatttgaaccctagaagcagagggagccagattacaccaccactgcactccagcctggacggagagtgagattctgtcaaaaaaaaaagtcccttttcttcacgtctttgtcagcatttgttatttttgtctcttctataatagccatcctaactgaagtaagatgatgcctcactgtggctttgattagcatttccttgctgattagtggtgttgaacattttttcatatatttgttggtcatttgtatgtcttcttttgagaaatgtctgttcagagcatttgtttatatttaattagattgttgtgcttctttgctgttgatatgtttgaatt

SEQ ID NO: 102288 - DNA, 606 bp, Homo sapiens
taccgtattttaaaaatccattcatctgttgttggaaatctaggttgattccatatcttggctattgtgaacactgttgcaataaacatggggatgcagatgtctctgcaatataatgcttttctttcctttggataaattcccagtagtgggattgcttgaggtgtttcaatactgttctccatactggctgctctaatttacattcctaccaacagtgcataagagttcctttttctccagctactcaggaggctgagggaggagaactatttgaaccctagaagcagagggagccagattacaccaccactgcactccagcctggacggagagtgagattctgtcaaaaaaaaaagtcccttttcttcacgtctttgtcagcatttgttatttttgtctcttctataatagccatcctaactgawgtaagatgatgcctcactgtggctttgattagcatttccttgctgattagtggtgttgaacattttttcatatatttgttggtcatttgtatgtcttcttttgagaaatgtctgttcagagcatttgtttatatttaattagattgttgtgcttctttgctgttgatatgtttgaatt

SEQ ID NO: 102289 - DNA, 433 bp, Homo sapiens
gactaaaattatacccattgaacagcmcctcccaattttcgtctccctctaacccctggtaaccaccattttactttctgatttgatgagttttactgttttagacacctgatattagtggattcatgcaatatttgtccttctgtgactggcttatttcacttagtgtaatgtcctcaagattcatccatgttgtagtatatgacaggatttttttaaggatacataatatttggttgtatgtatattaccacatttattttatccattcaactgtcctggacatttaggtggttgttagtgtcttgactgctgtgacaaaataagtacttttaaaagtctcacatttgcaagttcaatttgaacctttttttagtctgcttgcacttctcttatcaagcaagaaagcacttttctgctttttctattacta

SEQ ID NO: 102290 - DNA, 492 bp, Homo sapiens
ccaaaccaaaacaaaatgtcataattttaatttaccagcaaacctaggttgcttctgtgaaatgatctcatttgctgagttttaaaattgactaaatttcccaatttccaaatgaaaatatttagttatcttgtcttgctatgtgtttttggttaatatgatgattaatttttggtctattacttaatatatwccatgattgttgatatggattataaggactcacaaaatagttttcagatgtctttaatttttttacttagtgtagatcctataaatggattaggagtattctattaactcccatgtattcagaaatcgaattggagtggtaaattctgtttgaagtaacaagggatatcaaaggaaaaaaataattttgtgactatgtcttctatacgtaaatttttcaggcatctttatcaatggcttatactaaagacattttctggatcatgggtgacacacagaagacctgtggataagtggcat

SEQ ID NO: 102291 - DNA, 583 bp, Homo sapiens
attccttcttattagtatcccaatgtgaaattgtttctcaaaaaaggagggggcgggtaatttttgtacaaaagkcttttactccaaaataaagtggcttgtactgtatttctcctctggagccttgccgctggctccataggaaaattctgcctctcatagatacctgaggcattggattccctaaacaaaattgtagatccacttgtactgcaggcctctgtagtccaaaacgtttctctttctctgagtcccactcacagctgacatccttcttgacatttgcattttatttagaatacacatccaaatatgttttatgttgcctctaacattcaaaagagcctctaacagtcttcctttccctatcccttccttccatttgaaagatgtttgctccacatcactttctactgcattcttagactccctgaaggtaggaaacccacatttttgtcattggctcgatgtgtctttcctgaagtctatggtagctgctatttttctctagagcatatcaaccggatgctgtccatgtattccataagttatgtccatttggctagtgacatggccagggttc

SEQ ID NO: 102292 - DNA, 583 bp, Homo sapiens
attccttcttattagtatcccaatgtgaaattgtttctcaaaaaaggagggggcgggtaatttttgtacaaaaggcttttactccaaaataaagtggcttgtactgtatttctcctctggagccttgccgctggctccataggaaaattctgcctctcatagatacctgaggcattggattccctaaacaaaattgtagatccacttgtactgcaggcctctgtagtccaaaacgtttctctttctctgagtcccactcacagctgacatccttcttgacatttgcattttatttagaatacacatccaaatatgttttatgttgcctctaacattcaaaagagcctctaacagtcttcctttccctatcccttccttccatttgaaagrtgtttgctccacatcactttctactgcattcttagactccctgaaggtaggaaacccacatttttgtcattggctcgatgtgtctttcctgaagtctatggtagctgctatttttctctagagcatatcaaccggatgctgtccatgtattccataagttatgtccatttggctagtgacatggccagggttc

SEQ ID NO: 102293 - DNA, 583 bp, Homo sapiens
attccttcttattagtatcccaatgtgaaattgtttctcaaaaaaggagggggcgggtaatttttgtacaaaaggcttttactccaaaataaagtggcttgtactgtatttctcctctggagccttgccgctggctccataggaaaattctgcctctcatagatacctgaggcattggattccctaaacaaaattgtagatccacttgtactgcaggcctctgtagtccaaaacgtttctctttctctgagtcccactcacagctgacatccttcttgacatttgcattttatttagaatacacatccaaatatgttttatgttgcctctaacattcaaaagagcctctaacagtcttcctttccctatcccttccttccatttgaaagatgtttgctccacatcactttctactgcattcttagactccctgaaggtaggaaacccacayttttgtcattggctcgatgtgtctttcctgaagtctatggtagctgctatttttctctagagcatatcaaccggatgctgtccatgtattccataagttatgtccatttggctagtgacatggccagggttc

SEQ ID NO: 102294 - DNA, 583 bp, Homo sapiens
attccttcttattagtatcccaatgtgaaattgtttctcaaaaaaggagggggcgggtaatttttgtacaaaaggcttttactccaaaataaagtggcttgtactgtatttctcctctggagccttgccgctggctccataggaaaattctgcctctcatagatacctgaggcattggattccctaaacaaaattgtagatccacttgtactgcaggcctctgtagtccaaaacgtttctctttctctgagtcccactcacagctgacatccttcttgacatttgcattttatttagaatacacatccaaatatgttttatgttgcctctaacattcaaaagagcctctaacagtcttcctttccctatcccttccttccatttgaaagatgtttgctccacatcactttctactgcattcttagactccctgaaggtaggaaacccacatttttgtcattkgctcgatgtgtctttcctgaagtctatggtagctgctatttttctctagagcatatcaaccggatgctgtccatgtattccataagttatgtccatttggctagtgacatggccagggttc

SEQ ID NO: 102295 - DNA, 587 bp, Homo sapiens
tttctttgtcagtaaatttaggataatacttgttctcaagcatttattttgaggataatatcacaggtcagatttggactgagtgagtgtcccagaattataactcaattaatagtgaagaacagattgtaactgatgagacagcaaatttactgttatcagatccatagtagtactccatcagcacatgagaataaaagcttrgctttgagcctccaccatttgtctttcgtaatctttcattgactcttccatacacatgccaaattatacactagattgcgtattctttgagaaacaaggaccctgtccatcactttaaaaatcccccatggcagccagctagttgctcaatacatttttgttaaacaatcacactcaactaaaaccactggaaagccaaaatatactatttttttaaattaactcttctgtaacctaaacaatacagatgatcacaattcctcgactcattcaataaatatttactgaccattaccacatatcaaggatagtgttaagtgctagaaatgtaactctttaacaggttagcaaaattttctatgtttcagagagcttacataaca

SEQ ID NO: 102296 - DNA, 632 bp, Homo sapiens
tccctcctctttgctcccccaaccccttgctcagatctgatcctatcagctcttccaacaacctccaggcaggtccccctttagccagcttccccttcctgattcttgaaccccaatgttatagctctgaccagggcatctgctttaaaaatcttcaacagctcccatggttagaacaaaagtgaaggaataggaattcctacattcaaatcctggtctccaacttcacaagaggtaacgctaaaccagcagaccctgagggcagagaagctgccttccatggcacagggcctggcatgtggtaagctcacaaaaaatgtaagatgaacagaagagaggaaggaaagaaaaaagaaaggtgggaagaaaggaaggagttaaatcgatggcaggatgggtacctgcatggattgttggatgaatggatggatgggtgggtggataaatgaatggataaatagataagtgaatgagcagacacwctaatgaatggatagatggatgaatgaatggataaagagatggatgaatgcatggatagagagatggaaggatggatggctgaatgaagaaatggatagatgaatagatgaatggatagatggatggatggaaagacagatgaataaatt

SEQ ID NO: 102297 - DNA, 538 bp, Homo sapiens
catagtgtcaggaaggagaagaatgagagccgagcaaaggggggagccacttaaaaaccatcagatctcatgagaacttactcactatcatgagaatagcatgggggaaactgcccccataattcaattaccttaccaggtccctcccaccgcacatagggattatgggaaatataattccagatgagatttgggtggtgacacasccaaaccatatcagtatctacatgttaacttccagtgtaactgggaaaattagttgttgataaggaagaaaaatgaaatttgatccataccttacaccataaacaaaaatctactccagagggattaagaacttaaatgttaaaagcaagactttaatcctccgtcccagtcccttgcctgttttctctcagatcagttccctcctctttccaagttctgctctgtagctcagagggttgaccttggaaactaatttcccaggctccctgatccctgacttccacgtaagatgagccaatagaaggcaccggcagacacttgaagggaaaaa

SEQ ID NO: 102298 - DNA, 582 bp, Homo sapiens
tgctgtgtgactagtgtatttttaaatagcaaacacacatttacatagctcttgttctatgtgagatactgttctaagcattttattaagataaattccttttcaaaactgctctataatatccacccaacaacaattaaatatgcattctatcaagcgtacataaaacattctccagaatggatcacatgtgaggcccccaaacaagttttaatacatttaaggaagtcaaagtaatatcacatatctttttcagtyacaatggtaaaaagctagacattaataacaggaggaatcttggaaacttcaaaataacaccaagggaagtaatcttattatcctcatgtaacttatgatgtaactgagatccaaagaacttaagtgatttgcccaacatcatgcagtaaatggtgaaagcaagatttgattccacaatctgtattcaagaaactgaaaatctttgcacaatatatcaatgcaaaaataaagctgtaattttttaaatgtgatttacttcagaattatgattttaggtctcactgtgtacacagcttggtaaaaacaaaataattaaaatgttag

SEQ ID NO: 102299 - DNA, 567 bp, Homo sapiens
ttattcatattacagtggatgatacatattaattactagacacaggtgttttacaggaggaaaaaatgttttatgcttcttcacagaaactgtgtctattagaatgtgaagaagaaacaatttaccatcattttggatgtctttctcgcactgctatgtagaattgagaggcacttcctcacctttcccaattatttgcttgtgatttcaccctgttggagaaattctcaggtctgtttatcattcaaaatmtaagtctcatttcttcaaacctttttttcttctttaggtcatgtggattcgctatatggaatatgattgaaggatgattataattacagaaattataggtactaactttccatatttttgggctttatacaaatttctgcaaagttccagagaattgcctttaccaatgaatgtttcctaaaatgtgttgtctattcattatctcttcctttcttctctacatctactattagtaagagttctaatataagagtgctgcaatgatgatatataaatgacaactcaattgaacaaaactattcaataaaatgaatt

SEQ ID NO: 102300 - DNA, 473 bp, Homo sapiens
agtaagttgtacacatcatgacccttcaccccaaagactacaacatgcatctcctacataatcatagaccatcattacttctaaaaaaaagaaccataattctataatatccagtaaactacccatatccaaatctatagaagtgtaccaatgacatacacacacatatatcacacacacacacacatatcacacacacacacacacacacacacacaygcaaacatatgtttcaaattcagaattcaatcaagttgtatgggctttttgtggttatgacttttcagtctctttaaatgtagaacattatcttacctgttggttggttggttggttggttggttggttggttggttggttagttggctggttggttggtttgatagtttttcaagatataagcgtttattgaatgtcctggcaattatcttgtaaagttcccaaattctggatctgtctcttgcctcctaaat

SEQ ID NO: 102301 - DNA, 591 bp, Homo sapiens
aatcaaacataatcaaaattcaaacactttgtgtctcaaaagactccattaagaaactaaaaggacaatcatagaatgggagaagatactgaaaatcctatggctgtaaggaactgatatttagaaygtataaggaactgttacaactcaataataaaaaagataacctaattaaaaatgggcaaaggatctgaagagacatttctccaaataatgcacacaaatggccaacaagcacataagaagacgtttaacatccttagttgttagaaaaccgcaaatcaaaagcgcaatgaaatgagataccacctcacacccactaggatagctagaatcaaaaagacatacaataacaagtttggtgtggatgtggggaaactggagccctcacttactgctggtaagaaggagaaatggtgctgccactatctggtagttcctcaaaagctaaatgtgctgttatgatccagtaattgcatttctagctatacaatcaaaagaaatgaaaaccagcatctacacaaaaacccgcacatgaaagctcatagaggctgggcatggtggctcacctctaatcccagtgctttggga

SEQ ID NO: 102302 - DNA, 630 bp, Homo sapiens
tgtagctaagattagttatgatataattatgcccaatgaaatatatttggaagttgctgtgtagggaaattttaaaaaaggtgataagacttggctgccatatgctgttttctctatttttttccacttcctttctggaatgtgagtgtagtattgggggtgaagcagtaattttgcaaccattaggcaagaagcggaagtataaaatctaaaagaagtcaagagttccccagggttctgtgaaaacactttaccagcaatagatggtcatgtctggacctcctttttacatgataaaagctaaattctttacttatttaaacctttatttgctagctcatctgggtacagataagttggatttaagaagatttgtgaaaggtcattccacatttagggtgcaggctgagccaacaacaaagatatgaaaatacagtgtttgagcagtagaaaacatgttgtttggctggaacaaamggctatgaggggaaatggtggttgagagagattaaaaggcatgttgataccagatcatgaagcaccatgcatagcaagataaggagtttgggtttcattctgttatgaatgggactttttaaatatttttttcaggtagcagatttgacaatg

SEQ ID NO: 102303 - DNA, 546 bp, Homo sapiens
aatgggaacaagcacatatttggcttctgaggagcctgccaggaagaggaggtcaagrctggctcatagaaaatacatggaatcccaaaggcgtatttgaaacacaactttttcagccaaagaacatataaggtattctttcttaaaagaggatcctcaatgagctatatgttgccagattgtgtgagaatagtgacattatttctcagtcttatgttaagccccttccatacattggcttatcaaatccttacaagaaccctgcaaagcatgtgtcatattccccactgtatatggaggaaaccgaggttctaagaggttgtaaaatttgcccagattccccagctaatatgttgcaaaggcacaatgtgaatcagtttctgcctttacttctttagcctctaacagtgaaatctatactgtctggaggcagagagggaaagaggaaaaaggaggagagaacaggagagaagggaactggggcaggagaaaatggatgtttgaagggtaggcaaaaatataactcagagcaatgcaaactcacta

SEQ ID NO: 102304 - DNA, 517 bp, Homo sapiens
gtcctgtgcctctggagaatagcttatatgaattgagaactcattggtacaaatggaactggggaagaaaggtcagagggcagaattaatgctgatagaaaagtattcctaattgtacacagttttcataaatctgcttgagagatcacagtgggggtggtgagaagggagtggaattctgtgaatttttatgacacaaggaagcttcagtccatatttagaatttaattcatagtgatcatcagagccaagcaaaattatctacagttgtatccgtgcctttatttttcggtcatgatggactcctaaactgctgagtgaacacatttacatcttctctgctcacgagaggtattagcagaagacagagggtatcttgttggagaaagtgcatgcctgcaatgtagacatgcaaaacaccactgttcaccaaacccagtggctctaagrtattgaaaatgcattttgtagttttaattttccacaaattattctgtaatttaactaaagaagactt

SEQ ID NO: 102305 - DNA, 551 bp, Homo sapiens
gcacattttgtgtttgtttttttctctcactagattagagcttctttgtgtcacaattcatttaactttgtgtcctcagagtgaaactaggaaagcatgtttattgtgtgtctgaaataggccagacttaatcatagatactagacctatcattttgtttcatgtttacaataccctggtgaatttatatatattccattttgcaaaagagaaacatgaagctaacatagattaaataattttaccaaggctcagaaacagtaggacctagattcggggttatgatccaggctttttgaactcaaagcttttttctttcaaggagcaaatacyaagtcaatatacatgatttagctctaagtcagcaaataattcccattttttttcttaatttgaatagaacaaaattataatgcttataatattaggtgggtattttgtagctcattctgtttgggtggataagtaattttaaagtcaagaattttgaaaaatataatgttaaaacacaaacattaagtgatggtctatgctttagtgttaaaaccaat

SEQ ID NO: 102306 - DNA, 551 bp, Homo sapiens
gcacattttgtgtttgtttttttctctcactagattagagcttctttgtgtcacaattcatttaactttgtgtcctcagagtgaaactaggaaagcatgtttattgtgtgtctgaaataggccagacttaatcatagatactagacctatcattttgtttcatgtttacaataccctggtgaatttatatatattccattttgcaaaagagaaacatgaagctaacatagattaaataattttaccaaggctcagaaacagtaggacctagattcggggttatgatccaggctttttgaactcaaagcttttttctttcaaggagcaaataccaagtcaatatacatgatttagctctaagtcagcaaataattcccattttttttcttaatttgaatagaacaaaattataatgcttataatattaggtgggyattttgtagctcattctgtttgggtggataagtaattttaaagtcaagaattttgaaaaatataatgttaaaacacaaacattaagtgatggtctatgctttagtgttaaaaccaat

SEQ ID NO: 102307 - DNA, 602 bp, Homo sapiens
gcattggaaccataattagaacattctacaaagatgtctgaaagatggacatcataggagccagagataaactgctacagtccagctattatgtatggactgccttgaggttttgtatgtgggttcaatgtgtgtgtatgactgggattcatctgccraagtcattactagccataaataaacaggaaaaaactgtttacttactcctctgatttccagtcagaattatgatgctgtatcattttcctgtgcactaataggcttagagaaataatctttaaacttttttttttgcttgcatgcccccttgcgcaaatatatttttaaatgttccctttcatattcattacaaatattattggcacataatttacaaaatcaatacatagtacattatttgatgaataatcatacaaaacataaaattttgaagcaaaatttaaatgttattggaaatctattgtttaacgagataaatagacatttggaaaataataattcactcatctgaagatacatgaatataatttatttctagaatgagacagaatggtgtgaattctattcctctatttttgtttttatagatgtaaatgctgagt

SEQ ID NO: 102308 - DNA, 602 bp, Homo sapiens
gcattggaaccataattagaacattctacaaagatgtctgaaagatggacatcataggagccagagataaactgctacagtccagctattatgtatggactgccttgaggttttgtatgtgggttcaatgtgtgtgtatgactgggattcatctgccgaagtcattactagccataaataaacaggaaaaaactgtttacttactcctctgatttccagtcagaattatgatgctgtatcattttcctgtgcactaataggcttagagaaataatctttaaacttttttttttgcttgcatgcccccttgcgcaaatatatttttaaatgttccctttcatattcattacaaatattattggcacataatttacaaaatcaatacatagtacattatttgatgaataatcatamaaaacataaaattttgaagcaaaatttaaatgttattggaaatctattgtttaacgagataaatagacatttggaaaataataattcactcatctgaagatacatgaatataatttatttctagaatgagacagaatggtgtgaattctattcctctatttttgtttttatagatgtaaatgctgagt

SEQ ID NO: 102309 - DNA, 525 bp, Homo sapiens
attgatagcagttacctaattttctgtcattttttgacagatggggaasagatggttattagcttcataaaaataatcatgaaattcagtattaaaatatttattggacttcattcagaagtctcaacaggataaattttattggcaaagtttgtttgttgcaaactctacaaagctagtcagaccctgcaaccacatcatgcttctggccaaacaaggtagatataattcgctttcttttagagcttctggacttgacaataaacaaagttattaatgtatcacacctctggaaaaaaaacattaaattttgtttcccttacatgtgcaaatttgcaaaattgcctgcattacatgattcaacaacatggaatttaacaattacaccaaaccagagtgcgtggggagattttttttttttagcagagatatagtctatctcatgtatgatgtgtacaaacactgtgatttatatttctatagatggtttttccttctaatcaggtggtttatacatttgagaaa

SEQ ID NO: 102310 - DNA, 481 bp, Homo sapiens
aggtctgcagcaaagtttgccattgaacagtttgctgggctggcttgaacaacagggttatggagtcataggcctacattccttcctaaggtatccctctttctgacagaatcatacagaaagacacacaaagcacaccagattggctgcagcttaagacatacgtcacaaatcattttttataattaaaactttacagagaatataaacagtgatagttggggtcctggcctactaatacatcttctaaaaggaaaaaagaaaaaggcctctcacataaaagttaattcctggtctagtggggaatagaaaaaaaaaaccagctgaaattgcagggctgtgttaactgctgacagagtgtagaaaataaaaaaacaacttaaagtgcagrgctggaaagatgtcttgaggaagaccttcctattcttatgcaaatgagcttctccaaaagggagagaaaagtttaattgctgtttcttcc

SEQ ID NO: 102311 - DNA, 595 bp, Homo sapiens
caaaaccaatcacagggccatccagatctgtgagaaggggggataggctatattgctcagtagaagaaatagcaaaggatgtgtagcccctttcgatctaacataagtgtcttcaggagaatggaaggagacgtcttctataaaactgatacagaaagaaataaaaaaagattcagaaaaaatagaaactcgaagaaaaaatttaagaatggattataaaaatatattttataagtttctgtccttttcatactttaagtaatgccttttgtcagattatcagtgtgcagtgtctttttatgatacttacaagatattgtgaatattaataatgaaatctaaaatatttaagttttctgaatgtcttygtttgctagcgttttttgtttgctctctgttaacttcttagctgtggatttgggttgaactggttggtagggttaatgaatctcaatcaattttagatggaagaaaatttaagtattgtacacacctctgctaaatttcaagtttaaagaatactaacttaaggtaaatacaaaatgtcaacaacaaaaactaatcatttagctagtctttttcctggcaagtccta

SEQ ID NO: 102312 - DNA, 557 bp, Homo sapiens
atatggaactgctatttattattagaaatgcaaagaacagtgaaattcaagataaaactgcagaagcttgaggttttaaaaaaggatgacaagaaccaggacctggatcccagttcaggttccatttgtccccacgtctattgtatccagtgttatttaaggaatgcatataaggttcaaacaggacagggtgcccattgtgcttccttctatatgtctctcatcttccctcttcccccactgagttctttattaacaatgaaatgatttcttaatctcattactgagaaaagcacaaagcacagaaaagcatatgctacacaaattaagctgggtaatttgcatacctagggaaagggagaaacccctcccccttccttytccagagtcaattttcctcgatcttctgacaccatatgtcaataaatatctatatttcctcatgccctggacaggagatgctgttaaatgtcaaatataaagtaaagtttgtcataaaaatccctcataaaaaaatctcccaactaccagcattgaaagatggaggaagggaattc

SEQ ID NO: 102313 - DNA, 583 bp, Homo sapiens
ggctctgacttgtatagcctgactccttcttaaactaagagctcctcctccccctcaataatattttgagtgttttatgttcagaatcaagcacaaaaagagtccaagttgcagagttataaaaaacagagtgggcaacctggggagggaggaggtgggcagtgatgggtagaagatcacaaargtgggaatgtgggatgtatatttgatataggaggcaccaggacacaagggtaccatcattaagtttttcttcattgttcatatgcacatacttctgggctgggtgttatacagagaaattacatagatagtcttttgcactttaaggcctcataaaatagtcacaatgatataataaataaaggacaaatgaatccaaaaaaaagaaaaaatcaaaagataataggctgaaatatgaaattataataccccacagaagtcaatgtaattgagaataaggaccaagacgtgtgcaaattgagagaggaggacggaattttaaaattgaggtgggagaggggtaggaaatgggggggcgttccacgtccaggcacagtgagaccaaggaagtcaccagctc

SEQ ID NO: 102314 - DNA, 545 bp, Homo sapiens
taaggggcttttcaccctttgcttggcacttatccttcctgccaccgtgtgaagaaggacctgtttgctttcccttcttccatggttttaagtttcctgagacctccccagcsctgtggaactgtgaatcaactaaacccctttgctttataaattatccagtctcaggcagttccttatagcagtgtgagaatggactaatacaactcttgagtgaggccattgggtgacatctttctctgttctgtaccatcctctacattggatataccacattacacagctgggactggtttcacatctttaaaatggagtaataacaataactactacacacgtttcttgtgaatatacaagctcttattcagcacagtgtccaggctatagaaagtgctgagccattgttattactacactactagttgcctctttctgatattacttagagatcactaactgccatgaaattaatcaattctcagtgctattcattctggattatgctgaaaactgcccttgtgactgaaaacaggacttatatttgc

SEQ ID NO: 102315 - DNA, 605 bp, Homo sapiens
ctcagttttttccacagcctcacaaacactttgctactatttatctttgtttttattattttttttgagacagggcctygctctgtcacccaagctggagtgcagtggcgcgatcatggctcactgcagcctggatgtcccaggcttatgtgatcctcacacatgagcttcctgagcagctgggaccacaggtgtgccaacatgcctacctaatccttattttttttgtagagatggtgtctcgctatgttgctcaggctggtcttgacctcctaggcttaagcaatcctcccatcttggcctcccaaagcactgggattacaggctgagctatcatgtccagcttgtttatctttttaaatatagccaacctactcagtgtgaagcggcatctcactgtctcagtgtggttttgatttatatgccactaatgactaacaatgttaaacatcttttcatttgcttatcactcatttgtacagccttctttggagagtgtgtatgcccatcttctgctgggttaatttttaattgatgagttgtaagagtgtctaattgtattaattagtgcctgaatataaacattaacttagaccatgtcatat

SEQ ID NO: 102316 - DNA, 605 bp, Homo sapiens
tttgctcctgtatctaaaaacctattgccaaaaccaaggccatctagattttctcctgtgttactatctagaagtttcataattttgcattttacatctagttctctgacacattttgaattaatttttgtgaaagatgtaaggtcagggtctagattcatttttttgcatatggatgtgcagtggttccagattaatttttgaaaaactatcttttctccattatgttgcctttgctgctttgtcaaagaccacttgactgtatttaagwggggctatttcagggctctctcttctgttccattgatccatttgtctattttttcaccaataccactctgtcttgattactacagctttatagtaagtcctaaagtcagacagtgtctgtcttccaacttttttcttctccttcagcattgtgttggctattctgagtcttttatctctccatataatctttagaatcaatttgtcagtatccacaaagtaaatttctgggattttggctggaatcacgttgaatttatagatcaaattgggacaaactgatgtcttgacaatattgaatctatccatatgcatggaatatctctccatttatt

SEQ ID NO: 102317 - DNA, 631 bp, Homo sapiens
ttctaccaattatgcacataggatacaaagtctccaactacttattgttgaattgtctatttctccttttagtcagttgttagatacacatatattataattgtcatgtctttctggtgttttggctctttcagcatttaaaatgtcttctttacctctagcaacttctttttaaatatacaatctatttagtttgatatttgtataaccactcttggtcttttttgattgccatctgcatggaatccctgtatccatcctttcacttttaaattatttgatcatttaaatataaagtatgtgtttttccacagaatatgattgaatcatgtctttctaatgcgttctgccagccattamcttttgaaataatgtttaaatcatttatagttaatataattactgattatgtaggactgatgtataacattttgctcttagtttttaatatattgatgtcttttttgtctttctcctctctttctgggattccctcattgccacattttttggactaataccaacataatttccatagtctgcagaccaattgctttaatgtaactctctttacttctttctcatttgtgcctctactgtcatacaaattataactttaaatattataaac

SEQ ID NO: 102318 - DNA, 665 bp, Homo sapiens
tattcctgggctaattctggtaagcctgtatattatctgttatgtatgtatacttgtctgtttacttgtttaacttagtgttcacttaatgattacacatatattttcttagttgctttgaactatagttctcctagtctttgttgaatgacacaaaaatgtattcgttgggtcatgtctttaatactgagaactttataactttttatgagcctccaccttttagcttcacttagcattgagtttagccagaagtgagagattaatatgctttcagacctttactaaacatgtgaagatctctacatatgcgcatgtccttctatatccccaaagatatattggagtttttcaaagctcccatgggcattttattccctagattttcctttaatatttttgtgcagccttttgtttgccccagctggtattgctacctcagctagctgtaaygttaaacaatttttgctagttgttttcaatgaataccttgggaataaatctttcctcaccaacttagctctaactcaagtcaaattaagagaagccctccctatgaatacagttttttcaacgagctgtcaaataggaaaatatggtcaatttgggaaaatagacctattagagatctccaaaactaatctaaccttcagtgcaatgctact

SEQ ID NO: 102319 - DNA, 665 bp, Homo sapiens
tattcctgggctaattctggtaagcctgtatattatctgttatgtatgtatacttgtctgtttacttgtttaacttagtgttcacttaatgattacacatatattttcttagttgctttgaactatagttctcctagtctttgttgaatgacacaaaaatgtattcgttgggtcatgtctttaatactgagaactttataactttttatgagcctccaccttttagcttcacttagcattgagtttagccagaagtgagagattaatatgctttcagacctttactaaacatgtgaagatctctacatatgcgcatgtccttctatatccccaaagatatattggagtttttcaaagctcccatgggcattttattccctagattttcctttaatatttttgtgcagccttttgtttgccccagctggtattgctacctcagctagctgtaatrttaaacaatttttgctagttgttttcaatgaataccttgggaataaatctttcctcaccaacttagctctaactcaagtcaaattaagagaagccctccctatgaatacagttttttcaacgagctgtcaaataggaaaatatggtcaatttgggaaaatagacctattagagatctccaaaactaatctaaccttcagtgcaatgctact

SEQ ID NO: 102320 - DNA, 598 bp, Homo sapiens
atttttgtgctaaacccatgaattcttaagtaagttgttttaacatgttgtagattcaaagtggcagccaagtttcacactgtagttgatgtggagcacgatggaaacagcccattaggacaaaagagcaaaaaatactgatttcatcagtttcccaggcttcctctaatggcctcctctgcaaagcaggacactaggaaaactgctaacctgttgaacggacaacagcactcagaaggtgatggaagcaataaaggaaactgctgaatgagccagcaaatgaggagatgtggctgcagctaactgcataagtcagaatattagcttagagcttattcgatggggcaaatgcagtcagacctggcaactggagctgcttcaatataatggaatgttcagggcacagcccagcactcagaacaagggcttcatctcctaagtcaccgggacatggagaatggccaaggctgccacatggaacacacaatctaaggcatcccccmacgggtgaccataaatgccccctggttgggggtaaggaaagaaagtgtaggacagctcaaacacatcccaccatgcaggatggactcaggactga

SEQ ID NO: 102321 - DNA, 636 bp, Homo sapiens
atccaactgatctttgacaaagccaaccaaaacataaagtggggaagggacatcctattcaacaaatggtgctgggataattggcaagccacatgtagaagaatgaaactggatcctcatctctcacctttgagtgtttggttcactgttgtatcccaccacatgggagaatgcctagcacagagaaggcacttaataaatggttgctaaattaagaaatgggctgttattgtcactccagaatagtcatgtctacccaggttgccatcttccaaaaaaatgtcgctgtcagttaaaccttggaaacttcattgtaggcttttgaagacccacaaaaaccaccagattattgccattgtaatggcaataatgcaaaaacaaagtaatagtagaaaaaaataactactgaacrttgattataaggctgatattgcactacaatctaagttccataattcaggctttgcaaacatctttactgatgaagaatctgaggctctaagaagttatgtaacttgctcaaggtcatctatttttaaatgatgtggtttaaattcaaaactactttatttgtccttatatcctcctctttgtatagtactgttagtctgaatggcagtgataagaagaataagc

SEQ ID NO: 102322 - DNA, 559 bp, Homo sapiens
aagaaaatccaaggaaataccaccaaagaacacaataatttaaaataactgcaagcccccatggaaatctacaagttacctgacaactcraaataattgctttaagaagctcagtaaacttcaagagagcacaaaaagttaattcaacgaagtttgattatttgaaaatcaaattcaataaaaataatacatgaacaaaatgagatgtttaacagagatattgaaatcataaaaagagccaaaaaagtctacacatgaggaatacaatgaataaagtagaaaatgcaatagagagcatccacagcagcattgatcaagcagaagaaagagtccattaactcaaagacaagatatttaaaactattcagttagaggagaaaacataagagtaaaaaaaaccctacaagatttctggaacaacataaatagatctaacagttgcattttagaattaaagagggacaagagagagaaaaaagcacagaagattgttttaaaaaaaaatactgagtgaaacctctccaaatttgggaaaagttataaacagtcaagtacaaga

SEQ ID NO: 102323 - DNA, 559 bp, Homo sapiens
aagaaaatccaaggaaataccaccaaagaacacaataatttaaaataactgcaagcccccatggaaatctacaagttacctgacaactcaaaataattgctttaagaagctcagtaaacttcaagagagcacaaaaagttaattcaacgaagtttgattatttgaaaatcaaattcaataaaaataatacatgaacaaaatgagatgtttaacagagatattgaaatcataaaaagagccaaaaaagtctacacatgaggaatacaatgaataaagtagaaaatgcaatagagagcatccacagcagcattgatcaagyagaagaaagagtccattaactcaaagacaagatatttaaaactattcagttagaggagaaaacataagagtaaaaaaaaccctacaagatttctggaacaacataaatagatctaacagttgcattttagaattaaagagggacaagagagagaaaaaagcacagaagattgttttaaaaaaaaatactgagtgaaacctctccaaatttgggaaaagttataaacagtcaagtacaaga

SEQ ID NO: 102324 - DNA, 559 bp, Homo sapiens
aagaaaatccaaggaaataccaccaaagaacacaataatttaaaataactgcaagcccccatggaaatctacaagttacctgacaactcaaaataattgctttaagaagctcagtaaacttcaagagagcacaaaaagttaattcaacgaagtttgattatttgaaaatcaaattcaataaaaataatacatgaacaaaatgagatgtttaacagagatattgaaatcataaaaagagccaaaaaagtctacacatgaggaatacaatgaataaagtagaaaatgcaatagagagcatccacagcagcattgatcaagcagaagaaagagtccattaactcaaagacaagatatttaaaactattcagttagaggagaaaacataagagtaaaaaaamccctacaagatttctggaacaacataaatagatctaacagttgcattttagaattaaagagggacaagagagagaaaaaagcacagaagattgttttaaaaaaaaatactgagtgaaacctctccaaatttgggaaaagttataaacagtcaagtacaaga

SEQ ID NO: 102325 - DNA, 631 bp, Homo sapiens
cttaatagacacatacagactatttcatccagtagcagcagaatacacttttttctcaagcacaaatgaaatattctccaggatagatcatgttagaacacaaaatgaggattaataaattttagaagtttaaaatcatatccaatatcctttccaatcataatgatatgcaactagaaatcattaacaggaaaaattttgaaaatgtataaacaacatacttctaaacaaaaaagtgggtcaaataagaaatctaaatggaaatttgaaaacatgttgagataaaagaaaacggaaatacaaaacaccaaaatttatgggatgcagcaaaaacagttctaagggggacgtttatagcaataaatgcctacattaaaataaaagaattatctctaacaatcaaatattatwcaactagaaaaacaaaatcagactaagttcaaagttagtaaaagaaagtaaataataaaaatcacagcagaattcaatcaaatagatactagaaaaaaagatcaacacaaccaaaatatgttttctttaaaaaataaataaaacggacaaatatttagtctaaaaaaagagaagagtcaactaaataaaatcatgaatgcaagagatgttgcaactgata

SEQ ID NO: 102326 - DNA, 597 bp, Homo sapiens
ggcctgtgtgtcaactgatgaccacaaaatggcaccacgccctttcttgccacattgcaagacacttttacagagtgactttctccatggttgwactaattggggtggcggcaattttggacttttattccaaatttttttaccttcttctagttcaaatctcctccaatttcttgggctctttttgagtaaaatgtcactgagttctcagaagtagcagagattgcttgctgttatgaagggaatccgtccatttcatccctgaaaactcctgagtatctcataaatcaatttgcctagaaatgttttaactcttgttaaacatctgtcaataaagctaaaagtgatatgaaatgagttcagaaattccaattgtgcttaacaataaaagaatctttgtgatgctcttcaggtgttgacatttgggttagttctaggctgagcatggtataaaggtaaaagagcagtacaaattaactttctgctacttgttgcattaaaaaaagataaaggattgattctagtttggtagagtagatatctaaaactatccaacttttgtattcctttcacttctgtttctttacaggcacatac

SEQ ID NO: 102327 - DNA, 258 bp, Homo sapiens
caccctaacttactggccacagctttcctccttccaccttaatcttttaaaattccaatttctcctaacaaccagcatcaccaatctctcctaagtttagcaaactgcaatgacaggcatggytgtgtctatgcacaaacagctggatgggaaaggaaaggttcccaagaccctgtcaggctctgaaccaagacactagtgccaaattcaagtcctcccccaagaatccaggggacctcagctggatcaagtcactgt

SEQ ID NO: 102328 - DNA, 590 bp, Homo sapiens
tgttcactatctcttcttagcatgtccctgccaaggaataatcagaaaaggcttctttaaccttctccttcaagttttctcctttctccctcagggatgcctctctggggtccagggaagctttcatgcccgtaaagaccttggtgttgttggacatgaaaaccagcaggcacatatactaactttgtccctgaataagtatgtggtttctgtttggtttgttcgagaagctcttttttggatttgcacttcaacaccgtaagagatctgagaaacatcctaacatcctggcaaactgtcaggagaacaatcgtttgactggagaatgaggcctctcctttcccagaactatcctttgcattctcygagtttgagaataaatataataacaaccaaacaaccataaaagttagacccaagccttgacttcagatggctcaaggtgaggataataatctacaaatcaatccacagatcgtgcagaagggaggaaagatgttgtgctggttccctgatccctatctggggtcccagagttccatggaacattccagaagtaatttggctttgtgctcagtgcacagggacta

SEQ ID NO: 102329 - DNA, 561 bp, Homo sapiens
ggtatctgtgttgagaaaagtttctatatgggtttatgcaaacctaaataggaaagtaacaatagagaccactatgtacctaggataatggagttaagccataccacctacaggagatacatcaatttaaaatcaaatactgtcatgctattggattatgggggagaaagattctctgatatcaagagaccacgagaccagagtgtcttttgtctttggttctgttagaccatcacattataatgtttggcagttccagcaacattctactgtgagatgtgagtgaggcatataggacccaggacaagcagagccagaagccacaagtgagttgctccttgatcaagtgaaccagataccatgctattcatgaattttgcwtcagtgcatacctatagcacaagacgggggcgggggggcattttttaaaatcaaataatggaggaagaaaacatgagtattgttcttggatgaacttgacatgtgaattgaagtaaaaatggactgctgccacattacagcccactcaggggtaaccctgagagatagttgtaagagtaa

SEQ ID NO: 102330 - DNA, 485 bp, Homo sapiens
catgagtacacgcagccctgtgaaaagatcaagtagtgagaaactgagtccttctaccaatagtcagtgagaaattgaggtatcctgtcaacagtcacatgagtgagtcattttgaaatggattttccatcgccagtcaagcctatggatgactgaagtctgagcttatagcatgactgcaaactcttgagactcaaagccataatcattcagttaagctgcttctgcattcttgaccgtcaaccactgtgtgggataataaaggtatgtatgtatgtgtgtgtgtgtttaatttgtaattgtagtaaaataygcataacataaaatttatcatattaaccatttttaagtgcatggttcagcagtgttaattatattcacattgttgtctaaccaatctccagaaccttttcatattgcaaaattgaaacttcatacccattaaacaacagcactcagctctcccttctctggaaaccaccctt

SEQ ID NO: 102331 - DNA, 632 bp, Homo sapiens
tcatcagcattcccatttggagagagctcttgtatccagatcacatcatcaatctttaattggcctgtccttaaccaatatgcctatatctcaagcctaccttgttcaatgatcttggtcactggctgtatcttataactaatatacccatatctgcagggactcacattacagaaaacatttgtttagcttgttccttcagaaaatcagggctattggcaggagaatttttcatgaaggaaagccatgtgcaagtaaggcactaaaattgataaatcctataaaaatttacaacacataaaaggaaatgaaaagtccacataatcaataagctcacaatctagtgagggaaaagacacaagcatattctgtaagagaagacaactacctaaagttgccttatagctgctcatcacttacagttcagaagaacttcttttccttgaattctaatgcatgcagtttaaataactttcagggacatttatttagcataataakgggatttagcagaagcattttttgatagctctaatttttaaataccattgggaaaacagaagaaaagcaaaaatctcagtacaacttaagtagataaaaatacctacttgtacttattatgtgacaaatgt

SEQ ID NO: 102332 - DNA, 548 bp, Homo sapiens
ctcaaaaagactgccgtagcacactgagtcggccccatgcctcttcctgcattacttcttttttttcccaagcaggatgatttttccagcacaattatttaaacaaaaataatacaggctgggtgcagtggctcacgcctgtaatcccagcactttgggaggccaaggygggtggatcatgaggtcaggagtacgagaccagcctggccaagatgatgaaaccctgtctttactaaaaatacaaaaattagccagttgtggtagcgggcgcctgtaatcctagctacttgggaggctgaggcaggagaatcgctcaaacccaggaggcagaggttgcagtgaggcgagatcgcaccactgcactctagcctgggtgacacagcgagactccatctcaataataataataataagactagatggagatgagggaggggagatgtgaacccttagagattccagaaactgacaagtttcttgtgccaagaaggcactagcaagagccttagtttaatttacttaatgaaaacttatggattgatgaattc

SEQ ID NO: 102333 - DNA, 581 bp, Homo sapiens
aaaccttgaaaatgtggaagcaggacttgataactcacgacttggggaggctgagacgggcggatcacttgaggtcaagagctcaagaccagcctgaccaacatggtaaaaccccgtctctactaaaaatacaaaagttagccaggcttggtggtgggtacctgtaatcccagctactcaggtggctgaggcatgagaattgcttgaacccaggaagtggaggttgcagtgagccgagatcrccccactgcactccagcctgggcaacgaagtaagagacatctccaaaataaataaataaataaataaataggaaaatgtggaaattgcatgtacagtagaacacttccttaatcatctgttaattaagcaacttgctggatttcaaccttttttctccattcccagggtaaaatatttactaatgagcagggctttggaacattgatggctattaggttatttattaaaagaacttggcacttacagttaccatgagttgagatactaagagtccatcaaggttattctcaattcacttacaccaaataaaaatatgaaaggtactagatgatttaatt

SEQ ID NO: 102334 - DNA, 581 bp, Homo sapiens
aaaccttgaaaatgtggaagcaggacttgataactcacgacttggggaggctgagacgggcggatcacttgaggtcaagagctcaagaccagcctgaccaacatggtaaaaccccgtctctactaaaaatacaaaagttagccaggcttggtggtgggtacctgtaatcccagctactcaggtggctgaggcatgagaattgcttgaacccaggaagtggaggttgcagtgagccgagatcaccccactgcactccagcctgggcaacgaagtaagagacatctccaaaataaataaataaataaataaataggaaaatgtggaaattgcatgtacagtagaacacttccttaatcatctgttaattaagcaacttgctggatttcaaccttttttctccattcccagggtaaaatatttactaatgagcagggctttggaacattgatggctattaggttatttattaaaagaacttggcacttacagttaccatgagttgagatactaagagtccatcaaggttattctcaattcacttacascaaataaaaatatgaaaggtactagatgatttaatt

SEQ ID NO: 102335 - DNA, 605 bp, Homo sapiens
gccaagtaaacactttagtttatagaaaatcctatacagaaaggtttatagtgtcattatttttagctgttctcaaattgaaattaacccaaagttctttcaactggtaaacagaggaataaatttgggatatccacaaaattgaatattactcagtggttaaaaaaaaactactcaatatacacaacaatctgcacaaatctcaaacgagttactgcctgaaatataacagactcagattaccgggtctaaggatatgattagatttccgtatatgatatcatttatatgacattctggacaggacaaaactacaggaactagaaacggattgctggttgacaggagctggcagtgtgaggaagggttatacaaagcattaaaggaaaatagggatgggagtagatgagattgatggagttgttttacatcttgattatagtggcagttaacatgattatacatttattgaaactcagagaaatgcatagtcaaaaaggaaaattgtattgcataactcttctttaatacaaaaagtggaataaagagatatgcaattatatrttagattttgtataaagttcaaatttatttgtcatagcctc

SEQ ID NO: 102336 - DNA, 517 bp, Homo sapiens
acacacacgtcatatctgaattcctcaaaatgttaaacaagttattgctctaaaattgataagaaatacatcaatctgtgtatttgctgatatatatagtgtataattttaaaattatttctatattttattcaygtgaaatttcttgattcagtttaaactgttagttttatgaaatataatccacatccatccttttaactacaatcacctgtatgggcaacaatgcatgtaagcttaatgagaaacgagtatgcatccatacctgtaggggtcagttattatttgctattgtactcttttattcaatacacaataattttgtctaggaaggcacactgaaaatttataaaatttctactgaaaagtgtctattttacttacatcaccattttagattttctttgttctctttctttgcaattgataacaaaaaaattacaatcaaggcatatgatatatgtttttttcttctgttttttggaattatttttccccacctccagtattacattaa

SEQ ID NO: 102337 - DNA, 581 bp, Homo sapiens
aagcttagtaatgttgtagttcttgcagcaccataaagatatcaccttgatggtgtcgaataacatctggaagaattttctagattaccaggcagagattcttgttctcttcccttaatttcttccaaacaaatgcttgctctctctctctctctttctctctctttgttgagttacctggtgctggggtaggggtgacaaaagcactccaactcactaccactaccactgggactktgctgggtcagacatgaatccagcactgcactggtcttacccaaggcccactgtaaccatgaccttgctaccacctatgtttactcaaggccctaagctctacaatcagcaggtagcctaacttgggtctttcccttcagggtggcaagatcccctgggtcatgggggcacagggtgctctattctacagcagctaaactggcactgaaaccacaaaataaaaatccttgctctcatttcttctctttttccaagtcagaagagccactccccatgtccaccactaccaaaagcacacagggagtactgcctagctactgctgatgaaagacccaagtgctttt

SEQ ID NO: 102338 - DNA, 597 bp, Homo sapiens
cccacagaggggcccagtctacctactcagagaagacaaagtttgttcctgtagaggaagacctgatttctttgctgaaagaaatgatgaatgaattccttggaactagctgacacttgtttctatttgaaatagtggccttgaggtattcttgctgtgttttcggtgtctctgagaagactttcaatttctcagtgagtagatataccttccattgaccttgtagaaatgcatacacatattagcttagttagaaacagagtgagatttgagtgttaacattctagagcttctaacacgttttacaaatcctttctttcaaagcattgaaatcgtaataaatgaactgccaacatttcaatcatttcggcattatgtgagaacwgcacaaggtgaatttttgagtataaaaacggaattgggttgaaggctgacaatgggaataaaccttatatgatgtgcaaaatccttgcaaaaatgtaataaatgagagtcatcctcaaggattcttttaaaagggaaaagagagcttccataggaaatactgaggctctcttaaagccttcatgtttgactctacaatgttaaagacaagca

SEQ ID NO: 102339 - DNA, 552 bp, Homo sapiens
cggtactagtataaaaacagacatatagaccattgaaacaaaakagcaaactcagatataaatccacatatttacaaccaactcctttttgacaaaggggtcaagactgcactgaagtgaaaggacagtctcttcaattaatcatgctgagaacctggagaaccataggcagaagaattaaaatagatccaaatctctcattatgtacaaaaataaaatccgaatggattaaagacttaaatttaagacttgaaacaataaaactcctaggagaaaacattggagaaacactgcaggatattggtctgggcatagatatattatgtgtaagacctcaaaagcacaggcaaccaaaacaaaattagacaaatatcattacatcaatctaaaaagcttctgcacagaatagaaaacaacaaagtggagagaaaaactcacagaatgggagcaaatatttgtaaactacctttctgacaagggtttaataaccacagtacataagagctcaagcaactcagtagaaaaaaaaatccaattagaaaataggcaaag

SEQ ID NO: 102340 - DNA, 552 bp, Homo sapiens
cggtactagtataaaaacagacatatagaccattgaaacaaaatagcaaactcagayataaatccacatatttacaaccaactcctttttgacaaaggggtcaagactgcactgaagtgaaaggacagtctcttcaattaatcatgctgagaacctggagaaccataggcagaagaattaaaatagatccaaatctctcattatgtacaaaaataaaatccgaatggattaaagacttaaatttaagacttgaaacaataaaactcctaggagaaaacattggagaaacactgcaggatattggtctgggcatagatatattatgtgtaagacctcaaaagcacaggcaaccaaaacaaaattagacaaatatcattacatcaatctaaaaagcttctgcacagaatagaaaacaacaaagtggagagaaaaactcacagaatgggagcaaatatttgtaaactacctttctgacaagggtttaataaccacagtacataagagctcaagcaactcagtagaaaaaaaaatccaattagaaaataggcaaag

SEQ ID NO: 102341 - DNA, 574 bp, Homo sapiens
ggtttgtactgttccttacctccttatccaagataataataggcaacattcatacattatccacactgcttctaggtttctaccaaaggaggggctttgctgaatgtatagacagtactggactaccaaaacatctcttgttttggagtgtagacattaaggggttggtctgcagctcaaatccaagctttaaaggatgtccaggcaactgtttcgaaaagatttctacctctgggacagaagttatatagacctttggtgaaatccagttataacctacctgcttgtctcattcagagaggcaaggggcaaggtcttttatttcctccccctctaaacaagtaaacatgatttccaaaccaagaggaactttatagtgggttaaatagtgccctcccgcacatccaaagatatatccaygtcctaactcccagaacatgtaaatgtgaccttattttgaaaaaggagttttgcagatttaactgggttaaagatcttgagatgagatcatcctggatttagggtaggtgactgaatatgcaaatggacaatggccagaccatatgtaaaaaca

SEQ ID NO: 102342 - DNA, 586 bp, Homo sapiens
ctacggtgtctctgtgccctctcaatttatttcactgacaaaaagcatgtttttaatctgtctgcatcactgaactgactgagaaaacacagagcacaaaatagattctattccttgtgaattattaaagcaagttgtcagcaactgtaaatcctgctaacggatgacagcctcagaaacacagaatacamtctgtacaccctattggaacacaagaaagagaatcacttcttgaatggaaaattgaagaaattcctatttaaatttagaatatgaatttcaaggccatcctgaccatcaacccaaatccaaattaaccaataagtccttttaagccatgggtggataaagagtcataccattttgttattgtggtggtgcttgtctttccttaataccttatctgggtgagagcacaatcagccacagtgatttaaatgatgtttcacaggaaaagtttgtgggcactcaatatagataccttttaaagcctttgtaaaaagatgtaaaaattgtgcataaaataaaacacatgtgtgactctaaccactaaatgaaactaaaataaaggatgactgagttcatg

SEQ ID NO: 102343 - DNA, 586 bp, Homo sapiens
ctacggtgtctctgtgccctctcaatttatttcactgacaaaaagcatgtttttaatctgtctgcatcactgaactgactgagaaaacacagagcacaaaatagattctattccttgtgaattattaaagcaagttgtcagcaactgtaaatcctgctaacggatgacagcctcagaaacacagaatacactctgtacaccctattggaacacaagaaagagaatcacttcttgaatggaaaattgaagaaattcctatttaaatttagaatatgaatttcaaggccatcctgaccatcaacccaaatccaaattaaccaataagtccttttaagccatgggtggataaagagtcataccattttgttattgtggtggtkcttgtctttccttaataccttatctgggtgagagcacaatcagccacagtgatttaaatgatgtttcacaggaaaagtttgtgggcactcaatatagataccttttaaagcctttgtaaaaagatgtaaaaattgtgcataaaataaaacacatgtgtgactctaaccactaaatgaaactaaaataaaggatgactgagttcatg

SEQ ID NO: 102344 - DNA, 606 bp, Homo sapiens
gtgactgcaaatagtgctggtctcagtaaactggcctgcctgtagacaccacatccatcacagcaaagctggtgggatgtttgtaaagccctccagataccttggaaggaggtttatgattaatgcatggctgggagtaagcagtgggtgtaccagatgggagtgaacattcttctctctggccctaaaacaagtcctgatagagtgaagttaagattgccagggagatgggtgtggctctcacatcctcacctgtctgctgctgtcccagacaggccagacgcctggaggttgtgaatacctggggctgagagcrtgctgggcagtgtgttagaagaggaagtgctggggacagagcctgtagctgcatgaccctaaataaggcactgaactttgagcctcagtttcctcatccatagaatcgattcaataacatctaccgcaaagggtcatgaggacgaaataaaataacccacagtaaagtagctggcagacacacagtctgtgctcacttccatttttcggtgctttttatgtcaagcctatgagtcaaaactggtatgtagcgagcctcttgggggccctggagggaacttgggtaaagcc

SEQ ID NO: 102345 - DNA, 602 bp, Homo sapiens
tggttgctacagagtgactaaaaagaggctatataaggatttggcagttaggaaattgtagcaaatctttaccagggtaactttacctgcattgtcaggaaagagaggccagttacagggttggaagtgaagaagctgagttacgagtagaggttgttccattaagaaaattgtctttgaagccatgcagagagaaaggtgagtagctagaaggggacactgagtttggggggatggttttagaagttagagtcttgaacgtgtttatccattgagaagcagcctgtggaaaggaaagctgaagaggtgaagagatggaaagggatggattctggaccagggttggagacattaatctgcaacaacaggaagagcacatctccatctgaaattgtaagaaaggaaatagatgtaaaaaggtttgtgtgtgtgtgaaaagaaaacttaggaattttaagtccaatgacctcaattgcccaggtatgaagaaagccattttccaaggtgaaggawcaagaaaggagagaaacaatgaagggcaggcactggttttgacatctgctatggacatggaaggaatgaaacttgcaaagtggaactaa

SEQ ID NO: 102346 - DNA, 592 bp, Homo sapiens
tatcttaaaaataaaatttctatctttttatttattyattcattcattcattcattcattcattcgtttattagacagagtctcactctgtcacccaggttggggtgtagtggcatgacttcagcttactgcagcctcaatctcccaggcttaagcaatcctcccacctcagtctcccaagtagctgggactacaggctcgcaccgtcacacccagctattttttctatttttagcttcatgatgttgcccaggctgatatcgaactcctcagatcaagcaatctgcccacctcggcctcctaaagtgctgggattataggcatgtgccaccacacctggctttttaattagtatttttacttggttacacattattctgatacttttagttcttcagatattgtttcctttagctttttaaacatatttcaggtaactaatttaaagtgtattctagtaagtccaatgcctaggcctcctcagagatagtttctattaatttttttcctgtgtttgagccatacattttttgtttctttgtatagctcataatttttttgttgcaacctggatgttttgagtattatgtgg

SEQ ID NO: 102347 - DNA, 481 bp, Homo sapiens
ggttttgctgtttcctgtacctttaagtattttcttgtctaagggtctttgcgcttactcttacccttgcctgaaaccctcttcccctgataactacatagtaggtctctactcagatatcacctaaaaagtctttcttgagcataccacctaaaatagcgatcactacctcaaaactccctatctacctgaatctgctttttcctattcgtaatacttctctccatctgacacaagatgtttatttgtacatcatctgtctttccatatacagcaggaattttgtttgttactatgtctttaacactcagtgtgatgtctatgtgatcaataaattaataacatccaatatagcaatttattgtagatatttctttatatatttgttttatyttaattatacaagaattcttaattatttttatcttcaatatctggtacatagtaggtactcaataaatgttttgattcatgcatgact

SEQ ID NO: 102348 - DNA, 590 bp, Homo sapiens
gacactaacacaaatggggctccgggaaaatccagactaaaggtgttgtgttggtttgcaatctccttgcttaactttctgatactagacataaatagattggtgaaaaattttgtgattgaagaaatgtacatgaaacctacagtgtacagagaagcatctgttagttataagataaatattgataattttagttgaaaatgacatatgactgttaatatctcacataacatyctgagttactcaagaatgcataaaaggggcactagatactcttctcatgtatgtgtgtgtgtctgtctatacatgtatgtacacttcatggtgcatcagctggcggaaccctcaggacaccccttcacatcctcagtgccccatttcacacatgaggaaactgttcatgacagcacatggctgatttgcataaaagtcacttggtcagcagttgttgaagctgaacttggaatctaggtctgtctgaccttaaatatgttccttccacagagccacgttcattccatagaggagcccaccacatataaaaccagaaaagagacaaagccagaagtgcagggtggatttcttaacac

SEQ ID NO: 102349 - DNA, 402 bp, Homo sapiens
agccagaactgatgactccaagatcttagcccagtgaaactgatctggacttctgaactatgagagagtccattcctgttgtttgaagctaccacttttttgagaacttgttacagtagcccgaggacactaacacaaatggggctccgggaaaatccagactaaaggtgttgtgttggtttgcaatctccttgcttaactttctgatactagacataaatagattggtgaaaaattttgtgattgaagaaatgtacatgaaacctacagtgtacagagaagcatctgttagttataagataaatattgataattttagttgaaaatgacatatgactgttaatatctcacataacatcctgagttrctcaagaatgcataaaaggggcactagatactctt

SEQ ID NO: 102350 - DNA, 512 bp, Homo sapiens
tatgacatggaatcactgaagactgggatattatggaaaggttcatggagcaagtggtttttaaatatctttgagcagaatctgaggaccattattttttaatgacagaacttccactgaatacactagaaaatacagaayatttttgcagaaattatgtttgaattatttaatgtaccaggattctacattgcagttcaggaggtactagccttggaagtatcttgaacatctcaacaagtgggtgaatatatgttaatgagtatagtcattgacaaaggagatggagtcacccttattctcccagttgtagaaggttatgtaattgggagctgcatcaatcacatcctgattgtaggtgatactgtgtatttcattcaacaactgctaagggagagggaggtaggaatccctcttgagcagtcactggagaccacaaaagccattaaggagaaatactgttacatttgccctgatatagtcaaggaatttgctaagtatgatgtggatcc

SEQ ID NO: 102351 - DNA, 512 bp, Homo sapiens
tatgacatggaatcactgaagactgggatattatggaaaggttcatggagcaagtggtttttaaatatctttgagcagaatctgaggaccattattttttaatgacagaacttccactgaatacactagaaaatacagaatatttttgcagaaattatgtttgaattatttaatgtaccaggattctacattgcagttcaggaggtactagccttggaagtatcttgaacatctcaacaagtgggtgaatatatgttaatgagtatagtcattgacaaaggagatggagtcacccttrttctcccagttgtagaaggttatgtaattgggagctgcatcaatcacatcctgattgtaggtgatactgtgtatttcattcaacaactgctaagggagagggaggtaggaatccctcttgagcagtcactggagaccacaaaagccattaaggagaaatactgttacatttgccctgatatagtcaaggaatttgctaagtatgatgtggatcc

SEQ ID NO: 102352 - DNA, 584 bp, Homo sapiens
tccttcacatcctttacacacacattaatcacaaagtccctcctaaatatatccatatgccactcatatctctctaaatatctaaaaacaccactagttcaattaaccatcatttcgcatctaaattgtagggaaaaaacattaaagggatttctttataactagtattgccttaaatccgggaaaatctctttaaattgtaaatcatttggccactccactccttcagaaatcattcagtatctacttaaacctgcaaatttgacattgtgaatattttgattccattgttttactggtaaggaagttttaaaacaaatactttyaaaatatttttattgaggtatagttgatatacaataaactgcacatatttaatgtgtataatttggtaagtttgacatatgtgtatgcctgtgaaaccatctcaaaaatcaacatgtattcaacatatatatccaataatttcttgatatggctctttagaatcctaaactacactagatctctgctgtcaccattcaccctacaccatggcatgacaaccatagatttattttatgccattctagattagttttaat

SEQ ID NO: 102353 - DNA, 563 bp, Homo sapiens
gcttattaacatgaagtcgttggtaacattggtgaaattatttcatgggattatgatgatgaaatccatgttagcatgggtcaaacagtaagtaggagcaaaggaaatcgagactgcggaataggccactacctaattgtctggctgtaaaaggaagaagagagatgagactaactggagaggaaggaaagggagaataaagtttgcatttgggtttttgttttttgtttktttaactatatgaatttggctatttttaggatctctgggaagatgagaaagagaagtggaatatacaacagaaagaaaggataagcttatctgagaaggataaagagcctatgagtacaggcatagatggaatccacagagaggttgggagattttcttgagacggagcatggagagcaacagcactagtagaatgggatttatggatatgcaggaataatctggaagattccatctggtggcttctacttttattttcatagagtagaagatgaggcacaggtcagatggatttttgattcatccaaggttgggtttgaaataaagacaaa

SEQ ID NO: 102354 - DNA, 696 bp, Homo sapiens
ttctgatagcatttggactggctaaaattgtcgtatgttctcactaaaatgggactatttagattttattcaatacaataagaaattatttaataagatgctaatactacacttgcacaatgatttatctccacttttttatttcctctgtgttataaatctctacattggagataagtgtagcagcatttcaggtatgcgttagatgagttggcatacataacccaaggctctatattttaaaacacttacaggattcaatttttaaaggattaaaaaaaaagatgaaagaaaaaggcataaaatagctctacatattatatctgtcagtatattaatatacctagcttttcagcatcccccatttcaattttgatttggtgactcagtgctgtttaattcaccacttccatttttaaattccctcttgcttttccattgcccagtgaaagtttaatttgtatttatccccattttttagcacataaaattgtagcctataacaatgacgtaagtataaggaggctataaaattattgcaataaatatcctggatattgtaagaaaagacctcctgtcacgagaaggaatattcaygtaactcaaacttccctatatattagaattgtagtcaaaagaaatgacttccccccgccctcaggtgaaaagtctgaatctgcatttaaatggaaagaa

SEQ ID NO: 102355 - DNA, 568 bp, Homo sapiens
ggtagcaaggccctggccacgacacgaaaccattctgtcctkgtaggcctctaagcccatgatgggaggggttgcaaagaaagtccatgaaatgccttagaagccttttaaccattgtcttggctattggcaattggctcctctttacctatgcaaatttctgcagcctgctggaattcttcccccaaaatgagcttttcctttctaccacatggtaagactgcaaattttccaagcttttatgctctgcttcccttttaaatgtaagttctagtttttttgctcacacacgagcataagttgttagaagcagccagtccacctgctaaaagctttgttgcttagacatttcttccaccgtataccctatatcatttctctcaagtttaaagtttcacagacccctacggcagaggcacaatccgagctctttgccaaggtgtaacaaaagtgacctttgttccagttcccaataaatacctcatttccatctgataccttctcagcctggactttgttgtccatatcactatcagtactttggtcataacaacttagcaagtctcta

SEQ ID NO: 102356 - DNA, 568 bp, Homo sapiens
ggtagcaaggccctggccacgacacgaaaccattctgtcctggtaggcctctaagcccatgatgggaggggttgcaaagaaagtccatgaaatgccttagaagccttttaaccattgtcttggctatyggcaattggctcctctttacctatgcaaatttctgcagcctgctggaattcttcccccaaaatgagcttttcctttctaccacatggtaagactgcaaattttccaagcttttatgctctgcttcccttttaaatgtaagttctagtttttttgctcacacacgagcataagttgttagaagcagccagtccacctgctaaaagctttgttgcttagacatttcttccaccgtataccctatatcatttctctcaagtttaaagtttcacagacccctacggcagaggcacaatccgagctctttgccaaggtgtaacaaaagtgacctttgttccagttcccaataaatacctcatttccatctgataccttctcagcctggactttgttgtccatatcactatcagtactttggtcataacaacttagcaagtctcta

SEQ ID NO: 102357 - DNA, 574 bp, Homo sapiens
gcagacagtccaatacatactgagagacatccagctgggagtaatttccccacctaaatgaacacgaaaatattcaaatacagaaaaatattccaaggcaaattaatgtgaagatccttataatctaaacataacagattacaacttttacaactatccacttacgataccctgcaaagaaagagattttacagtgatcttacattcacctctcatttgacatatctgaattatttgctttttcaaatgagaaagtaaagaaaaatcacaaatgtaaatgtttctcaatttggcatggtgacaacatctattgctctatttccaaagataaaagacacaaactaggataatatagttgggtatataacttgtacccaaacatgatagattatcattaacctggggggagctctgattttgttctgttttgtatatcacctttatcagtaattagaatccagacactgtaaaatctaaaaaattagaagtgygtagcaacttttaaaattctattaaagagagaggcacagttaatgttgcatgacagaaaacagaaatgtttaatagacctata

SEQ ID NO: 102358 - DNA, 631 bp, Homo sapiens
aattttgaaaactaaaatttagagataaattttgaaggttagacatagaacctattcatggagcaacaggtaatgaggattgcttaaataagtgtagaatacaaaytcagtgctgcctacatgaagtgtcaaaaaatgtatttcattcatgaggtaacacttatgaatagaaaattgaaatagaaaagcattagcttccccaattaaaaacagaattaaagtgaataaaacaagtgagaacaattttcagctattactccctctttaatcttctgaaatacttgcttactaacagtgaagataatgggtaaggagcattatagttctaagtgagaaggaaaacattgtaatcaatgctgaaatagatttatcttaaagtaggggcataattgggcccccacgtcaactttgcatacactcatagaggactttcttattattagtgacccaaatcttggcttaaatataacttgctctcagatatgaaatacatatagtacaatctttttaaaagtgcatacttgaaaaaaccttatagttgggatcaccaaattaaataaaaataggttgattattgttttatctgacaaatatttatcgagtgtctacttcatgcaaggaactatgtgaa

SEQ ID NO: 102359 - DNA, 565 bp, Homo sapiens
aatgcattgcttatttcccattttttacatcttaatttgctgatattttattagctgatcatacagatcatcaggaatgtttcctagttcaggaaaattataatgctatctcaattatttttgccccattaaccatttgctcagttaattttacaagtatcaatagtgcatttcttgactgtgattatcactctgaccttctctttaattgaccagagggcaaaacagagtcagagagattgtgcaaacgtactttgtctttaagtgtttacagcttaattattaactttgcaacattcctwaagataaataaaaattttaaaaaatggatcacttggttgtcactcttttgaaaacagtgaaagttataactttatcttaattctttcactcatatttatttatttgaaaatattatatagggctacttttgtactttacaaatactgtagtcagtgtaattgaattatgcaaatggaatgcatgtttttctttttaaaaacatgtgacttatgcagtctattgcacaaatcctctataatatctccatgaaaacttctgctaa

SEQ ID NO: 102360 - DNA, 600 bp, Homo sapiens
ataactttctagctttctagtgctggacatctctgaacactttctttattaaaaatgagttaacagctttcttggttgaagaacattggaagtcacgaaatattaaagagaaattacaaaagattattatttacatgatagtcttttccttatgtgactgaaagaagtgagcttttttcttccaaaaggaaagacttgcttggaaaaagacctgaagagtcaaaagcttttcttgtggtgaccaagactcatgaaatttctttttatagaattctctggcttctattccatgtgaattgatatgaaatctcacataaatttatctttttattttgaattccaattgaacctttaaaagaaagatgacattccaactcagccaatttgatatacattacatttacaattagataatcagtgcactgaaattaagcccaacagacttcagctgaaatgggctacgttagattatgttccatttaatatgacaaagaaaaattttactatttgcttctttacttaaaagccttccctttycctctctccacttataacatcctctaactcaatgatgcccagtgctttctctgcttaacacat

SEQ ID NO: 102361 - DNA, 473 bp, Homo sapiens
atgaattccgtatctgttaagtaaatatactttatgtgtgcaagatatttgtagaaagctatttatagcagcattgattatgttagcaaacattggaaatttttcatcaataagattttattgtaataaattgttacattctttaatgaaaattactacaggccttaaagtgayatttaaaatgatatgtgtgcttatacacatatttatatagatagcaaacactataaatacattttaaaggacaagaaactaattccaaaaattaacagtgacttcccatggatgatgaggttataatggatttcacttttaaaacttatttcctaaatttcttttataaataattcatgcacctatccattaatttacatttttcccctttggtttccataacaaagtagactctatacctgtgatcttaaatcttatgttctagctttgaaaacagacattaaataaatattttaaaa

SEQ ID NO: 102362 - DNA, 473 bp, Homo sapiens
atgaattccgtatctgttaagtaaatatactttatgtgtgcaagatatttgtagaaagctatttatagcagcattgattatgttagcaaacattggaaatttttcatcaataagattttattgtaataaattgttacattctttaatgaaaattactacaggccttaaagtgatatttaaaatgatatgtgtgcttatacacatatttatatagatagcaaacactataaatacattttaaaggacaagaaactaattccaaaaattaacagtgacttcccatggatgatgagrttataatggatttcacttttaaaacttatttcctaaatttcttttataaataattcatgcacctatccattaatttacatttttcccctttggtttccataacaaagtagactctatacctgtgatcttaaatcttatgttctagctttgaaaacagacattaaataaatattttaaaa

SEQ ID NO: 102363 - DNA, 601 bp, Homo sapiens
atttcttgtaaacctaattagagatggctgcagcaaacttcaagccttagtgtctttactcatctcggtgtctaaaagtcacataaagcttcaatcatacaaactgtgcagttaaccaagtgtgatgatttttttcccaaagtaattttattaactcaattttgttttaaagtagtatttccaagtttaaatatattttattctagaaaaaaatcattggaatatttagtgctrtaagatctacaatccatgaatccttaaaaagcaggattgcaaattgccccgaatagattaatataaagtagtgaaataaattaagcaagggataaaaaagaaacctttggtgaaaagttatcacatgtaattggggaaaaatagcacattttgactattgaaattaactgtttgttaatatcaattattttaatgcatttagtctctgcttttaatgtgtaagcatcttgttgcatgacttactatatttccctacacatcatatcataggattgctttctttttgattacctgctgagattagtaccaaaatataaattttaagagcatgtgtgtgtgatggttaaggatgatatatattcttgga

SEQ ID NO: 102364 - DNA, 522 bp, Homo sapiens
ctctaaaggggctggctcttagtcctctcggtctgtggtgcaacagggctcctgggctctgctcatcctagctgtcagattaatggcagggacttctgcagtgatctcagccacacatgctgcctcttctatgtgacccagaacagagctcagagtgaggtcgtattgatttcatgagaagctgggcctgcatcttttctttcactctaggtttgttggctcctgcctgtaagatggctgaaggctatcatttttgtktggaggattaattagaatagatttctttgacttgggatgccaataaaacctgtggtctccagctattgatttatgatgctaagcaggaagtgttggtccctgaacaggccccaagaaagtagtggtattgggcattttgatgctcgggtggttaattgtggcaaactggaaaagaataagaacacataggagctttggggggtaccgtggtggaagggagattggtacaagggccaccctgattcagtgaatgaaaagagaatc

SEQ ID NO: 102365 - DNA, 530 bp, Homo sapiens
atgtccacatcacagggccaattggaggactgagtgggagaatayataagaaaagtgccaagtgttacataaacactagcattctttccatcaagaggagaaaattgtttttgtgggagaaaatgggtcctggccaagcatttttgcagggtgatgagcataaactcaacactaagtggagtagatagttcaaggtgccgagataagtcaagccaatgatttcaaggggttgggaaaacctcacagggcaacatgtccttgccagctcacttgaacctacttcaaatccaaatattaaactttttttctgactacgagggtggtcttggttaaactgccaacctataataaagtgcctgaaatcatagtctctggccaatggcttcacctttgagtcacattctttttctagctatgtgatatttaggccccagttgtctgatttgcaaaacaatcatctgagcaatggtatctgcatcataaatttgttgtaagaattaaataaggtagtgtagacaaagcccttagca

SEQ ID NO: 102366 - DNA, 470 bp, Homo sapiens
gtgagggagagcaaatcaacagaacacagaagcaagggaacatgagcccttttcctaatctcratagctggaggcccaaggaatcccgagaacattagttctaagtttaaccagtagggtccataaagaagttttctcccaccattaagcaaaacggtatagtggggaagtgtttgggctctgaattgatcaaggcagttcaagtcctctgccgccatttgctagctgcgtggtggtgggcaagtttattagtctttaaacctcaattttctcatctgtaacatagagacaacaatggaacctgcctcaaagatgtgtcagggagattcagtaagatcacgcatttaaattcatcacagtgcctgacacagtaaatattcaaaacattgatggctttgaacaaagttattattgttagcatcattattatcatcctgattgttagggtatgaggggtctaataaatcgta

SEQ ID NO: 102367 - DNA, 529 bp, Homo sapiens
tttagtctgcaaagaaacatcaaaacatacagctaaagggactaacaggctttgaagttttagcaatagactgtgaacatgtctcattcttttatttttctttcctcccttttctttcttccttccttttttccttccttccttctttcattgcttccttctgatatatatgaaagatagaatagttagccaaacagtcatattctctgccctcattggtctatagtccaatgaggcaatcagagattaagcaaataattgcacaaataaatgtaaaattttaaaggagatataaatataagagcatctgacaaggaatttgatgtagtcagagggtcaaatgacaggtttcagtgccttttagacatccaagaagaaaggttacataggtgattggttatatggttaaagtmaaaaaatgggttgttgcacattactgctgggaatgtaaattggtaaacccttatgaaaaacagtatgcaggttgctcaaagaaataaaaatagaacaaccatatgatccagcaatc

SEQ ID NO: 102368 - DNA, 612 bp, Homo sapiens
aattcccacaattcccatgtgttgtgggagaaacctggtgggacgtgattgaattatgggggygggtctttcctgcactgttctcgtgatagtgaaagagtctcatgagatctgatggtttaaaaaaaaaatgggagtttgcctgcacagtctctttctttgtctgctgccatccacataagatgtgatttgcttctgcttgccttctgccatgattgtgaggcttccccagccatgtggaactgtaagtccaattaaacctctttcttttgtaaattgctaagtccaggtatgtctttatcagcagtgtgaaaatatattaatacagtaaattagttccagtagagtggggtgctgctgaaaagatacccaaaatgggaaccaggtaacaggcagaagttggaacagtttggagggctcagaagacaaggaaatgtgagaaagtttggaacttcctagagacctgttgaatggctgtgaacagaagtctgatagtgatatggacaataaggtccaggctgaggtggtctcaaatggagatgaggaacttgctgggaactggaacaaatgtggctgactctcgttatgttttagcaaagagactggtggcaa

SEQ ID NO: 102369 - DNA, 612 bp, Homo sapiens
aattcccacaattcccatgtgttgtgggagaaacctggtgggacgtgattgaattatgggggtgggtctttcctgcactgttctcgtgatagtgaaagagtctcatgagatctgatggtttaaaaaaaaaatgggagtttgcctgcacagtctctttctttgtctgctgccatccacataagatgtgatttgcttctgcttgccttctgccatgattgtgaggcttccccagccatgtggaactgtaagtccaattaaacctctttcttttgtaaattgctaagtccaggtatgtctttatcagcagtgtgaaaatatattaatacagtaaattagttccagtagagtggggtgctgctgaaaagatacccaaaatgggaaccaggtaacaggcagargttggaacagtttggagggctcagaagacaaggaaatgtgagaaagtttggaacttcctagagacctgttgaatggctgtgaacagaagtctgatagtgatatggacaataaggtccaggctgaggtggtctcaaatggagatgaggaacttgctgggaactggaacaaatgtggctgactctcgttatgttttagcaaagagactggtggcaa

SEQ ID NO: 102370 - DNA, 539 bp, Homo sapiens
tgcatatttttcatttgcctcaaagggtaaattccaattatatgactgcattaactgtgtwcgatgacttttgtaaggcctggtaaacaataactgagatatatctgctatttcaatgaagtcaatgtgtttgttttcttattttcatttcttaaagcaatcataataaaacactaacctagagctgacatgaatttttctcaggtgttttaaagatggaaattaaaaatcacgctcccggtctgaattgtcctcattgtcccttatctgaacctctccaaggcctctgtgtgtggggtgtgcagcacagcacactcagacggttctgctcagagaaggaagtggagagttttggttcccattttacacttctggaacagtttagggaaggaagcacctttacaccttttattgttcgtggttgctgacatcatatccttccctgaccagtctgtgtgcgtgtttcctgccattctgtcaaaattcttctgtgctactgggagagatttgtaggagggaaggagggaggaagagggcaa

SEQ ID NO: 102371 - DNA, 620 bp, Homo sapiens
atgtttaaccattgaaataaaaatgtgttattacttaaaatactccagaaaaaatataagatagataaaataagattggcaaaatgttgatctttttaaaaactggatgatgggtacacgggcttataaattctctaattttatgtatcttttgaaattttccrtaataaacaatgtttaaaaactaaaataaaacacatcaaatctggggccaaggctcgggaatgttctctcacagagacctaaaatctactcaagttccacagaggagcaatagaaaaactagtcacacagaaaaattccaagttaaagtttgttgactcgatgaatgaatggttttcaaacttgttatctttcttgtggcttttagctctggttccttggatgctctaaactgctaactttcccttaaggggtgggcaacaaattaacatagaaaatttcatgacaagatgagtaataccttagaaaacagcctaatctgaggagctcctgctgcttttcttttattgctatgcacttggtttccattaccatgaagaacatatctagaaagttttgataaatttccatagtcatgtttggttgcccttggatgtttctgcaaaatgaggtcaaat

SEQ ID NO: 102372 - DNA, 472 bp, Homo sapiens
ggaattcacctacaattagcaaatacacatttctgtaatgtctcctgtgtacaaagctctgtgttaggcaccacagggattgcagaaccccagctccactatgaagtaatatatgaccttgaagaaaactttattcgtcctgcctcccaagctaccgtcttccaggctcacagaatcggtggtggcagcatttttctttttgaggtgtgtccaaggtcaaggtttgaagtagttaggaagaaaatctgataagaagaaaaacaaaacccaataatgaaaacaacatatggaatagggagaaaagtcaaggagaatttacatttctaaagatgctatgtttctggccaggggaaataatacattttgccagttggcttcatggtgtcccaatctgggcccagacacagatggaacagatgttggagcttcttcctggaactstatggccagactcttatcccttaagattctc

SEQ ID NO: 102373 - DNA, 538 bp, Homo sapiens
ccacattttaaaatcccagtggtaaatgttgcaagtcatttgattatattcaacgcctgtgaataattattcatgcctctcatctctgacctctaggctcttcgttctgccttttgagttattcttttttttttttccatgaaatacagctkgtacttgcaatagtacttgggtgttgaacttgttaagagtgcatatcctttttttcagatccatctatcatttcctagttgtatgtggttgtgtgggttatttctcctcttttacattgattttctcacctgcaagtgaataatagtaacactttatgagcagggttattgcaagtagcaaggagaaaatatatatttaccatttgccacaatccctggggaagtgcagtcaatacattggaaagggtcctcataagagtttgatgatcattctcagaaatctagccagagaaagtctaaatggtaaaggttccagctcattatcttcttcccttttctcaagttttctctccatctgacatgtgagctcagtatttaccattgcc

SEQ ID NO: 102374 - DNA, 538 bp, Homo sapiens
ccacattttaaaatcccagtggtaaatgttgcaagtcatttgattatattcaacgcctgtgaataattattcatgcctctcatctctgacctctaggctcttcgttctgccttttgagttattcttttttttttttccatgaaatacagctggtacttgcaatagtacttgggtgttgaacttgttaagagtgcatatcctttttttcagatccatctatcatttcctagttgtatgtggttgtgtgggttatttctcctcttttacattgattttctcacctgcaagtgaataatagtaacactttatgagcagggttattgcaagtagcaaggagaaaatatatatttaccatttgccacaatccctggggaagtgcagtcaatacattggaaagggtcctcataagagtttgatgatcattctcagaaakctagccagagaaagtctaaatggtaaaggttccagctcattatcttcttcccttttctcaagttttctctccatctgacatgtgagctcagtatttaccattgcc

SEQ ID NO: 102375 - DNA, 428 bp, Homo sapiens
gtgactttgaaaagagaacaatttgcataacattactcaggcagagttatagatcatctttgggtctgatcttctttcatctataaataccttaagtataatctaatggctttgtagttaatataatggccactatgatgttcttgagctcagaataagtattagcatgaaactaggcaacttcaaaaaaggaaacactaagtgttttataagtttaccaggaagaatctagcaaaagtagtttgtgttgtacataataaaattatttcagacaaagaaactcacgcaaaattttcttatactcatattgrctggtttaagtgagtaaatcctgtgtgtaagtaaacaatcagtgacaatattactttaaatctcaatcactaactactaaaccattctacatcacttataatcatagatttcaagaa

SEQ ID NO: 102376 - DNA, 535 bp, Homo sapiens
tagaaacaattaaaaatgtccccagctggctaggaaaagaaagagtatggtttrggattataaactcttcgattccctatgatatttagcaatttaattgtattactttgattaaaatgtttttgatcagtttaaactgatgtaatgaattcatatttattgatacagaaaaatatgatataatccatctaaaaagcaagttacaaaacagtgtacagtgtaccatagtacctatgaacacaattagtgaagtaatttgcagagctataataccaaatcagaaattattttggtaatgaatttatgattttcctcgttttctgattttttccatgatctcatatactttattctcagaaaacaaaagacaaaccccacacatacacaaaaataaacgagtaacttctttacaaccccagaggctaagtcagtgggaaaagagggaaatgaatggttatgagcataaacacagggacaaataaaagaagtttggagcacagagaacattcacaatcagaagtcattttaaaggaca

SEQ ID NO: 102377 - DNA, 535 bp, Homo sapiens
tagaaacaattaaaaatgtccccagctggctaggaaaagaaagagtatggtttgggattataaactcttcgattccctatgatatttagcaatttaattgtattactttgattaaaatgtttttgatcagtttaaactgatgtaatraattcatatttattgatacagaaaaatatgatataatccatctaaaaagcaagttacaaaacagtgtacagtgtaccatagtacctatgaacacaattagtgaagtaatttgcagagctataataccaaatcagaaattattttggtaatgaatttatgattttcctcgttttctgattttttccatgatctcatatactttattctcagaaaacaaaagacaaaccccacacatacacaaaaataaacgagtaacttctttacaaccccagaggctaagtcagtgggaaaagagggaaatgaatggttatgagcataaacacagggacaaataaaagaagtttggagcacagagaacattcacaatcagaagtcattttaaaggaca

SEQ ID NO: 102378 - DNA, 535 bp, Homo sapiens
tagaaacaattaaaaatgtccccagctggctaggaaaagaaagagtatggtttgggattataaactcttcgattccctatgatatttagcaatttaattgtattactttgattaaaatgtttttgatcagtttaaactgatgtaatgaattcatatttattgatacagaaaaatatgatataatccatctaaaaagcaagttacaaaacagtgtacagtgtaccatagtacctatgaacacaattagtgaagtaatttgcagagctataataccaaatcagaaattattttggtaatgaatttatgattttccycgttttctgattttttccatgatctcatatactttattctcagaaaacaaaagacaaaccccacacatacacaaaaataaacgagtaacttctttacaaccccagaggctaagtcagtgggaaaagagggaaatgaatggttatgagcataaacacagggacaaataaaagaagtttggagcacagagaacattcacaatcagaagtcattttaaaggaca

SEQ ID NO: 102379 - DNA, 535 bp, Homo sapiens
tagaaacaattaaaaatgtccccagctggctaggaaaagaaagagtatggtttgggattataaactcttcgattccctatgatatttagcaatttaattgtattactttgattaaaatgtttttgatcagtttaaactgatgtaatgaattcatatttattgatacagaaaaatatgatataatccatctaaaaagcaagttacaaaacagtgtacagtgtaccatagtacctatgaacacaattagtgaagtaatttgcagagctataataccaaatcagaaattattttggtaatgaatttatgattttcctcgttttctgattttttccatgatctcatatactttattctcagaaaacaaaagacaaaccccacacatacacaaaaataaacgagtaacttcwttacaaccccagaggctaagtcagtgggaaaagagggaaatgaatggttatgagcataaacacagggacaaataaaagaagtttggagcacagagaacattcacaatcagaagtcattttaaaggaca

SEQ ID NO: 102380 - DNA, 546 bp, Homo sapiens
gtttcaccgtgttggccaggctggtcttaaactcttgacctcaagcaatccacccaccttggcctcccaaagtgctgggattacaggcatgagccaccatgcccagctgatggttcaatatttaaaaatcaatattcaaaatcagtcaaatcaatgctattaaacagactaaagaagaaaatcacaagatcatatcaattgacaaagaaaaggcttttggcaaaattcaactcccattcacattcacagagagagagaaaaaaatatcagaaaagtaggaatagaagggaatctccttaacttgataaagagcaactaccaaaaacttacaataatatacttaatgatgaaagaatgactgcttcycctctaagattaggaaaaaggcaaggatgtccactcttaccattcttattcaacctagaacttaaagctctagcctgtgcaataaagcaagaaaaggaaattaaattatacagattgaaaacggaagaaataaactgtccattatttggcaggtggcatgatgatccacataggaaatcc

SEQ ID NO: 102381 - DNA, 555 bp, Homo sapiens
tatgtgttgtgatacaagtacctggagccataaaaatataaagcagatgtcttgctttaagctaagtgtaaaggaatgcatgccaacctgaaaaagtaacatctagacataaatctaaaaaataatttcaatctattgcagactaaaaactacaacaaacaacaaaacctrttccagacagagaaaatagtgtgtagaataaccaggagattaaaaaaaaaggtataatgtcataaactgaaagaagttaaatgtggctaaaacttagagagaagggacatggtggccagcactgactctgaggatggtgacaagtggcagatactctagagtttggtacagtgtttaaaaaaatttcaactttttactaagaaaaacaagagattttgtatttctgttggtgcaatatggaaaacaaattacagcaaaatacagcagggggacaatttgaaggcaattgcagcagatgaggctagacatgatgatcttggcttctgtcaatgtggtaactaacgggatgaagaggagagagtcactgagtatttagatgatacc

SEQ ID NO: 102382 - DNA, 599 bp, Homo sapiens
ctaataacagctgggatatgaatgtaggctatttgagtcatattactttccagcttcccagtactctggcttacttttataaaatacgtgtttttgttcagtttagttttagttttcttactcagtggcaaaaattgaacccaaagcttgcattcttttttgttatttttctcatttatacctctttctaaaatgagagaatcacaaatgcactggtaattgctgttaaaatgattcactgtataaatacattgtaaaacccatgtaaactatatcaccactaaacattaaaagtacattttgtggttctgtttaaatgaatctacttaattaataaatcatagtttcatgttttctgagttagtttaaaaatcacagatttaatttttcatgagataatctaatggtctttagagcaaccattgtctttataataattatattgtttccttcctaccccaagaaggaaaatctgatttatataatgacatatagctatagaaactatatataattatgtatatatttatatgatgaaacatatacagagatgtaaggctttctttgatkaatttaataatattacaaaatgaagcagc

SEQ ID NO: 102383 - DNA, 417 bp, Homo sapiens
ggaaatggagaagcttccaaagaactccatttcttgaaaggatttctctcctcagcctctgtatcaatttttctttcttttctcccccagttttatgcttaagtccagctaacattattaggagcataactactcccatgacccaacactttaaatagtacctagtgaatttcrgtaaactctgccgtctagtttttatctttaagtagaaacggaatcagcactttgtgatacaataaggcacagcagaagaagttcagttttaaagtcacactgacatgagctcaaattcaaattgaactcacacagattgttcagtcactctgaacctctgtactttcttttatcaaatgagaaatattttcatctcattggttgctttgtgaattaaatgagttcatacacataaagtgacca

SEQ ID NO: 102384 - DNA, 511 bp, Homo sapiens
tatttaacttttcacagactatttagaatcaatattcttgttacttaaagtggaatacagaaactttcccaatatgtagtactatgtattctctcctctttatgttgtagtgttcttatacattacatgtagttacatcgtaaatctcatcacaaggtattataatttttctttyaactgtttaaacatattttagacaacttaaaagaaatatagtttcctatttacccagatattttccatttctattgctttttcttcatttatgattttccaaatttattttctggtctcatttcccttttgtctgaagaagttgcttcagaatttctttgaaagcatgactgctgacaattaattatcttagtttttccttatctgagaatgcctccattcctgaagaatatttttgctggacatggagttcttggtggacagttcttttctttcagctctttaaatctcttgttccgctcctttttaaactccaggatttctgatgaaaattttt

SEQ ID NO: 102385 - DNA, 540 bp, Homo sapiens
tggctcttttttctggttctacagcagcttctgacctttgcactagaaatgggacatcagctctgcagattttggacttgccagcttccagaattatgttasccatttccttataaattatatatttataatatatatcataaatatatacatttaaacaatataaatatttataaatcataaatatatgtatatattttgtttttctggagaactctgattaatatgggaggatagtcctcctttacctgaataacctggaatggcctcccctgaggattgttgataaaaagtgtcaaactctgtaaaatatttttagagatttattttgagccaaatatgagtgatcatggtctgtggaggtcctgagaacatgtgctcaaggtggtcgggggtacagcttggttttatgtattttagggaggcatgatacatttatcaaacacatttaagaaatacactggtttggttcagaaaggggggacaattcaaagcagggggcttccaggctataggtaaattcagacattttctggttga

SEQ ID NO: 102386 - DNA, 571 bp, Homo sapiens
tcattctagaagaggtccatccaaattcctctttcccaaacctccttgccaacaagttttcaagtatgttccttctaaatccctgacccttcagccaaaccatctgtcagagtcaattcattacagactggtatctctggctattttattctcttgggaaaaataaccaagcaagggcactgcttgaagttcgcccactgggaggattctcctttactatagtctttcagggatgcccggagtaaggctgcagagtttcagttgtccacttttgagtggtacttgcatacaatgcagaaccatttgttaaccagacctgaggtttttttttctttytttttttttcccttcctcagtcaacttgtcttaggcaggaagacttaggtatggattgaaagagagaaggtaatgtaggggaaatagggaccatggacatactggcaaatccctcatgtaacttccttgtgccttaagggcctcctcaagtctgatctcatatatactgcctccctttgataacagagtacagctgttcacactcaacattatgtcttgtcagacaacacccagt

SEQ ID NO: 102387 - DNA, 588 bp, Homo sapiens
cagtctggagagagctgacatcttaacaatactgagcctcaaatccatgaatatagactatctctccatttatttagaatttctctaatttttctcaatgatattttgtagtttgtggtataccagtcagccccaccttttgctaaatctattcctaagtattttgttatttttgatgctrttatgaatgaatttgttttcttaatttcattctcagattgatcactggtagtataaaaaaaagatgatatacctgggcaagatggctgaataggaacagctccagtctgcagctcccagtgagatcaatgcagaaggtgggtgatttcaacatttccaactgaggtaccagactcatctcaatgggactgcttagacagtggatgcagcccacggagggtgagcaaaagtagggtgcagtgtcacctcacctgggaagtgcaaggggttggggaactccctcccctaatcaagggaagccctgagggactgtgctgtgaggaacagtgcactccatctcagatactatgcttttcccagggtctttacaacctgcagaccaggagattcccttgggtgcctacacca

SEQ ID NO: 102388 - DNA, 536 bp, Homo sapiens
tacaggtcatgccgatataagaggtgggctcccatggtcttgggtagctccacccttgtggctttgcagggtacagtctcactctcggctgatttcatgggctggcattcagtgtctgtggcttttccaggtgcacggtgcaagctgtcggtggatctaccattctggggtctggaggacagtggccctcttctcacagctccactaggtggtgccccagtaggaactctgtgtgaggactccaaccccacatttcccttctgtacygccttagcagaggtccttcatgagggccccacccctgcagcaaacttctgccttgacatccaggcctttccatacatcctctgaaatccgggcagaggtttccaaacctcaattcttgacttctctgcacccacaggcccaaccatgtggaagttgccatggcttagggcttgcaccctctgaagccacagcccaagctgtaccttggccccatttagccacggttggagcagctgtggaaaaggtctctggcaagccctagagacatt

SEQ ID NO: 102389 - DNA, 558 bp, Homo sapiens
tcctttggtgtagtcatattctctcagcacttgactaagcaggtggaaagcttatttagtcataggatgactgaaaacaatgaactataaacccatgtatatccactccaagaaaagagctaataaatgtcatgttttttattttcccgtggaccccctttttttttttttttttgtattttataacctttccagaatcttgagtgatttttaaatgtttgccctttggtcataaatgcagcaagtaaatgtgagtctgcacactcgaatgttrtataaatcagttgaccagtcagtgttggagcaaacttctcaggattgctctgtgaactccctgttctctggcagttgccaaatacaaagataaaccaggagagacttattcccaagaaaagaatgattctgcatccttaacttacatataaactgttgagatgtttcattgttttgtatggtcaagccccttctcttgttctctctcttcatcaattagtatggaaaattggaagtttactgaaaagagtttcgaatcatgggattttagatttgaaaaggacc

SEQ ID NO: 102390 - DNA, 611 bp, Homo sapiens
tgagtcacttcagctacaatttctggctatatttccctttgttagacacttttgctagttcatttctgaactcatgaatactatttgcctgrcactgttcaaatttccattaggtgtcatataatttccaacaaatcaccatggccaattatattagtaatagacttatgcttggaagtgtctaccaaaatatcgaagtcaatttgtgtttcctatagtgatgaaaaaataataataatcctctatttcttccttagttttcactcccccaacatgagtatacaactaaggctgttttgatagtgttattaatatttccctgtaagaaggaaggaaattttctttgttttgttcactgcaatagtctcagcatgtagaaatgacttgtattattacatagtatttttgaatgaacaaaggactatgttacacattttttagtggaatagtcccattactatttttgctcatggttctctttctcccattacacccagttattaatccatgttgtgagaagggaggtgaataaaggaggtgtgctaagacacaaatgtgagtatatacgtcataaggtttaaaatttgaaattttatgtccttgcaatgtca

SEQ ID NO: 102391 - DNA, 554 bp, Homo sapiens
aatgtcattcaaagtgcaagaaagctgaggaaaattttactaattcaaaaaagagtgtaaacttgttacttttaacacaaaattttaaaatatttttggtgattaagaaaatcattgatcaatataaataggggcaaatatgaagtagaaagagttttaaaatatcactctttatactcaatttccttctttcaaatgcttatctattattcttgatctgttataatagtctcttgaccagcagctacttaagcccagtgtttgattttccccattaaccctaaaatatttattgattgtctagctaacaatggttttccagggcatacatgctataaacacaagtttaggaaccaaaactctttctgatatgctagcaattaacattttaacatttccataatacacagtgtatcagttagggctaggttttatgaaagaaaagaggcccaaaataacagtggctgaaagaagacaaatgcatctgtctttcayttacaattcttaaggcaagtaatcaggtgctggcctagcagctttgctacataaagccc

SEQ ID NO: 102392 - DNA, 438 bp, Homo sapiens
caccgcttccacctccaaaattgaataaagtattgttcaatggacccatgtattttgaatatgaatttaaatgagtctaattatgacattgaatgcaacaaaccgctttatatacagctgtctttacaaatagaacatcatatattgaaattaaatgggaatattaacatatactttgtatgtatatgcacataaagtaaactgkggaactaagtgattatctgaccaattatagaattgaagttaacttctactattgaaaataccctagctttcccctaaaagagcatcaaaattaccccaactgacaaattatcctgttttattgatgtttgcctcaccattatttcaatattattttaaaaatggaaattcagaaagttactatttcatttttagtttgtttatgaaaacagacatgcaataaatagcattagg

SEQ ID NO: 102393 - DNA, 610 bp, Homo sapiens
acaggtggtttttggttacatggatgagttttttagtggtgatttctgagattttggtgcactggtcaccagagcrttgtacactgtacacaatatgtagtcttttatccctcatgcccctcacaaccttcccccaccaagtccacaatgtccattatatcattcttatgcctttggatcctcacagcttagctcccacttataaatgagaacatataatatttggtttttcattcctgagttacttcacttagaataatggcctccagctccattcatgttgctgcaaaagactttatttcttcccttcttacggctgtgtagtattccatggtgtatatttaccacattttctttgtatatttgttgattgatgggcacttaggttggttccatatcattgcaattgtgatttatgctgctataaacatgtatgtgcatgtgtctttttcatataatgacttcttttcctatgggattgttggattgaacagtagttctacttttagttctttaaggaatcctcataatgttttccacagaggttgtactagtttacattctcaccagccatgtaaaagtgtccccttttcaccacatccatgccaac

SEQ ID NO: 102394 - DNA, 534 bp, Homo sapiens
agcactgttttttttttttttttttttgagatgtcttgctcagtttcccaggctggagtgcagtggcacaatctcggctcactgcaatctctgcctcccaggttcaagtgattctcctgcctcagcctcccgagtagctgggactaaagatgtgtgccaccattcccagctaatttttttttttttgtatttttagtagagagggggtttcaccatgttagataggatggtctcgatctcctgaccttgtgatatgcctgcctcggcctcccaaagtgctgggattacaggtgtgagccaccataccaccagtattagcactttaaacacttgtgttattgttacatggcctttatttaaatgtgtaaaatgcctaaagcctttttctaaaactaactcccaaaaagtacattcttcgtaagcaataaaatgcagattgttgttgttgtttggttttgaaggggaaaatggtgaataggaggcagractaacttgcagctcccactctgacagacacagcagcatgtggagacc

SEQ ID NO: 102395 - DNA, 588 bp, Homo sapiens
ttcttcttctagcttccttgaaggggaaactaatattccccccttccatatgtataccccccaagaattcatattttaaaatatatctaaaatacaaaaaattctggggctgaggacagaaacagaaaatgcctacaaatagtcccatgagatctttttgaaacaatggaaattttctagaattcgattgtggtggttgcaaaattctgtaaatttatgaaaaatcagtgaattgtacacttaaaatgagcacatgttgtayctcaataaaggttacaaaaaaataaaaacagtaatgtaattgaatacaggaaagaattaccattacagatgaaaatgtttgaggaattctgaaagctattaaggaactaagatttattgaaagaggtatcagaccaagaggaccagcaacacaatttacaaggcccagtacaaaatgaaaatccatgtccaaaaatcattaagaatttcaagagggtgaaaggagagcattaaaccaagttcaagggccctcttgagtacagaaacctgtaggactgtacaggtctcatgtcctaaaaccagccatgcagataagaaaaatcttac

SEQ ID NO: 102396 - DNA, 575 bp, Homo sapiens
gtctccttttcttcttctttttatttcttatcagtaaacacccttatgaatccccaagagacagtgtgttctgcagtggcttaagaaggggaaaaagcaatgacggggaaagttcaaggaagaagaaagggaccaatacaccaggatttctgaagaaacaaggaacactgaaaccaaagtgtagaaggcaggcaggatgccctagccctacctagctccctttcttggtacttaccatgtgccaccagcagcccaggctcctcttgagcccctgttccagggaccacgaaagtctcttttccctttgcagctgagggaggtaaagccctaggaacccaagtggtaactgtggttgcatttttctgagagtgtcttaagcaataatactgttaattctgtagtcctcatgcacattcctaaccaatagacttcacgtgatttgatatcttgaaacaacgtattctcaggtctaaaagaccaatttgccactgttcataaggatargcacattcggctgtaaatgaaatagaaaatacctatacactgtggcatagacagttgcatttttggaagca

SEQ ID NO: 102397 - DNA, 635 bp, Homo sapiens
tcattcatccttgggctttattttctgtttagaatcctggctatgcyggacggcaggaactccctgaaaacttgaagattaatttccgctcagtggccatgatggtgcctgaccgtcagattatcataagggtgaagttggctagttgtggcttcattgacaacgttgttttggccaggaagtttttcacgctctacaaactgtgtgaggagcagctttctaagcaggtgtgtcatcctggaggtcttatgcacttaggcatgtttcatttttctattcagcagaatgttctcattttgagaaattctagactgggcttgttgacaaaggattttattgacactgagtagaaaggtgtattactacaaaaataattttatatgcatagttttttaagaagtacatttaaataaattaatatttacagcatagaaatgaagtgaatattatctgcactggtttaagagccaaagacttatggatattaacattggctgtttataccacttatagattcattgttatatgtgttatgtattttcatgatttgtaggaacctcccaatgatttattcttcttcattctaagctcacttgagtatttgaccaaggtttactaactgtcttgtttatatg

SEQ ID NO: 102398 - DNA, 635 bp, Homo sapiens
tcattcatccttgggctttattttctgtttagaatcctggctatgccggacggcaggaactccctgaaaacttgaagattaatttccgctcagtggccatgatggtgcctgaccgtcagattatcataagggtgaagttggctagttgtggcttcattgacaacgttgttttggccaggaagtttttcacgctctacaaactgtgtgaggagcagctttctaagcaggtgtgtcrtcctggaggtcttatgcacttaggcatgtttcatttttctattcagcagaatgttctcattttgagaaattctagactgggcttgttgacaaaggattttattgacactgagtagaaaggtgtattactacaaaaataattttatatgcatagttttttaagaagtacatttaaataaattaatatttacagcatagaaatgaagtgaatattatctgcactggtttaagagccaaagacttatggatattaacattggctgtttataccacttatagattcattgttatatgtgttatgtattttcatgatttgtaggaacctcccaatgatttattcttcttcattctaagctcacttgagtatttgaccaaggtttactaactgtcttgtttatatg

SEQ ID NO: 102399 - DNA, 635 bp, Homo sapiens
tcattcatccttgggctttattttctgtttagaatcctggctatgccggacggcaggaactccctgaaaacttgaagattaatttccgctcagtggccatgatggtgcctgaccgtcagattatcataagggtgaagttggctagttgtggcttcattgacaacgttgttttggccaggaagtttttcacgctctacaaactgtgtgaggagcagctttctaagcaggtgtgtcatcytggaggtcttatgcacttaggcatgtttcatttttctattcagcagaatgttctcattttgagaaattctagactgggcttgttgacaaaggattttattgacactgagtagaaaggtgtattactacaaaaataattttatatgcatagttttttaagaagtacatttaaataaattaatatttacagcatagaaatgaagtgaatattatctgcactggtttaagagccaaagacttatggatattaacattggctgtttataccacttatagattcattgttatatgtgttatgtattttcatgatttgtaggaacctcccaatgatttattcttcttcattctaagctcacttgagtatttgaccaaggtttactaactgtcttgtttatatg

SEQ ID NO: 102400 - DNA, 655 bp, Homo sapiens
gacattatcagtgattagactatgaatcatgatttcaacagagttaaaataaatactctcttaccctccatagcaaataaaactatttaagtagtgaataaatgtaattgtcatgtagtgaagaactgtacattcgtggttgctctatagtttttttttgttttttgagacagagtcttgctctattgcccaggcaggagtgcagtgttgcgatcttggctcactgcaacctccgcctcctgggttccagcgattctcctgcctcaccctctcacgtagctgtgactaaaggtatgtgccaccatgccaggctaatttatttttgtatttttggtaaacacagggtttcactatgttggccwggctggtctcgaactcctgacctcaggtgatccgcctgcctcagcctcccaagtgctggaattacaaactatatagtaggggttatagtctcatattccaaggtttgaattagtatcataatccctgagacaacctgaataatggcaccaacctatggacaagtcatgtatatttgcataggttttggaaatcagcttccaaactagtctgcacttaaaactgaggtgcttataattctgttcccagccaagtgttcattttttcttcttttccttaatgcccacctccctca

SEQ ID NO: 102401 - DNA, 449 bp, Homo sapiens
ggcataataatttgtcatgtatcttaaggttgttataagagttcaatgagattaaacgaggcaatatttataaagtgattagcatagtgcctgatgcatagcatatgttcagtaaatgtgagcttttcttacttgtattatttttgttagtagtaactattatttttaggctggtgaaactattattttcrggttcgcaaaaatagcaattaccttccaacctaactgaggaaagtctgtaattatttactccttcacatctccacaacaagtcttaaaggtattaatacactttttaacttttttgccagattagaaacttgaggcttacaaagaatgtataaactagcatgaattttttaaaaatttattttatggtgatgataaagacattgttcttccccaacaaaacttcctcctgaaagcaaatgtgggagatattatgaata

SEQ ID NO: 102402 - DNA, 594 bp, Homo sapiens
taataaaggatttgttaacacagtagtacatttttacaatagttttatgtatccattaaagatttatgaaaagtttcagtgagatagtgtatgcatgatacaaaactagtgaaggcagtattctccttggaaacaacaaaagaatagctggaaataaccactaatatgttgatttttctggaaagttgggagaccaagttgcaaaaaygcatttctgttttcattccttgcaagtgacagtttaacaaaaaattttcctccaaatttggctagccagcagcctttatggaattttagagtatggactgtcaaaataatttctctttgcttttgacaagcaacagtgatggcctctgtattagtctgttttcacgctgttgataaagacatacctgaacctgggcaatttagaaaagaaagaggtttaatggacttacagttccacatggctggggatgcctcatgatcatggcagaaggtgaagcaggagcaaagacatgtcttacatggcggcaggcaagagagaatgagagcttgtgcagggaaattcctcctaataaaaccatcagatctcatgagacttaccactatcat

SEQ ID NO: 102403 - DNA, 511 bp, Homo sapiens
aggtcctggaaccaattccccttggatactgagggacaactgtacaactgtttagatctataagaggggatttattaggggaattagcttatgtgattatagagtctgagaagttccacaacaggccatctgcaagctggagaccatgggatgctggtagtgtggctcagttcaagtccccaaggcctcagaaccaggaaagccaatgttgtaactttcagtccaaggctgaaggccaggcaacccggggagccactgatgtaaaccttggagtccaaaggcctgggaccctggagttctgttgtccaaggcaggggatgagtgtattccagatcctggagatagaatgacacattcacctttttcctgtttctttactgtcttcaccaccatccaccagactggatggtgcctgcccacattgagggtggatcttccccacctagtccgctcagactcacawgccaatctcctctggaaacatcatcccagacacattccaaaacaatgc

SEQ ID NO: 102404 - DNA, 625 bp, Homo sapiens
tgttgctcaggctgggctcaaactcctggactcaagcgatctctgtcttggcctcacaaagtactgggatgacaggcatgcaccatggcccgaggtctgttttaattttattaattggctgattcattcagacacataattatcaagtaaaatctcactatttccttagcatttcccttcaatttagcttagaaaatctattcctaagttaattttttaaaacatatacaattagccaggtgtggtggcacatgcctgtaatcccagctacttgggaggctgaggcaggagaagcacttgaacccgggaggcaggagaagcacttgaacccgggagacagagattgcagtgagccgagatcgcgccactgcrctccagcctgggcaacagagcgagactccatctcaaaaaaaaaaaaaaaggttttctccagatcatttttacatttaattattcagtctgttttgactatacctttaagaattaagtaaatataactttacttctacacactattagtcaatgtacctaacacaatttattgaataaaccagtccattcacaacaacatcaaaagtacgtacatttcccaatgtaaattaatacagccatgatggaaaataat

SEQ ID NO: 102405 - DNA, 574 bp, Homo sapiens
gcagaagggagggaactaacaggtaccacattacagctacaagaacttaccagaggagtgatgttctctattcacagccaagtcttctccattcccacactcggttaatctacccaggagcttatgtaactacttgggataattttgagggagctagacttccccaaaatgcatggggtgcatgggttggagctagataaatactgtcctattgccattagtgagattgtgatggtctaggcatttttgaagggagaaatatgtaaagaaagacaagcctcttactgaacaggtggactctcattgccttcactcttcagcaggctcattagatgcatcactcttccctatggcttcagcatgtrgaactttctccaactttgaggtatagaaacagaatagaattcacttaacctcagttacgagtaagcatatcttttaaagtgtgctcagttcattataaataaatgtagttattaacaatctcaaggtttatggaaggattacagctatccagtagcgcattgagcagctatttatctgaaagcacatactgactgaatccatcaacgtc

SEQ ID NO: 102406 - DNA, 528 bp, Homo sapiens
ggatgggcctgtccccaggacccctgtgagagggaagcccaatgtcccaccaggttggcagggctggggaagggaaagtgttatggcagccccaagaaaaaaaagaggcagcagagggagcaggacagcgctcacatggaactcatgccactgcctgaggggagggaggagtgcacgccagtgacgtcagggggcagagaggcgcagttccagggcggctttccccctcacttcctgccatgttactctgatcgcctccaggtgagcctgcccactttgtgcccaggggcctgtagaaaaccacagctccccatggttatgsccccaggagtggggcagagcagggaggagtcctggacagaggagaggaaggggcaggagggagtgggcctcaaactccaggagggggcccttctcatgggtcctgctttctggcttctccttccttacccctgggctgatcacttggggaagaactgagacaaagtttctcaccctcaggcccaaagggtttaattactgggccct

SEQ ID NO: 102407 - DNA, 484 bp, Homo sapiens
agacacacacacacacacacacaaatatagaatgtggagtgggaaatcaggggtcttacagccttcagagctgagagctttgaacagagatttacccacatatttattgacagcaagccagtcataagatttactaaaagtattccttatgggaaataaaggggtgggtgaaataaagggaagagctctggctagttatctgcagcatgaacatgtctttaaggcacagatcgctcatgctattgtttgtggtttaagaatgccttaagyggttttccgccctgggtgggccaggtgttccttgccctcattcctgtaaacggacaaccttccagcatgggcatcaaggccatcacgagcatgtcacagtgctgcagagatttggtttatggccagtttggggcctgttcccaacgagggcacaagctttttttgttattgaaatggctcttgggtttacaaaggtaaaaatccaatttaaaac

SEQ ID NO: 102408 - DNA, 616 bp, Homo sapiens
agagaatggttcctgtaagacttgaaaactgaaagtacaacataggtgcaatttgtgactaagtatcactggtacaaagaacttaactgattgaaatatatcaataagtaatctcttgggtggtcatacaggaatgcttaaaacctcagacccaattaatggcaaaacaatgaccctacatctgttttttatgtatayacacacacacacacacacacacacacacacacacacacaaatacatatgtaacaaccttttttcatggactgtcttagttcatctcattttgaggaaatagttgttgaatgacttctgtgtgtttctgtgacattgtattaagtattcaaatacagacttaaaaaagtaacttcctcttatggctattatattttaatattcctgaggcagatcattatcgattacctgtcagtctccttggggtttccatgatatccccttgacacatctctattgttgtcttccacattgctttgtgatggcttctgttcgttcatcttcttctccagactgtgagcttcttgataacaagatctttgtctcactgttttgggattctcagatcttagcacagtcctagaacattttatgctcttt

SEQ ID NO: 102409 - DNA, 616 bp, Homo sapiens
agagaatggttcctgtaagacttgaaaactgaaagtacaacataggtgcaatttgtgactaagtatcactggtacaaagaacttaactgattgaaatatatcaataagtaatctcttgggtggtcatacaggaatgcttaaaacctcagacccaattaatggcaaaacaatgaccctacatctgttttttatgtatacacacacacacacacacacacacacacacacacacacacaaatacatatgtaacaaccttttttcatggactgtcttagttcatctcattttgaggaaatagttgttgaatgacttctgtgtgtttytgtgacattgtattaagtattcaaatacagacttaaaaaagtaacttcctcttatggctattatattttaatattcctgaggcagatcattatcgattacctgtcagtctccttggggtttccatgatatccccttgacacatctctattgttgtcttccacattgctttgtgatggcttctgttcgttcatcttcttctccagactgtgagcttcttgataacaagatctttgtctcactgttttgggattctcagatcttagcacagtcctagaacattttatgctcttt

SEQ ID NO: 102410 - DNA, 502 bp, Homo sapiens
gataaattgcatctttgtgtatcataccaaagttcttttgcatatctctatttattttagtttaataaataattctcagcctaaaaagcttgtgtaaaagagaataaagcaatatttcaataaaagcaaaaactagtttgatgataaaatactttttactgaaatatatacatttttctatatcaccttttcttaatacagctgaagttttataattctcatatttcactacttcatttttagctaggggttcaatccagaaacgtgcccatttgtctcaaacaggtttggcaaataattgtgaattaaacctaaaggggaayctaatttctaaatagcaagcataaatagaaatgaatttgcaatgttattctcaaatttagtgttgatgtttcacaggtatgctaattaattagaggatcagaccttatcagacctgaaaggccctttgagaattcatgtcaaaatagagttctaactttctctgttacattagtaactg

SEQ ID NO: 102411 - DNA, 577 bp, Homo sapiens
catgcactggcatagggctatgtgtatgctcaggaaacctcagaaaaggctgtaaattatcatcccccgctgattttaaggctctttgcaagaaggaagttaaggctaagagttgtaaactgactgacwgagatgtgccagcacacatagagaaaccctcagcaaggctcagagacattgattccaagaatttgggtaaatcatcattagctgaccacttagctaaccaagcagaggctttattagccacacatcaccaagaaagcagactttaaaaaaaataaattccggctgggtgcggtggctcacgcctgtaatcccagcactttgggaggctgaggcgggtgggtcacgaggtcaggagatagagacaatcctggctaaaatggtgaaaccctgtctctactaaaaatgcagaaaattagccgggcgtggtgccagagcttgcagtgagccgagatcgcaccgctgcactccggcctgggcgacgagagagactctgtctcaaaaaaataaataaataaattcagaaaagtgaccaaacaaagcaacaacagtagaataatagcagcaaaca

SEQ ID NO: 102412 - DNA, 530 bp, Homo sapiens
ttaatggattaattcattcgtgttttaatagattaatgggttaatggattaacaggttatcattcaaggagaactggtggccttgtaagaaaaagaaaagagacccgagtgttagtgtgctcagccccgttaccatgtgatcccccgtactggcttgggactctccagagagtctccatcagcaagaaggctctcactagaggtgactcctcaacattggacttctcagcctccacaattttaagaaatacatttattttctttataaattacccactttcaggtattctgttataagcaacaaaaaatggaccaagacagtatttctcttaacataatatcctccaggtttatctattttataayaaatgacaggattttgttttgttttgttttgtttttttacttctttctaactttcagtttcagtttggggatacgtgtgcaggtttgttacatgagtagattccatgtcacacgggtttggtgtacagattactttttcaccccagtaataaacatagtacccc

SEQ ID NO: 102413 - DNA, 530 bp, Homo sapiens
ttaatggattaattcattcgtgttttaatagattaatgggttaatggattaacaggttatcattcaaggagaactggtggccttgtaagaaaaagaaaagagacccgagtgttagtgtgctcagccccgttaccatgtgatcccccgtactggcttgggactctccagagagtctccatcagcaagaaggctctcactagaggtgactcctcaacattggacttctcagcctccacaattttaagaaatacatttattttctttataaattacccactttcaggtattctgttataagcaacaaaaaatggaccaagacagtatttctcttaacataatatcctccaggtttatctattttataacaaatgacaggattttgttttgttttgttttgtttttttacttctttctaactttyagtttcagtttggggatacgtgtgcaggtttgttacatgagtagattccatgtcacacgggtttggtgtacagattactttttcaccccagtaataaacatagtacccc

SEQ ID NO: 102414 - DNA, 530 bp, Homo sapiens
ttaatggattaattcattcgtgttttaatagattaatgggttaatggattaacaggttatcattcaaggagaactggtggccttgtaagaaaaagaaaagagacccgagtgttagtgtgctcagccccgttaccatgtgatcccccgtactggcttgggactctccagagagtctccatcagcaagaaggctctcactagaggtgactcctcaacattggacttctcagcctccacaattttaagaaatacatttattttctttataaattacccactttcaggtattctgttataagcaacaaaaaatggaccaagacagtatttctcttaacataatatcctccaggtttatctattttataacaaatgacaggattttgttttgttttgttttgtttttttacttctttctaactttcagtttcagtttggggataygtgtgcaggtttgttacatgagtagattccatgtcacacgggtttggtgtacagattactttttcaccccagtaataaacatagtacccc

SEQ ID NO: 102415 - DNA, 530 bp, Homo sapiens
ttaatggattaattcattcgtgttttaatagattaatgggttaatggattaacaggttatcattcaaggagaactggtggccttgtaagaaaaagaaaagagacccgagtgttagtgtgctcagccccgttaccatgtgatcccccgtactggcttgggactctccagagagtctccatcagcaagaaggctctcactagaggtgactcctcaacattggacttctcagcctccacaattttaagaaatacatttattttctttataaattacccactttcaggtattctgttataagcaacaaaaaatggaccaagacagtatttctcttaacataatatcctccaggtttatctattttataacaaatgacaggattttgttttgttttgttttgtttttttacttctttctaactttcagtttcagtttggggatacgtgtgcaggtttgttacatgagtagattccatgtcacacgggtttggtgtacagattaytttttcaccccagtaataaacatagtacccc

SEQ ID NO: 102416 - DNA, 595 bp, Homo sapiens
tctattaggtccatttggtcaagtgttgagtttaggtcatgaatatctttgttagctttgtgcctcaatgatttatccaatatcctctgtggggtgttgaagtttcccactattattgtatggtamtctaagcctctttgtaggtgcctaagaaattgtcttatgaatctcagtgctccagtgttgggtgcatatatatatttaggatagttaagtcttcttgttgaattgaaccctttatctttatgtaacgcacttctttgtccttttgtatcattgttggtgtaaggtctgttttgtctgaaataaagatagcaacttctgctcttttttgtttttaatttgtttaatagatttttctcatccttttactttgagcctatgtgtgtcattacatttgagatgggtctgttgtacagagcatacagttgtgttttgcttttttatcaaacttattattttgtgcctcttaaagtggggcatttagcccatgtacattcaagattaatattgatatgtgtggatttggtcctgtccttgcattgttagctcattgttacatagacttgattatgtagagttttacaatgtctat

SEQ ID NO: 102417 - DNA, 505 bp, Homo sapiens
tctctgaatttcctgaatttgaatgttcacctctctagcaaggttagggaaattttcatggatgatattctcaaatatgttttcaaggttgctcactctctctctttcagagatgccaatgaatcgtaggtttgggtatctttacataatcccatatttattgtaggttttcttcattctgttttattctttcttctttatttttgtctgaccgagttgatttgaagaaccaatcttcgagctctgaagttctttccttagcttggtctattctactgttaatatttgagacagtacgaggaaagacttctagtaactttttaatctctatcagattaggctggttctttactactgttaatacttgagacagtatgaagaaagacttctcgtaactttttcatctctatcagatcaggctggttctttctcaaaatgactrttttgtctttcagccctcgtaaagttttactggattccttagattctttggattcagtttcaa

SEQ ID NO: 102418 - DNA, 496 bp, Homo sapiens
gaaaacacctatagaagagcaaaggtaacaatcaaatctaatttctcctcggaaaccatgcaagcaagtagtaagtaaaatatgtaaatgctcagggaaaaaataaaacaaaacaaaagcctaccaacctagaattttttatcctgcaaaattattctttattaatgaaggagaaatgaagactttcttacacaaacaaaaattgtaaaaatgtgctgccagtagaccagtctttcaagaaattttaaaagaagctcctagctctatagataacttaaggttataaaatagatcagcaactcagatctgcatacagaaagaaaaagcattagagaaggagtaagtgaagtcatggcaagacttttatttttcttattcttgattggtctaagagataattgtccaaattaataatcttgataatttatttgaatatatatatatgcttatatataaktgaagtaaatgatagcaattacgcatgaaatggaaggga

SEQ ID NO: 102419 - DNA, 501 bp, Homo sapiens
catgtgacatattatgtttattctttattttctcttatgagttaatataattcatcatgtttctctttttggctctgtggacagaaatcttagcaaatgtggtaacattctttgtgcgtgtgtgtgtgtgtgtgtttcaacagcaaaatcttttcttcaatgcaaagcctacacaggagtttgatatataaaagaattaacaggccaggcgcggtggctcacgcctgttattccagcactttgggaggctgaggcgggcagatcacgaggtcaggagctcgagaccagtctggccaatatggtgaaacctggtctctgctaaamatacaaaaaattagctgggcatggtagacccgagattgcgccaccgcactccagcctgggcgacagagcaagactctgtctcaaaaaaaaaaaaaaaaaaaaaaaaaaaagaaaagaaaaaaaaatctaacaaggtgctattatgagtggcacagaaacagaaaagtctataagttt

SEQ ID NO: 102420 - DNA, 476 bp, Homo sapiens
agcttgaagaacgtgtatagagtgagtgccatgtaaccacacccacatcaagatgcgcagcatcagcagctgcacagaagtccacttatgctccattcacatrcactattcccacttttctgacctctgtcatgacagatcaattctttaaatgaaatcagtgtcctaaccaccatccaaataaggagatagaacattttcagcaacccagatgaattcctatctcacccaaagaaaactgctcttttgacttctattacaataaattttggtcttgagtttctataaatggaatgatgcagatgatatagtatgcactctttggtgtctggcttcttttattatacttactcaaccatatgcttgtgagattcatccatgttgctgtgtggagcagacatttcttcttgttgctgtatataatattgcattgtataaatattccataatatatttgtctgttttattgttgatga

SEQ ID NO: 102421 - DNA, 618 bp, Homo sapiens
gtatcttactaagatacatacgcttaataggatatatcctattaagtgacagaaacccatctgaaagggctgtatattattctaatgatatgaaattctggaaaacacaaatctatggagacagtaaaaagattagtggttggcaggggttggggtgggaagggatgaataggtgaagcatgaaggatttttaggacagtgaatctactctttatgaaaatataatggtgsatacatatcattatacattttcccaagcccataaaaatgtttactgccaagagtgaaccctaatgtaaactatggactttgggtgacaatgatgtgttaatgtagttttttcaattgtaacaaatgtaccactcttgtgggagatgtcaataatgaggccaagtgggggggctatgcatgtgcaggataggaggtatatgggaaatttctgtaactttccctcaattttgctgtgaacttaacacttctctaaaaagataaagtcttaaagagttaaataaagtaaaatacaatgcacagtgtgatgactgaaaaaatatgtccatatattattttatattctttccttcaaagatggacccttcattctcctctccttgcatgtgg

SEQ ID NO: 102422 - DNA, 609 bp, Homo sapiens
caccttccaggcctcagttgtcttcctctctctcatggcctgaccatttgyttcagggtaatgaaccatgatttttgacaatacagatatgattcaacaaacatcttaatatcaatttgggtgacagcagggctgttgcctgaaatgacagatttgaggaatggatctgcctcaggtaagtggcactgagctatgaacagaaaatatctctgatggtgcagcataacatgtaaagaagactgccacaactgagtttttcccttgtgcaactgcttcactaacttcaactagggggatcctcattagttgctgaagatcccaatcccctttgagaaagaagtttgtatatctttcttgcagtctcccgcactgtgacttgcccaaaggaattactagtccatagaagagtcagtttccaaatgagaaagagggagaatttgaaaacccagccaagcttctgatgccatcatttctcactaccacgtggtgtgttcctgttgatgatggggcctgcactgtgccacaaaacactcattccttcagcagggatacacttgctggtctagacatctgcacaaacagattagcaccacactctggtggaaaaat

SEQ ID NO: 102423 - DNA, 609 bp, Homo sapiens
caccttccaggcctcagttgtcttcctctctctcatggcctgaccatttgcttcagggtaatgaaccatgatttttgacaatacagatatgattcaacaaacatcttaatatcaatttgggtgacagcagggctgttgcctgaaatgacagatttgaggaatggatctgcctcaggtaagtggcactgagctrtgaacagaaaatatctctgatggtgcagcataacatgtaaagaagactgccacaactgagtttttcccttgtgcaactgcttcactaacttcaactagggggatcctcattagttgctgaagatcccaatcccctttgagaaagaagtttgtatatctttcttgcagtctcccgcactgtgacttgcccaaaggaattactagtccatagaagagtcagtttccaaatgagaaagagggagaatttgaaaacccagccaagcttctgatgccatcatttctcactaccacgtggtgtgttcctgttgatgatggggcctgcactgtgccacaaaacactcattccttcagcagggatacacttgctggtctagacatctgcacaaacagattagcaccacactctggtggaaaaat

SEQ ID NO: 102424 - DNA, 592 bp, Homo sapiens
tctttctttggtctgattgttctagcaaggacttccagtattattaatatattgaatactagtggtgaaagtgggcatccttatcttgtcccacctcttggaagaagagtcttcagttataccctattcagtatgataccagctgtgagtctgttatatatgacttttattgtgttgaggtatttccttttatacccgattttttgaggatttttatcatgaagggatgttgaattttatcaratgcttattcagcatctgttgaaatggtcatatggtttttgtccttcctgtcttccttttagtaaaagtgattttctctggtggcgtgttttaattttttgctttttattttttgagaacctgttgtatattttttgatttgcgattaccaggaggcttgtaaataatatattgtaactcattattttaaactgataacaacttaacactgattgcataaacaaactaacaagcaaagggaaaaccaataaaaactctacattttaactttgtccccccctttaaaactttctgttgtctttatatcttattgtattgtctgtatttcaaaaaatagttgtagttatta

SEQ ID NO: 102425 - DNA, 500 bp, Homo sapiens
ttacagggtagacagggtacagtgtgcaagaagaacatacaggaggagaaattcacttaccactatcttgaatgattagccaaagcattcctgaaagaaagtctaaggtgaggataagaaggtaagaagccaggtaagaaagagaaggaagaatgttccaagaaagcagaactgatttagagaaatgagaatgaatgtgtatggggtagagatgaagccacaagatgagcaggctcttgaggcatatgacataaagaaaaaagaaacaatgaaaaggttttaagtaggatagtgctgggatcagattaaagaatcactcaaatcacaatgtggttcasaatgggtaataagggattggaactggtagcaacactggaggcagagacctattaggaagctacctcaacagtctgtcagcactgttcgaaagcactgtaaggtaagacaaaaatgagtaccacagattatttataattttctttttcttttctttttaagag

SEQ ID NO: 102426 - DNA, 538 bp, Homo sapiens
tctacctctgcaagacataccaggctttggatatgtgtttgggttcactttatattgatactagaatgagagtttcctattactgtttagcctaacatgatattttgatatatattttatataagaatataataaaggaatttttatttaacatttttaacatttacaaagcacagttgacgtactattcagaaaatcagagagaggtacatttttgtatcagtagagtcaaggtcyaggatactgacagagaaaagataatactatttagtatccgcttgctgaaagtatgacgttacacttagctgaggttgggaaagtattttatccatattcacagtggtgcacaataatccaaatgcacagaaaagaaagtttgtttggcagcatgtaaagtcagggattataagtcataggagatactcccctgtcttgcacaagtattgcagaacctctcatgtccctccaatggaaactcaacagacactgccgcaggctcatgggggaaagcacacatggaagacctgagaaaggggca

SEQ ID NO: 102427 - DNA, 618 bp, Homo sapiens
ataagaacacaggggctaatcttttgccagaaattaagaaaaaataatttgtcttattttgagtgaatataatttctaaaatacttgcagcaaagaatggcaggttttaggcatcgatgatattttggrgtcatattttaatctgtataattttacacgtacagcctgtattcctttgtattattattttaagtagtgaaacatgtaaaatagcacagtgtcaacttttgatcatattcagttttaacaaatagtttctactctgcacttgcaaaggaatagctaaaaacgatatccttttctgataaaaactgaaagattgaaaatatctaaacataatataatttttttggagtgtgatcaggactctgttgagaagtaatatcgcatatttagtgcaagtgcagtaacactcagtaaatgttcactgagtgaacccatttaagcagatgtcaaaatatgatggtaaaatgattcagtttcatgtagtatgccatgctagcagtaaaaatttattttgaaatgaaaggttgggtcaaatagttaggtggtttttttttctgaaaggaaaatatatggggagcttggcttttttctgaatgtttcacccagtgaaaa

SEQ ID NO: 102428 - DNA, 617 bp, Homo sapiens
agtgtctggagagttactcatgctattatgctgggaatggaatgttggtaatgatggagcattgttaaacttaccaagcaattcttctcaggaatgtaactgaagcaccatgccttctactttgtgtgtggcaatggcacatccctttttgtgcgttcctttgtatatataatatgtcttgaataagcgcaccctgtgtatgtcttgaatgattgtgcttgatgagtctcctccaaggaggacatcctcattataatgtcataactgctcctagggaaagttggatatgatgatggtcttgctggcagtgattgtgggccaggatattgaggttccccacagtyatccagttacaggtgatttatggccttttaaagataaagggaaactgactgagatcctattgaaataggccttgaatggaacatatttgtcaaatctatgattgcaaagtatttgttagtattcaaatgtagtaagcaatttttaataaccatgggtatgaggttctaaatgtgatggatcctggcattaaggctgtagtaaaatgttgtgaggcatcattaattcttgctaggtttaaaaatagtccaaattgggattttaaagggagaaag

SEQ ID NO: 102429 - DNA, 598 bp, Homo sapiens
ttttaggaatggagctgagagggaaagcaccccaggttggggagcaggggtcccatacgtggagatgtaattgagatggccataaggctggcttccctgggtggcactggctacactagtggagtagaaggttcaattgcatgagtaaagctgtggggatttaccagaaaccttagctatcaggtgggtggatcaggcctccaccatggagtaaggggaggacattgttaagaggataacaatgggagtaagggttgtaatggctgtgagacaatatacacttaaaaaaaattatgtttcttctctgcattttccaatttttatataatggtcttatgttgccttgtcaktataaaaatgatgacaaggctgttttaaagaagtccttgggaatggtaagtggtatgctggctggaatccagtagagtctgaaccacgtaatagaatgatgggttgggagctggggtgagcccctgtagggcagagagaatcagaatcagagttcaaagaaatatttggaagtaagaattggcaaaattgtgccaaacacaaaatgaagacattagatattgtgagcccaaaatatatgacgctggtc

SEQ ID NO: 102430 - DNA, 598 bp, Homo sapiens
ttttaggaatggagctgagagggaaagcaccccaggttggggagcaggggtcccatacgtggagatgtaattgagatggccataaggctggcttccctgggtggcactggctacactagtggagtagaaggttcaattgcatgagtaaagctgtggggatttaccagaaaccttagctatcaggtgggtggatcaggcctccaccatggagtaaggggaggacattgttaagaggataacaatgggagtaagggttgtaatggctgtgagacaatatacacttaaaaaaaattatgtttcttctctgcattttccaatttttatataatggtcttatgttgccttgtcagtataaaaatgatgacaaggctgttttaaagaagtccttgggaatggtaagtggtatgctggctggaatccagtagagtctgaaccacgtaatagaatgatgggttgggagctggggtgagcccctgtagggcagagagaatcagaatcagagttcaaagaaatatttggaagtaagaattgrcaaaattgtgccaaacacaaaatgaagacattagatattgtgagcccaaaatatatgacgctggtc

SEQ ID NO: 102431 - DNA, 567 bp, Homo sapiens
tgcctgtgtcaattaaggtagttgtaagctcatggtttattattatatgaatctctcccaatttgtttgtcaggatagaatatttggagaagcgaaacccctgcactttctcggagcatccctagtcttcctgagttgcattctcctgccttttcttttgtttcagcctaaggcagcctcgcttaaggtatcctcgtcttttacagtagtaacagactgggaggcmagagtcttcagatggagagagcttaaagtctttctggggctgagaggtttgagaagttaattgctttagctgtaaatgcataacctgggccatcttctatttctccttttttttttttttttgtcatagcgcaggatatttgatcagctaagttaactagttcattagtctagtcatggcccatttgtcatgtgccattttacaagggtggctaaatcatcatctagtctgtttaagaaatttgcattttataatgtattattttttattgttttcaaagcaatcaactgacatcctgcaatacttaaagttttatcaaaatatgttaaataatttaaaac

SEQ ID NO: 102432 - DNA, 567 bp, Homo sapiens
tgcctgtgtcaattaaggtagttgtaagctcatggtttattattatatgaatctctcccaatttgtttgtcaggatagaatatttggagaagcgaaacccctgcactttctcggagcatccctagtcttcctgagttgcattctcctgccttttcttttgtttcagcctaaggcagcctcgcttaaggtatcctcgtcttttacagtagtaacagactgggaggccagagtcttcagatggagagagcttaaagtctttctggggctgagaggtttgagaagttaattgctttagctgtaaatgcataacctgggcmatcttctatttctccttttttttttttttttgtcatagcgcaggatatttgatcagctaagttaactagttcattagtctagtcatggcccatttgtcatgtgccattttacaagggtggctaaatcatcatctagtctgtttaagaaatttgcattttataatgtattattttttattgttttcaaagcaatcaactgacatcctgcaatacttaaagttttatcaaaatatgttaaataatttaaaac

SEQ ID NO: 102433 - DNA, 380 bp, Homo sapiens
atctcggacaagatattcaatctctatatgcctcactgacctcatctttaatargggatataaattgtagcagttcataggatgtggcttcaatgagttaatatctgtagcatgcttaaaagaatgtcatagtaaatatgccttacatagtaaatattctctattgtttttgcctattgttatttcaattgttttaaccattcttctggtgtatcatatggagctatgtgtgtgtgtttttgtgtgtgttctccataaattaagagtctgtttgtagcatagccatgaaggagatcattttgaaaatggaattaaatcaggaaccaaaagcatcaaatcatgctactgttttagtatgggcttcttttgcagaaactgaa

SEQ ID NO: 102434 - DNA, 592 bp, Homo sapiens
ttgtgagcaagttctcataaaatctctttgtttaaaggtgtgtarcaccttccttcccgctctctctcttgctccccctattgccacgtgagatagctgctctctcttcagcttccaccatgactgaaagctccctgaggcctctccagaagcttagcaaatgctggcattatgcttgtacagcctgcagaactgcaagccagttaattttctatttcttcataaattacccagtctcagatatttctttattgcaatgccacaacagcctaatatagaagactggtaccaaggagtggggcactgctataaagatacctgaaaatgtcaaaatgacattggaactgggtaagagacagaggttggaagaattgggagggctcaggagaaggcagggagatgaggaaaagtttgaaacttggtagagactgattaaatggtcatgaccaaaatgctgatagtgatctgcaaagtaaagtccgtgctgacaaagtattaggtgtaagtgaggaacttattgagaactggagcaaaggtcacccatgttataccttagcaaagaacttggctacattatattcatgcccaggga

SEQ ID NO: 102435 - DNA, 592 bp, Homo sapiens
ttgtgagcaagttctcataaaatctctttgtttaaaggtgtgtaacaccttccttcccgctctctctcttgctccccctattgccacgtgagatagmtgctctctcttcagcttccaccatgactgaaagctccctgaggcctctccagaagcttagcaaatgctggcattatgcttgtacagcctgcagaactgcaagccagttaattttctatttcttcataaattacccagtctcagatatttctttattgcaatgccacaacagcctaatatagaagactggtaccaaggagtggggcactgctataaagatacctgaaaatgtcaaaatgacattggaactgggtaagagacagaggttggaagaattgggagggctcaggagaaggcagggagatgaggaaaagtttgaaacttggtagagactgattaaatggtcatgaccaaaatgctgatagtgatctgcaaagtaaagtccgtgctgacaaagtattaggtgtaagtgaggaacttattgagaactggagcaaaggtcacccatgttataccttagcaaagaacttggctacattatattcatgcccaggga

SEQ ID NO: 102436 - DNA, 592 bp, Homo sapiens
ttgtgagcaagttctcataaaatctctttgtttaaaggtgtgtaacaccttccttcccgctctctctcttgctccccctattgccacgtgagatagctgctctctcttcagcttccaccatgaytgaaagctccctgaggcctctccagaagcttagcaaatgctggcattatgcttgtacagcctgcagaactgcaagccagttaattttctatttcttcataaattacccagtctcagatatttctttattgcaatgccacaacagcctaatatagaagactggtaccaaggagtggggcactgctataaagatacctgaaaatgtcaaaatgacattggaactgggtaagagacagaggttggaagaattgggagggctcaggagaaggcagggagatgaggaaaagtttgaaacttggtagagactgattaaatggtcatgaccaaaatgctgatagtgatctgcaaagtaaagtccgtgctgacaaagtattaggtgtaagtgaggaacttattgagaactggagcaaaggtcacccatgttataccttagcaaagaacttggctacattatattcatgcccaggga

SEQ ID NO: 102437 - DNA, 592 bp, Homo sapiens
ttgtgagcaagttctcataaaatctctttgtttaaaggtgtgtaacaccttccttcccgctctctctcttgctccccctattgccacgtgagatagctgctctctcttcagcttccaccatgactgaaagctccctgaggcctctccagaagcttagcaaatgctggcattatgcttgtacagcctgcagaactgcaagccagttaattttctatttcttcataaattacccagtctcagatatttctttattgcaatgccacaacagcctaatatagaagactggtaccaaggagtggggcaytgctataaagatacctgaaaatgtcaaaatgacattggaactgggtaagagacagaggttggaagaattgggagggctcaggagaaggcagggagatgaggaaaagtttgaaacttggtagagactgattaaatggtcatgaccaaaatgctgatagtgatctgcaaagtaaagtccgtgctgacaaagtattaggtgtaagtgaggaacttattgagaactggagcaaaggtcacccatgttataccttagcaaagaacttggctacattatattcatgcccaggga

SEQ ID NO: 102438 - DNA, 601 bp, Homo sapiens
tattgtgaatagtgctacaataaacatgggagtgcagatatttttttagacaatttttatagaaaaacaatttttctatctcctctcttggcattataaggctaactgacagagttcttattcccaggtgctactagagaagtcagaacttcactattcagttgatagactttcatttactctctcaccttccaatgtgcctagtatccccaggttaagacttctcttatttatttttatagcataaatttccattctaatgaggataaagtggcactggtctcctagctgagcagggtgagaggagaacctatggaggactccccttcatatgcagatttctcatccaccttcccccctttttaagattcttggttcctcaattgccatctttcaagattttgacaaagggaatggtttgctggttttgccctcctctgtgggcactttgtaattagcattctcaactttgttgattttttcctctcctttccatttcctaaaytggtcctctcacatctctagttgtttcttctcgtcaccctttattactgacactttattgtcttctattctttaccgtcatttgacaagagggctt

SEQ ID NO: 102439 - DNA, 601 bp, Homo sapiens
tattgtgaatagtgctacaataaacatgggagtgcagatatttttttagacaatttttatagaaaaacaatttttctatctcctctcttggcattataaggctaactgacagagttcttattcccaggtgctactagagaagtcagaacttcactattcagttgatagactttcatttactctctcaccttccaatgtgcctagtatccccaggttaagacttctcttatttatttttatagcataaatttccattctaatgaggataaagtggcactggtctcctagctgagcagggtgagaggagaacctatggaggactccccttcatatgcagatttctcatccaccttcccccctttttaagattcttggttcctcaattgccatctttcaagattttgacaaagggaatggtttgctggttttgccctcctctgtgggcactttgtaattagcattctcaactttgttgattttttcctctcctttccatttcctaaattggtcctctcacatctctagttgtttcytctcgtcaccctttattactgacactttattgtcttctattctttaccgtcatttgacaagagggctt

SEQ ID NO: 102440 - DNA, 572 bp, Homo sapiens
tactgattatttggtgacaattgagacctgtttatcaagaatgtttgtggctatgatcttagaatctagaattttaaccaaaagtgtattagtttttttatctattacaatttgaaaatttaaaaggtatatggtttttgccttcaccagatttctaaacaccactgatrccagatttctcaaccttgattgcagaatagattcacctggggaagaaaaagcagtatctggatcctaccccaaaaccaattaattatgaatctcaggagatggggcctggaaatctgtaataaactaacttctctaagaatagaagtttccacgtgagaaataacttgattccatctggggtagttaaagagaaatctaagttttaaatttataaacgctatagttcgaataaacgttccagaatcgctggaatttcagggttacaagttttatgctattaaaaaaatactattttacatagcagatcttaaataatatgacaagtttcaacaggtgaggttgttttttgttgttgttttgtttacaaaaaatgttagcttaatgtaggaaagataaatagt

SEQ ID NO: 102441 - DNA, 572 bp, Homo sapiens
tactgattatttggtgacaattgagacctgtttatcaagaatgtttgtggctatgatcttagaatctagaattttaaccaaaagtgtattagtttttttatctattacaatttgaaaatttaaaaggtatatggtttttgccttcaccagatttctaaacaccactgataccagatttctcaaccttgattgcagaatagattcacctggggaagaaaaagcagtatctggatcctaccccaaaaccaattaattatgaatctcaggagatggggcctggaaatctgtaataaactaacttctctaagaatagaagtttccacgtgagaaataacttgattccatctggggtagttaaagagaaatctaagttttaaatttataaacrctatagttcgaataaacgttccagaatcgctggaatttcagggttacaagttttatgctattaaaaaaatactattttacatagcagatcttaaataatatgacaagtttcaacaggtgaggttgttttttgttgttgttttgtttacaaaaaatgttagcttaatgtaggaaagataaatagt

SEQ ID NO: 102442 - DNA, 593 bp, Homo sapiens
tttgttattgcatttataaccagaagaacattattagtaataaaaatattttaacaatggattatctttgaatcaaatattttaaacatacaaattttgacctgagtagtgttgaatcctgaggatacaaaaaccctgcataggttgaatgtgatatggtttatattttggaaacattactctaaagataattttaaaatatagtgaaggaagtaaaaacttgatactaagaggccaataaagaggctgttgttactgttgatgtaaatgatacgggcttgaactaagattaaagcagtggtaagtgaaatgagaagacagggaagagagaaaagttcaaatcrtaattaatgaggtttgattacaaattcagttaatctgagggagtaggaagacttctcaatatatgagggccgttcataacctgataaataaggtttggctttacatgctaaggggtgagagttaatgaccaagaagttagttgacagatggttctaacagaagcactaacggggaagaaaaccacaggggaaagaaacctaatacatgagatcatagcttttgggacttttgatgagtgtgagtcatat

SEQ ID NO: 102443 - DNA, 626 bp, Homo sapiens
tctcattatgttggccaggctggtctcaaacccctggtctcaagtcatcgtcctgtctcagcctcccaaattgctgggattactggcgtgagccattgcaactagcctaatgagtttgttttgagtaaacttackgatgaaaccaccatcagatcaagaaatgaaataacaccaacatcccagaacagttccctgtgtcgtcttctcagtcatcctccagaagtggctttgaacaccagagattagctttgcctgtttttgaggttaaatataaatgaaatcctagagtatttcactcctttcgtgtccagctacttgtgctccacattatgtctgtgagacgatccatgttgttgctgtggtttcagtttgcttagtctctgctgtgtaatattccattgggtaaatttaccacaacttatccatcagactgttaagacagatttgagatattttgagtttggggctgtaacaaataatgctactgcgaacatgcatgtacatgtttttggtgcacacatacacaaatttccattggccaatttacctgattgcattttgactcctgataaagatgaatcaatggagttccctgccagaggtctatttgttcagctcatatccac

SEQ ID NO: 102444 - DNA, 564 bp, Homo sapiens
aatttagaactaaaaattgtgagttaattaaagttatattgatggaaaaatggtcccaggtcaaggacttgaccccttatataactctaggagccaataaagacttgtcctgccagggaatgagggacttgagaaaaacaaaatgaggcscaggcaaacaacacgaaagatcctcacttgcctggtttgcagctggacaggagtcaccatcagaaaatcagcactgaaagtctgtactcccctgtgggtggggctgaattcacactactttgtgtgaagaagccatgagtcaataatggctttaaaaactggtccaaagaacaacaaaagtgtgtcctgaatgctacattgcatatgaaattctataacatggtaatagaaatcgtatctatggtagcatctgcgaatgaggattgactgagaatgggcatgagagaactggttggcatgacagaaatgcttcatgacttgatacgggagtggctaaaatgtgcatttgcatttattgaaactgattgtacaacacactaaagatctgagtaattcactgcttgtaaattataa

SEQ ID NO: 102445 - DNA, 564 bp, Homo sapiens
aatttagaactaaaaattgtgagttaattaaagttatattgatggaaaaatggtcccaggtcaaggacttgaccccttatataactctaggagccaataaagacttgtcctgccagggaatgagggacttgagaaaaacaaaatgaggcccaggcaaacaacacgaaagatcctcacttgcctggtttgcagctggacaggagtcaccatcagaaaatcagcactgaaagtctgtactcccctgtgggtggggctgaattcacactactttgtgtgaagaagccatgagtcaataatggctttaaaaactggtccaaagaacaacaaaagtgtgtcctgaatgctacattgcatatgaaattctataacatggtaatagaaatcgtatctatggtagcatctgsgaatgaggattgactgagaatgggcatgagagaactggttggcatgacagaaatgcttcatgacttgatacgggagtggctaaaatgtgcatttgcatttattgaaactgattgtacaacacactaaagatctgagtaattcactgcttgtaaattataa

SEQ ID NO: 102446 - DNA, 573 bp, Homo sapiens
tctttctttggtctgattgttctagcaaggacttccagtaytattaatatattgaatactagtggtgaaagtgggcatccttatcttgtcccacctcttggaagaagagtcttcagttataccctattcagtatgataccagctgtgagtctgttatatatgacttttattgtgttgaggtatttccttttatacccgattttttgaggatttttatcatgaagggatgttgaattttatcaaatgcttattcagcatctgttgaaatggtcatatggtttttgtccttcctgtcttccttttagtaaaagtgattttctctggtggcgtgttttaattttttgctttttattttttgagaacctgttgtatattttttgatttgcgattaccaggaggcttgtaaataatatattgtaactcattattttaaactgataacaacttaacactgattgcataaacaaactaacaagcaaagggaaaaccaataaaaactctacattttaactttgtcccccgctttaaaactttctgttgtctttatatcttattgtattgtctgtatttcaa

SEQ ID NO: 102447 - DNA, 573 bp, Homo sapiens
tctttctttggtctgattgttctagcaaggacttccagtattattaatatattgaatactagtggtgaaagtgggcatccttatcttgtcccacctcttggaagaagagtcttcagttataccctattcagtatgataccagctgtgagtctgttatatatgacttttattgtgttgaggtatttccttttatacccrattttttgaggatttttatcatgaagggatgttgaattttatcaaatgcttattcagcatctgttgaaatggtcatatggtttttgtccttcctgtcttccttttagtaaaagtgattttctctggtggcgtgttttaattttttgctttttattttttgagaacctgttgtatattttttgatttgcgattaccaggaggcttgtaaataatatattgtaactcattattttaaactgataacaacttaacactgattgcataaacaaactaacaagcaaagggaaaaccaataaaaactctacattttaactttgtcccccgctttaaaactttctgttgtctttatatcttattgtattgtctgtatttcaa

SEQ ID NO: 102448 - DNA, 573 bp, Homo sapiens
tctttctttggtctgattgttctagcaaggacttccagtattattaatatattgaatactagtggtgaaagtgggcatccttatcttgtcccacctcttggaagaagagtcttcagttataccctattcagtatgataccagctgtgagtctgttatatatgacttttattgtgttgaggtatttccttttatacccgattttttgaggatttttatcatgaagggatgttgaattttatcaaatgcttattcagcatctgttgaaatggtcatatggtttttgtccttcctgtcttccttttagtaaaagtgattttctctggtggcgtgttttaattttttgctttttattttttgagaacctgttgtatattttttgatttgcgattaccaggaggcttgtaaataatatattgtaactcattattttaaactgataacaacttaacactgattgcataaacaaactaacaagcaaagggaaaaccaataaaaactctacattttaactttgtcccccsctttaaaactttctgttgtctttatatcttattgtattgtctgtatttcaa

SEQ ID NO: 102449 - DNA, 621 bp, Homo sapiens
tttgatatgctaatcagcatatggcatggcccttaaggagtattttccaacaaagtaacttttttttctacaataggtatttacaaaatacttttatggctattttaggggttagtcttattttgtttttcttagtgattgattataaataactaagctcacctctttgaaatggaaataatcatacctcasactggggaaataaaagcaatgattgaagtgaggtggttgagaatgggaggaaaacaggccagcaaaatatgcattatcatgtgagcaggcaaacacacatgtaaatactcaaattatttgcgtcaggaatttagcttgtgtttttgtggataggttagcctttgctgttattgtagtgttttacagtcaaccagaaacaagaattgccccatccgcagtatttctgtgagttttaataaattatagatgaagattttgtctcttaacgttacttgccatttcttacaaaataacacgtgcaataaattattccttgagtttatttaaagaaaagattgcatctgcaaacaaatttggagagtcctgtcctttttttcctcaaacaataaatactggaaaatccttaaaatccttgtatgaattaccata

SEQ ID NO: 102450 - DNA, 570 bp, Homo sapiens
atgaagtttaaagttctacaagtgtttttccttttcactatcactcctgagctcagattacactctagctattctgttgttacactcataacacattattctccttttttgtcyacctgtttatttcttttagaccaccagtcctcaacctttttagcatcaaggaccggttttatggaggacagttttcccaaggaattaagcggaggatggtttcaggatgaaacttttccacctcagattattgtgcattagttagattttttttctttttttttctttttttttttttttcccaagatggagtctcacttcttcgcccaggctggagtgcaatggtgccatctcagctcactgcaacctccacttcccaggttcaagcagttctcctgcctcagcctcccaagtagctgggactgcaggtgcctgccaccatgcccagctaatttttgtatttttagtagagatggggttccaccatgttggccaggctggtcttgaactcctgacctcaagtgatccacctgcctcaacatcccaaagtgctgggattacaggcgcattaattag

SEQ ID NO: 102451 - DNA, 510 bp, Homo sapiens
gaagaaatacctgagtctgagcaatttataaagaacaaaggggtttaatgggctgacagttccacatggctgcaggggcctcacaatcatggcagaaggggaagcaaagctatccctcttcacatggcagcaacaagaagtgctgacccaaaggggaaaagccccttataaaaccatcagatcatgagaactcactcactgtcatgagaacagcatggcrgtaaccaccaccatgattcagtcacctcccactgggtccctcccacgacatgtaggtattacaggaactacaattcaagatgagatctgggtggggacacagccaaaccatatcagtgcccatccacattgggtcatggttatctcagtgtcttccagaaacaccctcatagatatgcccagaaatcgtgtttgaccagctatgtgtgtctcttaatccactcaagtagatgtctaaaattaactgtcagaatatttatgcctgattcatggctgaaattgtttgaccag

SEQ ID NO: 102452 - DNA, 677 bp, Homo sapiens
cgtttgcacccaggaggtagaggttgcagtgagctgagattgcacctttgcactccagcctgggcggcagagccagaccctgtctcaaaaaaaawttttttaaaggaaaactatagccattgtgagttatcagattctagtcttgtttcttgtttctgggctatttttacctctttgtaaactggatcctgccatctgatgaattttgtcccacaatgatgcttggggaacaagaagccaagtattgtctctcctactaatgtatctattgtcagttaacttgaaggtctccaaccctggaacaaagttagaagaggaaggttctgctccccaaaatgcataaccaaattctgctacattcatgtaatggaatactatttagccatagaaaggaacaagatatcaacacacacaaagacatgagtgaatcttgcatgcacattgctaagtggaagaagacagtctgaggaggatacacacagtgtgacctcatttaatgagacactggagaaggcaaactacacagatgggaagccattggctccatggggtgggggtttgaggcattccatatgatactttaatagtgggatatctgccacaatgcatttgtcgaaatatgcagaattttacagccaaatggttaaagcaaactctattcaaattaaatcaaatta

SEQ ID NO: 102453 - DNA, 677 bp, Homo sapiens
cgtttgcacccaggaggtagaggttgcagtgagctgagattgcacctttgcactccagcctgggcggcagagccagaccctgtctcaaaaaaaaattttttaaaggaaaactatagccattgtgagttatcagattctagtcttgtttcttgtttctgggctatttttacctctttgtaaactggatcctgccatctgatgaattttgtcccacaatgatrcttggggaacaagaagccaagtattgtctctcctactaatgtatctattgtcagttaacttgaaggtctccaaccctggaacaaagttagaagaggaaggttctgctccccaaaatgcataaccaaattctgctacattcatgtaatggaatactatttagccatagaaaggaacaagatatcaacacacacaaagacatgagtgaatcttgcatgcacattgctaagtggaagaagacagtctgaggaggatacacacagtgtgacctcatttaatgagacactggagaaggcaaactacacagatgggaagccattggctccatggggtgggggtttgaggcattccatatgatactttaatagtgggatatctgccacaatgcatttgtcgaaatatgcagaattttacagccaaatggttaaagcaaactctattcaaattaaatcaaatta

SEQ ID NO: 102454 - DNA, 499 bp, Homo sapiens
aatcactaataaatgttatgtcttgtctgacactgaaaataaatccaagtaagttaggagaaatattggtggctttttcccccatagaggtttagatcagctttataaattaaacagtatgcgtcgacagctcagggcagtaagtaaactattcagtagataatctccatagaaacaaaaaaagtttaagcatctcaatctaaaatagcacttctggaatcagcagttgaatataacaggagcaaatccttcctttcttcaaactagcaacaaaattaccttttgtttaaaaaagttcaatataaaataacttagaagwatcacataggtattaatggttgtggtggtaatctcaatataaatttttcctctgaaactgtctgataatctttgctgactttcagagagtactgcttgtttaccagacatttttctaagcattttatgtatatcagctcagtcagtcctacaccaatgaaaggagattctttctattatc

SEQ ID NO: 102455 - DNA, 608 bp, Homo sapiens
catcttaaatctatgtgagagacacaattcttaatgattggctgtggattggacagtgaggttggtgtggaaatgcaagtgaactgaaaagtgaaagtagaaatctgttaagcagggttctttctagttgctgagtttttattccacatcattgatattcacttctttcccaggggcattttcctggataatgagaagactctaaaatcaaataaagcttttgaacattgaagatgtttgccactgttcygttgaagaatcctatagatttatagtgattctaaaaggtgtcttatatccactatattaactagctttttagaagcttatgaacattgtagcttttattgattctagggaattggacccaacaataagcaataaaagtcgatggtaactttcttcccatatagggttgtgcagatcaatacttcgaatttactgtaatttgctggtaatggatggaagaactgaaaaaattgtggagccttgtggggcacagctgtgcggtgttgcctttttatctaagctcactgtaggtcacaggctttcccaagtaacaagaaacatagttaagtggcagggctgatacgcatatttatcaagag

SEQ ID NO: 102456 - DNA, 554 bp, Homo sapiens
gggaagaggaaccccaggaacatttgccatggtcattttgggaatacttgagtagtcaagtgtatttcttagagctatctgtaatttttctttattaaattgaggtttgtttatttatttaaggataatgtggttccaagaagtctgtttccaaggtctgtagtttgaagctccttttaccttaaaagtatgtcctgaaccctgaagactgaccatctggctagtgtggttgttgtcattgtgatcaataaagacagctttgatttatgagcaatttatcctgcttacaactgcacagaagaggcagtggttcatattttggctcctrttcagctgggggaacttgagctcccttagttctttcagaaagcctggctaggaagctggcatcatggcaggaatgttttagttagcttcaggaagtcaggataccaatgtcagagtaattcaactgacagaataactactttttatttttttaatccaaattatgctttaaattatgatcctatttaagtatattatttaaaagttaaaaatgttatttaaacatt

SEQ ID NO: 102457 - DNA, 570 bp, Homo sapiens
ataatatcatccttgacccagtccattctcatggaagggaacttccaaggggggaaggggaggagaggatagaagggcgattcacttagtaagtgagcaacaaaatggccttagtgttagccaaactcacacagcatcttcgagactttcagtcatttcttcaggttctatcattgtatcccagcccataggaagatcacactgtgggagatttaagatttgcactgctagccggtccaccagccctgccaccccggcagacactacctgccactgtcctaatccctgagagctgtacccacctcaggcagtagcacctttcagagcttcgtcctgttctttgttttctggccttgcagctgtgaggacctttcaaccactttgccttctcctcaggaacttgccttgtccttcttgtgggctttgggttagtcaccacccattttcagccatgcttatttggagtgcagaatggggaacaagagacagttcagattctgctggtgggggttgtgrgagggatggaaagagcagaggtacacaactatgcactatgaaacaaccagaccc

SEQ ID NO: 102458 - DNA, 610 bp, Homo sapiens
tgtgtacatttttactgcttccatgttcttaatatttcaaaatgaatgggcacagaagaactaaaaaggcagtgtaattctgaggggaaaattacagaaaggaaaatatattgtccaagtatttattatagacttaaaaaaatcatgctgtaccttgtcatatcacttcagaaaatatttgaaattaatttcattttcctccctattgcttctcaaaaaatatactgctttaaactttaagaaatatcctaatctagggccatgaaagaataggataaaaattttcagccaattccaaactgatcaaacttgcccattccttatgtaattgtattttgrccttctagttattgaattttgccccttttagatattgaattatagccagctccacagtgaattacaattaaagttaatagacagtcttaaaattaggaaacctggtcaagttttgaaaggcagatgccaagtaaatgaggtttccaagtgcccctcgcctccaggtatggaaacatttttcatcatgattgtgttctgtggcaggcctcagctgggaaaagttttgtttacaaaagaaaagaataagcaagagtttctgaaagtgagtagc

SEQ ID NO: 102459 - DNA, 552 bp, Homo sapiens
tcacctgtgggcgagggggcaactccagaacaagggagatgtaataagttaagcagataactcaaaaatgcatccactatttttgtgggaattataagtgtttctgctttatagatgagaacactaaataaaaggttgaatcctagggtgaggtagaaaaatcagaaatctacccaaatattttgactataaattttgtattttttgagttctacaacttaacctccctggaagctgacatagaaaggatcatcagtaaaactacagccaccttaactgaagaggtaatataataatatggataagataatccacttaacgttctttgaaagggtctagagttgggccttgargaaacagaccatgtttagttgtccaaatctggaagactgaacgaagcaaaaatagtgaaatctgatgatggagagacagaaagaggggaaggctgtgctagaaaaaggtaatacatgtcatcatatatttgccttttaatggaatctaattcaagaaaacactactattttgggtaacagtagtttgtgctttctccaa

SEQ ID NO: 102460 - DNA, 583 bp, Homo sapiens
aaatgttggcattctgaattcatttgtcccttcacaaaggggatacattgtgagaaatgtgttaggtgatttcgtgattgtgtgtaacatcatagagtgtatttacacaaatttcgaatttaccccccaaaatctttctttaataataagtttttagcttattataacttttttactttataagctttttagtttttaatttttttgactcttttgtagtaatacttggcttaaaaatcacgttgcacagctgtacaaaaatattttttctttatatccttactctataagctttgttctagtttttwttttttttttgttgttgttgttgtttttaactttttaaacttttttgttaaaaactaagacacaagcacatacattagctgaggcctacacaggttcagggtcatcaatatgcctgtcttccacctccatatcttacctactcctggaaggtcttcaggagcaataacacgcatggagctgtcatctcctatgacaatgccttcttctggatacctcctgaaggacctgcttgaggctgttttacagttcacttttttttcttttttcaataagt

SEQ ID NO: 102461 - DNA, 517 bp, Homo sapiens
tggtttgctttgcgggccctcatccctgtggagtctgaatccctagtgactatgtccttatcaggctgggcttactatggttgcatttacacctaaaagtggacatgggaaaaccaaaagatgtcaagatggatcaacttaacgacaaaaatattctccactcctctattatatagcagcaaccaaacctgttgatgactggggtaaattaccctctaataggtaactattttcttagcatgctggtctactaccatgaggagccccaaaatgaccacacaacaagtgtttattcagattcttaatgtgtctttgaggggaagagtccctcccactccaggaaccaggacctccacaacaacaaagcttatggttgcakgaatgagaagcacaaagtttccaagtggtcaatgggaatgatgttaagtagagccacttctacttacaccctttgggtccctgaattttatattctacctattagggacagaacagccaaggacctttggtttaatgt

SEQ ID NO: 102462 - DNA, 578 bp, Homo sapiens
cctgcaattcaaaaggaagagaatgaatcaggacccatacttgaagcaatggacaaagctttttctgtctccatacagaggagtgtgtgataggtatctccattaattgaggtcaagtttctgaaaaggaacactcccaataaaaatggctttggggaatgatggagcaagggaatatgcccagcttaaggtctacttgtacaaattcttacgtgatttataattagatttgaaagactctagagttagaacaagtaaaatagtaacagcctatgtaagctacataagaaggtacctgtctgtgtatatacctgcctctttaaatattactttaaatttctactttaataagacctttaggatgtktaaaggtcattcagtttatacagatttttaaataaagggctgttttcttttttaaaaaagttaaaatcctctactctgcgatttgtttgttttttgtttttagctttccatatttatgaagggagggttattgtcagtcctattgatcaatcctggcaccagcaccaaatggtagtagctgttgtaaatgtctcagaaggagctagaaaaca

SEQ ID NO: 102463 - DNA, 526 bp, Homo sapiens
tgtacctttaggggctcatgaaagaatctacgggcactaacgctattcaatatttggcatttagagctattagaacatgacctgcatctctaaatacacattattatgattaacagagctcagatctgagcaaacagatctccatatctcttgcatagatctttgaaagaaagagtaactgggtccaatagttatgaaaccttgtgggttggggataaacgttgcttccataggcaacactattgagaagtagaattacttacataaggaaaatagaaactgaagacctatcaaccctttttctcagatagtatgaatgtaataatttcaacgtgtttattkttgctttccttcatgctttaatttgtggttctagaggtacttatttaagaaaatggattaaaacaattacaaatacaaattagctatgaaaagtaatattttctaggcatgagaaattatagaaaattacatatcacaagatacaaaaataaaaatatattttactacttagctgcctaacaca

SEQ ID NO: 102464 - DNA, 596 bp, Homo sapiens
agactgtgcatttcacataacaacctaactattgctctatcattgaaaatttctttggaaataagtgaacagatttggatagaataaaaaaaaaacaaatactacagtgtgaagtttgcttttactaacctgtaaaaagaaacactaatttgcatttccttccaattcaagctgtatcccaacaaaccattttgttcgatctgaccacttttttcatgaatgtgagtttctagacacattattttgatgaacgttagttcaaatgggattctcacatgaatctaacaataaaagcattttattttgcctctttcacttagagataggaaagaatatgtggaaaaataggaaaagtccaagagattatttaaaagaaaaaaagaagacatttaggggaagggaagkatgtaggaaacatcttcaagcgcaggaatcattaaccccacataactaatgtagattacaacctattcttgtgtcaatgcttttgattttaaaagtatctgtctgaacacagattatattattttgtgtcaaggggaatggggtggggttgaatctcaactgcttattatctctcttttaagatattgctt

SEQ ID NO: 102465 - DNA, 593 bp, Homo sapiens
ggaacaagtaaaacaattcaggtgaagcacctggatgatctgtttacacaagctattttgaaagtgccagactcaatcatctgatgagtttagaaagtattatattttaattaatttaagtaggtgcacatgtcaatattcatatatattagtttttattatgatgaacactttgctaatattgtagatacagaaacaaaggctcaatgacttcttccaaagcgaatagtgtgtaacaaagataaaatgcatgtccttttatttatttatcaataaataataaatgcataggataagtaaagaaataaaaatacgaataattgagagcctgcagtttcattaataaatcatatatttttcccaggttgacaaaacatttatttttcatttgacaatattgatgattctcatattccgaaaattttggagaaaattacrgttagatatttcaaaaagaataactgcaaaacaaatgataattttttacaagcatgtatataaatgtggctaatttatgaatttttgcaaaaattcagagaatcagaggagcgaagagccaggagagagaaaagaggtaagatttgttttagata

SEQ ID NO: 102466 - DNA, 547 bp, Homo sapiens
ctgtctgagggtgagacagggtttgaatctgtggaggcatactgtcggtgaacccctctgaaattgaaagcaattttatgtatgtttctgggcttargttctgatgaaatctgaattctcagaggggctgtgaacaaaaaaagtggcacactgttgttcttgtggatgtattttctgccccaccccacccccagatgctgctacagttcggagtagggataaagtccactttctcccaacctcatgaagagcctgctttgaggcccagagctgggatgtctctaagaatcaaaccttattgagagtggctgcattgaccccggatacctctggaagtcacatggagtagcatgagccagtcgtggaaagtccacttgcagaagaggggtggaattttggcctgggtgccggtactttcctgtatttgatgtgttgttcacccatctctgaaccgcaaagtggtgaagaaaggctgggttgagtggtctttgcttttcctgtgcctgtgtgggaaggtgtgttagtgtaatattggttgacactgtct

SEQ ID NO: 102467 - DNA, 572 bp, Homo sapiens
tgtctctgtgagtgggaaaagtattgggatctacaaacaggtttaactcattacctgttagtgagttggaggtggccttttgtaacagtgtaatggtcaggtctgcggtacattcatggtttttatccggtattactwactctcctatagctagctcatcctctgaatttcctctcatgctcacctctctccatacaatcccatgccctccacctctattccctataccgaaggcttaggtaagttcctattttcaggactcccacagtgcccctgggcacatctttcatggtgcattttccacactggattataatttatgagcttttattctataagcttcttgagtccataacttatattaattctgaggaccagcttcaagagaacattgtggaaaaaaacgtggttccccatacctaaaatgctgttcctgcctctacacccattcagatcctaactatgataaatgaatcaactcaagtgcttcccactgcatgagccccttctttgatcttcccagttaaattttaattgcaaatgtcagtattctagtaaatgtctttttctag

SEQ ID NO: 102468 - DNA, 656 bp, Homo sapiens
aatgcacttaaaagggctggaaaatgtagaaaagtcgaaggtatgtagagaagaaagtcctgaagggtatcacctatagggtacatgttgtccccaagcctcgttctaaatagtttaaaagcaaataccatggcacaatgccctaaatgacctttggctccttttaccagtgtttcagaaccatctggcttaggagaaattgtaaaatcactgtacatgtagtctgtacagtaaataagatggttatagtagtatacaaagtaaaatttacatattttattcagcagaaaatcattcatttctcctagtgagtaaaatacggattcttatgttttgaaaattagtaagcaaatgaaacaaaattaactyctaaggtgagaaaattgcctcgtgatgtgccgctcattttgacatttttagttacctacaaaatatgccaggatagacatttaaatatatctcagcattgttttttagttattcagccacggtaataaaacacgtctcccctcagcttgtcatttgctattaaatctgcaaagaatggaagtaagagcagcacttagagaaaaagtcaaaggggtggctcaccgtgtcacaggctggacatatgcagacatttttaagccatgaaatgcaaatgtcttgaatgattt

SEQ ID NO: 102469 - DNA, 573 bp, Homo sapiens
gtgcgtggcaaagtatttgtgaatattaatatttgttctctgttctgttctacatccaagaaaccacctattcacaagggattggcytcacacagatacatgtgcatctgacgtagtcctggaaagttatttcatctccagcatgttctgagctatcatcatcacattcatatcaactttgtttctacgtatgatttggtaggtcactacaacaatcagatcaggttacagataatagtagtatttacagatgtcataataaaattaatcctaaatatgctaatagtaccagattagtttttgggttttagttctttttggggaaaaggaaaatcatatgcacagtttgggagttactttttaaaaataactattgaatcttttttaaatgaagcaagagacagtagtaaccaattctttttgctataggattaaaattagtaaatagtattttttttttttgccccagctcttgatctcctattttaaaatgtccatcaagtacttatctctatttacttcaaaattaatcatcctaaatgaattaacatatagttgccataagttcaagct

SEQ ID NO: 102470 - DNA, 563 bp, Homo sapiens
taaatcaggaattctttctattatttgttggctggttgactcaggaggccattgatgaaattaaaaacttctcttcctttgtctttaactcttttttctgtttttttctatatcagaaaacatgttactaaatgcacgtatttcaatgcactgttctaattaacttcttgacatatctaataataacataaaattactgtacttttcagtttccagcatttgctaaggatgcaacaactaagaatacagcagaacatagtgcaagaataattgttraacaaaaagcctttttttttttttttttttttgctttcacaaaagcagaattgcatagtgctccacaatggccattcagttgccaaggaatttaaccatttttgatatcttatagtaaatggattgagttacttataaaatcatcaaatagcagatatttttgcttacagaatgcttgtccaaataatactccattctggatctgtacatattactcagttaactatcattaaaagaatatctgtatatctatacctctctatatatttcatcagctataatatctg

SEQ ID NO: 102471 - DNA, 599 bp, Homo sapiens
tggagagtaaaaatttcattgcataagcaaaaatttcccacagtggactcttttgtctcattatgccaattctaaaataaattagagccctatttttttggcttctttgtgcaagggcggaatgagcttcagagcatcatttgtttttgtagtgacttcaggcatatcaatcctcagtgaaatgacagtcataggactggcggagacgttggctgacccacagaaagcaaaccggctctcacatgtttcttgctctctccagagcacacatccatccttaaagctgtttggtggaaaagcctcattcaatagtgagacagaatcaagggccagtgggtgaggaacaagtccttctagaagatatttgtgcaaagggttcagtagggagaaaagttgttctcctctaatgtcctcttaaggaacagcaygcttttctctgccaaagaaataattctgtcttcagagagctgccacagggaatgtccttgagtccaagtgggctgtctccttaggggtgtgcttgggtgtctatatctgctgcatatgtgcagagaatgatgcaggaggcttttcaaaatggaaaagtgactggaactggt

SEQ ID NO: 102472 - DNA, 557 bp, Homo sapiens
attccaatgaattataatgcaaaagcaacaagtaattctgaacttaaagaacaggacagtcatttttgtcaaagaaaatacatgcatggaatgcagatgccacaaacaggagatgaaataaaacagataaggagaaggctgtatctaggctgaatggctggccaatgttttcctctccrtcagtataaataaaatggatggaagaaaacacccctggatactatcaaatatgcctttcaattattttatgcaaaaacattattttcaataggtgtcattaaagaaaacatcatagaaaaaagtttgcaactcatgttacagaaattaggctaaagtctttaatataaaaacagctcctataaatcaataaggaaaagaacactggcctacttgaaaaaatagacaaaggttatttataaacaaacaatgctgataaatggtaaatgtggtagttcttaaacataagataaaatgctcaatcacagagaactgcaaaataaaatcattttgggatagtctttttcacctatcagatttgcaggatcaaaaagtttcat

SEQ ID NO: 102473 - DNA, 576 bp, Homo sapiens
ttcttggtgcatttaggtaaaatttgaccacataaaccaagacggaagtccagatataaagctgactccaagagttgagaattgtgtcttggatccagtttatgtaaacatgtggttctcaaatttggcaggatattagtgtcacccaagcaaataataataataaatcccacttaaagtttcgggcaaaatagttgtagtggtagcatatttttcccaaatcttcataaaaccagctagaayaattcagtagcaaatccaaaaacccttggcctatatttatagtaaagctaggtgacaagaattttgggttatttattgctgcataacaaatcacacccaaatttagtggcttaagataacattatattatcactatgatatctgtgggatagaaaatttaaaaaatggcttaggtgggtggtcccagctctagatttttcctaatgctgcagtcagactgtggctggaacaggaacagaagatgctgaaggagctcagggttggccaggtaacttcctctcttaatgtgttatcaggatctctccatatggaatctccagatcatgtctcatg

SEQ ID NO: 102474 - DNA, 545 bp, Homo sapiens
tcttctaatcttgttcattctactcatttgctagttgaatccattttcttaggcgtcatgcaaaggtaaactttcttttagtctttatttgcctataaatagcaaattaattaagactgctttaataagatttgacagtacctactggcacatgtttagtctcttccatacacttgctaagaaaagaaaagttttaattcttctttccatgtttgacttgttattccagtaaattcttcagtgtcccttggacttgattctcattcttctctgtctccctgagtgattcatctacattcctttgaaattggtagaggactgatacatgaaagaaataggcagggttaggaaagggacaaaaaaaatcagagcaagaattttaggctaggagcttctggtgcagaaaaggaggggaggtgaaygtcttcacaagagttatcttcaaatgatattctatccagacaagtaaaaagaatacgcttacatgtacgtgtggtaatataatatttatatttgatatatggataatatagaaataaaatgtt

SEQ ID NO: 102475 - DNA, 545 bp, Homo sapiens
tcttctaatcttgttcattctactcatttgctagttgaatccattttcttaggcgtcatgcaaaggtaaactttcttttagtctttatttgcctataaatagcaaattaattaagactgctttaataagatttgacagtacctactggcacatgtttagtctcttccatacacttgctaagaaaagaaaagttttaattcttctttccatgtttgacttgttattccagtaaattcttcagtgtcccttggacttgattctcattcttctctgtctccctgagtgattcatctacattcctttgaaattggtagaggactgatacatgaaagaaataggcagggttaggaaagggacaaaaaaaatcagagcaagaattttaggctaggagcttctggtgcagaaaaggaggggaggtgaatgtcttcacaagagttatcttcaaatgatattctatccagacaagtaaaaagaatacrcttacatgtacgtgtggtaatataatatttatatttgatatatggataatatagaaataaaatgtt

SEQ ID NO: 102476 - DNA, 616 bp, Homo sapiens
gatgttaaataactcgtcctgaatctccccaaaaacagtgtgcccattttctattacctgtactctctcaccccttactttattctagattcttcactctcaccttacttkcataggcactttatatttcttagattcatatttctcgaactggaatttatactattattagaatgttgaaggtatttgaggtcataggcttagcataaagtacatttctgcgatgacaattttatttgaggatttcgcaggactggggttgctggttgagggagggcaaagggttaaataacttaattcattagtgtttaaaatagtttcatattaaaacaaatacagattcgttgaagatatgaatatttaagacaaaatgggtaatgtcaaggatatctcaaatcactttgggccacactgcaaatccccctgagatatacattcactcttctcagtcattaaaagacctagagttagatagatcagtagaatgacaatagttaacattaattgtacatttcaaaatacctagaaagaataatttgtacatttctagcataaagaaaagataaatatttaagatgatggatattccagttactcttatttgattatatgaatg

SEQ ID NO: 102477 - DNA, 677 bp, Homo sapiens
ccacaaatagtgtaagcacaaagtgactttggcaaataattagggacctttcagggaaatctagaaggaagatacagagtggatgctcttggattgttattacagtcttcttggaaggttttttttccttcccttctacctaggagctgtgggaattcttaccgactccagtgtggaaattaagtgaagagccagactttacaagttcagtcttaaccagttttttggttatccacattaagtaggaccttggtcatcagacttcatgatcaatcagagcctgtggaaggtgaccgtaccagtcytatatcctatctgagtaacaacagccttactgagtgatactactttgtttctgccatcccaggagtcctccatctgtacagaaattagggagcttatttccatgcatctttatgaaaatgcatgtcagcagtctcatcttaaagagaatgaccacttgagaactattaaagatgttcccacccaccttgctcaaggcattcatgaaatgtcttctgagccctttgggagaccctgattagacaatgggtgactgactcatacataattaattcatttaaacctttgtatccctaaaagtctttggattccatctctacatgaaactgacatttttttcatgtaggtccagatttcagtcaaccaagtcaaaa

SEQ ID NO: 102478 - DNA, 520 bp, Homo sapiens
atatactgaattatttcagtaataatttttgtaacaaccattttattgattggcatatttatttgagtctgagctgtattaaaccttgagatttattcggaatatggaagttctatcattgaatataacttcaaattgatccattgatgatcaaatattaattataagcattccccagtttatatatgcaaattgagctaataaccagtttgctctatgatacaatattaatagtaatagacctaagggttgaactcaaatttgttagacttcagaggttctgagttttcggctgtctaaaaatggaacagctccaaatgagaacttagatcaaggaatacccttgtacgtgcttgactctaaaggagtagtgtgcagatcgtaagagttagaaaaaatgggcagatgtcaagcctacagatgtgtaggtggtgggatcttggcagawgatgggggaaagaagagaattgaaccagattcacagggcatttatccatctctcatcacagtatcatcactt

SEQ ID NO: 102479 - DNA, 403 bp, Homo sapiens
aattccttcagcatttgcttgtctgaaaagaatcttacttcttctttgcttatgaagcttartttggttgggaatgaaattctgggtcgaaatttcttttcttttttcaaaagaatgttgaatattgtcccccaatctcttttggcttataggatttctgctaagaagtccactgtttgtctgatgggcctccttttgtaggtgacctgacctttctgcctttaacattttttctttcattttattctgaccttggagaatctgatgattatgtgtcttggggatggtcttcctgtgaagcatcttactggggttttctgcatttcctagatttgaatgttggcctctctagctaggttggggaagttctcttggataatattctgaaatatgttttctgaag

SEQ ID NO: 102480 - DNA, 588 bp, Homo sapiens
aagtgacaatggctccgtgtttaaggcagctgtcacacaaggggtctcaaaagcactagacatagaatatcatctacgttgtgcttggagaccccagtctgcaggaaaggtagagaaaaataatgatattatcaagagacacctcagaaaattatcccaagaaattcaccttccttgggccactcttcttcctaaggccttactacaaataagaaataccccttcaaaagtaggtcttagcccttttgagatgctgtatggacaggctttccttaccaatgattttctattagatcaggaaacctctgagttagttaagcatgtaacctctctggctcatctcyaacaggaattagcgcaattagcaaaagtccaaccccaggaaataggatcacctctatttaacccaggagatttggtactggtaaagtctctcccttctctctctgcttccttaagcccaagctgggaagtgccttacattgttcttctttcaaccccctcggcaataaaatttacaggaatagactcctggatgcattgcacttgagtcaaagcctggagagctgagggaacaacccctgacag

SEQ ID NO: 102481 - DNA, 588 bp, Homo sapiens
aagtgacaatggctccgtgtttaaggcagctgtcacacaaggggtctcaaaagcactagacatagaatatcatctacgttgtgcttggagaccccagtctgcaggaaaggtagagaaaaataatgatattatcaagagacacctcagaaaattatcccaagaaattcaccttccttgggccactcttcttcctaaggccttactacaaataagaaataccccttcaaaagtaggtcttagcccttttgagatgctgtatggacaggctttccttaccaatgattttctattagatcaggaaacctctgagttagttaagcatgtaacctctctggctcatctctaacaggaattagcgcaattagcaaaagtccaaccccaggaaayaggatcacctctatttaacccaggagatttggtactggtaaagtctctcccttctctctctgcttccttaagcccaagctgggaagtgccttacattgttcttctttcaaccccctcggcaataaaatttacaggaatagactcctggatgcattgcacttgagtcaaagcctggagagctgagggaacaacccctgacag

SEQ ID NO: 102482 - DNA, 588 bp, Homo sapiens
aagtgacaatggctccgtgtttaaggcagctgtcacacaaggggtctcaaaagcactagacatagaatatcatctacgttgtgcttggagaccccagtctgcaggaaaggtagagaaaaataatgatattatcaagagacacctcagaaaattatcccaagaaattcaccttccttgggccactcttcttcctaaggccttactacaaataagaaataccccttcaaaagtaggtcttagcccttttgagatgctgtatggacaggctttccttaccaatgattttctattagatcaggaaacctctgagttagttaagcatgtaacctctctggctcatctctaacaggaattagcgcaattagcaaaagtccaaccccaggaaataggatcacctctatttaacccaggagatttggtactggtaaagtctctcccttctctctctgcttccttaagcccaagctgggaagtgccttacattgttcttctttcaaccccctcggcaataaaatttacaggaatagactcctggatrcattgcacttgagtcaaagcctggagagctgagggaacaacccctgacag

SEQ ID NO: 102483 - DNA, 588 bp, Homo sapiens
aagtgacaatggctccgtgtttaaggcagctgtcacacaaggggtctcaaaagcactagacatagaatatcatctacgttgtgcttggagaccccagtctgcaggaaaggtagagaaaaataatgatattatcaagagacacctcagaaaattatcccaagaaattcaccttccttgggccactcttcttcctaaggccttactacaaataagaaataccccttcaaaagtaggtcttagcccttttgagatgctgtatggacaggctttccttaccaatgattttctattagatcaggaaacctctgagttagttaagcatgtaacctctctggctcatctctaacaggaattagcgcaattagcaaaagtccaaccccaggaaataggatcacctctatttaacccaggagatttggtactggtaaagtctctcccttctctctctgcttccttaagcccaagctgggaagtgccttacattgttcttctttcaaccccctcggcaataaaatttacaggaatagactcctggatgcattgcacttgagtcaaagcytggagagctgagggaacaacccctgacag

SEQ ID NO: 102484 - DNA, 595 bp, Homo sapiens
ccactgccataatctgcctttattgaccatgccattccaggtragtgatttcatgtcctggggtcttgagtctctcatctgaaaacaaagggagtcaggagtcatgttctttacgtattatttggaattagacctgtgtctggaaagtcaagtttttcatgtccaagttgtgtgatttggggtagaaaacatattccctccaaaccccagtttcttcatgtgtacagtatatacagttctttactgatggtgttgctacatcctgatagagaattaaatgagacccatcttttcggtgtgacctgcacactaccaggcacctaatatacatctggtatacactaactactgcaaaagccttcagcctagtcagttcactctctagggcatgattcttcctctgtgaaaattttccacataccttcctctctagctaatagaaaatgctttctcaatttttgtcgtttcttttacagttagtaaataatgacaagtgtgttgagtgctaccaatgtgaagtgcaagtttgacgggacatagggagaccttatttggttagggtgggctgggctgccaccccaaccaaattaggttg

SEQ ID NO: 102485 - DNA, 595 bp, Homo sapiens
ccactgccataatctgcctttattgaccatgccattccaggtaagtgatttcatgtcctggggtcttgagtctctcatctgaaaacaaagggagtcaggagtcatgttctttacgtattatttggaattagacctgtgtctggaaagtcaagtttttcatgtccaagttgtgtgatttggggtagaaaacatattccctccaaaccccagtttcttcatgtgtacagtatatacagttctttactgatggtgttgctacatcctgatagagaattaaatgagacccatcttttcggtgtgacctgcacactaccaggcacctaatatacatctggtatacactaactactgcaaaagccttcarcctagtcagttcactctctagggcatgattcttcctctgtgaaaattttccacataccttcctctctagctaatagaaaatgctttctcaatttttgtcgtttcttttacagttagtaaataatgacaagtgtgttgagtgctaccaatgtgaagtgcaagtttgacgggacatagggagaccttatttggttagggtgggctgggctgccaccccaaccaaattaggttg

SEQ ID NO: 102486 - DNA, 626 bp, Homo sapiens
taagcatcaggagtggacagtgatgtttggggggatcccaaggcacatgggaggcagatcttacctctttctgaggaggccacagagagctggatagtccctctgtctgctccctggtagctggaatgtggatctgtgactccatgcagccaactggaagcttaatgcagggaatgtgaactttgaactagttagagattattcactgtgaggcttttgcaaagggcacaggctggatgagtggccgtgagcgtccgtgttcctgagcagactgtgctgtggcccaatcctgtgcgtgtctcctcttcaggctcctgccggagcatgcttctctaatcttaccatttatcactgacccttcggtgaaactctcttctgtttaaatttaccagggtacactttgtaatacttgggaccaagaatttgaagatagtaatcagacaaatcaaacaactagtagtagtggagagacacgtagccctacaggaaggggtagaattatcattaaaaacacagacaaaccagagaytgcctgaaaaaaaaaaaaagatgaactggaaagattcaaagtaggctctattggaggtgagtatggaaaacaagcttagctttttattttgaagttt

SEQ ID NO: 102487 - DNA, 640 bp, Homo sapiens
cttgctcacactgggttctacaaggcataaaaccccccagcacacaaagggtttactgggtccagtcaccttatcacctaggtggattcagtctctctcagcactgagagtcttaacttctttcttggcagctaaagattttttcttccttattttcaatctcagatacatatttatctctataaaatattttatctattattttcatgttggcatggcaagacagggagttccacattaactgactctgattgcatattctaacacatacatttttaagaaacaaaacttgtgacacatacaaacttctagaagtcctcattatagttttccattacaaaggcagcataatagagtgatgtatggcaacagtgaccctgtagtgcaatgagggaaaggatgctcttttcaattaatggtgctggatcaattgaatgtggaagaaaggcagcttgatcctacctcatacaattcacaaaaaccaattccagatggattgcaagtgtaaatgtgaaaaataaagcaataaagtgttcacrgaaaatcacagagtatattggtgaccctggcataggctaaaaaaacttaaacaggccacagaaaatgttaactattaaaaaaaaaaaaacttgtaagttag

SEQ ID NO: 102488 - DNA, 556 bp, Homo sapiens
tgtcttgaaaaacacaaagaataaaaagcatgtgggtctgcacttgaataacattagcacacactacctgcagtttttagttggagtaaatgtgcaaacttatagtagcccacgaagtcattgttgagagcaagagtatccataaagatatatatatatatwttttttttttttttgagttggagtttcactcttgttgcccaggctggagggcaatggcatgatcttggctcactgcaacctccacctcccaggtgcaagtgattctcctgcctcagcctcccgagtagctgggattacaggcatgtgccaccacacctggctaattttgtatttttagtagagatggggtttctccatgttggtcaggctagtcttgaattcccgatctcaggtgatctgcccgccccagcctcccagagtgctgggattacaggtgtgagccacagtgcctggcccataaagataattttaaagcatatttcagttttaatctagaatgcactgggctcccaccaaatcaagcttgttgacttggagtgtggtcacatactgt

SEQ ID NO: 102489 - DNA, 611 bp, Homo sapiens
aaattctaaaaagaaaacaaatagttcaattataaaatggggaaagtacttaaatggacactttgccaaagaagatatacagatggtaaataaacacatgaaaacatttcaacatcattagccattaagaaatttcaaattaaaaccacaatgagatatcaccatatacttgtcagaacagctaaaataaaaaatactgtcagtattaaatgctggccatgatgtagagaaactgtayccctcatatgctgttgatgagaatgtaatatggtatggccactctggagacagtttggcactttcttatcaggttgtgtgcattgactatatggcccagaaaaattaaaacttgggttcacacagaaacctgtacacgaatgttcacagcagctttatctgtaatagagaaaacgtggaaacgaggcaattgtcctttaatgggtgaatgaatgagcaaaccatggtgcacccacacaatgaagcactactccacaataaaaaggaactgactattaatatatgcagcaacatagatgaacctcaaggcagtttatattaaaaaagccaatctcaaagggttatatactcgtataataccatttacataacaa

SEQ ID NO: 102490 - DNA, 497 bp, Homo sapiens
tactaaatgctcaaaactgcccctcctaggggcatcctgggtcaagctttggagtcaggggttcttcttttcatggacatttcaggactttacaactaaaaccaggaagcaggctggctgcccatctcatatctgacgctctaggctgaatctttcattccctttgtgacagtgaagaatggaactctaatttatgatctcccactctctttatgkagtctctgttcctatacctcatcaatcattgtcactttgaattttgcagtgtcttataaaatcaacctatgttgatccacccattggtttaaagcttctgcaatgaagatctgtgtctatcttgtctgtctgaaatggactttataccacatagaatctccaacaacaaaccctcaataacagcaatgaggacaacaatcatatcagccaccaccaccatgattaatgttatcccggatcccacctgtattagtctgttttcaccctgttataaagaactt

SEQ ID NO: 102491 - DNA, 607 bp, Homo sapiens
tgaattctcctgagaccacgaagtgcccagggacatggaaaagaaaggcagagaattaaaagccttgtaagtaggtgaaaaggcatgttttcaacattgtagcagaaaacaggggcttgggktctacatctagtctgaggcatcccttccttaaccttcagtctatgaaggacccaacaccaccttctcctctcacctatttccccatcaacccctgggtattggggccaaccaggagttgtgcaggtataagtcactctgcttcacaaaggggatacaattaccaaacggtcttctgttcccactgtcctagggatgtctttttgcagtcatcctgggccaagaggagatcatggcattggatagttaggtttgctctgtgttgaaacaacacttgatttatgcaatttggtcagacacctggtaaaatcactgaatagaaaccaagttggttcaactgactggtgtatggagcaactggtcatttgaatcagaactctcagcctagcagtttggtgctattatgatactgcaaatataataatacagaacagcaaactgagcctagcctttgtacaattttaaagaaataataaagcatatgccc

SEQ ID NO: 102492 - DNA, 576 bp, Homo sapiens
gacctacacagacttccaggcccatgcctgggccgcctatgtggcgttgttccacctcacaataccagactagaggtgactagacaaggtcctcaaccagttaaaaaaaaaacaaaacaaaaacacacacacacacaataaaacaaaaaaatatttccccataagaaaatgttccaggtagaagtgtaataatgtcaaatatttaggaarcatttgtactaacaaggataaatcagagagttttgttgtgtgtgtgtttaatcctcagttaatcagaagatgttaaaatgggagcattccttcatgaaaagcatacacttaactaagactttgaggtcagaggaaacatgaatggggaaatccatgaaaaaaaaatctaattactgatgccttaaggtctggttttagagattcaatgtgtgcacacatagaaactgaatctctaaaactagaccttaaagccatcagtatcatgattaataggggttaatgaggttaacccctattaaccttaacagggaaggctttggttcaaaagcctgaaggagacccagagccagcaaatgtgacatgggg

SEQ ID NO: 102493 - DNA, 580 bp, Homo sapiens
gggacttagcaatatctataattcaaccaaattattgagaaactattgggtttgaagcactgttatctattattatcttaatacacaatgttcctatagcatttaatgattttaaaataatttcttttatatattttcacatttgattcaacctctttgaatccctatgaattatctaggtgaggatcaaagtttctaatttctatcgcttttgttttaaatatatactacctaatttaagatctagaataccagtctgtktccagactactcaccaatcgacccattcacctatcttctctgtaatacctgtaacactgcagagttgatgtacatagttctttacctttgcccattctatttcctcagtacctgcctttagaaagggtttgattaacaaaaacaaaaatctatatctaataagaaaaattaaatatataacaaaacctcaattttgtgtccattattgattcatatttctagccctcttgcttcttaattagcactctttttgttaagtccctttattttctctccatttaacataaacacatcaagagaggtttctctatgcaacttt

SEQ ID NO: 102494 - DNA, 521 bp, Homo sapiens
tactgctggggatactgactgcagytcttcctgtaactgtaaaagttcacgatttaaatgaattcctttgccctcttcttctgccatagacatactaattcatcagttcatgcttgatacttggaaagaagctacacaatgctcctctctccccagtctcctggagtcaacactgaatatttttgacacactcaggacgtctgccacatgggctcacaaataatagaagactcatcagcttttatatggcatccacgttttttccttctgcctcaaggcaattaatttaacagtaagttgcctagtttttgcattttttaaattttcagctgggcatggaggctcatgcctgtaatcctagcactttgggaggccaagactggaggactgcttgagctcaggagtttgagaccagcctgggcaacatagcaagacctcggctctattaaaaataaaattaaagagttaagaaaagattccttctttgggatggccttcatggttctgggtactgctgcatt

SEQ ID NO: 102495 - DNA, 614 bp, Homo sapiens
tcaactttataatggagggaaataatttaggcaattaatgttgggaatttaaagaaagctactctaagtgcatatatatttaatataacttgttggaattatttttctgatacaggaagagatagtcggatattcaataagtgattgattatttggttttaggttctgacatcagtcattccatatgaactggatattccacaattcagaactattgagtagttctgaaactaactacctgaagttagcacacaccccacagataaaagcaaagtccttcacaagagtgtccccacttcagatgccagacataagttttgggtgtttgtcctcaagccacttggatttctgcccggctggatacaaattccaagctgcttcatctctacctcaatagtatggactgtaacccagttctgacactacctagagtgtctttgtccatttgygttgctataaaggaaatacctgaggctggggaatatataaagaaaagaggtttatttggcttatgattctgcagactctataagaagcatggtgccagcacctgcttctgatgaaggcttcaatgtactttcactaatagcagaagatgaaggagagaaggcatc

SEQ ID NO: 102496 - DNA, 634 bp, Homo sapiens
agttttgaggaggtatatataacgttctatttcctaataagtaggaattagaagaccaaaataaagaatcatttgattttgcatttttttagtgaagttatgagaaattagtgtaagagaagaagttctcaaagcagtgcccacattatcaaaatcagtctcacctgaaacctagttagaaaagcatattctcaagtcccaccccaagcagacttgctaaatcaaacactctggattaggacccagaaacttgcacttaaacaaactytactagagatgcagatgcacagcctctgctagaataaggctaacatgaaaccatttacttttccagctctgtgagtagtttcacagagaatgtgacaactatataaaaagattataatttttactttttggagagttgaatcagtaaccttcaaatagtttcttaaagagacagactattgggaaatctgcattttattattaaatcttagtgataacaagttgtcagtgagtaaatttaatgtggccaaaacctggctggggaaaatggctgcaggagagcccattgctaatcatgtccccagggaaaacctggaatcagtgctgagttttgccaacctgaaggagttgatagtagccttgtccc

SEQ ID NO: 102497 - DNA, 589 bp, Homo sapiens
atacacagtgagtaatgtagtctcaattgatgcaacaaatggtcaatgtttaagtagattatttgttaacattatgttaatattatttaaattcacaaaagaagctaattgaagatctcaaaattacataagaacagcagagaactatggagaaataaaacaggtatttatatgtttgactttgatagttgtgaggcaatatagtctaagtatgatgaaaacaatgaattaaaattcattttagctgtgcggtttaatattgtaagggtagaaagaaaaagaaattgagagaggcagagagagggaggttattgaaggggcattccatctaaagattrtgctaccagcttgaaaatgttgttgagttataagaggaagagaaaaagaatgactaagaaaatcattatattaacttggttactacttcataatgtatttattttgtaattaatatgcagcacttaaatagctagacttcaccctactcctcaaaagacagtctttcaagctatcccgttttcccatggagccattagatgtcttacagtagagtataacatttggctgttaaatgattttttcttattta

SEQ ID NO: 102498 - DNA, 605 bp, Homo sapiens
ttcatgttcatatacattctttaaatcagaacatgaaacattctccaggatagcccatgtattaggcatatgggctataatatggactagcataagtatgaatgcatgtggtttttagatagaatgtttcataatgtttcttagatccatttaatctaaagtccagtttatatccaatttttttattaatttacagactgtaggatctgtctaaggctgaaaatgggatggtgaaatactccactagttgatttcaatatcattacataatgactacttttttgctattcttaagttaaaatctgtatatctaacacaagcatagctactcctgctcacttttggtttccattttcatkcaatatctttttccatccctttctttcactctatatgtatcttcactggtaaagtgagggttttttgttttgttttgttttgtttgtaagtagcatatagttggagcattttttaaatccattttgccattccatatcttttaagtccataatttaacttgtttacattcaagattattattgatatgtaagactttgtttctgttatattattaattgttttgtttgttttgtatattctttatt

SEQ ID NO: 102499 - DNA, 414 bp, Homo sapiens
tgtatgttgtcctctaatcttggcaaatgtttccattttctagtacagaatatgtatttgtatgtgtatcataaagaaatatgtattatatatttgytatgtgttatattatacacacacacacacacacacacacacacacactctctctatatatatataaagacagggagagaaactgcctttcaaagatcctacctctaaacaccatgaagttggggattagatttcaacatatgaattttggagggacataaacattcagtccatagccataactgagatgtacttacagtagaaagtatattattgtgatcagaattaattttaagatcaacaactatgattataaagatatatttcacattttaagcaaatgtagcaaaattatattcacaaatcaattttttcaat

SEQ ID NO: 102500 - DNA, 414 bp, Homo sapiens
tgtatgttgtcctctaatcttggcaaatgtttccattttctagtacagaatatgtatttgtatgtgtatcataaagaaatatgtattatatatttgttatgtgttatattatacacacacacacacacacacacacacacacactctctctatatatatataaagacagggagagaaactgcctttcaaagrtcctacctctaaacaccatgaagttggggattagatttcaacatatgaattttggagggacataaacattcagtccatagccataactgagatgtacttacagtagaaagtatattattgtgatcagaattaattttaagatcaacaactatgattataaagatatatttcacattttaagcaaatgtagcaaaattatattcacaaatcaattttttcaat

SEQ ID NO: 102501 - DNA, 603 bp, Homo sapiens
tactgatatattaattatttttaacctttttctagtaaacccttgcaattttgtactcctcccttcgtgaacttgtggcttttaaaattcacaattatatatatatatatatatatatataaaatatgtaatttacatataaaaacacagacaataatataatatagttgaatacattgttttgaataatttttaaaagagaaacattaatattacataaggatctcatacagactaaatctttgtagttcataagttgactagttacacataaaaacagtatatcagaagatttacttcattctattatttatgactctccatcctgaaaatagcatttccctaatctacccactttaattcaaaaataggaaatctcrgaagtaagcagtaagaaagccagatgtaacacatcattaggtatttgcattagtggttcttaagtttttctgcactcaacccttgagatttgcatttagaagtcaggctggtatccatagcactcattttaataacaagtgatgctcagacaagtgatcagagaactagatctttccaacatactgcccaaaacaaaactccctcccccaaagattatttctg

SEQ ID NO: 102502 - DNA, 582 bp, Homo sapiens
acagttctcagtgagattagaaacaatttgataattttaaacagtggattgtcatgatgtaactttttttgtttttttttaagaatcagtatggacattatgtggtgaatagactgcgggggcaaaggtgtcacagaatgacaattgagcagactattagggtagttcaaaagtgtaaaaaccttgtatttaaaaaagtatattggytatataaatctcaaactttctaggagctttcagttccacaaagactttatctcatttacactctcaaaaaagaatttcagggcgtatcaggaaggagtcttttttcacacacttgtctttaataaaagaaaaaatgggaaagaggaaaggcataaagaggtccacgaagctttgaagtaaggatgaagtaagattgaaaggggaaattgatgcttctatttccctattgagaatcaaaatctaatttcaaaaagtaatgaatgtgtgtaaaattatttccaccataaaatctgaaatgaggcttggttttcattaacgttttattggtgttttaaaggtccctgtaaaactagtactagaccaatacatgcttaa

SEQ ID NO: 102503 - DNA, 582 bp, Homo sapiens
acagttctcagtgagattagaaacaatttgataattttaaacagtggattgtcatgatgtaactttttttgtttttttttaagaatcagtatggacattatgtggtgaatagactgcgggggcaaaggtgtcacagaatgacaattgagcagactattagggtagttcaaaagtgtaaaaaccttgtatttaaaaaagtatattggctatataaatctcaaactttctaggagctttcagttccacaaagactttatctcatttacactctcaaaaaagaatttcagggcrtatcaggaaggagtcttttttcacacacttgtctttaataaaagaaaaaatgggaaagaggaaaggcataaagaggtccacgaagctttgaagtaaggatgaagtaagattgaaaggggaaattgatgcttctatttccctattgagaatcaaaatctaatttcaaaaagtaatgaatgtgtgtaaaattatttccaccataaaatctgaaatgaggcttggttttcattaacgttttattggtgttttaaaggtccctgtaaaactagtactagaccaatacatgcttaa

SEQ ID NO: 102504 - DNA, 584 bp, Homo sapiens
agagtattctcatagagatgtttagtgttcctgtcaggatgacattgtcaggcaacattattatcttgcaaaagttaaatgcctatgtattttaataggtcccagaggaataaaaatgcgtggtacatttgttcagtctcatttttagagaaaataagataaccatgctaattaaccaattcagaagtaacttaatagctttaratattaatactttgtctactagtctaaattctttcctaagtattcagcaatatttaaatgttgtttgactcacttacaaaaattgaaggaatattgctccttatcattgggactgctttgacagaatagagaaaataagctcaaagaatttagaaagccatttcaggggaagggagaggaaagttgaatattaggaagaagagagaggacaaaggatgggagggagggagagacagagggacagagaactgacaatgtccacactccaagttttaccaaaaatacaactactactgtaccttacctgtttttggcactttctcttttatcttctcaggtatcaggaatctatatctttgataggcaagtctaccaacttg

SEQ ID NO: 102505 - DNA, 569 bp, Homo sapiens
tatgatatggtcataggaatttcttcaaagcagagattatttgtgttagcacactgctaaaatcctgagtgcaaactcttcaccatatgcgttaaatgaaaagtccccatcctgacattcaagatcctcactaacattccccaaactaatctttctgcttcaacaatgtatataccaaaagaactttcacattccagccaatataccctgatccttgatcatgaatatgcccgtattttcccgagtgtctgtttcaagcttgctttgtcccctgtaaactctgcaccacatcattacagatcctgtaagaagccttttttttaaaagcctcccatgctcctccaccttcaacattatttttctcttttataaatacccagagtacttgttgccaccattttatcaatgcttacctagtggaatgatcakttttgtccttgtccaattttctgtgttaaataaactgcacattgtttgttgaagggcatggattgagtttttcgtatctgtttttcttcaaaacactaaacataagacgctgcacattattcattgtcagtaaatgtcat

SEQ ID NO: 102506 - DNA, 598 bp, Homo sapiens
  misc_feature (1)...(598): n = A,T,C or G
acaatacacatttgcctatgtaaaactgatgaarttactcaagacattccatgtgtttgtggtcagccactacatctcacattgaagataagacttggacattcggtattctgtaaataaaactgtgagtcactttgaaacttcactgcatcccctgtgttttctttctaagacacacacacttgttagaaacctcactcttcaaagaaagacttgagtgggctaactggctaactgaatgctggttgtaagggaaccagtgtggtcataccagtgtgaaaaagagtgagtttgttgtcaattccaacctagaatgtttgattgatatctgggtgacatatacaaactcttggaccaagatgaacaataaattaaaaataagacaaaacaaaacaaaagaacctcaaaatttaggaactgaatcatttaccaaacaaaagataagtaggaagctagtgaatatgttctgggatcattgcctgagtccagaggatttttgatggattgtttatcggacagtcattgcttgcctgtgcatttgtctggcatgaaagtatagcaccaattgggacatgctagctttttgcatcttaatnnn

SEQ ID NO: 102507 - DNA, 592 bp, Homo sapiens
cgattgaaataagccataaatgtcacaaacatatggaaaaacattccatgttaatgaattagaagactcaatatcattaaaatgttcatataaccttaagcaatctatagattcaaaacaattcctatcaaattaccaatgtcattttttcacagaattaaaaaaaactattccaaaattcatatggaaccacaaaagaacctgaataactgaagcaatcctaagcaaaaagaacaaagccagaagcatcacgttacttgacttcaaactatactacaaggctatagtgaaaatgtttactacacctactgtgaaaatgttggaggatttttttttttttgagattgagaacaatccaatgtttcttgctattactacttctattcaacattgtactggaagttctagtcagttaatcaaraaaaataaattagttatatgagttaaaaataaaaaaaaattagaacatattttcccaaaaaaatctgcaaaaaaaattagaattcagaattgaattctgcaaggcttccagatgtaagggaagtgctgcaaaatcaattgcatttctatatacaagaaagaaacaaaattt

SEQ ID NO: 102508 - DNA, 569 bp, Homo sapiens
catcctgtagcgatttgtcagctcttgttctgatctgccgctctgaacatctttgttggatacctctttccacatcataacactgctctgggttgctgccmttctgccttatatggctaggcaccaaacattgaacgagtatccacttcgaaatgcccaaagtacagcaaacaccaggttatggtatttaacattttactatggcttgagatgatctgaagtgaactgcaatggaaaaaaacaaaattaaaaattcactactcacatagaatacaaccttatattcttgccccaaaagatttcctaccatctctcttttaagcctcctcactccaccccatcccctgctttcagcttgcaccatgttccaggaatcaggtcatctgccaagtctataggaattacagaaacaaaccagtgagttgtctgcaaacatcttgccccaggtggtgccccaacccaatggaatgagatggactgcggtgatgaatggacacatgagttaaccatgagagaaactgacttataactgctgaattcttctccggggatatcctaggaggacatgc

SEQ ID NO: 102509 - DNA, 569 bp, Homo sapiens
catcctgtagcgatttgtcagctcttgttctgatctgccgctctgaacatctttgttggatacctctttccacatcataacactgctctgggttgctgcccttctgccttatatggctaggcaccaaacattgaacsagtatccacttcgaaatgcccaaagtacagcaaacaccaggttatggtatttaacattttactatggcttgagatgatctgaagtgaactgcaatggaaaaaaacaaaattaaaaattcactactcacatagaatacaaccttatattcttgccccaaaagatttcctaccatctctcttttaagcctcctcactccaccccatcccctgctttcagcttgcaccatgttccaggaatcaggtcatctgccaagtctataggaattacagaaacaaaccagtgagttgtctgcaaacatcttgccccaggtggtgccccaacccaatggaatgagatggactgcggtgatgaatggacacatgagttaaccatgagagaaactgacttataactgctgaattcttctccggggatatcctaggaggacatgc

SEQ ID NO: 102510 - DNA, 571 bp, Homo sapiens
ttgaaacaaatatttgtacatgttaatgggatacatatggatacatacatgatattttgttcacacagagactgtataaagattaagtcagagtgtttgggatgtcatcaccttgagtatttaccatttctttgttctggggtcatttcagtcctttcttctagctattttgaaatatgcaatatattgttaactatagtcaaccagctctgcttttgaacattagaatttattccttctaactctatgtttgtacctattaaccaacctcttttttattcctccctgccttcctctgcccttgcccacacatacccttccagcctctggtatctatcattctattctctacctccatgaaattaatgtttttatctccctcatatgtgagaacatgtgatgtttgtttttctgtccagggcttatttcacttaacataatgacctccagttccatccacgttgatgcaaataatataatttttttttkttgttgtgaccaaatagtcttctattgtgtatatataccttattttctttatccattcatctattgatagatatttatattg

SEQ ID NO: 102511 - DNA, 611 bp, Homo sapiens
ggatgttttatttctggatcatggtgattgccttttttttttttttctaaaagagatgaaaaacaatttcaagattgaatgcttaaatttagctcagtttctataattaaaagtgataaaggaattatagaatctcaccaatattttgctgaggaataagacaaagagattcaaccaaaaatgattaaaagtagtgattggcaaaaacaaataaatcacktttatatttgtttcgcttgggactgaactcgtagtagttaacagatatccctataaataagggcttaaactcaaaggtattgtttggcttaagaggtaaaacgttgttaaggattgtgttagttcacttttacactgctataaaggaatacccaaggctgggtaatttgtaaaggaaagaggtttaattgactcacagttccacatggctggggaggcctcaggaaacttacaatcaaggcagaaggggaagcatgcaccttcttcacaaagcagcaggagagagaaagagtgtatataggaggaaatgtcaaacacttacaaaaccatcagatctcatgagaactcacttactatcatgaaaacagcatggggaaaactgcccccttgat

SEQ ID NO: 102512 - DNA, 607 bp, Homo sapiens
caaatgcaatgctatttttttctcttttctttttccttaggttgattaggtttaaattgtgggggatatgataggggattatccttaaaagaaagagaaaaattcagcacaaatcagatatcagaaacttacatttattttaaaaactgcattagatacatcttttgaacactaatgaaacagaaaaagttcataggaacacrcttatttggaaatcagctatttgcttgttaaaaaattttagcttgactctctaaaggaaattaccagagacgctgaagactaaactaaacaaaccactcatgtagtaattaataaatgataattggaatgaactagagatatttgtttcctcctgaagtggcaagttttatgccttttaaacaacttgctgttattttcaatgaagaaaagggaagagaggggtcatgaaaaattagacaaatctcaatcagaagtgatttcaacacctggcagggacctgtaaggatgactttttagcctctcaaagctacttctcccagtagtaaatctgtccagtgcatgtcctctccaccaagaagcatccttttccatgaattttgttttttctccatttcttaggaga

SEQ ID NO: 102513 - DNA, 594 bp, Homo sapiens
cttcatttcattgatggaggcagatgttctgagacattaaggaacatccccacagtcctccaaggtcttcttatatggcacctacctttatttactttcttattagaaaagatcgcatcattcttagatggccattcctgggataggcagagagggaactctgtgtgcacccttcctgcagtgtgttggtgggggatacagtcccattgcacattttcatcctgtgactttcacccacagctctgtggaaatgctgcctggaagaaaagcatatcagggtatcgttggagaggttgtcatgggtggatccttggggtctagaggtctcagcagagagacragggaaagaaggagtgttcaggggtagtcatgtattgggaaatccaagcctttgtgtgggtatctcctgtgttcatgtggaacccaagaattctcaactattcttgaggactctgcttggaccttataaggatctgtgccttcctggatagctgaaaattggtgtcagtcacattttcaacagcttttattgggtgcctgcctctgcatcttgtattgtcatagcagtttacacacagcaagccagaccaggag

SEQ ID NO: 102514 - DNA, 520 bp, Homo sapiens
agcaaaggtttcacggaagacatgggattggacacgtggcagaattcaaatggagctgagcaatggcatgagagcaggartggccagatgtgttaggtaaggatgtgcagaagcattgtgggaggcagaagtggggctgaggctgcagagatggcaggaatacgtgcctttgtataagtcagggtcctgtttcctcatcctcctgagaagatggagcacacattccgcaccctccttaccgttctgaccttctgtaatcctgagagctgacctgtggataacaacttgctttcaaaagtggggatctattggcttgtgtgactgagaaggacaagagcagatccagggaggctgtgttacagcttgtctacctcctgttcctccacctggaaaggcagttacgatggggtggctgagactgtgggctcctcccaggctgccagggttcacgtttggctcctcctctttctggctatgcttcagttttatcctctgatataaagagtgacaatcatggcaa

SEQ ID NO: 102515 - DNA, 583 bp, Homo sapiens
tgtttagtgtagaaatgtagggctggtgcctgggagagaatctgcctggagaaatagatttggaaactgatgagaatatccaaggagaaaaaagaagaggaacttattgtcattgtagatattgaatttaaagacacaaacaaggtcataactctgttttaattatttctttcactttgtgatgacccagtacttggtaatgtctgctccagttcctgtattaggacaggtgaaaggttacagaataccatccagggtgtctgctgctattttccatcctctaggggacctgtgaagccccagatctgagacagatctgtgatgcactgagttcttatcagagtgagactagacatacaagactctttgatgagcggctacaaataatgatttgcaggcacatgcagaggcagtgtttgatttttktgtgatttagctgaatttgtttaactcctaaaagtgtaacatgtagttattgtaactctttccatcattgttatgcctcagacacgctttaacctttggatgtactctgctaatgtaattgccttgctgtcttttaaaggctgcttttaattgggtt

SEQ ID NO: 102516 - DNA, 606 bp, Homo sapiens
gttttgtcatatgaaaatggactaayatagcatagttcttgtaatacaagccatcagaccctgggcaaatttgagtttcagtttcccccagttaaattagcctattgtttatatttatttacataatttgtatgaaagatgtttataacttttaaagcccattacaaatataaatgattggaagttttctgtagtgagtagtaatcgcattttataaactcaaattatttccctttaattcctatcttgtaagattgttagaaacattatgtctgtcattttatttatattttccctttttataagattgtgtctaagttctaggaactcatgcatggttagtaacttggttgaaaagaatactcataagtattttggggggatcctataatataggctaacaactattgaggattggggctttttttagtcctctgttggtttatgtagatactgctagtcatccctcaatttcattccaaaatcccctacatgtccagggtttggggtgctccttctctgttctactaattcttagatactctgccatgttttaaagctctctcaccaatactacaatttagtataattctgatgttctcacac

SEQ ID NO: 102517 - DNA, 606 bp, Homo sapiens
gttttgtcatatgaaaatggactaacatagcatagttcttgtaatacaagccatcagaccctgggcaaatttgagtttcagtttcccccagttaaattagcctattgtttatatttattwacataatttgtatgaaagatgtttataacttttaaagcccattacaaatataaatgattggaagttttctgtagtgagtagtaatcgcattttataaactcaaattatttccctttaattcctatcttgtaagattgttagaaacattatgtctgtcattttatttatattttccctttttataagattgtgtctaagttctaggaactcatgcatggttagtaacttggttgaaaagaatactcataagtattttggggggatcctataatataggctaacaactattgaggattggggctttttttagtcctctgttggtttatgtagatactgctagtcatccctcaatttcattccaaaatcccctacatgtccagggtttggggtgctccttctctgttctactaattcttagatactctgccatgttttaaagctctctcaccaatactacaatttagtataattctgatgttctcacac

SEQ ID NO: 102518 - DNA, 606 bp, Homo sapiens
gttttgtcatatgaaaatggactaacatagcatagttcttgtaatacaagccatcagaccctgggcaaatttgagtttcagtttcccccagttaaattagcctattgtttatatttatttacataatttgtatgaaagatgtttataacttttaaagcccattacaaatataaatgattggaagttttctgtagtgagtagtaatcgcattttataaactcaaattatttccctttaattcctatcttgtaagattgttagaaacattatgtctgtcattttatttatattttccctttttataagattgtgtctaagttctaggaactcatgcatggttagtaacttggttgaaaagaatactcataagtattttggggggatcctataatataggctaacaactattgaggattggggctttttttagtcctctgttggtttatgtagatactgctagtcatccctcaatttcattccaaaatcccctwcatgtccagggtttggggtgctccttctctgttctactaattcttagatactctgccatgttttaaagctctctcaccaatactacaatttagtataattctgatgttctcacac

SEQ ID NO: 102519 - DNA, 443 bp, Homo sapiens
ctttctctctccctctctctctctctctctctctcacacacacacacacacatacacacacatgcacacacacacctctctgggactcaaaatctcagtatattagaaatttcaaacttgtcccaatgtgtctgatactcttttctcttttttctcttttgttttactctccatgattcaaactacatgtttctatttacctctcttttagtgcaaaagtactcctttctaatggctgcacatactatgctatatatacaatawtactatatattgaattactaattgttgtatttgtatgtgtatttttaagacacagtcttgttctgttgcccagtatggagtgcagtggcacaatcatagacgggattacaagcatgagccactatgccaggccaatttataggcttttatttgattgtcatttaaatatatattccagt

SEQ ID NO: 102520 - DNA, 647 bp, Homo sapiens
tcttgaaggcaggagtggccatatggcaagaatctggctaatgagttataggcacaggtaatacttgcaatttggggtccaagcttttgaaaaaagaaaaaagcatacatttcttctttcctcagtcgaaagcgggaatgataaagtaacagtgagtcatcactgattatacagcaaaggtgagccctataaataatgtaacaattgagtagaaagatccagggtttytaaaagcttcaacccagcaaatagccctaaaccaaactgatacacagcatatgtgtgctgtgtatgtgtgtgtctgcttggtcactataactcacaaacatttgttgtagtgattcagcctatattgtttcatacacacacacacacacacacacacacacacacacacacgcagtatgctgatgggcttgcttacaatcacctttttttaatgtatcagtatggcacctctttattcatctgattactactgattttccaaatgaattttttttacttgaaattttcattttgaattgcttgtttttgcatctggcttccgttaacatttatctctcagattcagagcaaataatttacactctgtttctgttggatttttttataatataatattaaataaaaacagaacaaacaca

SEQ ID NO: 102521 - DNA, 647 bp, Homo sapiens
tcttgaaggcaggagtggccatatggcaagaatctggctaatgagttataggcacaggtaatacttgcaatttggggtccaagcttttgaaaaaagaaaaaagcatacatttcttctttcctcagtcgaaagcgggaatgataaagtaacagtgagtcatcactgattatacagcaaaggtgagccctataaataatgtaacaattgagtagaaagatccagggtttttaaaagcttcaacccagcaaatagccctaaaccaaactgatacacagcatatgtgtgctgtgtatgtgtgtgtctgcttggtcactataactcacaaacwtttgttgtagtgattcagcctatattgtttcatacacacacacacacacacacacacacacacacacacacgcagtatgctgatgggcttgcttacaatcacctttttttaatgtatcagtatggcacctctttattcatctgattactactgattttccaaatgaattttttttacttgaaattttcattttgaattgcttgtttttgcatctggcttccgttaacatttatctctcagattcagagcaaataatttacactctgtttctgttggatttttttataatataatattaaataaaaacagaacaaacaca

SEQ ID NO: 102522 - DNA, 654 bp, Homo sapiens
cattagctagtgagtgcagcattgcccaccccctcatgtcaaagtagcattaacattttctacttgacttcagagttcctgtaatccttgggaacagagaaaagtaagtttgaggataatggccccagaaaaaaaacaccaattgctggtgatggcagtaaaaagacaagttgtctgaggataagcatccttagccaagttcatacatgactatagagaatcattaagaatatgaaggtcctgggactataaaactacttgctccaggacattggtgtaggcaaagattttatggctaagactccaaaagcaccagcaacacagcaaaaatggacaaatgggactatattaaaccaaaaaccttctgtacagcaaaggaaacaatcaacagaatgaagagacaacctgtggaatgagggaaaatatatgcaaactattcattcaacaagggactaatttctagaatatacaaggaactcaacaaaacagaaagaaaaccaccaaataatcccactaaaaagtgggcaaaggatctgaatatacatttctcraaagaagacacacaaatggccaacaggtatatgaaaacattctcaacatcactaatcatcagagaaatgcaaattattataagaccaccatgagatatcatct

SEQ ID NO: 102523 - DNA, 567 bp, Homo sapiens
ctttttttcccatattacaaacacattttcatgtcagcatagatatacttcatcattttcaatagctgtatttcatattctgcatgaatcataatgaaaggaagcattctccattggacatcttgatttattctccgttttcattattactactaataaccaattaacatactttttcccatatgcttgtgtacatgtgtgtttatkcctgtaagggagattcccagaagttgaattgctgagtcaaaataatatatatatttttaaagatagatactaatgaagataaatccaaatcagggtgctaagaagtggtccaacaccttataagggcacatcccttgtaaaagacattttattctgtacagaatccaaaagagaagggttctagaagaaggaggacaaaaatctcctactagggtagggagccagactcggtataaatctttaagaccaggtaggttaacagtgtctgggcgtggaatgaaacctgctggagagacagcaaagctaccaacaaattaaaggaagttgtcaatttcaatcaagccagagccttgaccatcc

SEQ ID NO: 102524 - DNA, 516 bp, Homo sapiens
ggacaaacatccaaactatatcacttggtttaccagagaagtcataatctaaatctattgtagttattatgtaatatctgacatatcaaaamccatattgcagcttttataaattattttgtggccaggcgtggtggctcacacctgtaatcccagcactttgggaggctaaggcgggcagatcacgaggtcagatcaagatcatcctagctaacacgatgaaaccccatctctactaaaaatagaaaaaattagccgggcgcggtggcgggcgcctgtagtcccagctactcaggaggctgaggcaggagaatggcatgaacctgggaggtggagcttgcagtgagcccagatcacgccactgctctccagcctgggtgacagagcaagactccgtctcaaaaaaaaaaaaaaaaaaaaaaagaaattatttcgtgtaagtagctagaacctcaggcacatgccaccacactcagctaaatttaaaatttcattttatttaatttttgcagagat

SEQ ID NO: 102525 - DNA, 592 bp, Homo sapiens
gttagggaaggaggacaggaggcatttcaagcagaaaagctaatatgcaaaagtccagagggggaagagagagagcaaagtacctttaaaaaccgtaattaaatgttgctggagttctgcctggggcggggaaagatgggcatggtctggtgacacaggaagctggaggaatcggcaaggagcaaatcataatctatatgctaacacacaattactgggcacctatcctgtgcccagcaccctgttaagtttgtctaggccctcatttaattatctccaccctatgaagtagtcttatttaatacctcttttatacatgatgaaatcgaagctaagaaaaattaagaagctgctttcccataaaacattgtttgccatgctaaggagttyggacttggtttcatgggcattgccaagatatagggacaagatggggacagcaaatggatgctcctgtctgtgaggagaccacagggaaaaaaggaatgcttctcatttttgcccagaggctctaccccattttcctcctaagaagtcagaatcaagcttgctggtagaagagcaggtcctcagagtacagagaggcttctgt

SEQ ID NO: 102526 - DNA, 514 bp, Homo sapiens
gaattcaatcagttcctaaagcagttgctatgataaggttacatttctaattaatcagatataagggacagagaagacagtttgcctctgaaatctgaataaatcctaagcctcatgtagtccagtctattcagagattcaatttaaaaatgcatggtacaacagccaaactaaataaaaataaaatttaaattgtyacttgtttcctgatgcaaacccaatcataagtcagtatatcagttctcaaagttcccttccccgttttctaccttacagccttccagcatatctaacatctctcattcaacaaaactctaaaatatcccagaatcccagacacccaccctgtaccacttttctgattctctccccgctcagcttttattctgttgatcagagaagtctctctgacttcttaaattttctcttcactttgcacattacagctgagagcccagagctggaagaacaaagagccctcctccctttctcctttctttccaaccctgtccat

SEQ ID NO: 102527 - DNA, 591 bp, Homo sapiens
cttctgcttcccagcctcaggtgttatccgaaaaagatgggcctggttaacattgccaagagcacttcttaccctaacattctgtaactctataaagtctggcatgcattaaaattcttctgattcaatagtttggaaaaacatttgttgctagactatttggcctatctcaattccttggcagggagtaaggcacagttagcatgtgctttaatccattcttgtcttgtaattctgagaaagccctttgagtttcagatttacaagttataatatttgcattgcttcgttgttatgacagcttcgtcttagatcatccctcatcctccccatcccctgcccccaccaccrccattcaatatggtataatatgcaaaggtttcagtctttaaaatatgagtatgtcccactcccaaaccactaaactgtaggtcagaagaccctgtgaggccaccaactagctgtgcaccttgaacaaattaatttgcctatgttttttcatttcttcctctgtaaaacaagcgttgaatgattggagaggtcccttacagctgtggaagtcagtgatttatatgcatttagtagctacgc

SEQ ID NO: 102528 - DNA, 363 bp, Homo sapiens
aaacccataaagcttagttcaaattcaaaattctgtgatcagccaggcgaggtggtgcacacctataatcccaggactttgggaggctgaggcaggtggattgcttgagctcaggagttagagaccagcctaggtaacatggtgagaccccatctctacaacaaatacaaaaattagccckgcatggtggcgcatacctgtagtcccagctatttgggaggctgaggtgagaggattgcttaagctcaggaggtcgaggttgcagtgagccatgattgcaccactgcactccagcctgggcaacagagcaagaccctgtcgcaaaaaaaaaaaaaaaaaaattctgtgatcatcattgttggt

SEQ ID NO: 102529 - DNA, 363 bp, Homo sapiens
aaacccataaagcttagttcaaattcaaaattctgtgatcagccaggcgaggtggtgcacacctataatcccaggactttgggaggctgaggcaggtggattgcttgagctcaggagttagagaccagcctaggtaacatggtgagaccccatctctacaacaaatacaaaaattagccctgcatggtggcgcatacctgtagtcccagctatttgggaggctgaggtgagaggatygcttaagctcaggaggtcgaggttgcagtgagccatgattgcaccactgcactccagcctgggcaacagagcaagaccctgtcgcaaaaaaaaaaaaaaaaaaattctgtgatcatcattgttggt

SEQ ID NO: 102530 - DNA, 614 bp, Homo sapiens
ataccaaaaagacacacttgcacastcatatgttcatcaccttgctattcatgatagcaaagacatggaatcaacctaggtgcccataaatggtgtattggataaaatatgtggtacatatacactatgcaatactacacagccataaaaagaataaaattctttccattgcagcaacatggatgggactggaggccataatctcaagggaacagaaaaccatatcccacatgctcttacttataagtgggacctaaaccttgagcacacatggacataaacatgggaacatatagacactgtagactactagagggggtagggaggaaggggtgcgtgtactgaaaaaccacctggtgggtattatgctcactaccctgggggcaatatacctatgtaacaaagctgtacatataccccctgtatctaaaataaaagttgaaattttaaaaaaatttttaaaatatatgtttctgggcattttttttttttttttaagtagagacagtgtctctctgtgttgggctgggatcaaactcctggccttaagtgacttacctgcctcggcctcccaaagtgctagtattataggcgtgagccactatggctggcct

SEQ ID NO: 102531 - DNA, 575 bp, Homo sapiens
cctccccagaactcatggctacgtcaggagtgagcatcatcctaagtcaacctgggctttgctctgcgcaaaaccaatgtgctgcctcggccaagtcctccacrgagagaaaactcctgaggccagggaaccttgagcaatgttgtttgagggctcagtttgtgaatctatgaaaaggggctgatcatgcatgaccaactgctgagcacttaaggagactgtttggcgagggcatggcacagtgcctggcctgttttcaccagccagggagtgggggaggcagccttgagggtctttgcccatttccgctggcctctctccctcattggggagagttgatataataactagatgtcataagacatcaaaagaggaagcaacattttcacagcactttgtaaaggataaagctgttttggcaggtgatcttgcttaatactcctaatagccctaaggtgaggtaattattcttctcattttggaaatgagaaaactgaagttcaaagcagtgaagtagcatcagtgtctgagggtgcccagctcacagctgggatggagcaggattccagccccag

SEQ ID NO: 102532 - DNA, 448 bp, Homo sapiens
gcttgaacccaggaggtggaggttgcagtgagctgagatcgagtcactgcactccagcctgggcaacagagtgagactctgtctcggaaaaaaaaaaaaagagaagcgaagataagagaaaagaaaagaatgtagaataaaaagttatttatgtactgtgacagccacaatgtaaaatatatgtatagatgcatagagaaaagccttgaggaaatatattacaaamgattaacagtgattatgtctgggtagcaggattatatgaatttttatcacattttttgcaataagcatacagtgtattgataacattaaaaaattttttcaaagtgaacaaatatgtaaatgtggggtaaagtcaaaataggaaagctaaatgtgtatgattatctaggaaacccaccaagtatcttaatgatgagatgaaatgaattttctaataaaatct

SEQ ID NO: 102533 - DNA, 448 bp, Homo sapiens
gcttgaacccaggaggtggaggttgcagtgagctgagatcgagtcactgcactccagcctgggcaacagagtgagactctgtctcggaaaaaaaaaaaaagagaagcgaagataagagaaaagaaaagaatgtagaataaaaagttatttatgtactgtgacagccacaatgtaaaatatatgtatagatgcatagagaaaagccttgaggaaatatattacaaacgattaacagtgattatgtctgggtagcaggattatatgaatttttatcacattttttgcaataagcatacagtgtattgataacattaaaarattttttcaaagtgaacaaatatgtaaatgtggggtaaagtcaaaataggaaagctaaatgtgtatgattatctaggaaacccaccaagtatcttaatgatgagatgaaatgaattttctaataaaatct

SEQ ID NO: 102534 - DNA, 599 bp, Homo sapiens
ctttattgtatggatgtaactttatttttccagtcccctactggtgaacgtttgcttcaaatcttttgctcttccaaacaatgctgattttgtgcatatataattatgagcaccttagtgagtgtgcccgtggcataaacttgcggaagtagaattgttaggccaaaaggcatgtgcaacctgaygtaattgtatcaagaatgtatctgaatgcctgtcacctctcactcttgtcaatacagtgtgttaccaacctttttgacctttgccgatcagataggtgataatgttctctcttttcacttgtgttattatgagtgtggttgagccatttgtatttcgttttttgtagattgtttctatcttttgccgtttattaaaatttaatgtttaccttatcaaagttatacatgcactcagtttgaagagtcaacttgttctgcaaagcttgttaaggaaaacagaaattcctttccccataccataattttttcccactccctacaggtaaccactctcaaattttttatataattatctttgtactttagtttatatctcaaattaatatatagtagaataaataccaatgaatagac

SEQ ID NO: 102535 - DNA, 584 bp, Homo sapiens
gctcttccaaacaatgctgattttgtgcatatataattatgagcaccttagtgagtgtgcccgtggcataaacttgcggaagtagaattgttaggccaaaaggcatgtgcaacctgatgtaattgtatcaagaatgtatctgaatgcctgtcacctctcactcttgtcaatacagtgtgttaccaacctttttgacctttgccgatcagataggtgataatgttctctcttttcacttgtgttattatgagtgtggttgagccatttgtatttcgttttttgtagattgtttctatcttttgccgtttattaaaatttaatgtttaccttatcaaagttatacatgcactcagtttgaagagtcaacttgttctgcaaagcttgttaaggaaaacagaaattcctttccccataccataattttttcccactccctacaggtaaccactctcaaattttttatataattatctttgtactttagtttatatctcarattaatatatagtagaataaataccaatgaatagacacgaatttacatatgcaagaagcttaacagctccaagcaggataaacccaaa

SEQ ID NO: 102536 - DNA, 584 bp, Homo sapiens
gctcttccaaacaatgctgattttgtgcatatataattatgagcaccttagtgagtgtgcccgtggcataaacttgcggaagtagaattgttaggccaaaaggcatgtgcaacctgatgtaattgtatcaagaatgtatctgaatgcctgtcacctctcactcttgtcaatacagtgtgttaccaacctttttgacctttgccgatcagataggtgataatgttctctcttttcacttgtgttattatgagtgtggttgagccatttgtatttcgttttttgtagattgtttctatcttttgccgtttattaaaatttaatgtttaccttatcaaagttatacatgcactcagtttgaagagtcaacttgttctgcaaagcttgttaaggaaaacagaaattcctttccccataccataattttttcccactccctacaggtaaccactctcaaattttttatataattatctttgtactttagtttatatctcaaattaatatatagtagaataaataccaatgaatagacacgaatttacatatscaagaagcttaacagctccaagcaggataaacccaaa

SEQ ID NO: 102537 - DNA, 601 bp, Homo sapiens
tatccccaactgctgggaaactgaagagactctgacactctgtgcattgaatgtgcagtctggaagctcagacgacctctgaaggacttttcccaccctcccctcatccagcagtggagaaagtcctcagcaggggaaggcaacagtattcctgggaatctttatcccaagcaactaaaaggagcatacacattattgggaggtgtttcatgagaaagctggaggccaaggaggctggcagaaaaaaaggaagsgaattttactttcacttcctagaagtcttgtttagggctttgtttagggcccctaaacaactaagcctccaaacaggcatttattgctaacgttgacattccctctgtcaatgcataacccatatgtcgaatctggagagtctgttttgaacttattttgacaagttcctctttcctctgatggtctattgacacctggagatgatagtggaagacactgaaactccttaggccagaccaggctttgctgcaggaatcctcgcagtttagttccaccttcctcctaagtcccccatggactatacacagtaggggagcaccatggaagacctgctcacaagcactcc

SEQ ID NO: 102538 - DNA, 601 bp, Homo sapiens
tatccccaactgctgggaaactgaagagactctgacactctgtgcattgaatgtgcagtctggaagctcagacgacctctgaaggacttttcccaccctcccctcatccagcagtggagaaagtcctcagcaggggaaggcaacagtattcctgggaatctttatcccaagcaactaaaaggagcatacacattattgggaggtgtttcatgagaaagctggaggccaaggaggctggcagaaaaaaaggaagcgaattttactttcacttcctagaagtcttgtttagggctttgtttagggcccctaaacaactaagcctccaaacaggcatttattgctaacgttgacattccctctgtcaatgcataacccatatgtcgaatctggagagtctgttttgaacttattttgacaagttcctctttcctctgatggtctattgacacctggagatgatagtggaagamactgaaactccttaggccagaccaggctttgctgcaggaatcctcgcagtttagttccaccttcctcctaagtcccccatggactatacacagtaggggagcaccatggaagacctgctcacaagcactcc

SEQ ID NO: 102539 - DNA, 601 bp, Homo sapiens
tatccccaactgctgggaaactgaagagactctgacactctgtgcattgaatgtgcagtctggaagctcagacgacctctgaaggacttttcccaccctcccctcatccagcagtggagaaagtcctcagcaggggaaggcaacagtattcctgggaatctttatcccaagcaactaaaaggagcatacacattattgggaggtgtttcatgagaaagctggaggccaaggaggctggcagaaaaaaaggaagcgaattttactttcacttcctagaagtcttgtttagggctttgtttagggcccctaaacaactaagcctccaaacaggcatttattgctaacgttgacattccctctgtcaatgcataacccatatgtcgaatctggagagtctgttttgaacttattttgacaagttcctctttcctctgatggtctattgacacctggagatgatagtggaagacactgaaactccttaggccagaccaggctttgctgcaggaatcctcgcagtttagttccaccttcctcctaagtcccccrtggactatacacagtaggggagcaccatggaagacctgctcacaagcactcc

SEQ ID NO: 102540 - DNA, 393 bp, Homo sapiens
atataaattattttaattcattattgcatccttaatagtgatccttgatagaggtggtgaggtaagataacattgggttgtaggatcagaaacaactaatttcaaattcttcttttgccrattatctcaccattgtaacagcagtcatgtaactgaacctttctaggccccaggttggctcagttttgaaaaaagaacaataacagtagcaacttctgcattgttgtactaggtgaggacatgtatttaaagtgtttagctggtgtctgaccctaacatttagtgattgttagcaaacattatgcttgattatattgatccacttaaaaaatgaaattgtgaaagtaaaatgctgccagagattttaaaacctgtatatgatgcaagaatagc

SEQ ID NO: 102541 - DNA, 609 bp, Homo sapiens
catggaaaaggtttttgtaagaactttmgacatcataagggataaataaatgtagcttgagtcagagtatttaaaacaatatgtcaatgtggaaacaaaaaagtacataaatgtggaaacatctgaactattgagtatattaactaaagtgatagtcttacattccataaattataaagtacttcactaaatgaaataaaatatcactatcatgacacaacctctgctgagggtccacgccaaattatttggagatctttggggctacgatggctgataatatcatgatgcccaagctgaaatgaatcagttgtgaaattcataatacttttttcagtttttaataattaaaatagaatttaacatatgtagactattgctcaataattttaataattataacatatcactctttgcaaaactatcacgacagtgaaggtaatgagataagtgagacatttatcttatatgcaaaatttaagagcatgccaaacttcagtaacgaagataaatcttattttaatgcaacatttaaaaaaatcaaaaataatccaaaaaatctgtggtggacaaaatatcaaaaattgtagtaaagataattccagcatt

SEQ ID NO: 102542 - DNA, 567 bp, Homo sapiens
aacatctgaactattgagtatattaactaaagtgatagtcttacattccataaattataaagtacttcactaaatgaaataaaatatcactatcatgacacaacctctgctgagggtccacgccaaattatttggagatctttggggctacgatggctgataatatcatgatgcccaagctgaaatgaatcagttgtgaaattcataatacttttttcagtttttaataattaaaatagaatttaacatatgtagactattgctcaataattttaataattataacatatcactctttgcaaaactatcacgacagtgaaggtaatgagataagtgagacatttatcttatatgcaaaatttaagagcatgccaaacytcagtaacgaagataaatcttattttaatgcaacatttaaaaaaatcaaaaataatccaaaaaatctgtggtggacaaaatatcaaaaattgtagtaaagataattccagcattactgaattttccttttgccttgggcttcagtatggttccttggtccactggttccttgccataattttctccaaa

SEQ ID NO: 102543 - DNA, 567 bp, Homo sapiens
aacatctgaactattgagtatattaactaaagtgatagtcttacattccataaattataaagtacttcactaaatgaaataaaatatcactatcatgacacaacctctgctgagggtccacgccaaattatttggagatctttggggctacgatggctgataatatcatgatgcccaagctgaaatgaatcagttgtgaaattcataatacttttttcagtttttaataattaaaatagaatttaacatatgtagactattgctcaataattttaataattataacatatcactctttgcaaaactatcacgacagtgaaggtaatgagataagtgagacatttatcttatatgcaaaatttaagagcatgccaaacttcagtaacsaagataaatcttattttaatgcaacatttaaaaaaatcaaaaataatccaaaaaatctgtggtggacaaaatatcaaaaattgtagtaaagataattccagcattactgaattttccttttgccttgggcttcagtatggttccttggtccactggttccttgccataattttctccaaa

SEQ ID NO: 102544 - DNA, 529 bp, Homo sapiens
ggagaaatggggtgaagtatgcatagaaagtctgtattccttttacaactttttatgagtcctaaaacatttcaaactaaaaaaaaattaaaggagataaggtggaaaatgtctctataggtactggtgctgcaaagattttgacaaaaaaatcaatacccattcytaatttttcaacatatagtaaagtagacatttgcacacacacacacacacacacacttttctcagtcctaaaatcaactaattcatttaacaaatgaaagaaaactttattaaatatatgctatctcagtgtgtaaagatgcccactaactccattagaatttagcattttattggacatattatccaaaacaactagcaaaaggaaaacaattacatgcttaaaaaccagcaaataataattattttcatttgcagatgatttgacagtttttctagataacctaagaaatacaattataaaattttcacaatgataaaataatccaagtaaagtatctagaattcgtgtataaaaatcagt

SEQ ID NO: 102545 - DNA, 537 bp, Homo sapiens
aaacctttttcctaaatcacagttatagytcaattacaattcacttagaactatcacggtaacactgtaagcatttgtacttggtttaaattctgcccaggcattgtctgttagggttcagctcataaaacagtcaaacccagaaattagtaattgctaagattgccatgtgctatgcaaccatgaatgccagacccttcttagaaatttcaagagatattttttccccaacagaaatgattttgttcctcttttgatgagattgcaagcaatatccaccaaagtttgccacttcaagctcttcactttgaaaagtaaacccaaagaggtagcacttttcaagtccaaacaggatttggcaattttaaaaaaatttaatacttattttgttattcgatttcaacaaatataagcctcctttcctctgacaatgtcactgctagacaaatttttgacatgtattaataattctaattcacatgtaaactgacatttcatctgtttctcaaattagagtgaatcaaatctaattgagga

SEQ ID NO: 102546 - DNA, 648 bp, Homo sapiens
atctgcacatatgattatgagagaattaacctccagcatctatttctatctggctttcctttcatcaactcccacttttttcaggcatatgacagacagcagacattttgatcctggactgctttttatcatcaagagttctctccagttttccctgctctgccatgtgtccctgctaacatttctggaacagctgcacacagccatctacatgagatctgtgccttctcggtgggatatgccgagtggttcacytcttctctttactgatctgcatatgtgttccacaacaccacttccaaagattttacatgttattcaaatttctttagatatttcatctcctgtggtaaaattccctataatcattccaaatcatcaataaacaggtaatataaatatgtctttcttatgtccactgagacgtaactaagacattcagccagttggtcttgtgggtgtccctggccatctagctgttggattccttactctctcccagtgtacctccctctttcaaattctcccatgagaattgtaactcacttttctgcaattcagagcacccatccacatgttacatttggattttcaatctggaacgatttcccagcatatatttatatgtaaaatgggaaggaagaataa

SEQ ID NO: 102547 - DNA, 648 bp, Homo sapiens
atctgcacatatgattatgagagaattaacctccagcatctatttctatctggctttcctttcatcaactcccacttttttcaggcatatgacagacagcagacattttgatcctggactgctttttatcatcaagagttctctccagttttccctgctctgccatgtgtccctgctaacatttctggaacagctgcacacagccatctacatgagatctgtgccttctcggtgggatatgccgagtggttcacttcttctctttactgatctgcatatgtgttccacaacaccacttccaaagattttacatgttattcaaatttctttagatatttcatctcctgtggtaaaattccctataatcaytccaaatcatcaataaacaggtaatataaatatgtctttcttatgtccactgagacgtaactaagacattcagccagttggtcttgtgggtgtccctggccatctagctgttggattccttactctctcccagtgtacctccctctttcaaattctcccatgagaattgtaactcacttttctgcaattcagagcacccatccacatgttacatttggattttcaatctggaacgatttcccagcatatatttatatgtaaaatgggaaggaagaataa

SEQ ID NO: 102548 - DNA, 570 bp, Homo sapiens
gtttttgtcagcctcgtcagagattagattatttcttggtgtgtgcctttatttctgggttttctgttctctttcattgctctatgtgtctgtttttgtcccagtgccacagtgttttggctactgaaccttaaagtttagtttgaagtcaggtagtgtgatgtcttcagctttgttctttttgcttaagattgctttgtttatttgagttcttttttggtttmatgtgaattttagcatagtttttttttttttaattctatgaagaatgatgtgggttgtttcacaggaatagtattgaatctgtaaattgcattgagccatttgatgacattgactcttcaaattcatgaacatgaaatatttttccatttatcattgttgtctctcatttctttcagtggtcttttatagttctctttgtagagatattttacctacttagttagatgtattcccgggtaattcattatatttgtggctattgtaaatgtgattgtgttcttgatttgaactcaccctggatggtattggtgtgtagaaacagtactgatttttgtatatttattt

SEQ ID NO: 102549 - DNA, 619 bp, Homo sapiens
gattagttacgctcaccaatgtagcagttctgcactccttttcctgcctttcttgaccacaaagaaaggggcctgggctgctggattctagtggtcctttaccagcgtgcccaacattgcctttgcgctcagcggtgagtcctagagctgggctgggttcctgagtatttcataacaacccagctgccccatcaagatgcattcccataaacaacagttcttctgcaaattcatttcagagactgtgtagctaaccttttgagtcaggattgagatagtcttttgattctgtaagtactttaaggcttggctgagtgcaaacagctcgcacatttgaggagaccaattattaggcaaatttttaactctgcttccacaagagtctccataccaattactgaatacccattgtagttttttcctcagtcacctgggaggaaccatctatcgtcctgtgctgaagggagttcctcctaggtctggtcggaccttygtgtggtaattaagatttaaatcccctgttaggaaatctgctgggttaagggagttatcagtggttggagttacattacccttttctagcatagtagccccatactttaagattattgagttagta

SEQ ID NO: 102550 - DNA, 648 bp, Homo sapiens
tatgctaacaatgccttcttctggaacacctcttgaaggacagacctgaggttgttttacagttaactttgttttcaaataagtaaaatgagtaggctctaaaataacactaaaaagtatagtatatacataatcatatatagtatacatataaaagtatagtaaatacataaactagaaatagtcatttattatcattaacaaatataatatttgttgttaactaaaaggttgttatatgaagcatgactgtatttacagctttttatttttatgtgtaatgtaagtgaatctttgctatatttagcattattttttttaattccaatgaccttgaattttattgttttatttcaaagagaatgtctttaaaaaatcaattaaaataataaatgtactacaatagactgctctggctcccagaaaattgtaatcttcatgagggctcaggtggtrtaattaacctttgccatccccagcagtacttgacacagtatttcagcagagttggcacctattattggagagtgaattgtttgttagcttcagtgtatttcattccccaagctagagaaattgctgtcctccaatagctatgtagagaaatgatgtcatggcagggcctataatattttgtcatgatatttt

SEQ ID NO: 102551 - DNA, 448 bp, Homo sapiens
gttagcaggcaatgaaaaatatatacactttcaaaggaaagagggcactctgagaattctgtaaatggttaaaatacacacaacaccaacggcaagatgcccttaattatacaatagctcaggacttttcaccaacaattccaggggtatcactcccatttgtgtgtgtatggagggtacctacaaaactgtgccatatacaatgtgtgggcttgtatgtgcttcaaaaccaaaacaataggatattgaccacaatagaatcaaaatatagtaaccacaaatgagaaagtcctagattgaatactgaacctggaaaataaatgtgatgaggacattaaatattattatatgaaaaaaagtcataaccttggagacttcaraaaagactatttggagcagttttaggttcacagcaaaattaagaggaaggtagagaattgtcatatac

SEQ ID NO: 102552 - DNA, 563 bp, Homo sapiens
ttcctactggaaagtggggcgtgactcccactctgagctttatagaagctaagccaaaatggaaaatctaatcacttatacgatttccagagttcacagaacaaactatgtgtcaataataagtattcttgactctattacttagaaaaaaggtccctgtatttctttataacagcatcactttgttctgtggacaatatggccatcaccatacttaaagcaaatgaaagtcagcaatgagttatttggtgatgtttctggtaatgtttctcaatgtggccctactgcataacctatatttgaaattcaacaaaaaagtattctatgatgctttaaaagtacgccatctttgtattatgaactgtggtgttctgattcaatccagaaaaaggacctttagactctttattaagtattatatattaaactcataattttgtttcaaactcacctaatgttggcaaaaatggtgacatataaagttgaagttagtgatgartacctcagttaactattctacaattctgggaaggtggggcttgaagccctcaaggtaaaaatac

SEQ ID NO: 102553 - DNA, 623 bp, Homo sapiens
ttaaaggtttcttctgaaaagtgtacgccagtacatggtacacaacatttgcttataaaaatatttaagatgtctaacacattttgattgaatgtaatatttaggtaatgtgagcagttgtataaataataagcatctgtatcaaagtaatccgttttggggaatagtaattttaattatttatgggctagataaatgagattggaacatattttttataaggcattatgcacctttgtggagtccttctgcaggtctcaaaaataatgagctatgtacagtatcatttgtcaccaattacatgaatcagaaagttatgagtgttttcacaktttcagtgttagatactttaattccaaggcatattcctagtgtatatatcaattctattatacttcattaacagaaaatagaaagatatttatcaaagcattacagaaataactttagcagaaagaaaacatatgaatagaatcttctgagaaatactttaagttatattatttgggaggaagtaatgatactccattatttaatcatctgaagaaaggaaataaaatgtttaaatccctcagattatagatctatagtactcattgctgaattaattaacttcatattta

SEQ ID NO: 102554 - DNA, 623 bp, Homo sapiens
ttaaaggtttcttctgaaaagtgtacgccagtacatggtacacaacatttgcttataaaaatatttaagatgtctaacacattttgattgaatgtaatatttaggtaatgtgagcagttgtataaataataagcatctgtatcaaagtaatccgttttggggaatagtaattttaattatttatgggctagataaatgagattggaacatattttttataaggcattatgcacctttgtggagtccttctgcaggtctcaaaaataatgagctatgtacagtatcatttgtcaccaattacatgaatcagaaagttatgagtgttttcacagtttcagtgttagatactttaattccaaggcayattcctagtgtatatatcaattctattatacttcattaacagaaaatagaaagatatttatcaaagcattacagaaataactttagcagaaagaaaacatatgaatagaatcttctgagaaatactttaagttatattatttgggaggaagtaatgatactccattatttaatcatctgaagaaaggaaataaaatgtttaaatccctcagattatagatctatagtactcattgctgaattaattaacttcatattta

SEQ ID NO: 102555 - DNA, 623 bp, Homo sapiens
ttaaaggtttcttctgaaaagtgtacgccagtacatggtacacaacatttgcttataaaaatatttaagatgtctaacacattttgattgaatgtaatatttaggtaatgtgagcagttgtataaataataagcatctgtatcaaagtaatccgttttggggaatagtaattttaattatttatgggctagataaatgagattggaacatattttttataaggcattatgcacctttgtggagtccttctgcaggtctcaaaaataatgagctatgtacagtatcatttgtcaccaattacatgaatcagaaagttatgagtgttttcacagtttcagtgttagatactttaattccaaggcatattcctagtgtatatatcaattctattatacttcattaacagaaaatagaaagatatttatcaaagcattacagaaataactttagcagaaagaaaacatatgaatagaatcttctgrgaaatactttaagttatattatttgggaggaagtaatgatactccattatttaatcatctgaagaaaggaaataaaatgtttaaatccctcagattatagatctatagtactcattgctgaattaattaacttcatattta

SEQ ID NO: 102556 - DNA, 623 bp, Homo sapiens
ttaaaggtttcttctgaaaagtgtacgccagtacatggtacacaacatttgcttataaaaatatttaagatgtctaacacattttgattgaatgtaatatttaggtaatgtgagcagttgtataaataataagcatctgtatcaaagtaatccgttttggggaatagtaattttaattatttatgggctagataaatgagattggaacatattttttataaggcattatgcacctttgtggagtccttctgcaggtctcaaaaataatgagctatgtacagtatcatttgtcaccaattacatgaatcagaaagttatgagtgttttcacagtttcagtgttagatactttaattccaaggcatattcctagtgtatatatcaattctattatacttcattaacagaaaatagaaagatatttatcaaagcattacagaaataactttagcagaaagaaaacatatgaatagaatcttctgagaaatactttaagttatattatttgggaggaagtaatgatactccattatttaatcatctgaagaaaggaaataaaatgtttaaatccctcagattatagatctatartactcattgctgaattaattaacttcatattta

SEQ ID NO: 102557 - DNA, 602 bp, Homo sapiens
tcagtttgcatgttatcacataatcatcataataatgtaaagtgtacttcttatttcatttttctagaattagatacagcgattcatgtacatacacaagtaacttcccaacaacacgcagatatcaggtggcaagaataggatgtgaactcaggtctattccttgttgatgtctgaagtcttccagttgactctgtgaactcctagctcattctactyccgaagaaagcagcttgagacatcctttgacagaaacacattatcttactttctaactatatgcaagtgattaaagtttaggactctgaagaggaaaaccatataaaacatgtcttctccagttgtctaaattaaattagtgcctcaagtaaatggggacaagagaaataggaaatgctcactgatcgtaatttttgctctctattccctcagttaataaactctgtttttctttcttgtttcctagaaaaaaagtgagtaatattcttccagacactaatagattttgttaggatcccaactaactttttacaaattttcttagtgctagataccatttcaaattttaaaaatacaattcttcaaactttgttcatagtccc

SEQ ID NO: 102558 - DNA, 602 bp, Homo sapiens
tcagtttgcatgttatcacataatcatcataataatgtaaagtgtacttcttatttcatttttctagaattagatacagcgattcatgtacatacacaagtaacttcccaacaacacgcagatatcaggtggcaagaataggatgtgaactcaggtctattccttgttgatgtctgaagtcttccagttgactctgtgaactcctagctcattctacttccgaagaaagmagcttgagacatcctttgacagaaacacattatcttactttctaactatatgcaagtgattaaagtttaggactctgaagaggaaaaccatataaaacatgtcttctccagttgtctaaattaaattagtgcctcaagtaaatggggacaagagaaataggaaatgctcactgatcgtaatttttgctctctattccctcagttaataaactctgtttttctttcttgtttcctagaaaaaaagtgagtaatattcttccagacactaatagattttgttaggatcccaactaactttttacaaattttcttagtgctagataccatttcaaattttaaaaatacaattcttcaaactttgttcatagtccc

SEQ ID NO: 102559 - DNA, 602 bp, Homo sapiens
tcagtttgcatgttatcacataatcatcataataatgtaaagtgtacttcttatttcatttttctagaattagatacagcgattcatgtacatacacaagtaacttcccaacaacacgcagatatcaggtggcaagaataggatgtgaactcaggtctattccttgttgatgtctgaagtcttccagttgactctgtgaactcctagctcattctacttccgaagaaagcagcttgagacatcctttgacagaaacacattatcttactttctaactatatgcaagtgattaaagtttaggactctgaagaggaaaaccatataaaacatgtcttctccagttgtctaaattaaattagtgcctcaagtaaatggggacaagagaaataggaaatgcycactgatcgtaatttttgctctctattccctcagttaataaactctgtttttctttcttgtttcctagaaaaaaagtgagtaatattcttccagacactaatagattttgttaggatcccaactaactttttacaaattttcttagtgctagataccatttcaaattttaaaaatacaattcttcaaactttgttcatagtccc

SEQ ID NO: 102560 - DNA, 602 bp, Homo sapiens
tcagtttgcatgttatcacataatcatcataataatgtaaagtgtacttcttatttcatttttctagaattagatacagcgattcatgtacatacacaagtaacttcccaacaacacgcagatatcaggtggcaagaataggatgtgaactcaggtctattccttgttgatgtctgaagtcttccagttgactctgtgaactcctagctcattctacttccgaagaaagcagcttgagacatcctttgacagaaacacattatcttactttctaactatatgcaagtgattaaagtttaggactctgaagaggaaaaccatataaaacatgtcttctccagttgtctaaattaaattagtgcctcaagtaaatggggacaagagaaataggaaatgctcactgatygtaatttttgctctctattccctcagttaataaactctgtttttctttcttgtttcctagaaaaaaagtgagtaatattcttccagacactaatagattttgttaggatcccaactaactttttacaaattttcttagtgctagataccatttcaaattttaaaaatacaattcttcaaactttgttcatagtccc

SEQ ID NO: 102561 - DNA, 598 bp, Homo sapiens
ctcctctctcgtggctctgcaggtctcagctcccatggctgttctcaagggctggtgttgagtgtctgtggtttttccaggtgcatggtacaagctgttggtggagctaccattctggggtctggaggagggcagccctcttctcacagatcaactaagcagtgccccagtgggaactctgtgtggagctccagcttcacgtttcctttccacacttccctaatagaggctccccatgagggctccacccctgcagcagacatccaggaatttccatacatcctgtgaaaactaggyggaggctcccatgcctcaacttttgccctctgcacacctgcaagcttaaaaccacatggaagtcaccaaagttatggcttgcactctctgaagcaacagcgtgaactgtaccttggcctctttaaatgaccagcatatcctatggtcaaatgctcctgcagctggagctgcggagatgcagggtgccatgtcctgaggctgcacagagcagcagtggccctgggcctggaccatgaaaccatttttccctcctagtcctccaggcgtgtgatgggagaggttgccttgaggcattttctcc

SEQ ID NO: 102562 - DNA, 618 bp, Homo sapiens
attctgtgacaaatgatgttggcaatttgagagagattgcattgaatctacagattgctttgggsagtagagccatattaacaatattgtttcatctaatccatgaccataagatgtttttctatttgtttgtgtcatctataatttatttcatcagtgttttgtagttctccttatagaggtctttcacctcgttggttaaacatattcatagacattttattttatttagcagctattataaatgggattgccttcttgatttggtctttggctaagttgctattggtgtatagaaatgctattgttttttgtatattatttttatatcctgaaaatttactaaattcatttatcaaatctaagagtgtttttggtagactccttaggattttctagatataagattatatcatcagtgaacttgactttctcttttccaatttagatgcctctgacatttttctcttgcttgattgttctggcaaggaattccagtcatatgttgaattaagagtagtgaaaggccaggcacagtggctcacgcctgtaatcccagcatattgggaggctgaggcaggtggtttacttgaggtcaggagtttgaaaccagcctgt

SEQ ID NO: 102563 - DNA, 618 bp, Homo sapiens
attctgtgacaaatgatgttggcaatttgagagagattgcattgaatctacagattgctttgggcagtagagccatattaacaatattgtttcatctaatccatgaccataagatgtttttctatttgtttgtgtcatctataatttatttcatcagtgttttgtagttctccttatagaggtctttcacctcgttggttaaacatattcatagacattttattttatttagcagctattataaatgggattgccttcttgatttggtctttggctaagttgctattggtgtatagaaatgctattgttttttgtatattatttttatatcctgaaaatttactaaattcatttatcaaatctaagagtgtttttggtagactccttaggattttctagatataagattatatcatcagtgaacttgactttctcttttccaatttagatgcctctgacatttttctcttgcttgattgytctggcaaggaattccagtcatatgttgaattaagagtagtgaaaggccaggcacagtggctcacgcctgtaatcccagcatattgggaggctgaggcaggtggtttacttgaggtcaggagtttgaaaccagcctgt

SEQ ID NO: 102564 - DNA, 429 bp, Homo sapiens
gagaagcatggataccaatgcaatgcaacattatgtgcccatctaaaaatggaaactcccatttgaaatagaaatgtgggtaaatgcttacgatataatgaacractatctatgaatgtaggtgagaaagggaaggtcatttacttccatagttgtagaatagtatagaaggctatatggtcagaataatactattaatgataacagtgtaattggctatcaagtgggatttctactgttgtcccagaattatagtttatacccaaatctaaaaataagacataaaataattctactttctaaaaagagctacctgtgagtcagagctgagatcaaactccttcccacaaggatccaaagagggggcagattgagcccccacttcccaacgaccactgctgcctcctccccagaagaagaggaggtaga

SEQ ID NO: 102565 - DNA, 429 bp, Homo sapiens
gagaagcatggataccaatgcaatgcaacattatgtgcccatctaaaaatggaaactcccatttgaaatagaaatgtgggtaaatgcttacgatataatgaacaactatctatgaatgtaggtgagaaagggaaggtcatttacttccatagttgtagaatagtatagaaggctatatggtcagaataatactattaatgataacagtgtaattggctatcaagtgggatttctrctgttgtcccagaattatagtttatacccaaatctaaaaataagacataaaataattctactttctaaaaagagctacctgtgagtcagagctgagatcaaactccttcccacaaggatccaaagagggggcagattgagcccccacttcccaacgaccactgctgcctcctccccagaagaagaggaggtaga

SEQ ID NO: 102566 - DNA, 429 bp, Homo sapiens
gagaagcatggataccaatgcaatgcaacattatgtgcccatctaaaaatggaaactcccatttgaaatagaaatgtgggtaaatgcttacgatataatgaacaactatctatgaatgtaggtgagaaagggaaggtcatttacttccatagttgtagaatagtatagaaggctatatggtcagaataatactattaatgataacagtgtaattggctatcaagtgggatttctactgttgtcccagaattatagtttatacccaaatctaaaaataagacataaaataattctactttctaaaaagagctacctgtgagtcagagcygagatcaaactccttcccacaaggatccaaagagggggcagattgagcccccacttcccaacgaccactgctgcctcctccccagaagaagaggaggtaga

SEQ ID NO: 102567 - DNA, 575 bp, Homo sapiens
accctcaactaggcagaaatactaagagatttagagatactcttgcctctcaacgttagaggcaatatcttgcagcaatattggaacctatgtttcaggacatctttaaagctaaaatggaaactcttcctactctttgttgagatgttttaattcttgcaacaactgctcaggtttgtggtcasaatccattttctttacatttttcactggctgtgagctgcaacaagtatctctttccattaaaaaaagaaagaaagaaagaaagaaaaattccacaaggaatgtccactgaggctggtataattaaggcactctgccaggaactctgggacatataaaagaatatgaaacgtagtcccttcactcagagactttggagtctagatagagagacagaatatagatatacgtagtgggtacaactttcaacttataaagtcaaacatgcaagaaatgtaacacttcgttattttataacaagttacttctgttttaagtttctgttctacagggcaaaagaaactaaatctgagttaattcaggaaaatctcactttttaactgggctgtttt

SEQ ID NO: 102568 - DNA, 575 bp, Homo sapiens
accctcaactaggcagaaatactaagagatttagagatactcttgcctctcaacgttagaggcaatatcttgcagcaatattggaacctatgtttcaggacatctttaaagctaaaatggaaactcttcctactctttgttgagatgttttaattcttgcaacaactgctcaggtttgtggtcacaatccattttctttacatttttcactggctgtgagctgcaacaagtatctctttccattaaaaaaagaaagaaagaaagaaagaaaaattccacaaggaatgtccactgaggctggtataattaaggcactctgccaggaactctgggacatataaaagaatatgaaacgtagtcccttcactcagagactttggagtctagatagagagacagaatatagatataygtagtgggtacaactttcaacttataaagtcaaacatgcaagaaatgtaacacttcgttattttataacaagttacttctgttttaagtttctgttctacagggcaaaagaaactaaatctgagttaattcaggaaaatctcactttttaactgggctgtttt

SEQ ID NO: 102569 - DNA, 597 bp, Homo sapiens
catttctctgactgagggccctccaaaagtaaaccaaaccactttgctgagtcagtgggccaccaagagcctgatttaggacaccatttttcytgtgccacaaatcacaggatctaaaaaaaaaaaaaaaaaagaaaagaaaagctgactttttaaaatataatttttcccttgaaaaactaaatgtaaaaaagaagagtttttctctttttcctatgactgcaactactttaccacaacgccagtgggtagagcaagaaaaaataattttcagttgtggtaagcacgccaaaacgatttacaaagaaagattgcaaaacataatcactgtacattctgacggataagtgaaaaaagttctggaattttcttcaatagaaaatgttaagaggacaatatattgtcaattggtaaggttctttttggggaaaactgaatacaggcagcaacataaatccaatgatttaagatttctatctcaacacattttgaaaatctccacctctatgcttttatcattttaaaaattaaaattcttctatttttcaaaatgtatctttttcataagtttattcttattctattctttttataaag

SEQ ID NO: 102570 - DNA, 591 bp, Homo sapiens
tggtccaccacccttttctttgctattttctccctctttcaacccctgcctcctagtgatccctgtgttccatgcattcatattgcatggctcctcccttctcagaagagtaactcatccctactggagctgacttgccttacttagtcaattccagcttctataacagactacaataaactgggcagcttcaacaatagatatttatttctcacagttctggagcctgggaagtccaagataaaagtgcyggcagatctagtgtctagagaggacacacttcctggtttgcagatggccatcttctccacgtatcctcctatggcagggagcagagaaagaagaggaaggggatgtggggaaacagaaaaagagagaacaagctcttctccttaaaaaggcactaatcctgctccaccctcaggacctaattacttcccaaagaccccacctccaaatactatcactttgggggttaggatttcaccatatgagtttttcaggggacataaacatttagttcataacaggatgtaatgtatcattctccttaaagagtttgcagtagaaagaaactttttttttcttttt

SEQ ID NO: 102571 - DNA, 594 bp, Homo sapiens
actcaacaagggttctaaaactacttcctgcccagagcaatttttgagattcattctagactccatatctaggtactgcattatgacttgggttctctccttcaacaacaagaatggattgaattatttccatgggcggggagtatatactgtacaggatattgattggtgtctttctcctgacttagtaatctagacaatggcttatgttatgtccataagagtgaaggttcaactatcatataccatatatagtaaatatgtatatatgttatagatatatatgtccatatatgtatatatatgtatgagtgtatgtgtataaatttcttgattgaactgtgaatttgmcataaatcctacttgtgatattctcctaaatataatttggattcctttccagtacccataaggaaacatttgagatttcaaagttctaaaccatagaatctaagcgtattaaatgtgctaatgagaagataaaataaccatatgacacaggcatgactatgagagtgatgtgcaaagctgcatgaactaactcacatcccttggcataatcctttctcccttgactaaaacacatccctttag

SEQ ID NO: 102572 - DNA, 636 bp, Homo sapiens
tctgtcttcaaatatacctactgtttcttggtttctgtttcagttatttaaaaagtttgctcatttggtggtatttctaatataacttttcgagtgaaaatggaatgtacagcctgtgctatttgtctttggcccacaagactctattacatgcattatatatcaccttgtttcctttggagggtgatagagcgcaggaagctggttttctgtggttctgatttcattctattttcccctatggatttgttatattacacaatagcagacagatccatttccattacttggagttctaaactccaaaaatgagcctgaagaaaaaggtgttctttataaaagtggtttccaaaggtgwttttctcttgtaaaatacatgtgtttgttgcacagcaaacttttgagcatagctgacagatatatatctgcaaaacatggcagagattaatggggcccaatagctcaaaggggttgataatttctgtggtgagttgaacccttttagaaatgtacaatttttacagttacaggaaatccacaaatttaatttctgtttcatattcaagtgtgtggtaagtgggtaatgatatctaagaaaataggcaattatgaattcatgtagttcaatttggaata

SEQ ID NO: 102573 - DNA, 519 bp, Homo sapiens
ctgtcttctctgctatgacattatctcatagatttgccttattcattttttcaaattgatcgatcaaacaaccaaacaaacttctctggcatgttgttagtgaagttttggagggacgagaagtaaatatatattcagtaagtgagtatgcatttttctctaggaatttcctagaaatgatatcaaagataattcatcatagacaaagatgtcaaataccagagaaaaattatgcctttaacttgaatcaattcctttggctaataatgtctcaatcaatgaggcatcacattattaatacaacagattttcaaaatcaacctttctaaatatttagcaatacctcttcttccttttatctgacttttatcccatttcttcaaaatgtagttgccattctgtgcctaacttctttcagttcttcaaagcttaagtgaatttcttataatttttctagcactcaccagttaaactgctcmaactccacacctattctcaggcattattttatgtatcctc

SEQ ID NO: 102574 - DNA, 519 bp, Homo sapiens
ctgtcttctctgctatgacattatctcatagatttgccttattcattttttcaaattgatcgatcaaacaaccaaacaaacttctctggcatgttgttagtgaagttttggagggacgagaagtaaatatatattcagtaagtgagtatgcatttttctctaggaatttcctagaaatgatatcaaagataattcatcatagacaaagatgtcaaataccagagaaaaattatgcctttaacttgaatcaattcctttggctaataatgtctcaatcaatgaggcatcacattattaatacaacagattttcaaaatcaacctttctaaatatttagcaatacctcttcttccttttatctgacttttatcccatttcttcaaaatgtagttgccattctgtgcctaacttctttcagttcttcaaagcttaagtgaatttcttataatttttctagcactcaccagttaaactgctccaactccacrcctattctcaggcattattttatgtatcctc

SEQ ID NO: 102575 - DNA, 600 bp, Homo sapiens
ttgtgtaaacttggtattaacttattaaaagttgcataaaatgcaccagtgaaactagctgcatctggagtttcctttgtgaggagaatgttaattgcatatttatatactgtatttcttctcgtgtgaatgtttagtgatttgtgtattttaaggaatttttccatttcatctaagatgcctaatatactggcaaaaaattacgtataatgttccactattgtcattctaatatctatagcatttgtataaacatcatctcttttattaatggcattacatttttctctttttcttcatgtctctcactagaattttgccaactttattgatcttgtcagggaagcaacttttggtttcatacattttctctactgctagtctatgttcaatatcatttccttcttagtcatttttcaatctccttctttcaactttgttttaatttgctcttctttttctaattccttaaggtgaaagaggagattatcgattttaaaccttttctttttatacaataagttagaatcataaatttytttctaatcacaactgtagtaacccctaaattgggatctgttgtgtttttatttttatata

SEQ ID NO: 102576 - DNA, 302 bp, Homo sapiens
aataatttaagaaatatttaaatattaaaagaaaatacttcagaaatgaagattaaattagagaaaacacaaaagtgagtaaacaacaggaatgkaattttttaaaataaaatacataagacataaatgtgagttctctaacataaacaaaaaagatccaatttatatttaataataattcctgaagggggaaaaaatgaagcaatgggaatttactaaatttatattataatttaaaatctactattaacagatactgtgtatttgggaaaaaccaaccccaaacggccaaaatagatgca

SEQ ID NO: 102577 - DNA, 542 bp, Homo sapiens
aagctaactttagtaattatattattagtgataaagttgttatggtttttattagattataacattgagttgtggtttaaaaccaatgaataacttctcaagaactgcgcttagtaccaaacatataacatatttaaattgtttataaattcttattgagcactcttattgctcaacttataatgtaattctataatataattttgcattgtaaagaaccagagatccragtctgtggcaagaaatacaaacaaagcacagcctattttgtcatataacaaatgaagttttaacagactacctagattatctcagaaagatcccaaaatatcctctgaaaaatattagctaattgaattcagtaaggataaaagaaattatacaccccaattattagcatttatcacaggtatgcaagcctggaccaatgtttgaaaatcaattaataaaatttgccacataaatagccaagaaaagtaaaatcacatgattatatcaataggtacagaaaaagcatgtgaaaaaaaatacgcattcatgaa

SEQ ID NO: 102578 - DNA, 656 bp, Homo sapiens
attttattttatacaacaaaattgaatgtagagcttaaatatttgaaagttagaaccaataattttaactttatatggagcagaaaatatcatcatattgaaggaatttttttccaaataatttaaaaatatggtaatttggctctgtactccaaggattaggcaaaagaaaaagtctgaagctaactttagtaattatattattagtgataaagttgttatggtttttattagattataacattgagttgtggtttaaaaccaatgaataacttctcaagaactgcgcttagtaccaaacatataacatatttaaattgtttataaattcttattgagcactcttattgctcaacttataatgtaattctataatataattttgcattgtaaagaaccagagatccaagtctgtggcaagaaatacaaacaaagcacagcctattttgtcatataacaaatgaagttttaacagactacctagattatctcagaaagatcccaaaatatcctctgaaaaatattagctaatygaattcagtaaggataaaagaaattatacaccccaattattagcatttatcacaggtatgcaagcctggaccaatgtttgaaaatcaattaataaaatttgccacataaatagccaagaaaag

SEQ ID NO: 102579 - DNA, 601 bp, Homo sapiens
agtggttctgagacaatggaatattcatatgcagaagagtgatactagaacccaatctttcaccatatataaaagtcaactcaaarttcactggaaacttaaatgtaagacctgaaactataaaactgttggaagaaaagaaggagaagtgcttcagaaaattagtctaggcatagattttaaggctaagtcttcaaaagtgcaggcaacaaaaaacaaaaacatagaccaataaaattgcattgaactaaaaagcttctgcacagcaaaggaaataatcagcagagtgaaaagacaacttatagaatgggagaaagtatttacaaactattcattcaacaaggtactcatatccagaatatacaaggaactcaaaacaactcaacagaaaagaaaaaaaagaaccatataatctaatttcaaaaatgggcaaatgagctaaataggcttttttcagaagaagaaatacaaaacaccaacaggtatatgaaaaatactcagcaccactaatcatcagggaaatggaaatcaaaaccacaatgggatagtatctcgccccagttagaatggctgttattaaaaaggaatgctattgggagaa

SEQ ID NO: 102580 - DNA, 326 bp, Homo sapiens
ggaagtagaaacttgttacttttaaaagaattcaatatttgggatatgaataagtctgagaggaaaatgacaatttagaaaggattcatgcaattcacttgtaaagcatgagttcatccacattctcggtgtaatyaggaacagagaacacaatctttggtaactaaaaaacatattaaaaaataatagtagggagaatggaataatagagaagctgtgttgcgtatctcacaagtgaaaaaacacagcaggaaaacacgttcttctaagaaagtagcttacctgcatagtataattcactccagcttttattaggtgcttgatta

SEQ ID NO: 102581 - DNA, 576 bp, Homo sapiens
acaaagaactggagagactaggatatggcaaatatgtggataaaaagaaaaggccttttttccttttcctttatttaaaattagtttttaaaacagtgatttaaaacaaaagaatrtattgtgatgttaataacatacagcagtaaagtaagtgtatgacaacaatataaaaatgaaagtatatttttggaaagtttttatattatatatgaattagtgtaatattatttgaaggtagaagtgatatattaattatgtatattttaaaccctattgcaactactaaaaacaataaaacaaggtgatatattttgcaagtcaatagtggagataaagtagaatactaaaaaatgtacaatgaatgcaaaagaagacaaaaaggaataaaaagggaacaaagaacagatgggacaaatagaaaacaagtagcaagatggtagatatatatctgacttaatcatcacattaagtgtaaattatctaaacactataattcataaacatagattgtcagactggatataaaagcaagacccaactatacactctttaaaaaaaaaaaaccctaaaatataa

SEQ ID NO: 102582 - DNA, 576 bp, Homo sapiens
acaaagaactggagagactaggatatggcaaatatgtggataaaaagaaaaggccttttttccttttcctttatttaaaattagtttttaaaacagtgatttaaaacaaaagaatatattgtgatgttaataacatacagcagtaaagtaagtgtatgacaacaatataaaaatgaaagtatatttttggaaagtttttatrttatatatgaattagtgtaatattatttgaaggtagaagtgatatattaattatgtatattttaaaccctattgcaactactaaaaacaataaaacaaggtgatatattttgcaagtcaatagtggagataaagtagaatactaaaaaatgtacaatgaatgcaaaagaagacaaaaaggaataaaaagggaacaaagaacagatgggacaaatagaaaacaagtagcaagatggtagatatatatctgacttaatcatcacattaagtgtaaattatctaaacactataattcataaacatagattgtcagactggatataaaagcaagacccaactatacactctttaaaaaaaaaaaaccctaaaatataa

SEQ ID NO: 102583 - DNA, 637 bp, Homo sapiens
caacgctgccatttcagacttctggcttccagaactgtgacaggaaacatttatgtttgttttgttttgctttaacattttttgtggtgaaaaatacgtacataatattagccrtttgtaagtgcaaaattcagtaacattaattacattaacaaggctatgtacccatcaccactatctttttctttattctttttatttttattacattattattattattttgagacagagtcttgctctgtcactcaggctggagtgcagtggcacagtctcagctcactgcaacctctgcctcccgggttcaagattgtcatgtctcagcttcccgagtggctgggattacaggcacgtgccaccatgcctggctaatttttgtatttttagtagagacagggttttgctatgttggccaagatggtctcgaactcctggcttcaagtgatttacccgcctcagcctcctcccaaattgctgggattacagatgtgaaccaccgcgcctggccaccattattttttttttatcatccccaacataaattctagccattaaacaatactctcccttctgtcttctccctgtctcctggtaaactttattctgttctgtgtctctatgaatttgactactctag

SEQ ID NO: 102584 - DNA, 637 bp, Homo sapiens
caacgctgccatttcagacttctggcttccagaactgtgacaggaaacatttatgtttgttttgttttgctttaacattttttgtggtgaaaaatacgtacataatattagccatttgtaagtgcaaaattcagtaacattaattacattaacaaggctatgtacccatcaccactatctttttctttattctttttatttttattacattattattattattttgagacagagtcttgctctgtcactcaggctggagtgcagtggcacagtctcagctcactgcaacctctgcctcccgggttcaagattgtcatgtctcagcttcccgagtggctgggattacaggcacgtgccaccatgcctggctaatttttgtatttttagtagagacagggttttgctatgttggccaagatggtctcgaactcctggcttcaagtgatttacccgcctcagcctcctcccaaattgctgggattacagatgtgaaccaccgygcctggccaccattattttttttttatcatccccaacataaattctagccattaaacaatactctcccttctgtcttctccctgtctcctggtaaactttattctgttctgtgtctctatgaatttgactactctag

SEQ ID NO: 102585 - DNA, 622 bp, Homo sapiens
gcattccaggtaactaagcagcacagttgcattgtcacctgtggtgtcatgttagcactcaacaaatttcagattttggagcgtttcagattttggatttttggatgctcaacctgtattattattattattattattttgagacggagtcttgctctgtggcccaggctggaatgcagtggcgtggtctcggctcactgcaacctccgcctcccaggagattcaagcaattctcctgtctcagcctcccgagtagctgsgattataggcatgtgccaccacacctggctaattttgtatttttagtagagacagggtttctccatgttggtcaggctggttttcaactcccaacctcagatgatctgcccacctcagcctcccatagtgctgggattacaggcgtgagccaccacgcccggccaacctgtattatttttagtggatacattatgtttctgctggggcacatgttataatttaatcaaaatgtctaccactatcagatatttctatcaaataaagtggtttatcagttcaagaacactgagaatcactgggttaggaagctatatgttaaaactatttattattttcctgctttcaaaataaaatcgctacc

SEQ ID NO: 102586 - DNA, 622 bp, Homo sapiens
gcattccaggtaactaagcagcacagttgcattgtcacctgtggtgtcatgttagcactcaacaaatttcagattttggagcgtttcagattttggatttttggatgctcaacctgtattattattattattattattttgagacggagtcttgctctgtggcccaggctggaatgcagtggcgtggtctcggctcactgcaacctccgcctcccaggagattcaagcaattctcctgtctcagcctcccgagtagctgcgattataggcatgtgccaccacacctggctaattttgtatttttagtagagacagggtttctccatgttggtcaggctggttttcaactcccaacctcagatgatctgcccacctcagcctcccatagtgctgggattacaggcgtgagccaccacgcccggccaacctgtattatttttagtggatacattatgtttctgctggggcacatgttataatttaatcaaaatgtctacyactatcagatatttctatcaaataaagtggtttatcagttcaagaacactgagaatcactgggttaggaagctatatgttaaaactatttattattttcctgctttcaaaataaaatcgctacc

SEQ ID NO: 102587 - DNA, 601 bp, Homo sapiens
ttcaagtcctggctctactactagttaggtggtgaccaaatatcaagtcacttacccttctcagcctcagcttctacaactstaaaatggggatgataaccaggcagagttggtgtgacgagttaacataatactatgccaaaggactgtataaatgtcaagagattttcattacctactccagcactttacaaatagtaggtgttaagttaatgtttgtttaactgaattgtataatgatcttgggaatataaagctaattttactttgcattgattgaattaaaccaggctctttctctgggaaattatgtctcagggaacaaactaaatctctggtatgctagaatttttggattaagttatgttataacagagtatgctgtatttactgcaaatgctactaatgagatatgctaatgggaagataattaagtgttccttttccagaagaaaaaatgaaactttctcccacaattagaaccattttgtaagccacatctttgtgtttgcagaactccctaaaaatgtgaaaaagttcatgcatcccagcaggtgagaagtttatttcttttccctgacaggaatattaatcactatta

SEQ ID NO: 102588 - DNA, 601 bp, Homo sapiens
ttcaagtcctggctctactactagttaggtggtgaccaaatatcaagtcacttacccttctcagcctcagcttctacaactctaaaatggggatgataaccaggcagagttggtgtgacgagttaacataatactatgccaaaggactgtataaatgtcaagagattttcattacctactccagcactttacaaatagtaggtgttaagttaatgtttgtttaactgaattgtataatgatcttgggaatataaagctaattttactttgcattgattgaattaaaccaggctctttctctgggaaattatgtctcagrgaacaaactaaatctctggtatgctagaatttttggattaagttatgttataacagagtatgctgtatttactgcaaatgctactaatgagatatgctaatgggaagataattaagtgttccttttccagaagaaaaaatgaaactttctcccacaattagaaccattttgtaagccacatctttgtgtttgcagaactccctaaaaatgtgaaaaagttcatgcatcccagcaggtgagaagtttatttcttttccctgacaggaatattaatcactatta

SEQ ID NO: 102589 - DNA, 574 bp, Homo sapiens
ctagaaaatcaagagttgagtattgacatgtaatttgtgctgacccctctccagaataaagatgagatctaattcttacttcactatgctcacgccattattttcactttatatagttcattgccccacctccttctcaccccaccccccaccatttctttctaggattttactcacccaccatctgcttattgctccaatctgcccaaaaaggaaaacaaagttgaacaaagcaacaacatgaaccatatgttattttttccttccccaatctttggggataaagtccataccttttcaaatattctatatttgagcactctgaatacagcatttaatgattgttttattataaaaagtaacccaatcactttattcaatatcatacacacacatacacatgcagagtgaatggatatattcatattcacatgttttctatgtgccaggactataggartgctccaggcactgggggtatagatgtaaacaaaaaagataaaattccttttctgacaaaacctacaatctgaagagtgagaaacataaataaggtaaggaagaagaaaaagag

SEQ ID NO: 102590 - DNA, 541 bp, Homo sapiens
tccgcccgctccttcattcaccccccgcccctcctggctcgcggactccccgccaaggcgcgcgaccccgccccactccgctcgccgtagaccacgcaccaccctttttcaccaccgcctccgcccttgcgcatgcgcggggcccgctctaccgactcgccctagtcttttgctttctttttctgccctcggcctcgctcttgcgcacgggaccacaatgctccgcgccgcttgtcattgggaggcgccgaaggtggagaggtcggctcggaaggaaaaggtcggcgcacgcatgccgggtctagggttggcggggcgaaggggtggggagggaaggggcggggaggggaggggaggggaaagtgggagagggtggactctggccggtgtgaagagaggcggtcgggcggctgcgctgtgggggcctgggcgtgtacttcggaggcccgtcgggcgcttcctttagacgggaggtctagcggccctttaaaaagagaaaaatarccttcactgtcgcagcctcacgccactacttccattt

SEQ ID NO: 102591 - DNA, 501 bp, Homo sapiens
agaccaacaaaattacttcaggtaaaagagtcctggggcaataagccactgtttttatgattgctgctataaacatggcctcacattgggcccagattaccagactccctcttctctcacaaaaaattcttcttgggatcctttaggatcttttctttctggtgaccttcattgagatcatctcaatccactagaaggttgtctatcaaaaamgtaggggtcgaaatcttgatcccattcctcatgaaaggaccctcattccctctccacagtgatcttctgtcaaatcacaaggaaaggtcctccttccttggggcacttctagggcaagagataacaagttgccatagattcagagtggtttctcacagaagtaacagaatctcctcaaaatgatttgctgtctgcccctagaccaatgctttgctgccttagctctacattggtgttatggactgaactgtgtcctcccaaaattcatatgttgaagccctaacaccc

SEQ ID NO: 102592 - DNA, 525 bp, Homo sapiens
atgtgccaggcaatttttatgtattaatcttcacagcaaccttgtgaggtaagtactattagtttctgcattttacaattgaggaaactaaggcaagagattaagacgtacaccaaagatctcaaagctggtaagggatccactggaaatttgcacctaggaagtctggcttgtgctccaaaccactgggatacaccctggatacgctttatctcccaaagaggaagagarttgctcagtttatatgttgcatgagtgagtgagtaagagtgaataagtgtttaaattcactatgttcataaaattcggctctattgaaatggcttaaggctcaactggataaggaacaatacaggttactcagcctgtgcagataatctactaaattgaacagcttgcaatagtttacaacccaagcacagtaaaattcctaccattgtatattgcttcataaagattccctagaaacatctgaagatgtgttgtcttggtagaaattataaaaatccatgtggtctgccatgc

SEQ ID NO: 102593 - DNA, 581 bp, Homo sapiens
tacattcatagggcaatgtatgtggaaaggaaagtgaaatttccatgccctctgtgggcatatcaccctccagacacctccacrtgttcagcaatccagaagcctttctgaacactattcttttgggtttttatggaggcttcattacataggcatgattgattacattattagccattggtgatcaacttaaccttcagcctttctctgctgcttgcagggattggggagtagggttggggaggctgaaactcccaactctctaatcatgccttggtctttccagtgacccccatcctgaaactacctaggtgctcttagccactgttatctcagtaacatacaaagaaaaaaaactcttatcactcaggagattccaaggattttaggagctgtactccaggaaatggaatgaagatcaaatatgtatttcacaacatcacagaacaatcctagctccctctgccaatggctcagaatatttaaaacctactcagtccaagaaattcctcttctaatcctaagaaacatagatttatggaactaatgataaatgtgttctttccagtccagctctgttt

SEQ ID NO: 102594 - DNA, 508 bp, Homo sapiens
ggtacttggcctcagctacagaggtaatagttacttccaatatctgctactattgtattctgtagcrttctccttattgcttcttagttaatcctattattaattaattcttagttcattataataattctttatatttgaaatattccattcaagttactgagtagtttctatctcctgactgtaccctgactgacacaacatttctaggaggttcataggaattctgcatggggtttcttttttgtcacaaatgtcaggagcttactgcattctaaactaaattaacttatatggtggaatgtcaggcatgtaaggccaaataatctagcacattaattaattatcatatattattttgcaaagatccaaaaatcagaaaagtctcaaagaaattgaacttctattagggtagacttccttaaaccaattaacatgtattttaattgtgtctccaagacatgattttgaagatcagcctgagaattaaattgtacatctaaatgct

SEQ ID NO: 102595 - DNA, 603 bp, Homo sapiens
cactgatggacacttacgttgataccatatcttgacaattgtgaatcttgctgcaataaatgtgagagggcagataccactctgatgtactgatttccttttttttkgggggggggtatttactcaggagtgggattgctggctcatatggtggctctatatttaggtttctaaggaatctctatactgttcttcacagtgctgtactaacatacattcctaccaacagtgtacgagtgtttctctttctccacatctttatcagcattcattattgcctgtattttggataaaagccatttcaactgggatgagattatacctcatcctagttttgatatgcatttctctgatgattagtgatgttaagcattttttcatatccctgttggccatttgtatgtcttttttgagaaataaccattcaggtcttttgctcaattttaattggattattttcctattatattgtttgagctccttatatattatggctattaattctgtgatagatgagtagtttgcaagtattttcccccacttgatgggttgtctcttcactttgttgtttgctttgcagaaggttcttagcttggcatgatc

SEQ ID NO: 102596 - DNA, 584 bp, Homo sapiens
aatctttgttgtcattatactggttagaagagtaattggttttcaggcaaaaatttctrttttcttaaattgggtgtaaatgccagcgggcagtgcgagtctatagaattttggagacaggcaggagaaggtttctcaaatcgtgaagtcattaaatacctttgttaatgtcggaggcaactaattatttttggaaaggcattgatgaggacatacgccatatctgatcttcaaataagttaacagtttgtatagttgaggtgacagcagtgcataactaatagacatagtgcttttttttatacacaagtcagaattacaaaagaatttctggtgaattattttgtgaaacatacaaattctaagaaacgcttttacagtttggtacagaatggaaattttctaattcttgagaaataaggttgtgtttttagtttaaatgtcaaaccagagttgttaggcatgattatactggctggttaatgttttgctgcaagattgtcttcagagttacttttcgcatcagcagtggcactatgttaggtgtgcccttgtatttaattttcataatcttttttgatgaa

SEQ ID NO: 102597 - DNA, 584 bp, Homo sapiens
aatctttgttgtcattatactggttagaagagtaattggttttcaggcaaaaatttctattttcttaaattgggtgtaaatgccagcgggcwgtgcgagtctatagaattttggagacaggcaggagaaggtttctcaaatcgtgaagtcattaaatacctttgttaatgtcggaggcaactaattatttttggaaaggcattgatgaggacatacgccatatctgatcttcaaataagttaacagtttgtatagttgaggtgacagcagtgcataactaatagacatagtgcttttttttatacacaagtcagaattacaaaagaatttctggtgaattattttgtgaaacatacaaattctaagaaacgcttttacagtttggtacagaatggaaattttctaattcttgagaaataaggttgtgtttttagtttaaatgtcaaaccagagttgttaggcatgattatactggctggttaatgttttgctgcaagattgtcttcagagttacttttcgcatcagcagtggcactatgttaggtgtgcccttgtatttaattttcataatcttttttgatgaa

SEQ ID NO: 102598 - DNA, 600 bp, Homo sapiens
atatatagtttgttttttccagtaaccaaaattagcatctgtgttagtctgttttgtgttgctctaaaggaatacctgagtctgggtaatttataaagaagtttatttggctcacagttctgcagactatacaagaagcaaagcaccagcatctgcttctggtgaggcctcagaaagcttatagtcawggtggaaggcaaagggggagcaggtgtgtcacatggcaagagagggcatgagagagatggctaggcgcttttaaacaagcagctcttgtgttaactaacgagcaagaattcactgattgccacagggagtgattgataagggatccaccaccacccccatccccaccccatgacacaaacacctcactaggctccatctctaacactgggaaattacgtttcagcatgagatttggaggggacaaatattcaaactgtatcagcatcctcactgaattactactttattatacagattaagttacccttttttggttttatttcagcgtgctcttgctaaaactggagctgaatctatcagtttgcttgagttatgtcgaaatacgaacagaaaacaagctgccgcaaagtt

SEQ ID NO: 102599 - DNA, 610 bp, Homo sapiens
cctgtatgtgcttttaaagtccttgtaacatttagttagagggctttaactcctgggtctaaaatgaatacaaagccctgctaaatcttaaacacttacagcaattaaatcatcatattcaggccccatagagatgccagacaaataaactgcattcctgagacacagggcaagaaattaaagctattcagctcttcaaggccctaggaatcttgtggaagaggtgaatgcaaaagattgtaaggcccaattttgaaagataaaataaattcggtttccctataaattaatcattagtgtcaaaggcacactgatgcaaaaccagtatataaacccctgtgtcagattaacaaagctttcttgcatcattaaccaattccttaataaaggctataaaggttataaaaggcttatggaagttatattttataatcaagatgaaattgtatagattgtttacaaaattctgaaaaacaaatgtaactgggttcatgctgtttttattagggcttcttgtttagawaattaattaagtctcctctctcaaagaacaaagatttttgctttttattcaaatccttgaattatcactctggttaaataaatgact

SEQ ID NO: 102600 - DNA, 613 bp, Homo sapiens
taactgggttcatgctgtttttattagggcttcttgtttagaaaattaattaagtctcctctctcaaagaacaaagatttttgctttttattcaaatccttgaattatcactctggttaaataaatgactttacaatgaactgtaatcctattttgtaacatcaaatgttttaaaccttttatagttgacaaaatttccaaaatcaaataactatgtcttttctaacctaattaatcctttaagacagtagcttccccaatgtccaaaaataacataatttggctaatttggtataaaaattacacaggaagtactgtcaaatatggaattgtgtttggttttctttggaccgtatttgtagaaatatattattggtatgtgttccaaaattctgggaaactcacgtaattctgatataacttagtgtacrctatcagtaataatgataattgttatgttaaaattattgcgtgccacagagttaacaaatttccttgacaattgtgtcttttgactatgggtgccttattttaccaaggctttgactggaatggtgtgctttcctttaaggaatcaaacttggcttatgaagccaataaagctcttgataaa

SEQ ID NO: 102601 - DNA, 626 bp, Homo sapiens
agtatgtcatctgtcttggtgtgtattctgtgggggggatggggggtgcttgaaaacgggtattctgctattatagaatgtcaaaatatcaactgtaataaacaagaaaaataatcctagtcttttatttaagggccctctttagtccatctcaacagacccttctccgaaggggaaagaaatgcagctcacaagagcccattaaacaactaaaacaagacaaaataaaacaactaccccctgccaatttgcacactgttacttcttttgttttcccaatcttatttcttcttcttttttataataaaaaatttcaaagcaattatctgctttcttacttccccttgactttgcctatgtttagttttactttctatgattggccatcaacaattaggcacaaaccattctgaacttcctcttcacacttactcaagtggkaaagctgctgtttacaaagttgcaaactagaaagtgctaaattgatgttgtacatttgcaagcattcacgttgaaaaaaagatgcaaaagaagacaggtgagacatcttgggaagtgatgtgagagcaattattctttttaaaatgttttgtctgtatatagtgtgtacaccatcactcacagct

SEQ ID NO: 102602 - DNA, 457 bp, Homo sapiens
tgacattgaaggtgacatctgctggagtccaagagtgagagaggagcatgtgggatagagtgggcagccaaagtatcctgaggtggacaatggcctcaaataaagccaccatagctaaagccaatggagagaaggagagkaatgcaaggtaaggtttgaaaaggaaggctgaaactcagttttgaagaatcctaagccattgtatagtattagctttcctggatttcccataaaaaaactggatggtttttgagaattattttcttataatcctggaggccagaagtccaaaatcagggtgtcatcggtggtggtcccttctgaaggctctgagggagaatctgttccttaactttctccagctgtcaatactgggtattccttggcttgcagatataatcgaccttctatatccaagggttccgcatcttcagagacattatttccttagcattta

SEQ ID NO: 102603 - DNA, 552 bp, Homo sapiens
tcgggagggcccctccctgcgtcggcgcccctgacccgcccccaggcatgtgtgaggtgggggcgggggaggaaaaatctccttttggggagccgaggtctagttaaagatgactcaggggcgggggttttggggacagacacggggcagttatgtgggggtcgggcgggagggagaacatcgttcctttgcggatcttggttttctgcagccgtctttgaagtggggggcaagccctactatgaatatgtggccccttaaatttcactggwtgtttctggttttcggtcccatcaacctcaaaccctacgattgtggttgagtcagggaggctgcaagggtctcttggcggtgctgaacaggtgacaggtggatctttctgttgctgatgctgtgagatgttcaggcacagtcgtacaccaaagtgtcagagaccgtgtgagtttgtatttatgtgtttggccatgtttcattccatatatagtatatttgagatgttaggtttccattcttcaagtcagcttaattgttgtggataaattcttcaaatgt

SEQ ID NO: 102604 - DNA, 641 bp, Homo sapiens
tttcttgtcaagtctgagaacactggctaaccttaggtcccaaacaaaaaagactatccttcctttattgaattgcttttgtacctttgtcaaaaatcagatagccgtaattgtgaggatctatttctggattctctgttctgttccattgatctttgtgcctgtccctccaccactaccacactgtttgattactattgctatatagtaagtcttaaaattagatagtgaaattcctccaacttcattctcctttttcagaattgctttagctattctagttcctttccatgtaaaatttagaatctgtaaaatgtcagtttcggrgaaattgacatttttattttgttgagtcttcaatccatgaacctggtatatggtatgtcttttatttaattcttttatttcttttgtcagcattttttagtttctagcataaaaatcccgtgcatgttttgttagatttatacctagatatatattttttagaacaattgtaagtgatactgtgtttttaattctgatttccaattgttcatgtctaatatgtggcagtatggttggttgatttctgtgagtggatcttatattttgagactttgctaaattatcagttttaggaggtttattttgtagattca

SEQ ID NO: 102605 - DNA, 581 bp, Homo sapiens
agaggctgagttgagaggatcacttgagcccaggagttcgaggctgcatatctatgattacatgacagcactccagcctggaaaatagagcaagaccttgtctcttaaaaaaaaaaaaaagaaaaccttaagagtagaacaagcagtcaaacaagaggtcatggtgttaggtgattgcccagataacacatacttgaacaaggacrttgtggtggaaaagagaaatttttgtgaaagtaatcagtgaaactttgccattgattatatgtggagaggaaaagaattgagaactctgaggtttctagcttcagaagcatgtcatttataattaacagagaaatacgttagtgagtaggaggcagtgagttgagttttggacaaggtgactttaggttgccagcatggtattgtcaggctattagtttacttgttccagtcccacccctcccttccgcctccctccttccctcactcgctcactgaattccattgctattagtctaagaacttccctttaggaaaagtaattttttttagtcacagtcagcagtagagcttgaaatttgtggagaccaattccc

SEQ ID NO: 102606 - DNA, 581 bp, Homo sapiens
agaggctgagttgagaggatcacttgagcccaggagttcgaggctgcatatctatgattacatgacagcactccagcctggaaaatagagcaagaccttgtctcttaaaaaaaaaaaaaagaaaaccttaagagtagaacaagcagtcaaacaagaggtcatggtgttaggtgattgcccagataacacatacttgaacaaggacgttgtggtggaaaagagaaatttttgtgaaagtaatcagtgaaactttgccattgattatatgtggagaggaaaagaattgagaactctgaggtttctagcttcagaagcatgtcatttataattaacagagaaatacrttagtgagtaggaggcagtgagttgagttttggacaaggtgactttaggttgccagcatggtattgtcaggctattagtttacttgttccagtcccacccctcccttccgcctccctccttccctcactcgctcactgaattccattgctattagtctaagaacttccctttaggaaaagtaattttttttagtcacagtcagcagtagagcttgaaatttgtggagaccaattccc

SEQ ID NO: 102607 - DNA, 499 bp, Homo sapiens
catctcttccagagagagagagagagagagagagagagcttatctttgctctggaatttaagcaaatgtctcctggagagaggggtaggtggctccaggaaagataagcctctaaatctctccagaacagtactatatctctaatttcctaggtgtgtttgccattcaatcattctttaamcgagtttgccagtgttctttgttcagaaagcccaaacagtgcagaaatgtgaaaatattcatggagaattgcatcccaacagtaggtagtcagtaaaggttatcttctttcatgagtctgaaaacagtgctctttacttttaaaccttctcccacagatgcccatgccactgttgttgagagacaaaaagctcaccagccatgaggtacctcaaggtgaacagccctagccatgttatgtcatacctgcttccatttggtcatttcctgccttacaacacaacaatctgttggctgcttttttgggcttctttcataa

SEQ ID NO: 102608 - DNA, 603 bp, Homo sapiens
gaaaaatggagaagacaacaaaaaagattctctccataaaccaattgttttacaataaccagcaggaaagttttagctcatattgttctatacctgttttttctggattaggttttagcataactaaagaaccattcagagtattcctaacccaaccccaaaagaacygtctaccccaaaagaaaatccagatctgtacttttagtaaaacagggtactgaccaaaagtgtgaaattatactttttatttataacgtaaatatatattcatgggcaggacacaagaccaaggtctgtgcttccctcccctgctggcagtcccacaaatggggtgagaataggatggtagaagatttatcacccacactactccctgcccccgctttccagggtaaactgaagacttcgattctttcctcttctgtttctacacaactttctccctctctcccctcctcctttctgtacactcctggttctcttctaggtttatatcttttcttattttgtgacagactctaataggcaggaattagatctaaatctgattttggcatatcacccatatattagtgcttggtgtaattttagggacactaaatt

SEQ ID NO: 102609 - DNA, 603 bp, Homo sapiens
gaaaaatggagaagacaacaaaaaagattctctccataaaccaattgttttacaataaccagcaggaaagttttagctcatattgttctatacctgttttttctggattaggttttagcataactaaagaaccattcagagtattcctaacccaaccccaaaagaaccgtctaccccaaaagaaaatccagatctgtacttttagtaaaacagggtactgacyaaaagtgtgaaattatactttttatttataacgtaaatatatattcatgggcaggacacaagaccaaggtctgtgcttccctcccctgctggcagtcccacaaatggggtgagaataggatggtagaagatttatcacccacactactccctgcccccgctttccagggtaaactgaagacttcgattctttcctcttctgtttctacacaactttctccctctctcccctcctcctttctgtacactcctggttctcttctaggtttatatcttttcttattttgtgacagactctaataggcaggaattagatctaaatctgattttggcatatcacccatatattagtgcttggtgtaattttagggacactaaatt

SEQ ID NO: 102610 - DNA, 603 bp, Homo sapiens
gaaaaatggagaagacaacaaaaaagattctctccataaaccaattgttttacaataaccagcaggaaagttttagctcatattgttctatacctgttttttctggattaggttttagcataactaaagaaccattcagagtattcctaacccaaccccaaaagaaccgtctaccccaaaagaaaatccagatctgtacttttagtaaaacagggtactgaccraaagtgtgaaattatactttttatttataacgtaaatatatattcatgggcaggacacaagaccaaggtctgtgcttccctcccctgctggcagtcccacaaatggggtgagaataggatggtagaagatttatcacccacactactccctgcccccgctttccagggtaaactgaagacttcgattctttcctcttctgtttctacacaactttctccctctctcccctcctcctttctgtacactcctggttctcttctaggtttatatcttttcttattttgtgacagactctaataggcaggaattagatctaaatctgattttggcatatcacccatatattagtgcttggtgtaattttagggacactaaatt

SEQ ID NO: 102611 - DNA, 314 bp, Homo sapiens
tgtacttttagtaaaacagggtactgaccaaaagtgtgaaattatactttttatttataacgtaaatatatattcatgggcaggacacaagaccaaggtctgtgcttccctcccctgctggcagtcccacaaatggggtgagaataggatggtagaagatttatcacccacactactccctgcccccgctttccagggtaaactgaagacttcgattctttcctcttctgtttctacacawctttctccctctctcccctcctcctttctgtacactcctggttctcttctaggtttatatcttttcttatttt

SEQ ID NO: 102612 - DNA, 537 bp, Homo sapiens
gtgagcttgtctcacctggcatggggtcaggtgtttccagaagcttgagagccaaatttcccaaagcagacgagccctttcctactccagggaggagtgcaatgtgctgagctttgttgagcaccttctatgggccagactctggtgtcctctgccaaggayagaacagtcagagccatccttgcaagatgtttgccagatcgcatttctcctctgctcaaaactctaccccctcccccagcaaaagtaaagtccttgcaatagccgtggcccagtgtgattggccttctctctgccctcatcctctgtctccctctctctgctcacattcagtcccacctcagatgaatctgacaggatcctgacccctgccgttccccttgcctggaccctaggcatccccaggtaccctccctacctcctccaagtcttggctgaaaggtcatcatttctgtgaggcccacgctgatcgcccccattcctcatccatgtacctgcttgctttctttttttccccatagcctgtattacctctga

SEQ ID NO: 102613 - DNA, 537 bp, Homo sapiens
gtgagcttgtctcacctggcatggggtcaggtgtttccagaagcttgagagccaaatttcccaaagcagacgagccctttcctactccagggaggagtgcaatgtgctgagctttgttgagcaccttctatgggccagactctggtgtcctctgccaaggacagaacagtcagagccatccttgcaagatgtttgccagatcgcatttctcctctgctcaaaactctaccccctcccccagcaaaagtaaagtccttgcaatagccgtggcccagtgtgattggccttctctctgycctcatcctctgtctccctctctctgctcacattcagtcccacctcagatgaatctgacaggatcctgacccctgccgttccccttgcctggaccctaggcatccccaggtaccctccctacctcctccaagtcttggctgaaaggtcatcatttctgtgaggcccacgctgatcgcccccattcctcatccatgtacctgcttgctttctttttttccccatagcctgtattacctctga

SEQ ID NO: 102614 - DNA, 572 bp, Homo sapiens
attatttaagtaaggtgtcgctggctcttgaacctggtgcgaggagtgcccagtggagcccacaaaaggcctgaaatgagcgaagtggtgatagaagagtggttgggtggtgtggagtagacatgcgcatctggctagttctcttgagctgcagagcaaatgggatttacccaagctctgagtctccagggagtcccaggacccaggtcctgttctaagtgagcaagggcaaggcccatcagcctgttggaggaggcactaaaggatgtgcttttcaaggctgtccattctgggtaccaggaatcctgggcaaggtaaatgacragacccacggcccagcgggaggggctggttgggatccgcggattgggcccagcttgccccacacaggattcaagttgctgctcctacaagcgcagcacgaggaaatcgcgccccctccgggagcgcggagaaagcgaggtggcccgccaacccggaacggccctaggctcccaggcctcggagctgcttccactgccagtctggggaaaggaaccccttgggggacggggcgcagcaccgtcgaccct

SEQ ID NO: 102615 - DNA, 537 bp, Homo sapiens
ttgtgtgtgtgcgtgtgtgtgtgtgtgtgtgtgtgtgtgtgtgtgtgtgttcttttctttggtttggctcaaaacctctgcgcagttggccatcgtgaaggagggaaatgaactcaatgtactgtcacgctctggggaagcgatccccacagctacctcctcccatctctcaccctgtgctagtcacttggcttctcctcctctcccctcaggaaaaggcctgtccccagaggcagccaaccactttcggtttcccctcctccctctcatcttgcaagccagccccagttaccttgggaagaaaacgagggrtctgcaggccaagaaaatgtgcccccaacacaccactccaacataaattggggtccctcccattcccgggaggttctgcagtaggataatcaccaaccagcttaaaggcttcaaatggttttaggtacttgtcaacctctccgaaatacccgtttgaaactctaccacctggtctttctccacagaaacatctttctggacagacagggttatggtttctggatc

SEQ ID NO: 102616 - DNA, 561 bp, Homo sapiens
ataggtcatgaagatttacttctaaatttccttctaacagttcatagttttagctctacctttaggcctatgacctatcttaatttttatatatgttattaagtaagggttcaattccattctttcatatgtggatattcacttgtccaagcaccatttgttgaaaaggcttctttccttaataaaattgtctagtggtcttgttgaaaattaatttaacataaatatgaagacttactgttggaatttcaattttattccattgatgtatatagctatccttatgccagtaccaaactatcttgcttacttttgctttgtagtaagttttaaaatttggaagtttgagttctccaactttattttttttctagttaagattgtgtggcatatagtctcttgcattttcatataaaatttatagtcaatttatcactttctgcaaaataggtagctgggattttgatatgaatagygttaaatttgtagattaatttggtgagtattgccatcttaacaatattttcctctaatctatgaatataaaatgtgctttcattt

SEQ ID NO: 102617 - DNA, 551 bp, Homo sapiens
aaaaacagaatttgattcattgtgtcatagtcattgacttactcaaggataagtcattggacatgtggaagaaagcacccctctgatgactgctggtggcattttggcactttctacaaggttcaccttttctatttcactctcgctttttctccttcctccattttccatcttctgctctcttttctcctactttacccacacctcaacatagtcagaagtgtccccataatgttttgtcctgttackggcatctagaactgatactgttgatagacccttctttagaagttaatttcagttaacaacccaatggaaaacaattaaacacaaatctacctttagatcctctgaggtcaaaaatgtagccagtaagagctcgctagtgaccacaccctgatgcaaatcttaccatggaggaaatataattaatcttgctagtagggatgtttaattatagtacacggggcagcttctccacttccctttgcatattttatgatggtcttcatgaataaattaaatcaagctgaaataactgtatgatttat

SEQ ID NO: 102618 - DNA, 606 bp, Homo sapiens
taatggtaaaatcagctagagcttagagatttgagtcctccttcttcacctggtcacatgtgagtcaactggcagtcctcattattcatctttccactaaattttaccatttatctttataatttttcagatattatcctgcattgttcagcaatctcatcttcaagtgtttgtttctctttccatccactcttccaaaaactctgtcccatcatcttggggaacattgaaagtcactgctggatatttgacatctggtgacagctttatcttctgtatgggtgaaatttggatttcaacattgatatcttttattcttgactcaccgttccatctactccacttgtacatgataatgtggcttcaatccctgctataaacatggcttargatgctgcttctgcatattttgccccttcttgctccatagccacatatgaaaacttgtagcttggaccctagactccttttatccaaaaaaggagatgggttagatttccaaatatgcaggcatttccccacaggtcttctgcatacagaaaagataaagataaaaatggaaacttaaactaacctctggcaattcaatgggactctcttgtgtac

SEQ ID NO: 102619 - DNA, 464 bp, Homo sapiens
aacttaaagtataataataattaaaaaaaaagaactccaattgtactaaatacttttgtgcatttttctgtatctgtcactaatttttggatcctttgtacctgtttatttcttattttacttcaaatcattttctttcctctctttgatgtattttacaaaatattttaagtctaatttatgtttctattaattttctccatggtaaatgattttcagcattttctcatgtagttattgttctttgtatawcttcctttgtgacttgtcttttgccctttttaaaaaaatgtgttgtctttttattaaagtttaataatctttaaaaaaatgtgttgactggatcaactactaaatcaatgtacagaatatacatttctgaaatgaaagctcctctattatggaaacccctgtgcacatttcacaatgtagaatattttaattgttcaatgatataaagaatt

SEQ ID NO: 102620 - DNA, 450 bp, Homo sapiens
tgataaacaagtgttggtgaggatgtggagaattagaaataaaattttcatattcaatttcctttggtacataaccaaaggaattgaaatcagtatgttgaagagatatctgcaytcctgtgttcattgtaatattattcacaattgtcaagatttggaaacaatcttaagtgcccatcaacaaataaatggattaaaactgtggtatatcctaatagtggaatactattcatccttaaaaaagaaataaattctgtcacttgtgacaatgtgtatgaattcagaggacattatgctaagtgaaattaatcaggtatggaaagaaaggtatagcacgatctcacttatatgtggaatctaaacatttgaatttatagaagtagagattacaatggtgattaccagggtctgaggcaggggctgtcagggggatgttggtaaaagagtaca

SEQ ID NO: 102621 - DNA, 450 bp, Homo sapiens
tgataaacaagtgttggtgaggatgtggagaattagaaataaaattttcatattcaatttcctttggtacataaccaaaggaattgaaatcagtatgttgaagagatatctgcactcctgtgttcattgtaatattattcacaattgtcaagatttggaaacaatcttaagtgcccatcaacaaataaatggattaaaactgtggtatatcctaatagtggaatactattcatccttaaaaaagaaataaattctgtcacttgtgacaatgtgtatgaattcagaggacattatgctaagtgaaattaatcaggyatggaaagaaaggtatagcacgatctcacttatatgtggaatctaaacatttgaatttatagaagtagagattacaatggtgattaccagggtctgaggcaggggctgtcagggggatgttggtaaaagagtaca

SEQ ID NO: 102622 - DNA, 406 bp, Homo sapiens
ttgtgacaatgtgtatgaattcagaggacattatgctaagtgaaattaatcaggtatggaaagaaaggtatagcacgatctcacttatatgtggaatctaaacatttgaatttatagaagtagagattacaatggtgattaccagggtctgaggcaggggctgtcagggggatgttggtaaaagagtacaaaatttcaattaggtgagaagaaaaagttctagtgatttattgcacagcatggtgaatacagttaattattatatgttgcatatttcaaaattgcttaaaaatggattttaaatgttttcgctataaaaaatgataaatatgtgaactgatggatatgttattagcctgatttgctcattccrtaatatatacatgtattgaagcatcacatttta

SEQ ID NO: 102623 - DNA, 562 bp, Homo sapiens
agaggttgaagggcatacaaaatccagtatataaaacatactagtctatttagaaagtttaccctggacaagaaaaaaatgccttcaagatagctactttattaagaaatgggggtggccaagtaagaggcctaaggaggaagtaggtatgtttatcagtttaggatgtgtctttttcagggcttaagtcatcttaaataaaagctaamataatgtagtgtactgtaatttagatatcgaggctgcatgaataaaatgaaagaatataagttataaaatgcagtttctgctttaagatctccattattgagttatcctcatctttgttttttgttggctaatggacataagctaaagagtgctgtttgttaattattctaggaagtgcgctggagaaatccttagctgtcagccaaggtggagagctctatgaagagtggctggaacttagaaacggttgcctctgctgttcagtgaagtgaggaatgtgtttactgtgtacatggtttactagaaatgtttattgattatatttccagctttaattttcttgagtaattta

SEQ ID NO: 102624 - DNA, 595 bp, Homo sapiens
agtttctgtgtgggtgaacctggctcctggggccccgggtgggggtgccaggcttcagaatctgcacactgcttcaccacccccgcagcctgtgatcccaagccaggccctctgatccggcagctgtcaacacaagcacactccagtgctttctgctttgctgttggcctccctcgggaagctttgaacactactgagatcatcattgtcaaactctctgggctctggtgcaagggcagtcagataaggaggaatatgacgtgccaaccctcctctttggtccccagcccccagcctcaccctgctgacctctggctcctgcttagctcagaaactgtgggctcagaacaaagtttgaggttctgcttctctgattcacccctttctccttcctgattactggcatggagccaggcactgcaggacagaaatcaggtaactttacagatgggaggaatgaagtggggttttaggggcmtatgttgtgctgggcaccaaagtaaactgcatgaggacagggaccttgtctgcatggcccacagaactatcctggcacagtgctggcacatgttgagctcatgaaatgaataagtca

SEQ ID NO: 102625 - DNA, 553 bp, Homo sapiens
ccagcaatcaatatatactttaaatatgaatacctagtagcttcattgataaggccatcaggtttctcttctgytaaatgctaaacaaaaaaaagtttgaataaagttactataatacaataaaaaatctaatgtcaacacaaaggattttactttagagacattttcttgcatctaataaaaacttcaacatgttctgttactgaatacacaaatccaaaactaacttttctagctaaaagcatttttcttccccatttgcaatttttttctacaagtgaacctgtggggttttatagggggaggaagagggcttaggatttcatactcctgaccttttcttttacttaaaaggaaaacccctttgattcacataacgtcataaaaacatagaagattacagttcagattttaggtattttccttcttacaaaactgttctggttctaaatattcattattacttatttttaaaaaaggataaccactgaaatatagtttcttagaatctaatatacttcccttcacaccaaacccccatattagaatctaa

SEQ ID NO: 102626 - DNA, 553 bp, Homo sapiens
ccagcaatcaatatatactttaaatatgaatacctagtagcttcattgataaggccatcaggtttctcttctgctaaatgctaaacaaaaaaaagtttgaataaagttactataatacaataaaaaatctaatgtcaacacaaaggattttactttagagacattttcttgcatctaataaaaacttcaacatgttctgttactgaatacacaaatccaaaactaacttttctagctraaagcatttttcttccccatttgcaatttttttctacaagtgaacctgtggggttttatagggggaggaagagggcttaggatttcatactcctgaccttttcttttacttaaaaggaaaacccctttgattcacataacgtcataaaaacatagaagattacagttcagattttaggtattttccttcttacaaaactgttctggttctaaatattcattattacttatttttaaaaaaggataaccactgaaatatagtttcttagaatctaatatacttcccttcacaccaaacccccatattagaatctaa

SEQ ID NO: 102627 - DNA, 459 bp, Homo sapiens
tgcatgactaaaattatacccattgaacagcmcctcccaattttcgtctccctctaacccctggtaaccaccattttactttctgatttgatgagttttactgttttagacacctgatattagtggattcatgcaatatttgtccttctgtgactggcttatttcacttagtgtaatgtcctcaagattcatccatgttgtagtatatgacgggattttttttaaggatacataatatttggttgtatgtatattaccacatttattttatccattcaactgtcctggacatttaggtggttgttagtgtcttgactgctgtgacaaaataagtacttttaaaagtctcacatttgcaagttcaatttgaacctttttttagtctgcttgtacttctcttatcaagcaagaaagcacttttctgctttttgtattactagtaacagtggagattaaata

SEQ ID NO: 102628 - DNA, 288 bp, Homo sapiens
cagtgatttcctgtcatccacaaaaaaagakgaaatagtaagagaaaagtaaatactaggtgaagtgctttgagccaaagggagtccatataagaagtgatggatggctctgttgggatcccggcagtagtgcatgatgatgttgttgtataaatacgtcagctcctttaaccctcgggggaccctgaagcatgtgtttttcatgggcccctagcgtgctcatgcgggattaagtttcagttgcctactgtggtaattggcttgagaagcctatctttattaattttc

SEQ ID NO: 102629 - DNA, 372 bp, Homo sapiens
aaatgctctgtttatctgattattggttagccagtgatttcctgtcatccacaaaaaaagaggaaatagtaagagaaaagtaaatactaggtgaagtgctttgagccaaagggagtccatataagaagtgatggatggctctgttgggatcccggcagtagtgcatgatgatgttgttgtataaatacrtcagctcctttaaccctcgggggaccctgaagcatgtgtttttcatgggcccctagcgtgctcatgcgggattaagtttcagttgcctactgtggtaattggcttgagaagcctatctttattaattttctcctcttccttgtcttatttctcttctcccctacctgtgttctcttcattccc

SEQ ID NO: 102630 - DNA, 589 bp, Homo sapiens
cctcatcctttctttttcacagcccaccaccatgcaaagcgatacatgcttagtaaatgcaaaatcattttaatattagccttagtaaatcatagttcctcggtttaagtgttaaaaatagcaatacacatattttctgggttatttgtattagtattgctttgtataaacagagatactcgagttggttgcattctggattgaaaaagttgactcagctcttattcctttatcaaaaagatatggatcctaacagtccaactgtgyggttgctttagaatgactggaaaacataaaagagcaacataaactgcaaaattatatgtattttaaaaagcaaaaaattgaattagatcttttttggcagggtggtaggtgggaaagacattaattattactcatcccattctgcatcaactgtatcttatcaggtttaagatgctattgattgtaagatggatctctatttcagtgatgttgaagtataaaaagtggttgaaatacggtaaatatagattctcggtgtcccaggacctttagagaacattgttttctgtagagtaatagcacatgctgggttcatgttagc

SEQ ID NO: 102631 - DNA, 608 bp, Homo sapiens
aaccacactgccatgccatttccaccagcacattggaaaaatcatattttataaaaatagcatctcttgtattgcaaatgactatttttcttggatgagtgggatgacaaactcaaaagagaccccttgggccctcgcaaagtcttggagaagcagttttacttcccttccttcacttagaccccattctttagcatttcttctgaagctcccacaagacccaagaatggctgctgcagtgtctcctcttcagtcagggaccctggttgagstttgtgtattgttcattattgctctgttttgcagttgttcaaagttggaagacttgcctgcggagcagtggaaccatgccacagtccgcaatgccttaaaggaactgctcaaagagatgaaccagagcacattagccaaagaatgccctctctcccaggtcagtatcttcaggtgggggtctgggaaacagaagaagccattggtagactctctatcagggggttccttctgcttaaacaactgtcttctctgtcttttatttatagacttaaactgcatttgaggtgtaaaagattatgttgcttctggttgtagaatagaagttatagcttatt

SEQ ID NO: 102632 - DNA, 599 bp, Homo sapiens
taatacacctggttatccaggggccacccctgggccagcctaagtcactttacgtcaaaggttgtgcttaagccttcttggcaagatagatattgacccttcaacattagatgtgtgtgtgagacttggggactgaaatcacagttcctggagtttatgctgttgctctacgttcagtcaggcatcaaaagcttagattttgtctctctgattacacctgagggggcccaaccttgtgcatgctcacagtctttcagactgtcaggtrtgtttatgacttcacttttgtgcctggctccttaggctttgcccatggttcagagcagcatattgcttacccagtgtttggtcagaggctgtgctgaagcccccagtaccagtgagaattacactattggtgatgcctctgagtgcagcttgaggcatgctttcaagtctgccctccacctgcttacatgcccacaggagcccccggcagcagagtggactgtgattccagaagggttcttcctggctttcttgttccctggttctcactgttaaagttctggccactctgccattttgcttgctgctactgatgtcatggagctgtgagc

SEQ ID NO: 102633 - DNA, 535 bp, Homo sapiens
cctctgcagaagatagctgtcatcctctctgacatagctgtcctacaatggggcactagcaggtgggtaaggaggaccctggtcatcttagcttgtccttcctcagcaagccaccccatgtccatctcagcaagccacctgatgataaggcagcttaggaggaagtgactgtgatcagggctcaggaatcttggcctactgtgcctggagctgagcttctgacctatgagtggggctggttggggaagaaaatactggtcttctccactgagcctgcccaaacagagcttatgcatcacagagctgaaggagatgagacaccccagtggcctgcttttcccgttatgacaaagagctctaggctgggagatgagaggaaaatggtcacctttcttctggactactctcacctggatsggaacccctggagtgatttccataatactgaacctgagattggggaggggagcatgttctgcttccaatgctgctaactcttgctgttcttactgacatttagtacgttattgtagat

SEQ ID NO: 102634 - DNA, 547 bp, Homo sapiens
agtctccctgtggttccttttccttcccccactaatggccggactttgatccagctggagccactgacttcggatgactctgacaactataagtgcattgcaagcaatgaccatgcagatgccatctataccgtatctctgctggtaacagaaggtgagttggccccttcctcttggcctttcttcttagggaccagactccccctgtctgaacctgtccctctgtctatcctcaggtcaagagaaaatggacttcaaaaagatgctgaagaagaggtgaggctggcaggtccttctgcccaagatattgtctcctcatcmaggccaaagcctctcaaaggcctctcaacaaggccctgagttccaagaatccatggagtagggaggggtttctcaaggttggagaggcattgtgtacaagcttagtcccttcctccttctcctagggcaccccctgctcccaagaagaagcagaagaaggtggcaaatgagaaagagatgctggagattttgtccaaagtgcccaagaaagactttgagaaggtgt

SEQ ID NO: 102635 - DNA, 620 bp, Homo sapiens
gtgacctcttgagattgacttttctcactcagcgtaattctgatagtggtgtagtgcaatatagaagtagtccattctcacaggcgtgtggagatatctcattgtgattttaatttgcacttccctaatgcctaatgttattgaacatatttcctggagtttatttttctctttttctagttttatgatctgaaracattttttatctccataggttattggggaacaggtgatgtttggttacatgggtaagttcttcagtggtgatttgttaagatttttggtgcacccgtcacccgaacagtatacactgcaccctatttgtagtcttttaaccctcaccccttcccctgagtccccaaagtccactgtatcattcttatgcctttgcatcctcgtagcttagctcccacttataagcaagaatatatgatgtttgattttccattcctgagctacctcacttagaataatagtctccaatctcatccaggtcgctccgaatgccattaattcattcctttttatggctgagtagtgttccatcatatatatataccacagtttctttatccactccttgattgatggacatttgtgttggttccacgtttttgcaa

SEQ ID NO: 102636 - DNA, 570 bp, Homo sapiens
tgttggtgtaatgaaggaacagcagaggccagtgtggctgaatcaggggagagtgatgggaagtgaggacaaaaagatccttggttggataatgatgttggttagatcatgcaggaccttcacggccacataaagacttctgacgtttaatccaagtgaaacgggggccaatggagagttttaagcataggagtaatgtagtctgacttgggttttaaaagaatccttctgatatgccacatggcttgaacatgaatgttcataagatkgttctcaatagtcaaagacttgaaaacatatctatgagttccgggggtcagttttcccatctctgatataatgaagttatgcctaatgacctctatgcaacttccaactctaatcataatcattttaataacagcaccaatcacctggggggatctttttggaatggtggaaattttctaaacccggattttggtaatgttgtaccactctataaataacctaaaaaatcattgaactatacgcgtcacacatatgatttttatggaatgtaaaattgtacctcaatgaagttttaaaaaa

SEQ ID NO: 102637 - DNA, 570 bp, Homo sapiens
tgttggtgtaatgaaggaacagcagaggccagtgtggctgaatcaggggagagtgatgggaagtgaggacaaaaagatccttggttggataatgatgttggttagatcatgcaggaccttcacggccacataaagacttctgacgtttaatccaagtgaaacgggggccaatggagagttttaagcataggagtaatgtagtctgacttgggttttaaaagaatccttctgatatgccacatggcttgaacatgaatgttcataagatggttctcaatagtcaaagacttgaaaacatatctatgagttccgggggtcagttttcccatctctgatataatgaagttatgcctaatgacctctatgcaacttccaactctaatcataatcattttaataacagcaccaatcacctggggggatctttttggaatggtggaaattttctaaaccyggattttggtaatgttgtaccactctataaataacctaaaaaatcattgaactatacgcgtcacacatatgatttttatggaatgtaaaattgtacctcaatgaagttttaaaaaa

SEQ ID NO: 102638 - DNA, 589 bp, Homo sapiens
atggatcttctgtgctgatgtaataaatgagacaaccaagctttatgatcatcacttacttgagttttagaatcagggcgtaaccaaggcaaagtgccattacggcgtagttctgccagtttggcatttagcttgtgtgccaagacaatggttaaaggcatacactcctcagtttcatcagtggcatagccaaacattaagccctaaagaaagaaaagtcaccaatgtgatcaagctccagaatttaatgttagaagagattaaaacagcctctacaccaagatacctggtctccagcaccaatgtcttcttcatttctgtcaagatgaacaccttgagcaatatctggtgactgttgctccaaggctaccagcacgttacaagtcttgtagtcaaaacctataagcaaaaaacacaacatcttgtttacgtcctaraaatacctgctgtttacagcaattatctggaattctaaacactgctgaagaaatcaaatatacctaaaccatcggaccttttagagaatgaacagaatagggcttagtgtatagtaagatacaactggagtttaggattagcaggaacattc

SEQ ID NO: 102639 - DNA, 603 bp, Homo sapiens
tggctcttgggtattgctcccttgtctccctgggctcattgcctgtttctgtagcttaattgtagcttaatttggggagcatggccccgggaawtttttttttttttttagacagagcctcactctgttgcccaggttagagtgagtgcaatcttggctcactgcaaacttcacctcctgggttcaaacgattctcgtgcctcagcctcctgagtagctgggattacagtgtgcacccccacacctggctaattttttgtatttttagtagagacgaagttttgccttgttggccagggtggtcttgacctcctgacctcaggtgatccacctgccttggcctctcaaagtgctgggattacagacttgagccaccatgtctggacaagccccaggaaatttagtgtctataacttgaattgctgggcatggggaagagtgggtggaggaggaggagttcccttacttccaaccctctatcctgtcctggtccctcctccagcctcagcagtcccgatggggcaaggagtcctggagctgcgagatgtgcccacctggagcctgcacccctcagtcccagggtctgccctcccaagggcagat

SEQ ID NO: 102640 - DNA, 546 bp, Homo sapiens
tcttcattggaatacttttatatcatagtatgagacactagggttattgtggagggagatcaaacttcaaacacctaaacgtggcagacatttgtttcacacctattgtatctcagacccctaaggcattaaatgtgataatgtgggctgggcatggtggtttaggtctgtaatcccagcgctttgggaggcagaggtgggcggatcacccgaggtcaacggttggagaccagcctggccaacatggtgaaatcccgtctctactaaaaaaacaaaattagctgtgtgtggtggtgcacgcctgtaatcccagccacttgggaggctgaggcaggacagtcacttgaacccaggaggcagaatttgcagggagccaagatcgtgccactgcactccagcctgrgtgacagagagagattccatctcaaaaaaataaaaaaaaataataataaaatgaataaataaatgcgataatgcgtaaattgagtaattttcattattattcagagatggaagcagttaatcagaggaagagagtgtggacag

SEQ ID NO: 102641 - DNA, 546 bp, Homo sapiens
tcttcattggaatacttttatatcatagtatgagacactagggttattgtggagggagatcaaacttcaaacacctaaacgtggcagacatttgtttcacacctattgtatctcagacccctaaggcattaaatgtgataatgtgggctgggcatggtggtttaggtctgtaatcccagcgctttgggaggcagaggtgggcggatcacccgaggtcaacggttggagaccagcctggccaacatggtgaaatcccgtctctactaaaaaaacaaaattagctgtgtgtggtggtgcacgcctgtaatcccagccacttgggaggctgaggcaggacagtcacttgaacccaggaggcagaatttgcagggagccaagatcgtgccactgcactccagcctgggtgacagagagagattccatctcaaaaaaataaaaaawaataataataaaatgaataaataaatgcgataatgcgtaaattgagtaattttcattattattcagagatggaagcagttaatcagaggaagagagtgtggacag

SEQ ID NO: 102642 - DNA, 508 bp, Homo sapiens
tgtgtaaactgttattaagtagaaagactaaataatgaaccaatgaaaaatagtaacaacaacaaatttttatgatgtagacagtacagtaagacataaagagtaacaacaaaaaattaaaaagcaaggggaatattaaggtatacaatattagtttactttttgattgcttgcatgtttgtttatgcaaacagtgtttttatcagctaatctcaaaccaaaaatcatacaacgtatacagaaaaaataagaagcaagaaactaaatcatatgaccagagaaaattaccttcactaaaaggaagacaggaaggaaagaaggaaaacaagaccacaaagcaaacagaaaacaaaacagtagaattatatcattatttatcaacaataacattgaatgtaaatgtactaaactctccaataaaagacagagttttggatacaaagaaacacaaaacatgacctattgatctgttttytacaagaaacacatttcaactataaagacatac

SEQ ID NO: 102643 - DNA, 590 bp, Homo sapiens
gtttatctacttatttcctcactattcattgtgtactaaagtagataaagtggatctcattaaacagtccatgagagatatttattttccagatcaaatgcatttcttttttaaaaaatttagttttattttaagttctgggatacatgtacaggacgtgcagatttgttatatagatataaatgtgtgccatggtgacttgcacctcttaacccatcacctargtatgaagccccacatgcattagctttatcctgatgctcttcctcccctctccctcaaatccatttcttgaagaccaaatttatgcttctatttctactttctccttcctacttttccgtcttggctttctattacgtactgagaattttccactaggcttgggaattgttttccattgagataagcatggacatttatttctgtgcaaattctgtgtagtcatgctgtttctgagaatggggaggatctgtgcagcaaggaagccttggtattctgagtgcctggcattgcccctcaaagtggtctgggagcttgcaggagagagttatggccaccaggtggtgctctggctgttttctttctgg

SEQ ID NO: 102644 - DNA, 590 bp, Homo sapiens
gtttatctacttatttcctcactattcattgtgtactaaagtagataaagtggatctcattaaacagtccatgagagatatttattttccagatcaaatgcatttcttttttaaaaaatttagttttattttaagttctgggatacatgtacaggacgtgcagatttgttatatagatataaatgtgtgccatggtgacttgcacctcttaacccatcacctaggtatgaagccccacatgcattagctttatcctgatgctcttcctcccctctccctcaaatccatttcttgaagaccaaatttatgcttctatttctactttctccttcctacttttccgtcttggctttctattacgtactgagaattttccactargcttgggaattgttttccattgagataagcatggacatttatttctgtgcaaattctgtgtagtcatgctgtttctgagaatggggaggatctgtgcagcaaggaagccttggtattctgagtgcctggcattgcccctcaaagtggtctgggagcttgcaggagagagttatggccaccaggtggtgctctggctgttttctttctgg

SEQ ID NO: 102645 - DNA, 561 bp, Homo sapiens
tcattttccctggtcttctactgttaatataatatattgttttcaaatgcacgttttcccatctcagcccagtgatttaactagtgagctgatctctcaaactatttggccygtaatcaaaagaggacatggctcattgagaagatgtcaagggtatttatttcctggaaggataaatcattttccataagcatttacacagtagatatgaggtgatttcttgctttgctgagcatctgctaacaaattcagaaccaaaaactccatgctcagtgatattattttgtttatttatcctttgaattatcaggccatagtgatttagaacagagaacatcccacccatcctaccttgaagttcctggattcctaagcaaccgtcataggtagtaattagcatctctgaaccattttcagtattttagaaaaacaatggataagacccatgaaaatgagacttcctagaaatattaatcccattgatatgacaactgaaattacctatgtctcccctttatgccagaaatggttattagaggcgttcaggaaccatgaattaag

SEQ ID NO: 102646 - DNA, 549 bp, Homo sapiens
ttgcatagaataaaaagataatatgtgagatagtgaaaaatggtgctggcagtcaggctgtgatggtcctaacagaatgtaaacrtactcccggaagacaagcaaagctcagaaaaagccattccaggatcatgagtaaacaagccagacataaggccactctacaaccacaaaatgactaaacagccccctcttccaacttacgcattggttactgcttgtttacttgtttgcttcttaaagtaaaaatcttcattgctatttgagctgaaaacgtcatagaaagtatttattcttgccttgaaccatagcttcataatgcaccatgcaaatgtgtgttactgctccttatcaatgccaacttgttctcatcctcctgcctccagataaatattatgatgacccatcaccaaattgtttttacttctagacaaaatccaatccagaactggcccccactgccttaaactctcattagaatcacctagaatgcactgaaatctacaagaagcccccacccactctctcttactgagatgtctaacgtgt

SEQ ID NO: 102647 - DNA, 549 bp, Homo sapiens
ttgcatagaataaaaagataatatgtgagatagtgaaaaatggtgctggcagtcaggctgtgatggtcctaacagaatgtaaacatactcccggaagacaagcaaagctcagaaaaagccattccaggatcatgagtaaacaagccagacataaggccactctacaaccacaaaatgactaaacagccccctcttccaacttacgcattggttactgcttgtttacttgtttgcttcttaaagtaaaaatcttcattgctatttgagctgaaaacgtcatagaaagtatttattcttgccttgaaccatagcttcataatgcaccatgcaaatgtgtgttactgctccttatcaatgccaacttgttctcatcctcctgcctcyagataaatattatgatgacccatcaccaaattgtttttacttctagacaaaatccaatccagaactggcccccactgccttaaactctcattagaatcacctagaatgcactgaaatctacaagaagcccccacccactctctcttactgagatgtctaacgtgt

SEQ ID NO: 102648 - DNA, 550 bp, Homo sapiens
tatttagctatgtttactccatttaccctgcacagtatttccgttacttatttaattaaatagctttgataaagtctctcacaaaatgccaagtgaggcaaataagtgcatacttttttttattgtggagaagtatttgtctagcatcttccctcttgttatttggaaataagagtggctgctgctggaaaacagttttaaagttagcaattggacatacttacattttattcatttgtagttttgaacaatgtacaatgtaattttcaaccaatttatttttgaagagtttgctggaaaccattacttgtggcttctaaacatttgcacatttggctagaagcttgcacagtctctgtaggtaccctctcccaaggcaccgtctctctggcctgccctgttaytgactcctcagaacaactccttgagattgctactgtggtttccccatgttttggacgaaaaatctgagacaatatcttgaaactagagactattcaaagccagatttcattttaggcatgctgacttgagtcagaactccaaaact

SEQ ID NO: 102649 - DNA, 608 bp, Homo sapiens
gaagatattttatataaatctcttttagctcaaaatttcaatttaattttcccttacttttttttcagttttatattgtgacctaattgtgtacccaatgttccttttatgtttggcaaagagactcattaattctattacctctagcagataaaaggggacttttgaaatggctagcagctacagatcaataccctaactcaatagagataattattgaaatcactaggagactagcaagctgtcagctgtaagcaatcattttaggcctggaataaatcttcagaaaacacaaagcaaactttaaatgtagtcttttaaaattgagagtcctaggcctacaattgtctttctattatccatttccacagatctgttattattagttcctkataatatatattgatttttaaatactttgttctactatgcttcatattgaaccttaattcctccactttttttcctatccatcatcctgcattgttgtcttattaaactattaaattttgtttacttagtatttaaaagtatgaatatcttatttggatttaagtatttgcagtgatcagtcatggagatataggagaaagttgtcatatctacaa

SEQ ID NO: 102650 - DNA, 493 bp, Homo sapiens
tacaaatgatccaacagtctcaccactggatatatatcaaaaagaaaagaaaaaggaaragaaatcaatatgtcaaatagatatatgcattcccacgtttattgtagcattattcacaatagcagagataaggaatgaacctaagttgcctatcaatagatgaatggataaagaaaatgtggtgtgtgtgtgtgtgtatatatatatatatatatatatatatatatatataaaaaatgaaatattatttagtcaaaaaaaaacaaactgtcattcacaacaacacggatgagctcagatatattaaatgaaataagccaggcacagaaagatgaatattgtattttctcactagtatgtggaaactaaaaagctgattttctactaatagagagtagagtggtggttattaaagggtggataagagagtggggagatggggatagccagaggttggttaaaggatactaaattacagctgtattggaaggac

SEQ ID NO: 102651 - DNA, 565 bp, Homo sapiens
gggattatatcaaactaaacagcttctgcacagcaaggaaaacaataaacagagtaaagagacaacctgcagaatgagagaaattatttgcatactattcatcatacaagtggttaatattaataataaataagaaactcaagcaagtcaacaacaaaaaaattaatttaatttaaaaatgggcaaataaggtgagaggacatttcctaatagaagacaaacaaacggtcaacaggtatctcaaaaacactcaatatcaataatcatcagagaaataccaatcaaaatcagaatgagataccatctcactctagctagaatggctgctattaaaaagacaaaaaataacaaaatgctagcaaggctcagaagaacacttatacactgttggtgggaatgtaaattagcacagccattatagaaagcagtatggaggttcctcaaacaattacaaatgatccaacagtctcaccactggatatatatcaaaaagaaaagaaaaaggaaaagaaaycaatatgtcaaatagatatatgcattcccacgtttattgtagcattattca

SEQ ID NO: 102652 - DNA, 493 bp, Homo sapiens
tacaaatgatccaacagtctcaccactggatatatatcaaaaagaaaagaaaaaggaaaagaaatcaatatgtcaaatagatatatgcattcccacgtttattgtagcattattcacaatagcagagataaggaatgaayctaagttgcctatcaatagatgaatggataaagaaaatgtggtgtgtgtgtgtgtgtatatatatatatatatatatatatatatatatataaaaaatgaaatattatttagtcaaaaaaaaacaaactgtcattcacaacaacacggatgagctcagatatattaaatgaaataagccaggcacagaaagatgaatattgtattttctcactagtatgtggaaactaaaaagctgattttctactaatagagagtagagtggtggttattaaagggtggataagagagtggggagatggggatagccagaggttggttaaaggatactaaattacagctgtattggaaggac

SEQ ID NO: 102653 - DNA, 493 bp, Homo sapiens
tacaaatgatccaacagtctcaccactggatatatatcaaaaagaaaagaaaaaggaaaagaaatcaatatgtcaaatagatatatgcattcccacgtttattgtagcattattcacaatagcagagataaggaatgaacctaagttgcctatcaatagatgaatggataaagaaaatgtggtgtgtgtgtgtgtgtatatatatatatatatatatatatatatatatatawaaaatgaaatattatttagtcaaaaaaaaacaaactgtcattcacaacaacacggatgagctcagatatattaaatgaaataagccaggcacagaaagatgaatattgtattttctcactagtatgtggaaactaaaaagctgattttctactaatagagagtagagtggtggttattaaagggtggataagagagtggggagatggggatagccagaggttggttaaaggatactaaattacagctgtattggaaggac

SEQ ID NO: 102654 - DNA, 584 bp, Homo sapiens
gattttgaatgtcctcataaagaaatgacaaatgtttgaggtgataggtatactatttatcctaatttgataattacacaatgtatacatatattaaaacaatacactttaccccatcaatatgtataattatcgtgtatcartgaaaaacaaaataaaacttaaaatggaaaaaatggactaaagcagtttctcttctccagagctataaacattagtggactggttagtttccaaatctcttttcatttgctcccctaaacccattatcagcccaatatatatgtcactttttctgccttgtatattggaaaatgtatatggctctgtgtttgagtaaataagcctttgcaactgccatatgcaaaggctccacagtattttgctctactgagaagcctactgtttactagcacttatgagtagggctatcaaaacacaagcttgatgaccttgtttctctctctctctttactaaatttactgagacttcattgaaatttatcaatttgacaatctctttcagcttcatatgatatgaccttattcaagcttcattttgtttcagtagattaaacaagagc

SEQ ID NO: 102655 - DNA, 584 bp, Homo sapiens
gattttgaatgtcctcataaagaaatgacaaatgtttgaggtgataggtatactatttatcctaatttgataattacacaatgtatacatatattaaaacaatacactttaccccatcaatatgtataattatcgtgtatcagtgaaaaacaaaataaaacttaaaatggaaaaaatggactaaagcagtttctcttctccagagctataaacattagtggactggttagtttccaaatctcttttcatttgctcccctaaacccattatcagcccaatatatatgtcactttttctgccttgtatattggaaaatgtatatggctctgtgtttgagtaaataagcctttgcaactgccatatgcaaaggctccacagtattttgctctactgagaagcctactgtttactagcacttmtgagtagggctatcaaaacacaagcttgatgaccttgtttctctctctctctttactaaatttactgagacttcattgaaatttatcaatttgacaatctctttcagcttcatatgatatgaccttattcaagcttcattttgtttcagtagattaaacaagagc

SEQ ID NO: 102656 - DNA, 455 bp, Homo sapiens
taacttcaggaaagaatgatgtttatatttcttatcataatgaaaatctaatgattcttgaaattggcctggttgctgatgttatcaccagaaatgcaaaaggttggtttctgccttctgctcagaggaatgctgtagaagtctgagtcaatagccatcatgcgttaatccatccatacasagcagtctagtgcaaaaggttatccagacacagatatgatatggcagctacatggtttcttccctgaaaggatgtaaatgagaaaatcccagccattagcaaacaaaagaacccttaggagtcctgctggtatcaaagaagtctttattccctgactgttctcttttcaccagctcacagtcagataaagaacaaagacaaaaaaaaaaaaaaaaaagcaatcaagagcttagcattacatggttaagtgaaatgtacttttgaaaaaaaaaac

SEQ ID NO: 102657 - DNA, 455 bp, Homo sapiens
taacttcaggaaagaatgatgtttatatttcttatcataatgaaaatctaatgattcttgaaattggcctggttgctgatgttatcaccagaaatgcaaaaggttggtttctgccttctgctcagaggaatgctgtagaagtctgagtcaatagccatcatgcgttaatccatccatacagagcagtytagtgcaaaaggttatccagacacagatatgatatggcagctacatggtttcttccctgaaaggatgtaaatgagaaaatcccagccattagcaaacaaaagaacccttaggagtcctgctggtatcaaagaagtctttattccctgactgttctcttttcaccagctcacagtcagataaagaacaaagacaaaaaaaaaaaaaaaaaagcaatcaagagcttagcattacatggttaagtgaaatgtacttttgaaaaaaaaaac

SEQ ID NO: 102658 - DNA, 455 bp, Homo sapiens
taacttcaggaaagaatgatgtttatatttcttatcataatgaaaatctaatgattcttgaaattggcctggttgctgatgttatcaccagaaatgcaaaaggttggtttctgccttctgctcagaggaatgctgtagaagtctgagtcaatagccatcatgcgttaatccatccatacagagcagtctagtgcaaaaggttatccagacacagatatgatatggcagctacatggtttcttccctgaaaggatgtaaatgagaaaatcccagccattagcaaacaaaagaacccttaggagtcctgctggtatcaaagaagtctttattccctgactgttctcttttcaccagctcacagtcagataaagaacaaagmcaaaaaaaaaaaaaaaaaagcaatcaagagcttagcattacatggttaagtgaaatgtacttttgaaaaaaaaaac

SEQ ID NO: 102659 - DNA, 569 bp, Homo sapiens
agaataaattaaaatattattaagtactccaaaacgtaagctcaataaatagaacaggacaatgtgatgaagagtattgatgggagaggtagagcttagattctgtgttctaagaagcatctcttaaaaagagactttttaagcagagacctaaatgatgagaaaaagacaatcttgggaggaggtgagagcaaggacaccaaggaagcaacaagggcaaggagagaacaaggtgttttcagaaatcaaaaacggcactgtggagtaaagtcttgggagtttaagcagaagagtggcacattctgcttacatttttgaaagaatgctctggcttctatgaaaagaatagattgtttgaggctaatawggacatagggatagcaattagaaggaaatagttgtatttccagttaacaatggtgtcagattaggtagtcagcaatggtggttatggggaaacagacccatatactatttatttgaaaatgtattgtagtatttgctggggatctgcatacaggaaaaaatgacttcctctagccaagaattgggcatctaccacatgactc

SEQ ID NO: 102660 - DNA, 596 bp, Homo sapiens
ctaccaatgggcaatactgtgcctttgcagtatgcagtccctgagcacacttaatgttaaaagttagaagttgcttagcaacccctttactacttacgtgttgtagatacaactgacaagaccaagggcataagcaatgctctacctttctactaacaggtttgcatacrctctcccaagctctcatttattgtaaccctttgaatttgaaatatcagcatctttgtaatggagaagaccacacaattactaaccctttttttttttctagaaatcccttaaggctgagaaggagatagactgtatgttcagtccaaaagaagaaattgctcactaatgagggcaaaacattctcctgtgtccagctgtccccacaggctcattcacagttttgattcagggtcatgctttccatctacggacatactttcccactctttctccgtatcagccattatctggggcttttgtcaattcatcaagtccagtgaagctaagaaaccaaaaattcacttaggtgatatttttcagtctaccttcagtaatgtctaaagaagaacagtctattgtacagctttctagctgaaagaagctat

SEQ ID NO: 102661 - DNA, 596 bp, Homo sapiens
ctaccaatgggcaatactgtgcctttgcagtatgcagtccctgagcacacttaatgttaaaagttagaagttgcttagcaacccctttactacttacgtgttgtagatacaactgacaagaccaagggcataagcaatgctctacctttctactaacaggtttgcatacactctcccaagctctcatttattgtaaccctttgaatttgaaatatcagcatctttgtaatggagaagaccacrcaattactaaccctttttttttttctagaaatcccttaaggctgagaaggagatagactgtatgttcagtccaaaagaagaaattgctcactaatgagggcaaaacattctcctgtgtccagctgtccccacaggctcattcacagttttgattcagggtcatgctttccatctacggacatactttcccactctttctccgtatcagccattatctggggcttttgtcaattcatcaagtccagtgaagctaagaaaccaaaaattcacttaggtgatatttttcagtctaccttcagtaatgtctaaagaagaacagtctattgtacagctttctagctgaaagaagctat

SEQ ID NO: 102662 - DNA, 579 bp, Homo sapiens
aatcaaatcggtgatactgggccacaagaaagttgtgtttctagatgacatgcacctatttttcatatacttttttaaaattggattatcaaaaatttaacaaacattcattacaaacaggcagagcaatttccagtgtgactacctgaataccttctgtttgtaatcatcatctgaatgaagattcaccacatggttacctaaacaatgatgaattatttatacctttaatgaaacttgtatgttaaaatgttagtaattgcattttaaaaaaatagacacacaaaacagaagaaaatcatctgactgagaattaagatactgtgatacacataagacagcttttcacagctttatgatgtattgttgatttaatagcaattgcttttttatataaaatatattttatattagtacacattaattgaaatttgtcctcaaatttagaaatgtttcaatattttttaaatgtgtagtttttttggtagaattgtagcacctggtcattactagatgtttatgtcaaagagaatgaamaacaaaaacagcagatactgttgcatgttttagttgttctac

SEQ ID NO: 102663 - DNA, 605 bp, Homo sapiens
  misc_feature (1)...(605): n = A,T,C or G
tctggcttccatctctggcttccttgagtcctgagagttggcatgttctttgagatccttctctgggaattctgggtcatgagccaaagagctgaaatgcccagtacccattacaatgaccttycctgctaacacaaggaaggaggggcaatagtaggaaagagacagtgggagaaggaaattaatattgattggatgccaatcatgtgctaggcactacgttaggtatttaatatcttttatctttatgtaccatatgtagtcatgtttatgacacccttttacatggtaagttgcaacactggtatttctaaattagcccttgatcttgtcaaatgagtctacttttgtcaaatgtggaggggggctcagagtgtcttttagctgggctttagacaggtctgtcaatctggcaagttagacctgccaggagcccctttttaggcaaagactttcagaaactttctagaaaagaattcatgctaaaggggttgaggcagaacaggcacgtgtttgttgaataactagtagccacgcccacctctttcttgctaaaagaacccagatattagtatccatcacaaggctccgctncgnccatncgc

SEQ ID NO: 102664 - DNA, 605 bp, Homo sapiens
  misc_feature (1)...(605): n = A,T,C or G
tctggcttccatctctggcttccttgagtcctgagagttggcatgttctttgagatccttctctgggaattctgggtcatgagccaaagagctgaaatgcccagtacccattacaatgaccttccctgctaacacaaggaaggaggggcaatagtaggraagagacagtgggagaaggaaattaatattgattggatgccaatcatgtgctaggcactacgttaggtatttaatatcttttatctttatgtaccatatgtagtcatgtttatgacacccttttacatggtaagttgcaacactggtatttctaaattagcccttgatcttgtcaaatgagtctacttttgtcaaatgtggaggggggctcagagtgtcttttagctgggctttagacaggtctgtcaatctggcaagttagacctgccaggagcccctttttaggcaaagactttcagaaactttctagaaaagaattcatgctaaaggggttgaggcagaacaggcacgtgtttgttgaataactagtagccacgcccacctctttcttgctaaaagaacccagatattagtatccatcacaaggctccgctncgnccatncgc

SEQ ID NO: 102665 - DNA, 605 bp, Homo sapiens
  misc_feature (1)...(605): n = A,T,C or G
tctggcttccatctctggcttccttgagtcctgagagttggcatgttctttgagatccttctctgggaattctgggtcatgagccaaagagctgaaatgcccagtacccattacaatgaccttccctgctaacacaaggaaggaggggcaatagtaggaaagagacagtgggagaaggaaattaatattgattggatgccaatcatgtgctaggcactacgttaggtatttaatatcttttatctttatgtaccatatgtagtcatgtttatgacacccttttacatggtaagttgcaacactggtatttctaaattagcccttgatcttgtcaaatgagtctacttttgtcaaatgtggaggggggctcagagtgtcttttagctgggctttagacaggtctgtcaatctggcaagttagacmtgccaggagcccctttttaggcaaagactttcagaaactttctagaaaagaattcatgctaaaggggttgaggcagaacaggcacgtgtttgttgaataactagtagccacgcccacctctttcttgctaaaagaacccagatattagtatccatcacaaggctccgctncgnccatncgc

SEQ ID NO: 102666 - DNA, 563 bp, Homo sapiens
gcataactgtaggtttcctgtagtataaataagtgaacagctaagaatgctaatgttttgccttgaccaagaaaaagctctccataaatgacaaggaatcaccctcaytggactatttaagtttaagtgtttttttttttttttctctaaaggggtaagttaaaccaaaacaatagagataggtcatcatataatacatactactgctttgagatcattaaagaaaaaaaaagttttaaaattgtttaatttccgaagtcctttctagttggcaaactcaactggagaaaagccatgagagtcaccgataaacaccaattcaggcagcagccagttgtagctaaatgcagtcaaagaaggtcagagcctttgccctcttgagactcagatggaaagggaagaaaaggaagcctgggctgggaatgaggacacccaaggaggttaagaagaaaagactacagcagagagagcttggcaagaaaggagcatgcagttgggattccaagcggcagcacccaagggcagctttgcttctcatcaaccatcacagtagagagcagtgc

SEQ ID NO: 102667 - DNA, 563 bp, Homo sapiens
gcataactgtaggtttcctgtagtataaataagtgaacagctaagaatgctaatgttttgccttgaccaagaaaaagctctccataaatgacaaggaatcaccctcattggactatttaagtttragtgtttttttttttttttctctaaaggggtaagttaaaccaaaacaatagagataggtcatcatataatacatactactgctttgagatcattaaagaaaaaaaaagttttaaaattgtttaatttccgaagtcctttctagttggcaaactcaactggagaaaagccatgagagtcaccgataaacaccaattcaggcagcagccagttgtagctaaatgcagtcaaagaaggtcagagcctttgccctcttgagactcagatggaaagggaagaaaaggaagcctgggctgggaatgaggacacccaaggaggttaagaagaaaagactacagcagagagagcttggcaagaaaggagcatgcagttgggattccaagcggcagcacccaagggcagctttgcttctcatcaaccatcacagtagagagcagtgc

SEQ ID NO: 102668 - DNA, 567 bp, Homo sapiens
acagagtctctgggcaattttagagttcttcatttgcaactacgggcagagaaccagaaatcactggccaattgaaaaaagcctctaagatgaaagaataataacacaacgaaagaacgctgaggaaacagatgatgtatgaagcagaaaaaaagcttaaaaatacttaatatcctcaaaagggagggatattaaasgctctgtagagtaaaacattcagcaaacacttaaagatgcctttgaaagtgaaacgtgatctgtgtaatgaaaaaagtgaagataatggttggcatataaagttgagaatatatggcagactagagaacaaaactgcaaagcaattgaaaagaggagagatgagacaagaaaattagggaacaggtgcaggagttatatcatgtcatgaataagaaatccagaaagagagagtagagaacatgatagacaaggctttttcaaggaatttagttttattactgcaattcaaagacatttgtttttgaataaaattgcccaccactaagcatcaagcaaatgaataaacaaagaaaaacctacactaatgga

SEQ ID NO: 102669 - DNA, 595 bp, Homo sapiens
aaataagaacgtgtacactgagcaataaagagatgtaatatcatgaaaacttagtcctattttctgggaacggtgctgtccacatagggaagtgtttcttcagcatcactcttcatactgcatgcctttcaggcctttattatctgaagactgaaagactgaatgagaaatgcatctgatctaatgctgagacagtcgaatttgggaatttgaaatgcgatttaccagagagcaacttgggcttagcacatggtaagtagraactaaaatacacgcattaaggaaggtaaggatgtttacccaaggaatccaaagacagaaaaaactatccaaataagggaaaactttaagcaaattgccatcaaaattttagtgagaaatgtagcttttgtatctatctatctgtctatatggagataaatacttacgtatgagcctctaactatctatcatctatctatgtatctatgtatctatgtatctatgtatctatgtatctatgtatctatgtatctatgtatctatctatctatctatctatctatctatctatctatctatctatctatctatgtatctaatctatcttcttggt

SEQ ID NO: 102670 - DNA, 595 bp, Homo sapiens
aaataagaacgtgtacactgagcaataaagagatgtaatatcatgaaaacttagtcctattttctgggaacggtgctgtccacatagggaagtgtttcttcagcatcactcttcatactgcatgcctttcaggcctttattatctgaagactgaaagactgaatgagaaatgcatctgatctaatgctgagacagtcgaatttgggaatttgaaatgcgatttaccagagagcaacttgggcttagcacatggtaagtaggaactaaaatacacgcattaaggaaggtaaggatgtttacccaaggaatccaaagacagaaaaaactatccaaataagggaaaactttaagcaaattgccatcaaaattttagtgagaaatgtagcttttgtatctatctatctgtctatatggagataaatacttamgtatgagcctctaactatctatcatctatctatgtatctatgtatctatgtatctatgtatctatgtatctatgtatctatgtatctatgtatctatctatctatctatctatctatctatctatctatctatctatctatctatgtatctaatctatcttcttggt

SEQ ID NO: 102671 - DNA, 595 bp, Homo sapiens
aaataagaacgtgtacactgagcaataaagagatgtaatatcatgaaaacttagtcctattttctgggaacggtgctgtccacatagggaagtgtttcttcagcatcactcttcatactgcatgcctttcaggcctttattatctgaagactgaaagactgaatgagaaatgcatctgatctaatgctgagacagtcgaatttgggaatttgaaatgcgatttaccagagagcaacttgggcttagcacatggtaagtaggaactaaaatacacgcattaaggaaggtaaggatgtttacccaaggaatccaaagacagaaaaaactatccaaataagggaaaactttaagcaaattgccatcaaaattttagtgagaaatgtagcttttgtatctatctatctgtctatatggagataaatacttacgtatgagcctctaactatctatcatctatctatgtatctatgtatctatgtatctatgtatctatgtatctatgtatctatgtatctatstatctatctatctatctatctatctatctatctatctatctatctatctatctatgtatctaatctatcttcttggt

SEQ ID NO: 102672 - DNA, 589 bp, Homo sapiens
acgctggctccagagtccatgctcttaacatctgtattatgctgcttctccctaagaacttacaaatgtcatccattatttacatttttattaaaagatagaggttcagaattcaatgcagaaatgtttgataatatagttcttaaattgggaatattatggaataagggccttgggaaactttgctcatcaatacttgagttagtgaatgaatgaatgagtaaatgagtgaataaatgagagcaagtcttgcatgattaaagccagaaatgtgtcttagaaccatattcaggaaatcagcattggttagaagacatggacattatactattataatgtcacactaagcataaaatgacaattctgatgtatgtactagyagtgtttttgagacataggcatctccctgctgagtctcagacttcaggtggaggaagcttgccaccccttgggaagcacccaacgtgatgatcctatgtcagcaacgtgtgtgtaaaggtggtttgccaaaatccagcactggcccatgtaaaacacatttttatctgactttttaaagccacatttggagatccattagcactgtata

SEQ ID NO: 102673 - DNA, 548 bp, Homo sapiens
gccatggcatatttggagccccagtcttcatctagcccagcaatcctacctccagtaattacaccaatacgaggctttygtcatttcacatttttgcacctaaagtgtgtgaaagcagttcagttccaaatgacatacaattttacgttcaaaagctcatttggacccatgagtccaaaccaaaccagcaatagtcctcagctacaggaggggaataaacaaagcagatccttaaagacatgctgatggcaaatttattattatttttaaatttggacatgcatttcatacataattcaaaagttctttagtaatagatatttttttaaagtagcaccatcaaaatcaagccaccaaaaattagagggagagagcactaaatttttttaaggagacaaagatatatcatgaagactaaagaagcatatgaatctcaaagtccttagagaaaaaaacagaaacatgtaagcagtgcaaaaatataagataagaagtaccactcgggtaggagagaagatgtattttaagttgagcaaaggtctgattgt

SEQ ID NO: 102674 - DNA, 606 bp, Homo sapiens
gttgattgtcccaaattcaaggcttgcactccctgttagggtatcatggatagcttatccttcactttcccactcaaaagtkttatcggtcttcacctatctgccttctaaaactactgcagactgaagctatctcactttcctcagggatatctgagtatttctcatctgtataattcattgggtaattaatcacctgtaatttttaatatatccttatgatagttcattttaatgtgtcagcttgactgggctatggggtactcagatatttggtcattctgggtgtttctgcaagagtgtttttagatgagatgaacatgtgtataggtagactaagtaaagcaatagccctccccaatgtaggtagggcttatccaatcagttgaaggccttattaaaacaaaatgctaatcctccccaaagaaagaaggcctaatgatcttcgaactgaacatcattttttgtcctgctgtcagacttgaacaataaacactggctcttcctgtgtttcgagcctgccaacctttggaatggaactacactatcagctctcctggttctcaggcccttagactcagactgaaactaaacaattcactctcc

SEQ ID NO: 102675 - DNA, 632 bp, Homo sapiens
tcctcaaatagagctctgcaggattccagggagactctatattttacttgtcctcctccgcatcaacagggttcccaccctacaccctctacaaagggacgtccaygttttgcttcagggagggccctgttactaagtctttacctaaacccatgcactctggtgaagcactatctttaggtatcaaggccatttcagatgatttccatggaatgttctaggatggagccaccaagttctccagtttgcctgcttctaatttaggactgaggctgtattttctacatctggttcttccctgtgggtcagccatttctggctgtagctttaacatcctctgtctgccctgtcaataaactgtatgccttggtcccttttgtgagaaaagtcatatcttgtttgcaataaaatatgaaaatgggttctcttcattatgtagaaacattatgtggaaactttcatgtgttcccttcattatataccaggaagctgggtgcaatatcactgaacacagtggtttccttagcagcagaagttaaggatcctaatatttagtctcgtccccctcaacatgaactagattatcattgtcacagattttgctggtcttaggaatgttgagccctttatat

SEQ ID NO: 102676 - DNA, 374 bp, Homo sapiens
cacaaaccccaatagcccatgtgtaacatgacaagcacagagaggtcgcagtgactcttctctgatatggatgctgtaccagatgtagcccacagtccttgtgtggtgtttatctgtcctaccacacaccgaggccccgtcacatgctgggaagagcagcagcctctggaggatagggagcaagaccaccaggttctctggaagaaaccagcgctggtctggcacccatgctcattggttcyatccaactccagcacttctcttgaacaacagtcaagggggatcattggtcaaaagttcttgaagacagcaaaaaagaaggttgtgaaaaactgagctctcttaggagactgacccatcaatagagtcaacgt

SEQ ID NO: 102677 - DNA, 577 bp, Homo sapiens
cacattttttgttattattttattaatggatgcactcttttactagactagatgctttaatgagaataggaaaattttgtcccagggcctagcatcatgcataatagatgctcaataaatgttattttgcataaaattaatgaatgaaataagtattgtgtaatgttatactccaagaagcctctcctatcatataccttgccatgtaggggttatagtaggggctaaaaatgtggtcaccaggaaagaggaatggtactataccaccttttatgaaaaaaaaaatcaaaaactcactagcatcatctgtcttctaatttgtctgaatattacaaactgtctctcggacctggttttggaggaataaatatataaagtaaattttcaggaagcatgttttgtgttttattttttaattttggagggttttgctagtagttttactgttttccaaacaagcacactactacagataagctgttcccyactaggcatcattctgatgaagggcattcaagctggggactcctgaggataagtatacaatacttgtcataaaagctaaaaatatgtgtta

SEQ ID NO: 102678 - DNA, 600 bp, Homo sapiens
ggttgagaagaagaagagacatctaggcaaacttatattcamctttgaagatttagctcaagcatctctcttataaaagccttttctgactctttatcctcaagcaaaatcaagaagaatcaattccttcatttgcagcccatggtatccagtgcagtcttctttcacaggccctccaacactgctaccctcactcatttatgtaattgtctatcttcattagactgacatcttcctgaaaggcaagactgacgttctttctacctctgcactccgtactcttcctactgatgtttcataaatttctgtggctaaatgacattttaaaattaccactccttacttaccaaactgaaactgcttgttgtccatgaggcgaatagatgccggagcacatctctgttttaaaaagaaaaaaaaaagtgatacaaatttaatacagtaagaagctagacaggtagaatgtgaatattatctttctatatttaagagatcaagagcttagttcctaaggatttacagaggaaaaaaagttaacttttcatatacttttatgaagacaaatatcaatgacttctataaaatatttggagagaagaa

SEQ ID NO: 102679 - DNA, 600 bp, Homo sapiens
ggttgagaagaagaagagacatctaggcaaacttatattcacctttgaagatttagctcaagcatctctcttataaaagccttttctgactctttatcctcaagcaaaatcaagaagaatcaattccttcatttgcagcccatggtatccagtgcagtcttctttcacaggccctccaacactgctaccctcactcatttatrtaattgtctatcttcattagactgacatcttcctgaaaggcaagactgacgttctttctacctctgcactccgtactcttcctactgatgtttcataaatttctgtggctaaatgacattttaaaattaccactccttacttaccaaactgaaactgcttgttgtccatgaggcgaatagatgccggagcacatctctgttttaaaaagaaaaaaaaaagtgatacaaatttaatacagtaagaagctagacaggtagaatgtgaatattatctttctatatttaagagatcaagagcttagttcctaaggatttacagaggaaaaaaagttaacttttcatatacttttatgaagacaaatatcaatgacttctataaaatatttggagagaagaa

SEQ ID NO: 102680 - DNA, 613 bp, Homo sapiens
attgcgctggagttccaactttcactactaggtagaaacgttggagaaatgcatgacttcagttttttccaagaggggaaaatccaagacattaaaatgtgctcctttccctatgcatttttactcttctctcttaactactaaattagtcagccagtgatgtgtgggtgtgtgagagacacacatgctcagtttgtacttttcagccttctagggattttggatattgaactgataaatatggattttcttctgttaaaataagaaaagattgcctacactttaattttttttccrgattcttagtttgaagatttctatgcaggtttgctagactgtacaagatatcattctgggttttctttcattctttgttatatatttggaatagatgctgtagattccatgttattatcctggggctatttttgtataattttttttcagtttattagtggccatgatggggctgtgaaaaactaggggcttaattattccataaaattatatttaatcaccaatttaaaaaatacccctagataaactgacctggagaccatagactttaagggagaataaatacaatttttcaatcaagaattagggacataga

SEQ ID NO: 102681 - DNA, 613 bp, Homo sapiens
attgcgctggagttccaactttcactactaggtagaaacgttggagaaatgcatgacttcagttttttccaagaggggaaaatccaagacattaaaatgtgctcctttccctatgcatttttactcttctctcttaactactaaattagtcagccagtgatgtgtgggtgtgtgagagacacacatgctcagtttgtacttttcagccttctagggattttggatattgaactgataaatatggattttcttctgttaaaataagaaaagattgcctacactttaattttttttccagattcttagtttgaagatttctatgcaggtttgctagactgtacaagatatcattctgggttttctttcattctttgttatatatttggaatagatgctgtrgattccatgttattatcctggggctatttttgtataattttttttcagtttattagtggccatgatggggctgtgaaaaactaggggcttaattattccataaaattatatttaatcaccaatttaaaaaatacccctagataaactgacctggagaccatagactttaagggagaataaatacaatttttcaatcaagaattagggacataga

SEQ ID NO: 102682 - DNA, 613 bp, Homo sapiens
attgcgctggagttccaactttcactactaggtagaaacgttggagaaatgcatgacttcagttttttccaagaggggaaaatccaagacattaaaatgtgctcctttccctatgcatttttactcttctctcttaactactaaattagtcagccagtgatgtgtgggtgtgtgagagacacacatgctcagtttgtacttttcagccttctagggattttggatattgaactgataaatatggattttcttctgttaaaataagaaaagattgcctacactttaattttttttccagattcttagtttgaagatttctatgcaggtttgctagactgtacaagatatcattctgggttttctttcattctttgttatatatttggaatagatgctgtagattccatgttattatcctggggctatttttgtataattttttttcagtttattagtggccatgatggggctgtgaaaaactaggggcttaattattccataaaattatatytaatcaccaatttaaaaaatacccctagataaactgacctggagaccatagactttaagggagaataaatacaatttttcaatcaagaattagggacataga

SEQ ID NO: 102683 - DNA, 348 bp, Homo sapiens
tcttctgaaatatttgtttggctgtctggaatttaattttaagtcgctgaactaatatttaattaaggagcatgtgaatacttcagggcattcttaaatgagatagtcttaaggcaccagcatgtcttaatgcactgattgggaaatcctagatcagcatatgcatttaatatatttaaccacatagattcaactcttagtgtctgtgccttctctcttccctctgtgaggcccagaagaagtaagatagttaagagaggaaattcccagcrtagtggttgtcagttctagctgctctacataacagtcacctgtgaatcatccttggtcatgaaaagatgtacagtt

SEQ ID NO: 102684 - DNA, 573 bp, Homo sapiens
ggtgcttcttatgtttaccttttacycacatcacaatccatttcactttactgaaattgcagtgtttaaggttaccagtggtctcctaattgtcatcaggacctcttttcaacttgtatcctacttaatgtccctgcagtattgaatgatgttgaccaggacattttcctgattattgtcttctttcttcatctcctctttatcttcagtgttgatatttcctttgttatctgtcccctgcattttttcatttatcttaagctgctagtagttttttgctggttcccaaatgctccagagctggatttctagtggaacctttccacctaagcaagtatttcaaatttaacatctccagacctcctttgcctcccccagttttgctctctgatatggtttggatttgtgtccctgctcaaatatcatgtggaattgtgatctccagtgtttgtggagggcctggtggagatgattggatcgtgagagtggattttccccttgctgttgtcatgatagtgagttctcacaagatctcacaacattgttttacaagatcgattcacaagattgttt

SEQ ID NO: 102685 - DNA, 573 bp, Homo sapiens
ggtgcttcttatgtttaccttttacccacatcacaatccatttcactttactgaaattgcagtgtttaaggttaccagtggtctcctaattgtcatcaggacctcttttcaacttgtatcctacttaatgtccctgcagtattgaatgatgttgaccaggacattttcctgattattgtcttctttcttcatctcctctttatcttcagtgttgatatttcctttgttatctgtcccctgcattttttcrtttatcttaagctgctagtagttttttgctggttcccaaatgctccagagctggatttctagtggaacctttccacctaagcaagtatttcaaatttaacatctccagacctcctttgcctcccccagttttgctctctgatatggtttggatttgtgtccctgctcaaatatcatgtggaattgtgatctccagtgtttgtggagggcctggtggagatgattggatcgtgagagtggattttccccttgctgttgtcatgatagtgagttctcacaagatctcacaacattgttttacaagatcgattcacaagattgttt

SEQ ID NO: 102686 - DNA, 557 bp, Homo sapiens
ccccagattgactaatatattcaataaaagtgtagtaaaaatgcaaatagtttttttccttcagttggcatttgacttttctaacaacgtatactggaaatgcaaagggccaaaaataggaaagataatcttgaataaggaaagtgaagctggaggacttttcagacttatcaaaagccacagtaatcacagtgatgttctaatagactaatacaccaaagaaagaaaacatagattcagaagcagagtcacacttagaatgatttgaatcatgacaaagattacattgcagtgcaatgggggaaagggtggtcttttcaagaaatggacctgggtcaaaagaaaaatatatatattaacacccaccccacactatgctcaaaaataaattcatgatgaattatagatctaaaagtggaatataaaacctttagaagaaaacagaggaaaatatttcatagccttgatgtaaacaagaatttcytaacaagacccaagagcaccaacaataaaagaaaaatattaataaattgcaatatatattaagaatttgtgtt

SEQ ID NO: 102687 - DNA, 453 bp, Homo sapiens
atgactaaaattatacccattgaacagcacctcccaattttcgtctccctctaacccctggtaaccaccattttactttctgatttgatgagttttactgttttagacacctgatattagtggattcatgcaatatttgtccttctgtgactggcttatttcacttagtgtaatgtcctcaagattcatccatgttgtagtatatgacgggattttttttaaggatacataatatttggttgtatgtatattaccacatttattttatccattcaactgtcctggacatttaggtggttgttagtgtcttgactgctgtgacaaaataagtacttttaaaagtctcacatttgcaagttcaatttgaacctttttttagtctgcttgtacttctcttatcaagcaagaaagcacttttctgcttttygtattactagtaacagtggagattaa

SEQ ID NO: 102688 - DNA, 625 bp, Homo sapiens
tatgcttcctgatgcatttagcagacactaaacatttgtcatactctaaacaaagttacaaaggactagaagaattcttgttctgtatttagaaacccactcacrttacttgatatttgggtatttaagtcatgaaaggtatttcttctaggaagcagtgattctaaagtgtatgcttaaccagtcagttgagtgtctactcttgtgtgttcacaagtgtgcacaaagtttttggtaaattaagaatattatttcaaataaattaatttcatccccataggagccagtttatcagataattcgtttctcatttctgcaaatcaatacacaatgagctcatattcagataaatataatagtttttctttatttcatcattgttcattgattgcaacccatttctaaaacaaattatttaatataaccaaactcctttaacttctcaacttttcccacgaaaactgtgaaacattatataaaatctttaatcaataggatatgatacatatttcatcattttgtttcaggttttggttgtgataaataacactgaaaaaccatcctaatatatgtattaactttatcattagaaaaggggattgttcaaaaaaaatatcaatacaca

SEQ ID NO: 102689 - DNA, 625 bp, Homo sapiens
tatgcttcctgatgcatttagcagacactaaacatttgtcatactctaaacaaagttacaaaggactagaagaattcttgttctgtatttagaaacccactcacgttacttgatatttgggtatttaagtcatgaaaggtatttcttctaggaagcagtgattctaaagtgtatgcttaaccagtcagttgagtgtctactcttgtgtgttcacaagtgtgcacaaagtttttggtaaattaagaatattatttcaaataaattaatttcatccccataggagccagtttatcagataattcgtttctcatttctgcaaatcaatacacaatgagctcatattcagataaatataatagtttttctttatttcawcattgttcattgattgcaacccatttctaaaacaaattatttaatataaccaaactcctttaacttctcaacttttcccacgaaaactgtgaaacattatataaaatctttaatcaataggatatgatacatatttcatcattttgtttcaggttttggttgtgataaataacactgaaaaaccatcctaatatatgtattaactttatcattagaaaaggggattgttcaaaaaaaatatcaatacaca

SEQ ID NO: 102690 - DNA, 415 bp, Homo sapiens
ttgatagcgaaaggtagaaaagatagatggtaaacagatagatagatgatagataaagaaaatacatagctgttccagaaaacagaaatggataacttcatgaaccaaaagcaragtaatatactttagaaaggaagcaggccagaaaacccacagttgcaaagcaaatagaatttccaactgcctcttgtagccccttcctggaagtagtcacagcccagggtgtttgacttcttcctctgttttttgtttgtttgttgtttgcttttctctggggttttgttgttgtttgctttttttaaaaaaaaattccctttccctgcttttttgtcacagcagcctttgtcacttcaaacaccgcaagtgttctttaaaaaaaattatatcaacctttcaattaaaatgcaacatgtct

SEQ ID NO: 102691 - DNA, 415 bp, Homo sapiens
ttgatagcgaaaggtagaaaagatagatggtaaacagatagatagatgatagataaagaaaatacatagctgttccagaaaacagaaatggataacttcatgaaccaaaagcagagtaatatactttagaaaggaagcaggccagaaaacccacagttgcaaagcaaatagaatttccaactgcctcttgtagccccttcctggaagtagtcacagcccagggtgtttgacttcttcctctgttttttgtttgtttgttgtttgcttttytctggggttttgttgttgtttgctttttttaaaaaaaaattccctttccctgcttttttgtcacagcagcctttgtcacttcaaacaccgcaagtgttctttaaaaaaaattatatcaacctttcaattaaaatgcaacatgtct

SEQ ID NO: 102692 - DNA, 577 bp, Homo sapiens
aaaaatactttagtttttctagctgtgttttcatgtaatcactgaaattatttttaattggttttaagcattcattgattccatwtacaccacctgcaaaaaagttacataggtgatcgctaacaatactagaattcgccccatccaaaggaaacattagagtagaaaaagaaaaaggatttgagaatccagtaggaaattcagttaatcattccttccctgttactcaactaccttaacattgtcaggtttacctgaacataaacttcattttcttaattgttcttagaacgaagggatatgtttattgaaatcagtaattaagaatattttgggacagttatgatttacttagccagtgaagcagtttctattcccaaatccaggcaaagagaacaataagattaaacgtagcctaagagatttcctttttgtcaaataatgtgattttgctatgtatagaggagatgtctatatgtaagggcatatttatgaccagtagttcctaaaattaaggggactattattgtgttactcaaggtatcagttgtataggatacattatgtcatatttcaa

SEQ ID NO: 102693 - DNA, 577 bp, Homo sapiens
aaaaatactttagtttttctagctgtgttttcatgtaatcactgaaattatttttaattggttttaagcattcattgattccatttacaccacctgcaaaaaagttacataggtgatcgctaacaatactagaattcgccccatccaaaggaaacattagagtagaaaaagaaaaaggatttgagaatccagtakgaaattcagttaatcattccttccctgttactcaactaccttaacattgtcaggtttacctgaacataaacttcattttcttaattgttcttagaacgaagggatatgtttattgaaatcagtaattaagaatattttgggacagttatgatttacttagccagtgaagcagtttctattcccaaatccaggcaaagagaacaataagattaaacgtagcctaagagatttcctttttgtcaaataatgtgattttgctatgtatagaggagatgtctatatgtaagggcatatttatgaccagtagttcctaaaattaaggggactattattgtgttactcaaggtatcagttgtataggatacattatgtcatatttcaa

SEQ ID NO: 102694 - DNA, 593 bp, Homo sapiens
tttgtggggagcaattcatgatgggcgttcttgtctggtttccccccactccgtcccctgacgccgagtaacacttaaacctttctagttgcmaagtcttttcagagttttttttttaggaaataagttttgaaaattctagtgcttaaaaaatgtatatatatatatatatgtatatttatagccttttattttccctgagtacatgttggccactacattccaaattgatctcaaatggttttccagcttgttggggggtaatgaaaaataaatggagaatatatttacatgccctcctattcattcttttagaagtctcataaatagtaaatttcctattttaaaagccaggacattttcaacctcaaatatttggaatttttaaaggccatattaaaatggattacttctgctatctataataaatatgaattgtgaaaataaattgagggaaaataatgtaggttttaaaaagttccatttagaaagggaagaatgagacgtaatagaaaataaacgatgtagtgtagtgacttagcattttatttcgtctatataactaggcttaattttaacaccttaattttaac

SEQ ID NO: 102695 - DNA, 458 bp, Homo sapiens
cagcagctgatagactcagcaacaggcagccaggagctctgaggctcacagctggcagtctagttccactcagtctctacttgagaaattctttctttggaagtacagcagaggccttaggtgartggcttgtctgctatggcagagattagaggtgctgccagactgccataagtattaggcagtaacagcagcagctgcttatatgcatgtgaacagctggggaattaatttggtatgcattctcaggagccactcatctgctggcagaggtagcagaagaatgcccttagtgtaagtcctctacaaccatacaccaaatgtgctccctgcatttcaaattccattgtagaaagtctctgataatctcacttataccatgagccattcctcagtatctgtcctcttcctgttagtgttctacaattcctttctccttaatttttctccgctttaca

SEQ ID NO: 102696 - DNA, 558 bp, Homo sapiens
ccaacgcgttcactgcccacagtccccacacaaacttctttcgcaggctcacaacatagtccctctgccccgtgccctttttgcaatagtctgccagtcccctaagtcttagctctgcctatttaacagtagtggtgtctcagaacacacacacacacacacatacacacacacacacacacacacacacacacacgatccctgacatatttggcaagagtaggccctgaaggtttttawtattttggttctttaacccagtggaattactgaatgatttatttaattagggtggggatggagtggatccatttgtttgatgctaaacagcctgagctcgcagttcccagggggcatatctctaaatggtctgaaatgagatttgcagtggttttcttaatgcaattcccaacttctctccaaatgccttttgacatttggcaacatttcatgcctcttcccctttcggttttcatccttgttttctctcccttctcccacgacctcggtagtcttctgcaatccagattctcagacttcaggtttttctccctctgc

SEQ ID NO: 102697 - DNA, 558 bp, Homo sapiens
ccaacgcgttcactgcccacagtccccacacaaacttctttcgcaggctcacaacatagtccctctgccccgtgccctttttgcaatagtctgccagtcccctaagtcttagctctgcctatttaacagtagtggtgtctcagaacacacacacacacacacatacacacacacacacacacacacacacacacacgatccctgacatatttggcaagagtaggccctgaaggtttttaatattttggttctttaacccagtggaattactgaatgatttatttaattagggtrgggatggagtggatccatttgtttgatgctaaacagcctgagctcgcagttcccagggggcatatctctaaatggtctgaaatgagatttgcagtggttttcttaatgcaattcccaacttctctccaaatgccttttgacatttggcaacatttcatgcctcttcccctttcggttttcatccttgttttctctcccttctcccacgacctcggtagtcttctgcaatccagattctcagacttcaggtttttctccctctgc

SEQ ID NO: 102698 - DNA, 558 bp, Homo sapiens
ccaacgcgttcactgcccacagtccccacacaaacttctttcgcaggctcacaacatagtccctctgccccgtgccctttttgcaatagtctgccagtcccctaagtcttagctctgcctatttaacagtagtggtgtctcagaacacacacacacacacacatacacacacacacacacacacacacacacacacgatccctgacatatttggcaagagtaggccctgaaggtttttaatattttggttctttaacccagtggaattactgaatgatttatttaattagggtggggatggagtggatccatttgtttgatgctaaacagcctgagctcgcagttcccagggggcatatctctaaatggtctgaaatgagatttgcagtggttttcttaatgcaattcccaacttctctccaaatgccttttgrcatttggcaacatttcatgcctcttcccctttcggttttcatccttgttttctctcccttctcccacgacctcggtagtcttctgcaatccagattctcagacttcaggtttttctccctctgc

SEQ ID NO: 102699 - DNA, 558 bp, Homo sapiens
ccaacgcgttcactgcccacagtccccacacaaacttctttcgcaggctcacaacatagtccctctgccccgtgccctttttgcaatagtctgccagtcccctaagtcttagctctgcctatttaacagtagtggtgtctcagaacacacacacacacacacatacacacacacacacacacacacacacacacacgatccctgacatatttggcaagagtaggccctgaaggtttttaatattttggttctttaacccagtggaattactgaatgatttatttaattagggtggggatggagtggatccatttgtttgatgctaaacagcctgagctcgcagttcccagggggcatatctctaaatggtctgaaatgagatttgcagtggttttcttaatgcaattcccaacttctctccaaatgccttttgacatttgrcaacatttcatgcctcttcccctttcggttttcatccttgttttctctcccttctcccacgacctcggtagtcttctgcaatccagattctcagacttcaggtttttctccctctgc

SEQ ID NO: 102700 - DNA, 636 bp, Homo sapiens
tcatcgtaatgaccttgagttatcaaggaaatgtttcattgcatttgataggcacatttaagaaagtagggtagagggaaacatttaagatgagatctccatccaaaatatttcatattgctcaaattagacttagaagagataagcattcagcaagctgagtaccttgattatgcagaatgacttaactttctaaaagtcatgggcagctaagaatttaatatataagaagaagcatttacgtcatctttcctgcccccaatgatttcaaattcttattggtaatataagttttcaaccttgctaaatgactttgcatcttaataaagaactttgaragaccaaaatgccttacaatcccaaaggagtcaagttccagtaatataattctgggcactaagaacacagggggaaagtttgatgggccaaaggctttttctggttatccatgcaaggagctgttgactttcctttgtgtgaagatggtcctgtaaaaagaattgtcttcttagttgctcatgtcctttggagtcataacctcccgccctctagacctgaatcttgcctttaagacacagtgcagagtaagtcaaacatgctcatggccaagaagaaggctgaagggtccccagagaa

SEQ ID NO: 102701 - DNA, 636 bp, Homo sapiens
tcatcgtaatgaccttgagttatcaaggaaatgtttcattgcatttgataggcacatttaagaaagtagggtagagggaaacatttaagatgagatctccatccaaaatatttcatattgctcaaattagacttagaagagataagcattcagcaagctgagtaccttgattatgcagaatgacttaactttctaaaagtcatgggcagctaagaatttaatatataagaagaagcatttacgtcatctttcctgcccccaatgatttcaaattcttattggtaatataagttttcaaccttgctaaatgactttgcatcttaataaagaactttgaaagaccaaaatgccttacaatcccaaaggagtcaagttccagtaatataattctgggcactaagaacacagggggaaagtttgakgggccaaaggctttttctggttatccatgcaaggagctgttgactttcctttgtgtgaagatggtcctgtaaaaagaattgtcttcttagttgctcatgtcctttggagtcataacctcccgccctctagacctgaatcttgcctttaagacacagtgcagagtaagtcaaacatgctcatggccaagaagaaggctgaagggtccccagagaa

SEQ ID NO: 102702 - DNA, 601 bp, Homo sapiens
aaagcgggaggtttggaaaagatttcactggttctcaatggccaggtgcagagccgtatttaagatcctttaccatagagattcagattattttgtcagttctttctttaggccagctatgctgtctttaaattcagcaccatggatagaggagattaggggcagggatgcatgaagcaaaaccctgcctggggaagttttagtagcacacaaaatgattacttttattctcaggaatggtcttatgagttgagaagccctatacaggacacctttgctgccctgaatgaacacctgagctgaaataagttttactaaaaagcattcacatcgaaataaaaatattaagatttgaattccagtatttatgtttcctaggtacatgactttgtgcctggtaaactttctgagaaccaacttctgctgtacagatatgtttgggaaactactaccctgagaagatgtagagtgtacttctaagttgggtttacattctggstctactctttactttgggatcttggacaagttacttaaattttctatggctgttttctcatctcttaagaaggtgaaaggggtactttattcaaaatgttga

SEQ ID NO: 102703 - DNA, 612 bp, Homo sapiens
cgtcacttactgtgggacagaaaaacgtaaaagttctgggtgctagagctagggagagtgggccaggaaagaaaggataaaagattgctatactgttttctggtttgttgaaggggtgagtgtaatttagagaattaaacgctaggagtcctcttcatgatcctatgcaaaaggctcaccatccacacatcgtagctgcaggcttgttgtgatttgctatatgagactctagaatcttattgagaatggaaaagaactcatataatatgcatagaaatccagaagctctgcctaatggtcttggaaattgtgcctctaaacaggsatccttttgcttcattcattcatttatatattcacatattgtacattaattaatttatactcaataagcatttattgataatttactgtatctaggcataatgttaaggattatagcagagaaatatgatttagactaaaggctgccatcaggcattggggaacacaaaacatatatgaaaatcattaattaagtgaatcaataaatattaagtatttaatattgtgtctggcaaataattgggatttaatatttgttagatgagtttactgtaagtttttattatt

SEQ ID NO: 102704 - DNA, 588 bp, Homo sapiens
cacaatttcaactgtagacctcatacatgtgtgtagtttagaacctcaccagtgggctctttcaatgtgtgagggtgacaatcctaacagttggcagggtatgcatagaaaaaacacaatctcacytgtgtgccgggccctgtaattacactgtctgtaacatttgagggctttataaggtatgtgagtgagtggtaattctttatgaccttcatacaaagaggagacccagaatcttacctagtaccctaagcctagctacaagagacagtatctctcctatttgctgactcaagttacaatagttactattgcaccttgatctggatcatatattttatatatatcacaatatttcctgagggcaatatatatatatatcacaatatttcctgagggcaggcaccaggcaagagagtcacatcacctagatgctcagccagatatgctacaatcccttcctgaaagcagggtacaggcagcagagtcaaatcatagaagtgctaggctcagcaatatgtctcaataccttctgtgggcagtgccaaagcaggaggatagtcatattaccaaggtgctgggtccagt

SEQ ID NO: 102705 - DNA, 501 bp, Homo sapiens
gaattcaggagacaaaactattagtttaactggtgaggctaacttacccctaacagaaaaacaggtcatcagcttgccatgcataatggctgctcagggaataaagatttatgacacagaaataaggtcactttgaaatatgcttttagatttagattttggcaaggcttccaaatttaagaaaaagacaaggtggtagagagttcttatgaggcttatacaaggagatactcaaatggaattggggaaagccattctggggcaaaggtctgtagtcaatagatacctgaaacctaactctgtacttccctttaraggagggattctttctgggtctatggatgagattcagggaattggcgaagcctctgaaattttaagccaaatgtcacatgcatgcacatatgtgcattttgcctggtgaaagcattcagagcttttgtaaaatctcagaggccccttgattaagaaaatttaagagaaatactgtacttgatagag

SEQ ID NO: 102706 - DNA, 549 bp, Homo sapiens
tagagcccactgtcatatctttcaataggattacgtgtactgtttccccaagaaccatcctgtgggtcaagaagcagaatggggaaaaggcagcaagcactcactgtccggttgctggggtgctcacctgagrgcccagtgctgtggggaaccccaggctgctgtcttggctgccctaggtgctcggctggcaattcctgggccaccctgacccacagtgaggtcagtagagacagcctggtgtcctcacaggacgcagctgcaaacataagtgaaccggaaaggctgctcactccttggctacccatgtgtccccacatcagttcctgcatctggaagcagccgcagtggcgaccacacagtgacttcccccaggacgtgtctctgcccctcccaccctgctcctgcagagggccctgggtcaggggttctcaagaccccagagtccctaaccagaaatcagaggggaaggttcctactgtacccgcctcccaaccaatgggtttttcctccttattctgaacaaagcacgccacgcacgcaattcca

SEQ ID NO: 102707 - DNA, 549 bp, Homo sapiens
tagagcccactgtcatatctttcaataggattacgtgtactgtttccccaagaaccatcctgtgggtcaagaagcagaatggggaaaaggcagcaagcactcactgtccggttgctggggtgctcacctgagggcccagtgctgtggggaaccccaggctgctgtcttggctgccctaggtgctcggctggcaattcctgggccaccctgacccacagtgaggtcagtagagacagcctggtgtcctcacaggacgcagctgcaaacrtaagtgaaccggaaaggctgctcactccttggctacccatgtgtccccacatcagttcctgcatctggaagcagccgcagtggcgaccacacagtgacttcccccaggacgtgtctctgcccctcccaccctgctcctgcagagggccctgggtcaggggttctcaagaccccagagtccctaaccagaaatcagaggggaaggttcctactgtacccgcctcccaaccaatgggtttttcctccttattctgaacaaagcacgccacgcacgcaattcca

SEQ ID NO: 102708 - DNA, 570 bp, Homo sapiens
tgggctgtggccacttgtgtccacctgacttgtctccgcctgatggacccacctccccatgggctttagaggagacagtgcctgccaagcctgtggcagatacaagtgctcactaactggtggtgttcctggtgataatctgttgggaggaggtgaaggcaggtcttcctggggaagttgcaaataggctgaagtctacaggctcagccacttyccccatcattcattcattcattcattcaacgaactcttaattgcagaacagctctgcccagccttgtgccacgagctgtgatttctgagctcataagacatggtccttgtgggcaaggtctgtgtgggcaagagcccactgaacagactcctggaggaggatggcaagtgtgctctggaagtctacttctctgaggagggataagatcttggaacgcaccctctaactgttttcccatctctccattgctcagtgtttgcatttatggctgggagttggaaagatggggcacagggaaaggtgggacacagagcagggagggaggcagggcctggctgtgctgctggactagggct

SEQ ID NO: 102709 - DNA, 621 bp, Homo sapiens
tttagacgtttaacagtttaaattagactttctctttctgaaggagattttcatggtgcttgatccagtttcctgctccccgctcttcttttccaacgaaatactaaagactcccctcccccactctccatgcttgtagcagcaacaaaaattttctgtttttatacttatagataatttgaggttcatggtatccttgatctcctcgcaatgctaaaagagtaatttcatgaatggtttacttgtgcttcaagttgaattcacaggttttaggggaggatgtgttgagagatcaggattttagcagsctccattagcccagtgccaactggaattcagcatattcattcttaataagagtaaagtgatgccttaagatactggaagatgcttgaaaacagtctataaaattatttacatattcttcttctaataacgtaactaatatgtgtagagtaaaattcacagaattatcagttccaaattcctgaagtcaaaactgatgaggattttctataattcaaagttcccaacttttcttttggctggtttttctaaccctttaatctttaggacattctccatacattgttttgtaggatttccttgtttcttgttttc

SEQ ID NO: 102710 - DNA, 611 bp, Homo sapiens
gtgagatactctccaggatagatcgtatgtcaggctacaaaccaagtcttaacacatacaagaatttgaaatcatatcaagcatctcttctgaccacagtggtatgaaactagaaatcagtaacaggaggaaaattggaaaattcataaatttgtagaaattaaacagcatgctcctgaacaaccaaagggtcaaaaaaatctaaatggaaatgttaagatatcttgagacaaacaaaaatggaaacacagcataccaaaatttattggacacaccagaagcatttctaagagtgaggtttataacaataaatgcctagattaagaaaaagatctcaaataaacaacctaactttatacctcaaggaaatagaaaaagaacaaagcctaaattcagtagaaagaaggaaacagcaaagatcagagcaaaaataaatgaaatagaagctgaaaagaacaacagaaaagatcagtgaaactaagatattaaaaattaaacttaaaaacagaactagcacatgatgccgcagccccactgttgggcatatatccaaaagaaattaaatcagtatatagaagaaatagctgyactgtcatgttccttccagcatt

SEQ ID NO: 102711 - DNA, 597 bp, Homo sapiens
atgcctcttcaagctctagggaatgggggacccacttcagtttcatttttgtgagggtcattgttcctctgatgtatgtaatggaaaggatctaagatgatttccatagcgcctctctattgcatatctaccacccacatccaggccacaggaaacattcacacattccttgttcccaaaactgtgtgaatacatatccaacccattatagcagcaatcctccttcactctgcctccaaaacagcatgccagcccacctccagcctctagattttccagggtgaaagtcaagtcacatccacactgattctctaactgcaaaggaaacagcacactatccaagtgattccaacgcagccttacttactcagcttctgctaagatttgacactcaacccgcttmgggtaggagcttgagactcacagcacaccagcatctctttctttaaaatcctttcataccaaatcctctctcaattactactctgtctaccattttatgtacttaatataattgattcatctaatcagttctctgccatctctgccacctactttgaaatttctgccaagtaatctcttacaactcactgatag

SEQ ID NO: 102712 - DNA, 642 bp, Homo sapiens
tataacaagttaagatttatagccaaggagcagggcagtggtcagtgggtggaaaattactaagaagcatcaaggatagagggattttggctagactgattcaacaggattcttactgaccaggatgctaagatattggggatggggctgaggaagttggccagatattgagggtgatcagataccaaggggattttcactaaactgactcagcagtattcttgctaaaactggactaagcaggccaagaacagagccaaaggtcagggcctagtcaaaaagaggaatacaaaagaccctgactcaagtttggtcaaaagagagggtctttgtcaacactagcaaaacttctgcttcctgctcctctgagatcttatgcttcccttgtctcgaggtcttagttccaagggaagaaatgcttttaccaggagacagaacaataattccaacgactggaaagttaacacttccatctggccactttgtgctccttatgcctctgaatcaactggcaaagaagggagctactgaaayggtttcagtgattgatccaaggggaaattggacacaaaagaagtgaggaagagtctgtatggaatacagaaaatcccttagtgtatattcccataccctgtaattaaa

SEQ ID NO: 102713 - DNA, 518 bp, Homo sapiens
ttgtcctggcactgagaatacattgtggctaagactgaaatagttttggtcctcatgaaacttacaatttaagtgaaaatattgctggattgtccattaggaagaccaagcctgtgcttatggtaatagcaaaaaaggagcgatccttctctcatctgttaaaaattaagtttgaagatgttagcaagagggtccactagaagctcctagtagcgctctctctgctccccttccctcactgccagaaaaacaaacgacaaacaaaaaactacattttgaccaaaatarctaaaggagagcatcgcagaacagcaaggaggcagcagaagtcctgtagaccgcagaaacccaggatggctgcatggagaagaggaggaatcaccatgcctctcccacttcattcccctaattaaggtcagctcagaaccagaaggaacttctccctgtggaggaaaggtaaaaaagaggaccccagcagcccccattgccactgtggacacctgcagtctttgctactg

SEQ ID NO: 102714 - DNA, 641 bp, Homo sapiens
tgcagcttcatgactggtttgtcttgctttgtgagaggattctggaatgtttgggatatgagcagtactatttcagagtccacttgtatgccagcctgaggaaactggggcatcctatttttgtgtaaaacataccattgttgcttcacttccatgaggcctgagaggatcacagtgctgtcttggcacccccaagcccctcagctcacagtttggggaggatggaaccaggttccaccttgagcccccaggtggatatctttgttctcactgaggactctggaggcaacaatgtgcagaagctgtttaaaggaataggatttcaaccagcatgctgaagggaaacaagaaaaccctttatgagaacatgtcgcccaccctggggacctctagaaatagagaatttagaaytgggaaaccaggagactgttaacatgtgggtgagatcaacaggcatccaagagtgactgccctcaaagggaacacattcaaacaggctattaggccttgggtaataggataaatatggatctatttccttccaattaagctattctctctattttatgaaagggataggcctgatatattgtatagtatttattctctgggacgtccacctcatatccctcaggaatctg

SEQ ID NO: 102715 - DNA, 616 bp, Homo sapiens
actaacaattaaacattcctgtgtttaacaagattaaatactgttcttgtgactttactgatgtattaaattaattatccttgtatttttaccctgctatgttccaaaagaaatacatgcagttgaatacaattcagttatgatctcttaaccccgtggtatggccggagtagtaaattaaagttcagtatatatgcctttatttaagttccaagaggcagtttagtcgacattttctcctggaagccctccacaacttctccattagaaggtaggtgtttcttatctgtagttccaatgcactactgtgcttacctttatcataacacttattagactgtgtataacaaaattttgtcctctgattttacctgcttcttccactaggctgtaagtacctataaagcgctgacagtgtcttcttcttggtgtggctgcaaacacagggcmtaggatgtggtacccttctcccaatccatcctccatgctgttgcatgagctctcctcctgatagaaccaaacctgcatccaacacttccctgcaaaaaatcccctgaaggctcaggatcttctgtaggagaaagtgcaagctcttcattttggaatagatatcttt

SEQ ID NO: 102716 - DNA, 446 bp, Homo sapiens
gaagaacttcagatatactctggaattagaagagaagaaggcaagaaagataaactgtcagtgacattttagaaggaaaaataataaaacatgtgctatgaattttaaattgtttgctgtggagtacaatgtacaaatccctcctctataatatcttcagtaaagtctacattgctcactgataattctatgtaagtggacatgtctgggaaacaaactcatgcttaactttacatctgtgtccatgcaatgcagaccagggacagcaagaaaatcttgtaggggatccaatgtattcatcacaggatctatacctaatccctacccaccccttaatgtggaaatgtttacacttgctctcttccccttggctttggtttcctgttttyttgtggcaggtccagtaccctgaacctggactccagttgctttaatggaattctctt

SEQ ID NO: 102717 - DNA, 479 bp, Homo sapiens
atcatatcaaaaaagataatacaccaggatcaagtgggtttcataccaagatgcagggatggtttaacatatgctagtcaataaatgtgatatatcacattaacataatttaaaacaaaaattatacaattatctcaatagatgcagaaaaagcttctgacaaagtccagtatacctttatgattaaaactctcaccaaaattggcatagaagagatataccccaaggtaataaaaaccatctatgacaaacccacagccaacattatactgaatggggaaaggttgaaaacatttctcttaagaactggaacaagacaaggatgcccactttcaccatttttattcaacrtagtacggaaatcttagccagagcaatcagacaagagaaaaaagtgcatctgaatcagtaaagaggaaggcaaactgtcaccatttgccaattatatgattgcatacctagaaaacccttaaaaactc

SEQ ID NO: 102718 - DNA, 700 bp, Homo sapiens
gcacaggaaaaggacagagctgcagacaatgtctgaatcttcccagcatagccaaggggcttgcctaatagcacatatccccaggccttatctaaaatctaatgactctaaaacagacaattcatacaattatcaaaaatgttatagaagtagtttatgaccttaaaacatccagcagactgtgtcagacttaactcagactaaatgtctacattctgaaaatttctattttattttaccaattttaaaaccacctttatttacaaaacactactaaagtcatatgaagtaaaaagcatttgagtttctatttttctgataaaatatttggtttaagcacttacttttcattaaatccaatcaattagagctcttctatacattttatagtgaaatatcacrtagacatagacacagacagaagcagattttgtagatttataaaagtcttcatgtatcatttcctaaagtatctcttcctcatttttggttagtattctcttgatcacctgttctctgccctaaacaattgtccagtaggcatctccaagtttgcatttctaaagggaaaactcttaggtggtatgaaatagagaatttatattttactcaaaccaaggaaaaatggtgtgagtaaaagctcagttaagatagccaggaaaagcagactgtcttacacatggagatttccttaaagata

SEQ ID NO: 102719 - DNA, 606 bp, Homo sapiens
gttcttattgccacgtctgacaaaaagtaagcacttgataaaatgctttttttcttatcattattaaggcttttgaaaaatcagtgattaggggagttagggtagaacctgtgtttatgggcagagatttctctttacactttctgaggaaactgtattacggcagtacatcgtaggagtaaaccagcaaggagactgcaagctgactgcttgagctcaatgctggccctgccacttcttagctatgtgggcttgagcaagttacttaaactaagactcagattcatcatctgaaaaatgggttgataataatagaatctacttcctcactttgtcctgaggattaaataagaacacgcatataaagttcacacagcacagtacctgaaacatagtatgctctcaacaagtatttttttattataracaagataaaattgattcccctcatttacatctctggtcatatattcttttaatggtgctttgcagttttcagagagtttaactgacaaataataattacagatatttacggagtatgatgtgatattttgatgtatgtatacaatgtggaatgattaaatcaagctaattaacatatcc

SEQ ID NO: 102720 - DNA, 510 bp, Homo sapiens
ttatgtgcctatttgatccctatacayatacatttgttggcatgacatgatgaagataaaatgtgaagaaatgcatggaaacataatggcaggactttgcctttttaattgttgcctattcagcaacatatggtcttgaaccacttgcacacaaatcaaactgaatatttgtgtccgacctccctagagttcataagttgaattcctaaccccaaatatgatggtatttggagatgaggcctttggaatgtagttaggcttagattaggtcatttcatgatgaaaatagtggctcaaaaaaatttaaaaaaggagattccccatcctcctctcagtgcttgcaaagaagaaagcccatgtgaggacatggtaagacggtggccatctgcaaaccaggaagagacacctcaccaggaataaaatcatctggtacctcgatcttggactttctagcttctggaagtgtgagaaataaatctctgtttttaaaaccacccagcctatggtatt

SEQ ID NO: 102721 - DNA, 571 bp, Homo sapiens
agttaaaaagcttctacagggtaaacaaaatgctcaacaaagtcaagagacaacctacagaatgggggaaaatatttgtaaattatccattccaacaaaagattaatagccagaatatgtaaggagctaaaataatcagaaaatatataatcatcttattacaaartgggcaaaatatctaaatagacacttctcaaaagaacacatacaaatggcaaacaggattatgaaaagatgctcaacattattgattatcagaaaaatacaaatcagaactacaataaggtatcatttcatcccatcagttaaaatggcttttgtcctaaagacaagcaataatgaatgctggcaaggatatggaaaaaaggcaacactcatatactgttggtgggaatgtaaattagtattaaatacaaacattatggagaacagtatggagggtcctttaaaaactggaagtagaactaccacaggattcagcactcccactgctaggtatgtacccaaaagaaagtaaatccatttattgaagataaatctgcactaccatttttactggggcactattcac

SEQ ID NO: 102722 - DNA, 571 bp, Homo sapiens
agttaaaaagcttctacagggtaaacaaaatgctcaacaaagtcaagagacaacctacagaatgggggaaaatatttgtaaattatccattccaacaaaagattaatagccagaatatgtaaggagctaaaataatcagaaaatatataatcatcttattacaaaatgggcaaaatatctaaatagacayttctcaaaagaacacatacaaatggcaaacaggattatgaaaagatgctcaacattattgattatcagaaaaatacaaatcagaactacaataaggtatcatttcatcccatcagttaaaatggcttttgtcctaaagacaagcaataatgaatgctggcaaggatatggaaaaaaggcaacactcatatactgttggtgggaatgtaaattagtattaaatacaaacattatggagaacagtatggagggtcctttaaaaactggaagtagaactaccacaggattcagcactcccactgctaggtatgtacccaaaagaaagtaaatccatttattgaagataaatctgcactaccatttttactggggcactattcac

SEQ ID NO: 102723 - DNA, 329 bp, Homo sapiens
tattgattgcttatcacatgcctggaatattctaagcatggttacactacatattctggctgtcactcacaccagaaggatttttagaactctgtgtcctcgcctcctgggttattcagaatacactccagtaaagaagatgttatttttatttctattctctatacattagggaaataaggcagaggaatatttggacccagggaatcttcctcccaagtgtgtgctcttaatcactattcgactcaacttcaagtctagcccacaggaagaacaaagagaygaacaggatttaagtcagctgttggaggattccaagctaggctttc

SEQ ID NO: 102724 - DNA, 592 bp, Homo sapiens
ttaaagtctcccattattattgtgtgggagtctaagtctctttctatgtcactcaggacttgctttatgaatctgggtgctcctgtattgggtgcatatatatttaggatagttagctcttcttgttgaattgatccctttacctttatgtaacagccttctttgtctcttttgatcttaagactaagtggcagagccaaaatttgaactcagggagtctgacaccactgaaggttgaagcctatgcttcaaccactctagatactctagatactgcttcagagacatgcaaacgtggaggtgcatggacgcacacacagacttctaatcatggactcttctcccccatggtgtcttctcrtgtgctacctaccaggccctcgctggcatcaaagggagacagagccgctgtcacagtcaggagttgcctctctggttctgcgggacccagcccccctggaggtgggaaactgcagaggaagaggaagtgggttgtctggaaaggcagggctgggccacaagcctacagttctgcaggctttgctactggtgtgagtttcttccagattcacaggagaaggaagcttaggag

SEQ ID NO: 102725 - DNA, 476 bp, Homo sapiens
gacctgctccctgcctctccccaccattctgtatgcttccttgccctcctcccaaagtaaacatgtctcaatgtcaatttgctttaaggataagtaaaagggtatcttaaggggaagggaaacaactgagaatttattgagtacttaccacacaatgagcayggtgaaagtgttatttcatttattcttctcaatggccctctggaggcaaattttaacccccaatttacagatgcagaaaccaaagctgaggagttggagtttcttgctcaaggacacacagctagccaatgacagatcagggattttaccccaccctgccttttcagaggacatcatcaggacaggaaggacacagaggctaggatagagacgatgtcccttagtcagaaaaggacctggtgttcaaattctggcagaccacagtgggatgggaggacatcccttcttgcaatttagcaatttggagagaacaa

SEQ ID NO: 102726 - DNA, 575 bp, Homo sapiens
caaagtcataagaatcaatagtgctgttctgttccattaagcaaatgcttattgattacctgccttatgtaatggcattgtgtgagaccctggagaaaacaaagatgtgtgaggcagtgtcccagatttccaaggagtctcccagcctaatgggaaacagatgagccaatgtgactgcaagtgccaagttagaggaatctttggggaaagatgcaactttgggaaagcgatgacttgacatcgtsttaaagttcaggctattttttgatgtggtctccaaggcaagattcatacacatttaccttcaaattttaactaattgagaaatagacatggatattacaaagaatagaagcaaaagaagtggttgcttgttttggtaaaactacattgtgtaactcagcttgaatctatagtcaaaatcactctgaaccttggaatgaacagaaggagagaatcagatctcaagagaagaccacacacctggagaagctccaacttcttcacacctgacaagaattaagacctctaagaagagaatgatctacagtaaccatgaagctgatatgttactc

SEQ ID NO: 102727 - DNA, 575 bp, Homo sapiens
caaagtcataagaatcaatagtgctgttctgttccattaagcaaatgcttattgattacctgccttatgtaatggcattgtgtgagaccctggagaaaacaaagatgtgtgaggcagtgtcccagatttccaaggagtctcccagcctaatgggaaacagatgagccaatgtgactgcaagtgccaagttagaggaatctttggggaaagatgcaactttgggaaagcgatgacttgacatcgtcttaaagttcargctattttttgatgtggtctccaaggcaagattcatacacatttaccttcaaattttaactaattgagaaatagacatggatattacaaagaatagaagcaaaagaagtggttgcttgttttggtaaaactacattgtgtaactcagcttgaatctatagtcaaaatcactctgaaccttggaatgaacagaaggagagaatcagatctcaagagaagaccacacacctggagaagctccaacttcttcacacctgacaagaattaagacctctaagaagagaatgatctacagtaaccatgaagctgatatgttactc

SEQ ID NO: 102728 - DNA, 575 bp, Homo sapiens
caaagtcataagaatcaatagtgctgttctgttccattaagcaaatgcttattgattacctgccttatgtaatggcattgtgtgagaccctggagaaaacaaagatgtgtgaggcagtgtcccagatttccaaggagtctcccagcctaatgggaaacagatgagccaatgtgactgcaagtgccaagttagaggaatctttggggaaagatgcaactttgggaaagcgatgacttgacatcgtcttaaagttcaggctattttttgatgtggtctccaaggcaagattcatacacatttaccttcaaattttaactaattgagaaatagacatggatattacaaagaatagaagcaaaagaagtggttgcttgttttggtaaaactacattgtgtaactcagcttgaatctatagtcaaaatcactctgaaccttggaatgaacagaaggagagaatcagatctcaagagaagaccacacacctggagaagctccaactkcttcacacctgacaagaattaagacctctaagaagagaatgatctacagtaaccatgaagctgatatgttactc

SEQ ID NO: 102729 - DNA, 674 bp, Homo sapiens
atcatatgttttatttgtttacttgtttaatgtctctcatccccattaaaaaatgagggcctcatcagcctgtaaagcaaaacaaaaacaacaacaaaaccacgctcactggtttaaaaagaaaaaaaggacctaaaggtcagatgtggctcatcctattcaccaayctatcccccaaatctggactgagttggcgtataaaatcttcatcaatattcataacacaatgtttgattcaatcataataaatgagtgtatgaaacctaagaaatatactaccccaaaaaacagaaacaaaagctttggcgaaatcacattgcagacaataaagctgagtgggagcagaggattttattgctcccttcttgtgcccatcctcagtaacttagccccttctacagataagtgatagccaggaagaagtcaatgctggcctttggcacaagaactgaaaatataagtaaaagtaagatgaaacagacatgtatcctaagaattaattgtccaaagaaattctggaagggttcgtacaactacttcattataaactcaaagcagctttagataaaagggtttctccaaaaaaggtcagaaagagatgcaaaatcaggaggataatataaggcaaacaaataaggttaaaatcaagtaagttagctacaaggctgagggaa

SEQ ID NO: 102730 - DNA, 674 bp, Homo sapiens
atcatatgttttatttgtttacttgtttaatgtctctcatccccattaaaaaatgagggcctcatcagcctgtaaagcaaaacaaaaacaacaacaaaaccacgctcactggtttaaaaagaaaaaaaggacctaaaggtcagatgtggctcatcctattcaccaacctatcccccaaatctggactgagttggcgtataaaatcttcatcaatattcataacacaatgtttgattcaatcataataaatgagtgtatgaaacctaagaaatatactaccccaaaaaacagaaacaaaagctttggcgaaatcacattgcagacaataaagctgagtgggagcagaggattttattgctcccttcttgtgcccatcctcagtaacttagcccyttctacagataagtgatagccaggaagaagtcaatgctggcctttggcacaagaactgaaaatataagtaaaagtaagatgaaacagacatgtatcctaagaattaattgtccaaagaaattctggaagggttcgtacaactacttcattataaactcaaagcagctttagataaaagggtttctccaaaaaaggtcagaaagagatgcaaaatcaggaggataatataaggcaaacaaataaggttaaaatcaagtaagttagctacaaggctgagggaa

SEQ ID NO: 102731 - DNA, 514 bp, Homo sapiens
gaattcatttgaggaccatgccagttcatggacaggtgcctgggagttaggcacagttggggtgggtcgagttgtctaagggtacctaggactgtcatacccacacctgagttggctccttccttccttcattgaacagayattattaagagcctacactgtgccaggctttgctaggtgctggggatgcaatggtgaaggtgaaaaacagatgggtcctttgacttcatggagcttccagcctatgccaatgacaggttaataaaaaaggagctgagtgctctgcagtgggtattaaagatggggtgagcaatgagtgagtgtattttctgtagagattttacaaacaataatacaaaggattaaaagttgttctgttttttatgatcaccacgcatctgcaattctaaaccacatcagtgataaaacacttgaaggggtccataatacatcattgtagcataaaaattattttgagctaaaggcatttggttcctgaaatcttctatctgat

SEQ ID NO: 102732 - DNA, 610 bp, Homo sapiens
gtgtattttctgtagagattttacaaacaataatacaaaggattaaaagttgttctgttttttatgatcaccacgcatctgcaattctaaaccacrtcagtgataaaacacttgaaggggtccataatacatcattgtagcataaaaattattttgagctaaaggcatttggttcctgaaatcttctatctgattaaaagcagagcctcccaacagaattcgattgttataaattccctccctgggggaaacttgggaagattgattcttatcactggagatgagaagtcagcaccacacacagatattgtcacaaaactgtcatatctctcatctcttcccctgagggcccatttatctttccaaatagccatttgttttcccttaagtgccctttctctttcctttccctattaagatagtatgtaaaccccaaattctaaccacctccttgggtcacatttctttgtaaactccagtgtgtaattaagtttgttttttctcttgctaatctattgtcagtttatgtcttttttccaatgggttcaaatcccagtctcatcatttaaaaaattaattttaatatttatggggaacatgaaatagtctg

SEQ ID NO: 102733 - DNA, 516 bp, Homo sapiens
caaactctggcctttgagaggtggattccaccatgcccctgatcttgtgtctaccctgggaatctcagtgtggatctgggactsattctgatacagagaggtaagggagggccgactggcatccaagttttcctggtaaatgtaacccagaggtggctggaagatgtgttggggtgaagaggttgttcattttgttttctttgctccttcaccacctccctccccccccaccaccaccatttctttttcccttaaatcgtaaaagcagtaaatcaaatgcagtatgggattgaggtttttttcctttccatttgaaaaatccttttaattgaaaaatcacatttggggaacaaagtggtcaaatgacagtgaatttcaaacttgagaatgctgacttgattaaaaaaaaaatactgatctttcttaatggagggaaaatcaagtgcatgcggccaggagacctgagtttgacttttagcttcgccccttgctaattgtgcaatcctgagcaacacc

SEQ ID NO: 102734 - DNA, 602 bp, Homo sapiens
taaacagcaaaaaagtttatgtctctctaatgcaacagaatagtggtaaggaggagaggttggcagctctgctctgccaggatatcctgggacccaggtttcttttattttcttcctctagatctttttagggtggtgctgcatggctgatgctgattcagcagtgccacatccaagtaccagccagagagaagaggaaaagagagtagatgtgaaagacttacactcaagctcccattcacaagaagctgatcacatggccacaacaagcttcaagggagactgggaaatgtggcctctagctgattagccatgatgcctgaaagcacctatggagtaggggagaattttcttactaaaagagaaaaggagagaacagacacagttggacatatagcagtctcggacatgcctataayaagattccatactcaagtctattattctattgagtaatgaattgtattgtcatgtaatcatttaattttatttggcttcttttttttgcccagaattttgctttgattccaacttcaaacctactactgacctaaacctaatgtctttaggtatgtatgttttaatgtgaggtccatggctcc

SEQ ID NO: 102735 - DNA, 602 bp, Homo sapiens
taaacagcaaaaaagtttatgtctctctaatgcaacagaatagtggtaaggaggagaggttggcagctctgctctgccaggatatcctgggacccaggtttcttttattttcttcctctagatctttttagggtggtgctgcatggctgatgctgattcagcagtgccacatccaagtaccagccagagagaagaggaaaagagagtagatgtgaaagacttacactcaagctcccattcacaagaagctgatcacatggccacaacaagcttcaagggagactgggaaatgtggcctctagctgattagccatgatgcctgaaagcacctatggagtaggggagaattttcttactaaaagagaaaaggagagaacagacacagttggacatatagcagtctcggacatgcctataataagattccatactcaagtctattattctattgagtaatgaattgtattgtcatgtaatcatttaattttatttggcttcttttttttgcccagaattttgctttgattccaacttcaaacctactactgacctaaacctaatgtctttrggtatgtatgttttaatgtgaggtccatggctcc

SEQ ID NO: 102736 - DNA, 520 bp, Homo sapiens
ttttttttgttgttgttgttgttcatttgagaaatgatttgtccatagcagcattcactgaccatggcgaaactttaattgatctttccatgccacagcctacctactatctatgaggaacagcaacagttaaaacccattctgtaattaagtcttggttccattaacaactccaccatgtaattaaacttatttctcgaacaagcagacacggttcactaaagaakctgagaagagccatttaaattatgctcagtgttttgctctgggttaaccacgatcaagtctgggcttggaactgaagtttagaaagaatgtagagaatgctgctggcccagaactcaccagtgctgaatcttcatgggatccaggatgtatttcctgtgcaatctgtgaaacttctaacttattactgctcattgttttcctccatgaatatgttgggtaaaaatgcaggttgctgaatacttgtcctgttcttggaacagcctccattaactaaagcagcaaatctaatagt

SEQ ID NO: 102737 - DNA, 607 bp, Homo sapiens
gatgaacgacatgactgatggaacacatgacagctggaggctcttgccagaccgtttcatcctccgctgccatctcctactccagcgcgggagagggtgtccccacggtctaccaagggacatcagagacgcagtcgcaccggcggggcccaggccacgcgggggactgacrgggattcgggcggtggcctggagaggactgggactggaggagcggcagggccacaacaatccgggtgcgagtgaggccgcggcgtttgccgctgggggacggaggctggcttcctgctcccgcagcagcagcgccctctggcatttccaccgtcagaggcatggggtggtggggacgaaggactcaggagcctctccgcctggacttacagggaccccaggactcccgctcccgaaggtcccgccgccttccccaggcctcggcctctcttgtactggccaagaggctgagaaatcatacccggaaataactttttcctctctaactcccatccccaatttaatattaaattaataggcaagctggcccccacctctccctaagggcctcaggcagaacctttcactgctcccttaacctactttttccttcttt

SEQ ID NO: 102738 - DNA, 498 bp, Homo sapiens
ataagctggcttctccacctaccattatcctttgccttgattactctgctctatatcatcaccttgcataccctaacacatgacttttatactcattgctccatytgttataaacatactgataaataatatttcctctttagcagtgatttcctgatctaatcaatattttggtatcatataacctcattggattattagtgattatcactaacctgctatcatacaatacacatttaatttcttttctcattgtttattgtctaaactgctaggtagaagaagggcactttatctattcttatcacaaatgtaggacaacggctagcacaaggttaggaacttacatggtattcaattaattgttgtttgataattgattaaaaactctagaattttgggttccattcttatgatgacaacaaataatgctagcgatgccaagtgaatagcaagtttaaccaagttatcctgtatggggagccacagttacttaaa

SEQ ID NO: 102739 - DNA, 498 bp, Homo sapiens
ataagctggcttctccacctaccattatcctttgccttgattactctgctctatatcatcaccttgcataccctaacacatgacttttatactcattgctccatttgttataaacatactgataaataatatttcctctttagcagtgatttcctgatctaatcaatattttggtatcatataacctcattggattattagtgattatcactaacctgctatcatacaatacacatttaatttcttttctcattgtttattgtctaaactgctaggtagaagaagggcactttatctattcttatcacaaatgtaggacaacggctagcacaaggttaggaacttacatggtattcaattaattgttgtttgataattgattaaaaactctagaattttgggttccattcttatgatgacaayaaataatgctagcgatgccaagtgaatagcaagtttaaccaagttatcctgtatggggagccacagttacttaaa

SEQ ID NO: 102740 - DNA, 663 bp, Homo sapiens
tgtcgaatctcaattgatcttggcatatacattatctggtttggcgctttctagtaaaatgagcccatagagcagacacatttctctgggtggtggctgaagaagaaatgcagaaaaggcagtcagaaagatgcagccgcagcagaagtcaaagagatctaaatgatgagaaggtcacaacgtatatttctggctttcaatgctgaaagacaatgtgaaaaggagtgcataagcctctaggagcagagagggtcactcagctgacagccagcattgaagcagagacctaggacctgcagccacatggaactgaattacgacaataggcagaatgagattggagtctgggtcttcctcagatccttcagagaagagctcagctggggacattttttgtggccacatcagatccaatccaactacttggtttctagatttctgagccatataaactragaggtgatactctcacaaacaatacatttgtgttgttttaagccattaagtttgtatcaattcgctgtctaacactagaaaatgaataaacctgccataaccccttacttccgtatttcactcttcctacattttctaactagaagagagaattttttaaataaataagatcgtggttaacagcctgcactttttattaacagagac

SEQ ID NO: 102741 - DNA, 583 bp, Homo sapiens
ctttatttgtccctatttatctatctggcttgagtataattcataaaatactaataattacatttacaaagctaatgatgaactttattaggtaacacttggcatcttaataagtagctgtcgtttaaaaaatatawttacattcatgaactcactaaattctctcaacaagccaagtacatagatcagaaatctaaggtacaaataaataaggtcaaggtcatgcacatagaaagtgacagagttggaattgattgttcccagcgagttacttcccaaggcacatttatttctactaattttaagcaaccataaaggctagaatatttttgatgtattttaaagaacatattttgcaaccatcaggacaatcttattaattaagcaataacgcatcactgaatatgaaaatgtttttaatataagactttcaaaatacataaagcctctagttttttatcaagcattacatgctaaattaaattaaatctagcctaaagctgcctccctatgtgttgaactgcaacctaatttaagatgcaagcaaattccaacctaaataagagtatattcttgtaacaca

SEQ ID NO: 102742 - DNA, 583 bp, Homo sapiens
ctttatttgtccctatttatctatctggcttgagtataattcataaaatactaataattacatttacaaagctaatgatgaactttattaggtaacacttggcatcttaataagtagctgtcgtttaaaaaatataattacattcatgaactcactaaattctctcaacaagccaagtacatagatcagaaatctaaggtacaaataaataaggtcaaggtcatgcacatagaaagtgacagagttggaattgattgttcccagcgagttacttcccaaggcacatttatttctactaattttaagcaaccataaaggctagaatatttttgatgtattttaaagaacatattttgcaaccatcaggacaatcttattaattaagcaataacgcatcactgaatatgaaaatgtttttaatataagactttcaaaatacataaagcctctagttttttatcaagcattacatgctaaattaaattaaatctagcctaaagctgcctccctatgtgktgaactgcaacctaatttaagatgcaagcaaattccaacctaaataagagtatattcttgtaacaca

SEQ ID NO: 102743 - DNA, 619 bp, Homo sapiens
aactggccgctattccagatataaaagcagaaagtattagtaataactgtggtatgtctgtccacataattctaacataaaatatattaaatttattgtaggactaatatatttatttggatttattttggagacagggtcactgcctatatatagggtataaacatattttcttgagttgagatcattccgtgggccaaasataaggggtaatacaaatctctcagctaaaaaatgtggacttgagttggtagtctataacatgaaaaaagacgagtgctattctcttgaaattgctcaagagaaatttgtcttgatattgctgggaggctagtttcactagggtagtgaaaaacctagccatatggagatgtcctgaaagctaaaaaataagaagaaaagaagctgacaaacttctgccactcctggagcctcagaaagttaatcacactgttttcctggactttcaaaccataaaatagcattgaagacacaatccaagttataaccatagactttatataatactgtcaagttaccattaagttgagcattttgtagtgaaattcgtgaaacaatacaattttcaaatgtatagtgaagaaaaagttaccttaat

SEQ ID NO: 102744 - DNA, 619 bp, Homo sapiens
aactggccgctattccagatataaaagcagaaagtattagtaataactgtggtatgtctgtccacataattctaacataaaatatattaaatttattgtaggactaatatatttatttggatttattttggagacagggtcactgcctatatatagggtataaacatattttcttgagttgagatcattccgtgggccaaacataagggstaatacaaatctctcagctaaaaaatgtggacttgagttggtagtctataacatgaaaaaagacgagtgctattctcttgaaattgctcaagagaaatttgtcttgatattgctgggaggctagtttcactagggtagtgaaaaacctagccatatggagatgtcctgaaagctaaaaaataagaagaaaagaagctgacaaacttctgccactcctggagcctcagaaagttaatcacactgttttcctggactttcaaaccataaaatagcattgaagacacaatccaagttataaccatagactttatataatactgtcaagttaccattaagttgagcattttgtagtgaaattcgtgaaacaatacaattttcaaatgtatagtgaagaaaaagttaccttaat

SEQ ID NO: 102745 - DNA, 588 bp, Homo sapiens
aggttgcatactaacttaagcattcatgtcaccataaaatgcctttagcatttctcaatgactggatgggaaattttcctttattgcctagctgcttgtgtttgagtggttgtcctatgagcaatgcatttggagttcttcagctttcactacttctctgttgcttgctaatcatgtaactactaaaatactgtacaaaattgttttttcacactaacaaatgtgtatatggagaagagggctcatgtgatgatcatttgtgaacttagatttttgaggattatgtgactagtaataaatgtgaaataaattttcaaaaaagttgacatttgataatatttttaggtctatcatatgctgtcttctgtattaaagcaagttcttacaaaatccatatacaaaaattaattgcaagtttatataccacaaaacacttaaaagtttaataataagtaaagtaagccgggtgcagtggttcatgcctgtaattccagcactctaggaggccaaggagggaggactgattgaggccaggaatttgagactagtctgggcracacagtgagaccctgtctccatagaagaaca

SEQ ID NO: 102746 - DNA, 599 bp, Homo sapiens
gatggaaccagccacccatccagtgcacaccccgccaaggtctccccgctggaaaaggagaactgttttgccttgcaccctacattttatgcatgacaggaaaagcctaataacaartaccatttgttgagcaattaattgtctgcccctgtgcagagcacagtgcctgtgtcatttccttcatgtctctaataaaccttattctaaagacatagaaactgggaaaaggagaagctctgccattagaccaatgtcacatagtgtgtagatggcagatccggggctccaccctaggtctagctgacttccaggaccacacattttaacatatggcaaattcattttatttctataaaaccctggaaataagccctgatccacacgtgtataggactcgtgtgcttaaggccaaatagaaattcatctgtgtctaaacaaatcatgctttagagccagtgaagttctctgagagaatatggagaaagttctcacgtgtggatctcctcctcctcactgcccggccacacatctgtttggtgggaagatttctgtgtgcacactgccaacttctagtgaaatcagggaccatgaggacggtg

SEQ ID NO: 102747 - DNA, 599 bp, Homo sapiens
gatggaaccagccacccatccagtgcacaccccgccaaggtctccccgctggaaaaggagaactgttttgccttgcaccctacattttatgcatgacaggaaaagcctaataacaaataccatttgttgagcaattaattgtctgcccctgtgcagagcacagtgcctgtgtcatttccttcatgtctctaataaaccttattctaaagacatagaaactgggaaaaggagaagctctgcmattagaccaatgtcacatagtgtgtagatggcagatccggggctccaccctaggtctagctgacttccaggaccacacattttaacatatggcaaattcattttatttctataaaaccctggaaataagccctgatccacacgtgtataggactcgtgtgcttaaggccaaatagaaattcatctgtgtctaaacaaatcatgctttagagccagtgaagttctctgagagaatatggagaaagttctcacgtgtggatctcctcctcctcactgcccggccacacatctgtttggtgggaagatttctgtgtgcacactgccaacttctagtgaaatcagggaccatgaggacggtg

SEQ ID NO: 102748 - DNA, 599 bp, Homo sapiens
gatggaaccagccacccatccagtgcacaccccgccaaggtctccccgctggaaaaggagaactgttttgccttgcaccctacattttatgcatgacaggaaaagcctaataacaaataccatttgttgagcaattaattgtctgcccctgtgcagagcacagtgcctgtgtcatttccttcatgtctctaataaaccttattctaaagacatagaaactgggaaaaggagaagctctgccattagaccaatgtcacatagygtgtagatggcagatccggggctccaccctaggtctagctgacttccaggaccacacattttaacatatggcaaattcattttatttctataaaaccctggaaataagccctgatccacacgtgtataggactcgtgtgcttaaggccaaatagaaattcatctgtgtctaaacaaatcatgctttagagccagtgaagttctctgagagaatatggagaaagttctcacgtgtggatctcctcctcctcactgcccggccacacatctgtttggtgggaagatttctgtgtgcacactgccaacttctagtgaaatcagggaccatgaggacggtg

SEQ ID NO: 102749 - DNA, 610 bp, Homo sapiens
ctggatccagcctcctttttctgctgaaatatgtaccccctagttgggatccaattttcaggtgcctgaagtcctccaccctttccttaccatccccaccttgaaagagaagtgttcccttgtcgaagaatttcatttcaggcatcggcaagcagagaaatttgggggagtcactggggagggcctagaccataccaggtcttagctggccacaaacatatacctgacttaggttctcaactgtttttcagcaacttagtggaggtgggattgctgggataagtccccrggggctctcccctaaatggtaggcccctcaagtcatggtaggtcaaggccacttccaggttttgagcatatctccaaaagaagggtttataataaatgtttacattaagcaatcacacatttaaccccccaaataaatatactgggaatgtacagttgacccttgaacaacaaatggggttggggcaccgaccccttcagattgaaactcctggtcaggcatggtggctcacgcctgtaatcccagcacttcgggaggctaaggcaggagggttgcttgggccaggagttcaagaccagcctgggcaacatagtgagacct

SEQ ID NO: 102750 - DNA, 572 bp, Homo sapiens
cataagttaaattatgttttttgtatttcaaaaaataaattgtgaatttatttggtatttcaaattattttgtgtatttcaaaagtaaattgtaaattcttaataattattattttaagaacartaagcagccagacttttctgtaagttatcctgcaagatggatatttctatgggaatcaaagaaagaaaaagaagcccccaataagtttcgaaacaaggaatgggaagaaggtgctggaaaagagcacctgttctctccttaaaccatttacagcttttggcactagagacacattccaccacctacaaacacaggtctctgatagagaataaatcattagccctttgtcatcagaacactagtctatcttcctgatccaggaatgggacagaactgcactcacttaggtgtgtcccttcacttctgttactctcttactgtgtaactgaacctaatatttccctagaggtccaaaagagtgaaatcaccaaaagatcctggtgtaaactctggaaagtttatctaaactggatagagaaagagaaagagataaattccaaatatatac

SEQ ID NO: 102751 - DNA, 572 bp, Homo sapiens
cataagttaaattatgttttttgtatttcaaaaaataaattgtgaatttatttggtatttcaaattattttgtgtatttcaaaagtaaattgtaaattcttaataattattattttaagaacaataagcagccagacttttctgtaagttatcctgcaagatggatatttctatgggaatcaaagaaagaaaaagaagcccccaataagtttcgaaacaaggaatgggaagaaggtgctggaaaagagcacctgttctctccttaaaccatttacagcttttggcactagagacacattccaccacctacaaacacaggtctctgatagagaataaatcattagccctttgtcatcagaacactagtctatcttcctgatccaggaatgggacagaactgcactcacttaggtgtgtcccttsacttctgttactctcttactgtgtaactgaacctaatatttccctagaggtccaaaagagtgaaatcaccaaaagatcctggtgtaaactctggaaagtttatctaaactggatagagaaagagaaagagataaattccaaatatatac

SEQ ID NO: 102752 - DNA, 543 bp, Homo sapiens
ttttttaaggctgaataatattccattgtgtgtatgtacatgtatacaccacattttgtttatccattcatctgtcagtaggcacttgggttccttcaccttctggctattgtgaataatgctactatgtatatgggggtacaaatatttctaacaggccctcctttcaattattttggggatatacccagaagtggaattgctggatcatatgataatttaatttttgttttttgaggaactgccatactggttttctaattattgttattattattattatactttaagttctagggtacatgtgcacaacgtgcaggtttgttacataggtatacatgtgccatgttggtttgctgcacccatcaactcrtcatttacgttagatatttctcctaacgctatccctcccccaataggccccagtgtatgatgttcccctccttgtatccatatgttctcattgttcaactccaacttatgagtgagaacatgcagtatttggttttctgtccttgtgatattttgctgagaatgatggtt

SEQ ID NO: 102753 - DNA, 543 bp, Homo sapiens
ttttttaaggctgaataatattccattgtgtgtatgtacatgtatacaccacattttgtttatccattcatctgtcagtaggcacttgggttccttcaccttctggctattgtgaataatgctactatgtatatgggggtacaaatatttctaacaggccctcctttcaattattttggggatatacccagaagtggaattgctggatcatatgataatttaatttttgttttttgaggaactgccatactggttttctaattattgttattattattattatactttaagttctagggtacatgtgcacaacgtgcaggtttgttacataggtatacatgtgccatgttggtttgctgcacccatcaactcgtcatttacgttagatatttctcctaaygctatccctcccccaataggccccagtgtatgatgttcccctccttgtatccatatgttctcattgttcaactccaacttatgagtgagaacatgcagtatttggttttctgtccttgtgatattttgctgagaatgatggtt

SEQ ID NO: 102754 - DNA, 537 bp, Homo sapiens
tattttctgtttttcagtgtaagaaaatgatgtacggagactctaagyttcctttctgcctgtctccacagttgtccattttactggcaaaactgcatgcttgttagtactcacaacacagaactgatgaccagggcttttcctctgttctgatgatactaagagaattaatgtggaaaatatttgtggccaaacatcgtgtgcatagccatgtttggtcggtttctattaattccattcacaaatcatagattaaagtggaagcaaaagcagtgatgagagaatagtgaattagcaatttatccctgggttgttacaatttcatccattgccaaggtggcacctttctctctgtctctcttcatatgaagtttcctctcagatccccagttgttcaaaaccaaagggaacttgatatccctgctcttgaaatgcaggtgtcatgtcacgaggaagacagtggagagacccatgtgaagaggaagtggcccccggccagtgtccagtctgagctcccagaaagagccagcactaact

SEQ ID NO: 102755 - DNA, 484 bp, Homo sapiens
gtatcataagctggactactgggcagtcactgcacaagtcgtatgttactttcttagcaatcaaaaacaggctaaaagaattctcagctgttaaaagacaagatataggtgttccttcactcactcactcatcagcaaatattgataggacagactctaggtgctcatttttgttctaggtaaagtgatggatggactaaaacagcaacaacaagatacttccttcatgaaatgatgaaatctacagtctagtcaggagacttgggagataaaagcactgaaaataaacagatatgraagtttcaaataaagactaaagaagcaggtgatgcatggacacagggaggggaacaacacacactgggacctgaaggggtggggtggggtgaggtgagggggaggattaggaaaaatagctaattcatgctgggcttcacatctcggtgatggattgataggtgcagcaaaccacaatggcacacgt

SEQ ID NO: 102756 - DNA, 311 bp, Homo sapiens
cattcacttgtctgcccactataatagtcatagtttctartatatgtatctgtgaattatgtatatgtgaattaatattttatttagttatatatactatatattacatatatttaccatacatgatatatatcatatatgaattaatatatttaattatatatgaatttatatacatatatccatatattcatctcacatatgtgcatgaatttgggctcaaagcatacagttgaattttcaggagttaaattctgggtgcacagccccagtccatgtgcaccccaggatgacagtgaacacgactgcac

SEQ ID NO: 102757 - DNA, 598 bp, Homo sapiens
gacattcacaaacattagattgcacggcagcttgtaaacattttaagttgcataaacttcacsttgattttcatgtgtagtataatactgtctactaaaactcctttttgtttcaactaagtactctcacatatattggtttataataatggtttttattatttttaaagtgttttccagtcaagggaaagaagtaaattcctatgtcagagaaaccaacgtggctgaagaataggtattagccagagaggtctagatgataaaatcaatcttctagcctcaaagaagctccatgaacatagaggaaggccaagtgtcacacagctttctttcactcgaattcattcttgactagagcccgtatgcctgttccagggacatttaaactcttaaaggatttcttatgatcctcactaaatacattaagaagaatgccaagcagtgccttttggtgtactgggacatatactcatgtgattaaaacaggtaacatgaactctgactttaaaatgtattgtagatataaatgctctaagctagaaaaggttttccacatccacagtcaatgatgggagcctttcattcctcagaaataatc

SEQ ID NO: 102758 - DNA, 598 bp, Homo sapiens
gacattcacaaacattagattgcacggcagcttgtaaacattttaagttgcataaacttcaccttgattttcatgtgtagtataatactgtctactaaaactcctttttgtttcaactaagtactctcacatatattggtttataataatggtttttattatttttaaagtgttttccagtcaagggaaagaagtaaattcctatgtcagagaaaccaacgtggctgaagaataggtattagccagagaggtctagatgataaaatcaatcttctagcctcaaagaagctccatgaacatagaggaaggccaagtgtcacacagctttcyttcactcgaattcattcttgactagagcccgtatgcctgttccagggacatttaaactcttaaaggatttcttatgatcctcactaaatacattaagaagaatgccaagcagtgccttttggtgtactgggacatatactcatgtgattaaaacaggtaacatgaactctgactttaaaatgtattgtagatataaatgctctaagctagaaaaggttttccacatccacagtcaatgatgggagcctttcattcctcagaaataatc

SEQ ID NO: 102759 - DNA, 598 bp, Homo sapiens
gacattcacaaacattagattgcacggcagcttgtaaacattttaagttgcataaacttcaccttgattttcatgtgtagtataatactgtctactaaaactcctttttgtttcaactaagtactctcacatatattggtttataataatggtttttattatttttaaagtgttttccagtcaagggaaagaagtaaattcctatgtcagagaaaccaacgtggctgaagaataggtattagccagagaggtctagatgataaaatcaatcttctagcctcaaagaagctccatgaacatagaggaaggccaagtgtcacacagctttctttcactcgaattcattcttgactagmgcccgtatgcctgttccagggacatttaaactcttaaaggatttcttatgatcctcactaaatacattaagaagaatgccaagcagtgccttttggtgtactgggacatatactcatgtgattaaaacaggtaacatgaactctgactttaaaatgtattgtagatataaatgctctaagctagaaaaggttttccacatccacagtcaatgatgggagcctttcattcctcagaaataatc

SEQ ID NO: 102760 - DNA, 544 bp, Homo sapiens
tctattaagctagacattgaagagatttgcaatgtcactcttttcactatttttttgatttggaaaatatagattttttaatagaaatatattaaatatgccaatwtataatgagtttattttttcattaattaataagtaagatatcaggctgtgcgtggtggctcacgcctgtaatctcagcactttgggaggctgaggcagacattcagactgaggtctgacttgaggtcaggagttcaagaccacctgagcaagatggtgaaaccctgtctctactaaaaatacaaaaattagctgggtgtggtgacagacgcctgtaatcccagctactcagaaagctgaggcaggagaatcgcttcaaagtggcatgcaaaggttgcagtgagctgagatcacgccactgcaccccagcctgggtgacagagcaagactctgtctcaaaataaaaaaataaataaagtatcttttaatttctattttggtaatatgatagaacccatgagggaaaaaaaaagctacttgaggtcttcaataattttaa

SEQ ID NO: 102761 - DNA, 593 bp, Homo sapiens
gagacagcttctttccttaaacgtcatgaaccaatatctgctactttcagacttttcttctgcagcttcctcagctctctcagccttcatagaattgaggagaatcagggctttgctctgaataaggctttggtataaaggaatgttgtggctggtttgatcttccatccagaccactcaaacgttctccacatcagcaagaaaacgatttcgctttcttatcattattgtgttgatgaagtcatacttataattttcttcaagtacttttcctttgcagtcacaacttracaactgtttgtttggcacaagaggcctagctttcaatctatctggactttcaacataccttcctcaataagcgtaatcattactagcttttgatttaaagtgagagatgtttaaatcttcctttcatttgaacacttttaggccattgtcgggtactaactgaacttatttcaatattgtgtctcagggaatagggaacccaagagaagggaaagagatggggtaatgaccgatcgttggagcaatcagaacacacacaacatttacttcccatcttatatgggtaaaatttgtggtgtcac

SEQ ID NO: 102762 - DNA, 612 bp, Homo sapiens
ggctagattgtgttgattagccatttcataattttattactgtcatcttgactttaatttgaactgaatctttcaacatatgaaggcaactcatatgtattttaaaatgaattactgagtgattcactgatgaaacattctgggatrctagaaacatcactggaagatttaatgtaccatccgaaggtatacatagagggtaaatttattgtggctacttgatttgcagcatacgaccccataactctctgtgcataactgctgctcgggtttattcttacctccaacactggacattctggaggagtcctgatgagagctggatttattgcggttttgattttttcgtttgttggctgctctcacggatcgaagaagtacctcactcgccttgaagaaggccaccatgaatggttgttttgactgaggtccctgtcttcccacaagaccagcagattttacgttgatactgcgtcctagaacgtaatacaaaagcacttggtttatgaaaaagaaagaacaattacctgatgtgaatgaattctgagggtactttgaaaaggggaaaagttttaaaacattatcagaatgccttccttacaggccaagatt

SEQ ID NO: 102763 - DNA, 481 bp, Homo sapiens
tggctctgaaaacaaatcgttttcagatttattcttaagctacatttactcgtgtacaaaaygggttaagaagaagtagatatttcatttaaagagcttagcaaaatggttaacactgagtaagctctcagcaatgttagtttccactaatgttatttatttgatttcagttgtccatcacaggaaatgcatggtttaaattcttactgaaaatgaattaaaaatatacctagaaagttaaacctggattaactatgtagaatttaaaaatactaaatattagcatgaaagaacaaattgatattggcaaaaggtattgctgaaatcagcgtataaaaaagaggatatttgtatagacagaaaataagttgataagaagaatgtttgaaaatacatggagtatattttatgaaaattctatatggctaataagagaattaacgagatctctggttgaaccaagtagaaatttaacagtgat

SEQ ID NO: 102764 - DNA, 515 bp, Homo sapiens
gtgcatgctgtcatgagtccaaactgattaatttctagtttttaaatcacaaaccactttcacaagaggagactctcagaatttccacaactcttctttattttcatgcctctgaaaatttctactcataccttagtgtggtcatattatggttccarttcctcctagagaacctctaatgcatcccttcaagtccttcagtatcctgaactcagcagcccctgccttggcatttttctagcacaaggaaaaagaacactgggggagggaggatacgtatgggaggttttgtggcccaggcctgaaagtgatgcaagtcacttccactcatattctagaattgagccacaaggcacacacaactgcaagagaaattaggaaatgtgatgtcctttgacacagggacaaaggaagcttttactaccctaatcatgactttcaactaatagtggtcaggcacattataatttaatcatcttggataaaacataatgtaggtcacagaaatattaacc

SEQ ID NO: 102765 - DNA, 515 bp, Homo sapiens
gtgcatgctgtcatgagtccaaactgattaatttctagtttttaaatcacaaaccactttcacaagaggagactctcagaatttccacaactcttctttattttcatgcctctgaaaatttctactcataccttagtgtggtcatattatggttccaattcctcctagagaacctmtaatgcatcccttcaagtccttcagtatcctgaactcagcagcccctgccttggcatttttctagcacaaggaaaaagaacactgggggagggaggatacgtatgggaggttttgtggcccaggcctgaaagtgatgcaagtcacttccactcatattctagaattgagccacaaggcacacacaactgcaagagaaattaggaaatgtgatgtcctttgacacagggacaaaggaagcttttactaccctaatcatgactttcaactaatagtggtcaggcacattataatttaatcatcttggataaaacataatgtaggtcacagaaatattaacc

SEQ ID NO: 102766 - DNA, 585 bp, Homo sapiens
ttcctgctgctctattctttttyttgtcttttagagccataggcactcatttctgttaagagtatattcaattttagtattggtaggtcatgagtttatatatgtttagctttagtagatattagcaaacaattttataaaacaggtgcaccaatttatacacctgctagcagatactggcatgtatggggccctcaatagaggaacttattttaactgacttaagtgttcactgaagaaatgataagcagaaacttctaaatacagacaacagagaaaatgcattctagaaaataatcaggatatgtatcacaaaccattatgcaacagatgggtattgtcactgatactaaataagtgagcatgtcttgagctgaggtcaagtgagtagatgtgagatgcaatctttgaaaagtgtgagataaccattttataaatcaagattctgaattttaaaattaaaaacaataaaacattacaagtcatcttttgtgtatgtttacattgttctatactaactctttctaatctgtacaaaaagacatactaagttcgtggaatatccatagttgtttcatgaaaagg

SEQ ID NO: 102767 - DNA, 527 bp, Homo sapiens
aacatcacctatgtgcatagtcctagattttcattcagttatctcctacctcctgttctcaagtgcttaataaaatctccaagctttccattttgtgctcaccaggtacaatttgcttgatgtcatcaatacagtgagccagtgtgatattctgcggaattgaagatgactacagtccctttggactacactatgacaaagaacaagagtgttagcacagccctggggtaagacaacaaatgtgtccccaccatatgaagatgaactgactttgatcctccctactgatggggaagaaggcatttgcttgatcaatagcctcttacaaatgccagaggctatttgacctgctctagtaaaattaccacatctggcacagaagctgcaatcagggttgctgcctggtttcrtttatacgagtcctcagtcattccccatgagcaatttggttttagcaggtccagaatgatgagctgaatgaggatgtgatgggaaacacctaccctacatcctctaagtttttaacg

SEQ ID NO: 102768 - DNA, 543 bp, Homo sapiens
cctgtccttgcataccaggcccagctcttccctactcaggaggggagggaagctggaaccaaaccctgcacaggcaagcattccacaggacatctgcctcatttaacagtttaaaataatctacataatggggggatccttttttttttctaattaggaggatttggccatttgatcccaaaagtttcaggagaatctcaagagacattacccagatatccctattgcaaggttcccattccttccttttcagggttctgatattggacaattgctaaaaatgagacttcattattttctcaatttctgccactcttaggatcgggtcctgagtctggttcacacattggyagcacttaggctatagtatatgaagattgcttcctttacaggccatctgctgtcttttaattggcatttacttacttaaaatagtaatattttctcttcaaagcatcaatagtgtgcaacaataggcacccgattaacagtccttataattattatttgccagttacctctctaatgtcagagacaagccag

SEQ ID NO: 102769 - DNA, 525 bp, Homo sapiens
tcatcttccaccatgattgtgaggcttccccagccatgtggaactgtaagtccaataaacctctttcttggagctgcttcagagatggcaaaataggaatagctccagtctacagctcccagcaaaatcaatgcrgaagattggtgatttctgcatttccaaccgagttacctggttcatctcattggaactggttggacagtgggtgcagcccacagagagtgagctgaagaagggtggggtgttgcctcatccaagaagtgcaagggattgggggatttcattttcctagccaaaggaagccgtgagtgactgtacctggaggaatggtaaactcctgcccaaatactgcaccttttccacagtcttcacaaccagcagaccaggagattccctcccatgcctggtgtggcaggtcccatgcccatggaaccttgccccttgcttgcgcagcactctgagtttgacctacgattctggagcttggtgaggaaaggggcgtccactattgctgaggcttgggta

SEQ ID NO: 102770 - DNA, 525 bp, Homo sapiens
tcatcttccaccatgattgtgaggcttccccagccatgtggaactgtaagtccaataaacctctttcttggagctgcttcagagatggcaaaataggaatagctccagtctacagctcccagcaaaatcaatgcagaagattggtgatttctgcatttccaaccgagttacctggttcatctcattggaactggytggacagtgggtgcagcccacagagagtgagctgaagaagggtggggtgttgcctcatccaagaagtgcaagggattgggggatttcattttcctagccaaaggaagccgtgagtgactgtacctggaggaatggtaaactcctgcccaaatactgcaccttttccacagtcttcacaaccagcagaccaggagattccctcccatgcctggtgtggcaggtcccatgcccatggaaccttgccccttgcttgcgcagcactctgagtttgacctacgattctggagcttggtgaggaaaggggcgtccactattgctgaggcttgggta

SEQ ID NO: 102771 - DNA, 525 bp, Homo sapiens
tcatcttccaccatgattgtgaggcttccccagccatgtggaactgtaagtccaataaacctctttcttggagctgcttcagagatggcaaaataggaatagctccagtctacagctcccagcaaaatcaatgcagaagattggtgatttctgcatttccaaccgagttacctggttcatctcattggaactggttggacagtgggtgcagcccacagagagtgagctgaagaagggtggggtgttgcctcatccaagaagtgcaagggattgggggatttcattttcctagccaaaggaagccgtgagtgactgtacctggaggaatggtaaactcctgcccaaatactgcaccttttccacagtcttcacaaccagcagaccaggagattccctcccatgcctggtgtggcaggtcccatgcccatggaaccttgcccyttgcttgcgcagcactctgagtttgacctacgattctggagcttggtgaggaaaggggcgtccactattgctgaggcttgggta

SEQ ID NO: 102772 - DNA, 711 bp, Homo sapiens
  misc_feature (1)...(711): n = A,T,C or G
cctctgccttattttctccatgcttcccgagagatcttacttattcttctggttcagactgccactgataagcatctggcacccaaatccatagctccagtccaggcttcattcctagtctccaaaaygatttatttaactgccttcagtttatcctgacttgtattttgtacagttgcttcaaatttgttatgtccaaaatggagctcatttttccccccacaaaccaaacatgttcttcctattgtattgtctcccttggtataaaacactgccttatgcaactggaaaactgacagtcttctgtgactctgcctttctctttttttccccaaaacctaatttaagaacaagtcaaaatctctcctttatacccctcctattcatctcttctgctgctgatttactttaggctttcctaatttcatacctggattattgcagcagcttctgagacctcttcctttaatcttgcaggtctccaatccattctccttgctgctgttagagtgttctttcctagatagaaatccagtcatgtctctattactttaacctcttccctgagtcttcacagctaagaataaattccaggctctttagatggctnttaaggtgcttcatatctggaccttgcccacttctctggttntaccttttttttaaaaatgtcccaacatatgctgtagttcctcatatcattttacacct

SEQ ID NO: 102773 - DNA, 559 bp, Homo sapiens
tatgaattcctgggccagagcttaattgttctgtaaaatagaagaattgctgccatggccaacagggatcccctttatccactttgccacactacattcaggctctctataagtactagggattttaaaggatcaatttgaaaaggtacaaattattggactgccacaatacccacgtgccttggtctggcccagctcaggcttaactcatagaaacattgtaaagatgaagtgatattaggtaaaactatgcaagtgccaatacttaactgtttttaattccccaaaaacagtaattgcatgtggctcaacccaaacgtaaagtattgaggctactgtaattcaggacctgaaccagggtaattcttcgccaagggtaattcaattgccaagaagaaggtggctaatttcaacagagagcatttaaggttcaatctaacagatgggtaattctcaaattctkgtgaacatcgacatcatggcttggaacttcagtccatttgaagccgaatgtctatcctgaggtgtctggcacaggacacagcacccagaacagggt

SEQ ID NO: 102774 - DNA, 584 bp, Homo sapiens
ctcaccagttactatagcctcacacttggtcctattacaagagcttaagcccttgtatatcttagggcaatagctgctgcaaccaaactcattcatgcctctgaggaactagtttttagctccttgcttgaccccacagtttctcacccagcacagaattactactgattgagcacacattatgtttcccagccatctgattaactacttaagagattctgtcactttcttcctttcctattactatttaccactaaaacactctcagtcctgccattctcctgcccctaaaggaagcaagggaaaacttatcattctctaacctcaattagggagctstctttattttacagatgtgtagaagagactcccatcaagaacttggtctaaatattatttgttgatggaccatacttaaatcagaaggtagtagttatcaaacaggatatcctatcactaatttaagctcttctttagaatatagttctctacttcaggtaaaataaacctggatggcagaacttattgtatttactagagcatgtaaactggccaaagaccagaatgtaaatatatgtacaata

SEQ ID NO: 102775 - DNA, 584 bp, Homo sapiens
ctcaccagttactatagcctcacacttggtcctattacaagagcttaagcccttgtatatcttagggcaatagctgctgcaaccaaactcattcatgcctctgaggaactagtttttagctccttgcttgaccccacagtttctcacccagcacagaattactactgattgagcacacattatgtttcccagccatctgattaactacttaagagattctgtcactttcttcctttcctattactatttaccactaaaacactctcagtcctgccattctcctgcccctaaaggaagcaagggaaaacttatcattctctaacctcaattagggagctgtctttattttacwgatgtgtagaagagactcccatcaagaacttggtctaaatattatttgttgatggaccatacttaaatcagaaggtagtagttatcaaacaggatatcctatcactaatttaagctcttctttagaatatagttctctacttcaggtaaaataaacctggatggcagaacttattgtatttactagagcatgtaaactggccaaagaccagaatgtaaatatatgtacaata

SEQ ID NO: 102776 - DNA, 324 bp, Homo sapiens
  misc_feature (1)...(324): n = A,T,C or G
gaataatttcgtctcttgctcctctgaagcattcctgggggatggggtggggtggggtggggmtgagtcatttgagcccctccagcagatggtggagggcagtgagtcacagctctggttctcaatcagaagcagagtagaggcctgaagagaatgcatctatggccaggtctgggatgcccagcttgctggtaactgcctcttaaacaatgacagttgtggctgccactgtgggaagcttcactgttgagactttcacatgtgtttcctcactggatctcagtttctaattataccttcctttgtgtggatatttaatggtnn

SEQ ID NO: 102777 - DNA, 615 bp, Homo sapiens
gcaaaagaacacaaagaaaatcatcaaagaagtttagggaagtattaaaattagcagaaattaaaataacacacagattatcaaaattatcatctttttaaaatgacttgagagcctggacatgtgtttctggggaggtagatgaagctttctcttcaacagtgtcaaatgaagctttctcttcaatcgtcaaatgcagccacatgtggcccatgtgactgctaaatgagcaagttatttttccaatatcagaaattttaaaggcaccttattctctgatgcaaaataatttgaactataaggaaaagcttccttactgggcatttgtttccacctagaatctgagtacaaatgtttcctgaatcacttgaaaagtattgctgtatagcaggggcctgatccttgtgctaaacccatcctgatgtctgtttttgtgaaaaaggttttattggagcttggccacaccatgtttactattgtctatgattgctttcaccttgcaatgcagggttgaacagttgcaacagagaccctgtggctggcaaagtctraaatatttactcgctgaccctttatagaaaagtggctgacatgtcgtagagtcaactgttaatt

SEQ ID NO: 102778 - DNA, 569 bp, Homo sapiens
tttcacaacagctgtcaacatcttgacaactgtaagcagaagttgattctatttttctccatgtatctttcactattgactacgaattaaaggtgtttgacaagagtyctaaatgattctataaatgatgaggtcataaagaaagcctaatatttaaagaaaaatgtttagaaaagacactgtagttattgggataataaaaaatcatggaaacagcatagctatgactctaaatttatctgtgtataattattacaaataccaggaacttaactgacaattgtaagccaaagacagtatctagtagttataggaagaggatctcatcatgacaacattgtacaatttatattaaagctattttttttcagatgaataaaaattttaaatgcttagagatgtatctacatatagacataaagcaatagggtagaaataaaacaaatttttaaatgccacaagaataaagatattttgttttatgtaatattttcacttctaaactcaataaaccatgttgtaactgcttttaataatcaaaactgacttctttgtcttttttaatctcc

SEQ ID NO: 102779 - DNA, 612 bp, Homo sapiens
gtcatcttcttggagaaaggtcccccaggttcctggtaggctgttttgtcaagccctgtcatctcaaggatcaccacagcaagcccagggcagagctgaagagagcattacccatagatgttttcccaatatcaacatggattacaaaatggttactatgattccttaaggattcttgcccctgcatttcacagaactctycttaaagaataaacaagttaattatgaatccgttgagtaaactgacacattttcaatttacctttatgagtactcaaaaagacacataagcaatacattgtgaacgcagaaggattgcttcaccctgcctggaaagttatagaagttagcccggataaggtgttactaaaactgggtttttatttaatatttattaaagactaatatatattaatataacatatattaatatatttatagaagcatatatatgtaagtgtacatttcagtgaattttcaaagtaagaatatggtaaaatcctaccaccaacatgcaaatcagaatatagaaactagccatcacttaagcaatctcccctgtgccccatctttagcaccatccccagtagaaacctttagtctgaattatat

SEQ ID NO: 102780 - DNA, 612 bp, Homo sapiens
gtcatcttcttggagaaaggtcccccaggttcctggtaggctgttttgtcaagccctgtcatctcaaggatcaccacagcaagcccagggcagagctgaagagagcattacccatagatgttttcccaatatcaacatggattacaaaatggttactatgattccttaaggattcttgcccctgcatttcacagaactctccttaaagaataaacaagttaattatgaatccgttgagtaaactgacacatwttcaatttacctttatgagtactcaaaaagacacataagcaatacattgtgaacgcagaaggattgcttcaccctgcctggaaagttatagaagttagcccggataaggtgttactaaaactgggtttttatttaatatttattaaagactaatatatattaatataacatatattaatatatttatagaagcatatatatgtaagtgtacatttcagtgaattttcaaagtaagaatatggtaaaatcctaccaccaacatgcaaatcagaatatagaaactagccatcacttaagcaatctcccctgtgccccatctttagcaccatccccagtagaaacctttagtctgaattatat

SEQ ID NO: 102781 - DNA, 612 bp, Homo sapiens
gtcatcttcttggagaaaggtcccccaggttcctggtaggctgttttgtcaagccctgtcatctcaaggatcaccacagcaagcccagggcagagctgaagagagcattacccatagatgttttcccaatatcaacatggattacaaaatggttactatgattccttaaggattcttgcccctgcatttcacagaactctccttaaagaataaacaagttaattatgaatccgttgagtaaactgacacattttcaatttacctttatgagtactcaaaaagacacataagcaatacattgtgaacgcagaaggattgcttcaccctgcctggaaagttatagaagttagcccggataaggtgttactaaaactgggtttttatttaatatttattaaagactaatatatattaatrtaacatatattaatatatttatagaagcatatatatgtaagtgtacatttcagtgaattttcaaagtaagaatatggtaaaatcctaccaccaacatgcaaatcagaatatagaaactagccatcacttaagcaatctcccctgtgccccatctttagcaccatccccagtagaaacctttagtctgaattatat

SEQ ID NO: 102782 - DNA, 475 bp, Homo sapiens
tacaattgtctaaaaccaatgctgtatagtatgtacatgggtacagtaataaaaatgatgcctgacttctcattggaaataaggcaatccagaaaacaacatctttraaatactgaaagaataaaaagttatcaacctagaatggtatatccagtgaaggtatctttcaaaaatgaaggagaaacactttttcagacatacaaaaactgaaggaatatatcaatagcaggctcactattaaaaaatgttaagggaatgcaatttttcttctattaaattaaagttggggttttctgcataaaagctgatgtgttttttactaacacatcaatttgatcattatcaggttaaggaaatgagtattacaatgtttgctagtaatgatgatatgtccaatattgctctggagtattaagaaatcctctattggtatagttcattgacatcttggtcaaggggaaaacattttaaataa

SEQ ID NO: 102783 - DNA, 475 bp, Homo sapiens
tacaattgtctaaaaccaatgctgtatagtatgtacatgggtacagtaataaaaatgatgcctgacttctcattggaaataaggcaatccagaaaacaacatctttgaaatactgaaagaataaaaagttatcaacctagaatggtatatccagtgaaggtatctttcaaaaatgaaggagaaacactttttcagacatacaaaaactgaaggaatatatcaatagcaggctcactattaaaaaatgttaagggaatgcaatttttcttctattaaattaaagttggggttttctgcatamaagctgatgtgttttttactaacacatcaatttgatcattatcaggttaaggaaatgagtattacaatgtttgctagtaatgatgatatgtccaatattgctctggagtattaagaaatcctctattggtatagttcattgacatcttggtcaaggggaaaacattttaaataa

SEQ ID NO: 102784 - DNA, 530 bp, Homo sapiens
aacaatatgctcctgaatgaccagtgagtcartaaagaaattaataagaacactgatagatttcttgaaacatatgaaaatggaaaaaaacccacaccaaaaactatggggtatggcaaaagcaataccaaggaaaatttacagtactaagtgcctatttcaagaaagttaaaaaaaatcaaataaacaatctaataatgcatcttaaagaactagaaaagcaagagcaaaccaaatccaaaattagtagtagaaaagacataataaataatggagcagaaataaataaaattgacattttaaaaaatataaaagatcaatgaaatgttttaaaaagatacacaaaatcaacaaacttttagacacattaagagcaagacttgtataaataaaatcagagatgaaaaggacaatacaacttctactatagaaattcaaaagattattagaaactgctatgagtaattatatgccaataaattggaaaacctagaagaaatggataaatttctaggaacatacaacctacc

SEQ ID NO: 102785 - DNA, 530 bp, Homo sapiens
aacaatatgctcctgaatgaccagtgagtcaataaagaaattaataagaacactgatagatttcttgaaacatatgaaaatggaaaaaaacccacaccaaaaactatggggtatggcaaaagcaataccaaggaaaatttacagtactaagtgcctatttcragaaagttaaaaaaaatcaaataaacaatctaataatgcatcttaaagaactagaaaagcaagagcaaaccaaatccaaaattagtagtagaaaagacataataaataatggagcagaaataaataaaattgacattttaaaaaatataaaagatcaatgaaatgttttaaaaagatacacaaaatcaacaaacttttagacacattaagagcaagacttgtataaataaaatcagagatgaaaaggacaatacaacttctactatagaaattcaaaagattattagaaactgctatgagtaattatatgccaataaattggaaaacctagaagaaatggataaatttctaggaacatacaacctacc

SEQ ID NO: 102786 - DNA, 530 bp, Homo sapiens
aacaatatgctcctgaatgaccagtgagtcaataaagaaattaataagaacactgatagatttcttgaaacatatgaaaatggaaaaaaacccacaccaaaaactatggggtatggcaaaagcaataccaaggaaaatttacagtactaagtgcctatttcaagaaagttaaaaaaaatcaaataaacaatctaataatgcatcttaaagaactagaaaagcaagagcaaaccaaatccaaaattagtagtagaaaagacataataaataatggagcagaaataaataaaattgacattttaaaaaatataaaagatcaatgaaatgttttaaaaagatacacaaaatcaacaaacttttagacacattaagagcaagacttgtataaataaaatcagagatgaaaaggacaatacaacttctactatagaaattcaaaagattattagaaactgctatgagtaattatatgccaatarattggaaaacctagaagaaatggataaatttctaggaacatacaacctacc

SEQ ID NO: 102787 - DNA, 530 bp, Homo sapiens
aacaatatgctcctgaatgaccagtgagtcaataaagaaattaataagaacactgatagatttcttgaaacatatgaaaatggaaaaaaacccacaccaaaaactatggggtatggcaaaagcaataccaaggaaaatttacagtactaagtgcctatttcaagaaagttaaaaaaaatcaaataaacaatctaataatgcatcttaaagaactagaaaagcaagagcaaaccaaatccaaaattagtagtagaaaagacataataaataatggagcagaaataaataaaattgacattttaaaaaatataaaagatcaatgaaatgttttaaaaagatacacaaaatcaacaaacttttagacacattaagagcaagacttgtataaataaaatcagagatgaaaaggacaatacaacttctactatagaaattcaaaagattattagaaactgctatgagtaattatatgccaataaattggaaaacctagaaraaatggataaatttctaggaacatacaacctacc

SEQ ID NO: 102788 - DNA, 570 bp, Homo sapiens
ggagaacgagtgaaggagaaagtagtgcagacctttaaacgaccagatcttgtgagaactcattcattatcatgagaacagcaagtgagaaatccacccccatgattcaattgctttccaccaggccctcctccaccacatgggaattacaattcaacatgagattttcctggggacacagagccaaaccatatcaccaagagaatgaaggacaaaaacyatatgatcatcttcattgatgatgaaaaagcatttgataaaattcatcatttcttcctgataaaaaccctcaaaaattaggtttagaaggagcatacctcaacataataaattccatatatgacagacccacagctagtacactaaatgggaaaaattgaaagcctttcctctaagatctggaacacgacaaggatgcccactttcacaagtgctattcaacagagtactgtaagtcctagttagagcaatcagacaagagaaagaaataaaggacatccaaattggaaaggaagaagtcaaattatccttgtttgcagatgatacaatcttacatttggaaaaacctaa

SEQ ID NO: 102789 - DNA, 570 bp, Homo sapiens
ggagaacgagtgaaggagaaagtagtgcagacctttaaacgaccagatcttgtgagaactcattcattatcatgagaacagcaagtgagaaatccacccccatgattcaattgctttccaccaggccctcctccaccacatgggaattacaattcaacatgagattttcctggggacacagagccaaaccatatcaccaagagaatgaaggacaaaaaccatatgatcatcttcattgatgatgaaaaagcatttgataaaattcatcatttcttcctgataaaaaccctcaaaaattaggtttagaaggagcatacctcaacataataaattccatatatgacagacccacagctagtacactaaatgggraaaattgaaagcctttcctctaagatctggaacacgacaaggatgcccactttcacaagtgctattcaacagagtactgtaagtcctagttagagcaatcagacaagagaaagaaataaaggacatccaaattggaaaggaagaagtcaaattatccttgtttgcagatgatacaatcttacatttggaaaaacctaa

SEQ ID NO: 102790 - DNA, 523 bp, Homo sapiens
tttcacatgctttttctgtacctattgatataatcatgtgattttacttttcttggctatttatgtggcaaattttattaattgattttcaaacattggtccaggcttgcatacctgtgataaatgctaataattggggtgtataatttcttttatccttactgaattcrattagctaatatttttcagaggatattttgggatctttctgagataatctaggtagtctgttaaaacttcatttgttatatgacaaaataggctgtgctttgtttgtatttcttgccacagacttggatctctggttctttacaatgcaaaattatattatagaattacattataagttgagcaataagagtgctcaataagaatttataaacaatttaaatatgttatatgtttggtactaagcgcagttcttgagaagttattcattggttttaaaccacaactcaatgttataatctaataaaaaccataacaactttatcactaataatataattactaaagttagctt

SEQ ID NO: 102791 - DNA, 553 bp, Homo sapiens
tgtttctaacactcaagcctctgctgtcctgcgtctcctggtcagcaaacatttggaaaagtgagccccatcctcaaaccacaggctgctggagcaagactctgctctgatggcagccgccttcctgcctgtttttgacccccatttatggctgtggagtgacattgccccctcaatccctacctacccgatgcatacagatatgcacacacaaacacacacacacacacacacgtataccatattttgaccccgattgctgctcttgcttaaactacatcctaattctgtctcacttcttggacaccatgcttttgctgagtcttccctgagcatctgcagttctaactatcccctcttgcctgctccaccctaggggggggcccagattcttcatcctctgtcctcccagtctggccattctgaaataatgtttagtcctttcyacattgcaggatggcagaaggaacagagaaggaggcactgcatgggtaactggaagtgtggcaggaagaggagagcaaacaagtgacaacagatttgcagctcttga

SEQ ID NO: 102792 - DNA, 504 bp, Homo sapiens
cacttgttaatctattatcccatttgaactcactaagggtagagtcaaaaattaaytataatttggtagatgataacaaatggttccttgtctatgtgattcacaccttaatttggactttgaaaatgaatgagttaatgaatatgcaaaattctctgtgtaaaacaggaaaaagacggggaggtgtgtattttgtttcttttttaatacatctcttctagaaatataagttgtatgctcaggcctagtatttgtatttcccacagctacatctcccacatgctcactaacctctaaaggtgcactcataatttttagagagaaaagaaaaaaaggaaggtagagaaacctttgttcttttcaggtactggaagcctctaatcccccttccctcttcttcagtaggaataaggaaaactaaagtttctctttgctgctgctattcttccacaaagttcttatttcaggatctatttgtcacacaccaatatagatattttcaag

SEQ ID NO: 102793 - DNA, 605 bp, Homo sapiens
actacactaatactatctattttggggcatattgtaaagattaaatgaaaacgtgtatgtgcaatrtcaggatatcatgagttgaaggtcccccaaaaaatccaactctaacaaaaacgcaaaggaaatgtattaattcatgcaacaggaaattgaaagtgaaaggctggctttacgtatggttggataaagatgttcaataaatgtattcaaaatttgtcttttctccaactcttggctgagctgttctttggataggctttaatttcaagtagtttctcttcatgtgttggcaaagatgatcaccagaagctaaaaaacagtacttctttttcatagttccagaaaaagtcccaggactgaatctcatttgtaactcctgggtcatgtactctagactgagaccaagagaaagaattctcagattggcttgatcctggaggaagttggttgtgtcagcctcactcaaatagtatggacaggaaaagggtgaagggcagcacctttcaagcaaaaaaggtgatgttacatcactacaaaaaaaattgagagtgggcaaaacaacagctgaatgtatttaaagtgcagcacaacgcttgacaaag

SEQ ID NO: 102794 - DNA, 631 bp, Homo sapiens
actacactaatactatctattttggggcatattgtaaagattaaatgaaaacgtgtatgtgcaatgtcaggatatcatgagttgaaggtcccccaaaaaatccaactctaacaaaaacgcaaaggaaatgtattaattcatgcaacaggaaattgaaagtgaaaggctggctttacgtatggttggataaagatgttcaataaatgtattcaaaatttgtcttttctccaactcttggctgagctgttctttggataggctttaatttcaagtagtttctcttcatgtgttggcaaagatgatcaccagaagctaaaaaacagtacttctttttcatagttccagaaaaagtcccaggactgaatctcatttgtaactcctgggtcatgtactctagactgagaccaagagaaagaattctcagattggcttgatcctggaggaagttggttgtgtcagcctcactcaaatagtatggacaggaaaagggtgaagggcagcacctttcaagcaaaaaaggtgatgttacatcactacaaaaaaaattgagagtgggcaaaacaacagctgaatgtatttaaagtgcagcacaaygcttgacaaagatcaagccatccatgaatatttgctg

SEQ ID NO: 102795 - DNA, 577 bp, Homo sapiens
agggactgggtaaaataaggctgagacctactgggctgcattcccagagtgttaggcattctcagctgggataaaatagaaggtcagcacaagatacaggtcataaagaccttgctgataaaccaggttacagtaaagaagctrgccaaaacccaccaaaaccaggatggtgatgagagtgacctctggtcatcctcgctgctacactcccaccagtgccatgacagtttacaaatgccatggcagcatcaggaagttatcccatatggtcaaaaaaggggaggcatgaataatccaccccttgtctagcatatcatcaagaaaaaaatgggcagcccgcaacccttggggctgctatgcctgtggagtagccattcttttattcctttactgtcttaagaaacgtactttcactttactctatggagttggctcaaattctttcttgcacgagatctaagaaccctctctcagggtctggatcggggacccctttccggtaacatctttttggtaaccatgaagggacaatactaaggaaacccctgaccgaaaggctaattttgggtaagtggtg

SEQ ID NO: 102796 - DNA, 574 bp, Homo sapiens
ataagcaaaagatgtaatatctaaaatggatatcatacagggtaaaattagataaaggagacgctgaagaaaaaaagtagttaactctgaagccagcaatagaagctacccaaaatgaagtagagatagaaacaagacaaaataattaataatgaatcagttatctgagcaacaatattagtttaataaacatataattgaagctccagaaggagaggaggagaaacagaaaaaaaagttggggaagtgaataccagagttttacaaatttgataaaacttatgaactcatggattcaagaattatgccaagaaataccataatcaaatttctggaaacaagtgaatrggagatacttttaaatacaactaaagaggaaaagacacatgaaacatgaaggaacaaaggtgagaatgacaacatatttcttgtcagaagaaaacgtaacccagaaaacaatggagcaatgtccttaaaatcttatgtcagaaaacgtcaaccaaaaatcgtatactcagcaaaaatatgttgcagaaataaaggcctaataaaaactcttagacaaaccacagtt

SEQ ID NO: 102797 - DNA, 533 bp, Homo sapiens
caatcaaaaaagccaaaaatttgctcttggaagaggtctacaaaattgtcaagccttttacctagactgattgagaaagaaagatgactgaaagtactaaaattaggaataaaagtggggacatttctactaaccttacagaaataaaaaggattgtaagagaatattatgaataaytgtatgccaataaattagataaccaagatctaatagacaaatttcttttttttctttattctaaaaaaaaaacagggatacacatgcagaacatgcaggtttgtcacatacgtatacctgtgccatggtggtttgctgcacctattgacccatcctctaagttccctctcctcaaccccatcccacaacaggccctggtgtgtgttgttcccttctctgtgtccatatattctcattgttcaactcccacttgtgagtgagattatgcggtgtttgattttctgttcttctgttagtttgctgaggatgatggcttctagcttcatccatgtccctgcaaaggacatgatctcatt

SEQ ID NO: 102798 - DNA, 538 bp, Homo sapiens
ctgccaactagtacaggaccttagaataattaatgaagctgttattcctattcatcctatcgtcccaaacccttacaccctttgtagataaattccatctaccacagcttggtttactgtacttgatcttaagaacaccttttcctgcattcctatatacccagatagctatttttttttttttttttttgcctttgaaaggcaaaacccagatactcaaataactcaacagtkaacttggacagttctgtgccagggattcagagataacccccgcctttttggacaggccctagctaaaggcctgtccaccctgcagcctctcccagatagcaatatactccagtatgtggatgacctactaatctgtagtcctaccaaggctgtttcagaccaaaatacagtatttgtaactaaacaaatttgctaactgtgggtacaaagaagtttcttccaaagtacaaatatctgcacaaagcattcaattttggggtcttagtttaacccccagtacaatgagcctttctagtgccagtaa

SEQ ID NO: 102799 - DNA, 538 bp, Homo sapiens
ctgccaactagtacaggaccttagaataattaatgaagctgttattcctattcatcctatcgtcccaaacccttacaccctttgtagataaattccatctaccacagcttggtttactgtacttgatcttaagaacaccttttcctgcattcctatatacccagatagctatttttttttttttttttttgcctttgaaaggcaaaacccagatactcaaataactcaacagtgaacttggacagttctgtgccagggattcagagataacccccgcctttttggacaggccctagctaaagrcctgtccaccctgcagcctctcccagatagcaatatactccagtatgtggatgacctactaatctgtagtcctaccaaggctgtttcagaccaaaatacagtatttgtaactaaacaaatttgctaactgtgggtacaaagaagtttcttccaaagtacaaatatctgcacaaagcattcaattttggggtcttagtttaacccccagtacaatgagcctttctagtgccagtaa

SEQ ID NO: 102800 - DNA, 614 bp, Homo sapiens
  misc_feature (1)...(614): n = A,T,C or G
nnnnnnnnnnnnnnnnnnnnnnnnnnccatatatcaaaggaatacctgcacctccatgtttactgcagcaccattcacaatagccaagatatggaatcaacctaaagatccaccaatggatgcatggataaagaaaatgagatagatatatacaagggaatactatttagccataaaaaaaatcctaccatttacagcaacatagatgaaattagaggtcattatggtaagtgaaataagcyaggtatagaaagacaaatatcacatgttctcattcatatgtggaagcttaaagtagatctctttgaggtagagagtagaggcttggggatggtgggagggggatgaagaaaggttggtaaatgggcacaaacacagagttagatagaaggagcaagttctggtgttcaatggcacagtcgcatgactatagttagcaaacatttattgtgtatctcaaaataactagaagaaaagatttgaagtatctcaacacaaagaaataataaataattgaaatggtggatatcctaaatatcctgatttgatcactatatagtagtatatgcatgtatcaaaatatcacatctgccataaacatgcacaattattgt

SEQ ID NO: 102801 - DNA, 636 bp, Homo sapiens
tgagtacatcttagcctaaatgcttgagaccagaagtatttcagattttttgcaagttttggaatatacccacttttgttaagtgcctgtaacagctgcttccccatttttctacttggttgtatttttcttattagtttatagtcttaactggcttggaccactataacaaaacaccatagactgggtggcttaaataacagacatttatttccaacagttctagagtcagggaagtaaaagaccaaggttccagctggttcagtgagggctctcttcctcacaagacagagagagagaacctctgggctctcttcttcttataaggacactgatcsaagcatctcacccccctactcatgacctcatccaaacctaattatgaaccaaagatctcacctccaaatctatcacactggggactaaaatttcaacatacaaatttgggaaggacacaaacattcagtgactaaaaaggaggtgtttttaaaaaaaaattctggttttcagctctttattcattatgtgtgacaaatagcttatcctacactcttcttcctttttttcttaatggtgataaacacaaattcttagttgtattaattttcaaataagtatgttatatgtattatttaa

SEQ ID NO: 102802 - DNA, 636 bp, Homo sapiens
tgagtacatcttagcctaaatgcttgagaccagaagtatttcagattttttgcaagttttggaatatacccacttttgttaagtgcctgtaacagctgcttccccatttttctacttggttgtatttttcttattagtttatagtcttaactggcttggaccactataacaaaacaccatagactgggtggcttaaataacagacatttatttccaacagttctagagtcagggaagtaaaagaccaaggttccagctggttcagtgagggctctcttcctcacaagacagagagagagaacctctgggctctcttcttcttataaggacactgatccaagcatctcacccmcctactcatgacctcatccaaacctaattatgaaccaaagatctcacctccaaatctatcacactggggactaaaatttcaacatacaaatttgggaaggacacaaacattcagtgactaaaaaggaggtgtttttaaaaaaaaattctggttttcagctctttattcattatgtgtgacaaatagcttatcctacactcttcttcctttttttcttaatggtgataaacacaaattcttagttgtattaattttcaaataagtatgttatatgtattatttaa

SEQ ID NO: 102803 - DNA, 636 bp, Homo sapiens
tgagtacatcttagcctaaatgcttgagaccagaagtatttcagattttttgcaagttttggaatatacccacttttgttaagtgcctgtaacagctgcttccccatttttctacttggttgtatttttcttattagtttatagtcttaactggcttggaccactataacaaaacaccatagactgggtggcttaaataacagacatttatttccaacagttctagagtcagggaagtaaaagaccaaggttccagctggttcagtgagggctctcttcctcacaagacagagagagagaacctctgggctctcttcttcttataaggacactgatccaagcatctcaccccmctactcatgacctcatccaaacctaattatgaaccaaagatctcacctccaaatctatcacactggggactaaaatttcaacatacaaatttgggaaggacacaaacattcagtgactaaaaaggaggtgtttttaaaaaaaaattctggttttcagctctttattcattatgtgtgacaaatagcttatcctacactcttcttcctttttttcttaatggtgataaacacaaattcttagttgtattaattttcaaataagtatgttatatgtattatttaa

SEQ ID NO: 102804 - DNA, 585 bp, Homo sapiens
agtggttttctccatctgagcacttcaatctgtcattgccaccatcccaaaacaactgagtcttcctatcttttcactttcaaattttaaaattttatctttagtcattttaattttacttttattttttatttaaaatttgttacactaaactttttattttcaaaaatttccaacctacagagaggcacagtgaatacccacacaatatcaacytgaatccaccagttattgacattttgcaacatttactttatttctctcacatatatttactttgcctaattatttgaaagtaagttgcagatatacaagtattttgacaacacttgacccctttatatttcagcatatgtccccttagaacaaggacattttcttgcataaacacagcattgccacactctcaaactgacaatgacagagtactatcatctgatagacagtagtccccaaacatctctcagctgtccctttcctgcctacagccctgaattagaatccaattaagaatcacatttggcatctatttgccatctaactttggtttcctttaatctagtacagccccttgcctttttgttt

SEQ ID NO: 102805 - DNA, 539 bp, Homo sapiens
gtgtacaattcatatacacaatttaaagaaaaacaaagctaacatctaggtccttgccacatagcttataaaatggaatgctcccagagattttgaagtccgactccctaattttttttctgccttgctacctcgttgttcattctttgacctctttctcccttgctttgctttatgaaatcttcatgtatttatgtatcaaaaataaaatactacttaaatttgtctattatttagtcttataaaaacaagatcttatatatatagtcattcttctgtaacactattttttgagatacattcattttatttatttatttatggatcatactatatactatatgctcatcactatataatgctgtattgtaagaatatttcaatttatttatacatgyttagtggacaactgagctggttctcaacttttagcaatgaatacataatgctgttatgaacattcttgaacatgtttcaatgtgcatttgtaagaatttctctggaagttaattctgcctgagtgaattgctgggctttag

SEQ ID NO: 102806 - DNA, 617 bp, Homo sapiens
atgccaataaattctaagcagattaaatgattttgtaaaaaataatatcaattgccaaaatgaacccaagaagtattggaaaaatctgaatatactaggaaatttccaccagtgattaaaaacctaccatgaaagataccacaggtagggggttacaagtgagttttcttttaaagaataagcaactcatatcttgcataaatygtttctgtaaacagaaaaatcagaaagtctttataccaaatccagaaggtacaaggaaagaaaattataaactaaccccatctataatgatgaagataacaattgacatttaaattgaacatttactggtatgctataagcactttgcatgccttatcttcttaatgctaacaacaaccttatgaagttggtaccattcttgactctaattcccagctgagaaaactgaggcataaattggttaagtaacttatctaagataatagctaaaaaatggcagaacttggattttaatgcaaaaattataatttaagtgaatgaaatccaggtgtgtgtgtaatctactgcattaactgaccaaatgaaaaagaactacattaatatcaaaaagaaaacatgatgagaattatcac

SEQ ID NO: 102807 - DNA, 597 bp, Homo sapiens
tatctatctgatacattccaaataattaagaaagatatataaatgcacacttttaaagatgagtatttattgttttggcatcttcatagcttccatttggtctaaatacatacgtgaaaaagcttttttgtaccttaaattgatatacaatcttgttacccataggcattatttatcttattttatatactcataaaaatgaaatgggaatggttaacttttcaatactttccatgaattttattgtttcttttttttcttctgacaatcaatgtcaagtaatttttaaaaacaggtccttagatttgggtgcttttaagattctcttttcctgagtcatgaaaaaagatctttttactgtgttgctcagatatggtggctatttctaaagtagggtagagacaggatgcatacaagatgcagatattcaagaaaatacagtctgctgcaaaatttcccaaatgygtgttctgtggaaaactagtctcaaaagagttccatcatcaaataagtttggaagatgctgcatcttatctcccttcttggagatttatagcacacttcagaatatttaaagctttggtaaattctgcagaa

SEQ ID NO: 102808 - DNA, 542 bp, Homo sapiens
ccactgcacagtaatctgggtgacagagactctttctcaaaacaaacaaacaaaaacaagcaaacaagataacagctttttgtgcatcatttatttttattatacagctaatatgataagtttgtttcatgttatccccatttgatcaagaggaggacagtggttcagagaggttaagttatttacccaaagttgcacatctaataagtgatgaggcctggatcccacactctagtctctctcactccatgccgttaatctccatactatccctcactctccatcttgctactacaactcatttattaaaaatcacattctgggcatctgtagaccagattcagccttctagtatggaggagagaaggcaggagaaggagggagacgtgtttcatctcatgctattctcaccaggttgctatgtcagcctgttgtaaatgctcttcagaaacaatcagagtccgtccagtggaaaatgccttttcacmtggaaatggcaagaaatctttttcttcccaaggtttcagcttgaagagtacatg

SEQ ID NO: 102809 - DNA, 612 bp, Homo sapiens
atagcagcatgagaatggactaatacaaacacaaagcctattttataataaagtgttgaatatttcatgtgatttattgaatattgtactagaagtgaaaaacagaattgttgtatgggtacttgaattaggtttctactgaatgcatgggacttttggaacatcataaagttgagtcatcttaagttgaggaccatctgtatttccagttttaatttttttagttgcaaagtctgtratgtagaggaaatcatattatagatatatcccatatttgtaagcacccttccctccctcatttctagaaatctgagttcaggttctatctcctgtttattttgtgtgactttgaataagccattgataccgtaacttttaagctcttcacctgtaggactgataaccactcctgccttgctcctgtaccagtctttagaacaatcaataatgggttggaaataaaaccacagactccgtgaggaaaccacagagcaactacactcaaagtgagtagaggttgggagccctaaatttcactctgcagtgatggtgaatatagatgttacttccagagcactggaggagaaaagagattatgtaaatattaccagg

SEQ ID NO: 102810 - DNA, 612 bp, Homo sapiens
atagcagcatgagaatggactaatacaaacacaaagcctattttataataaagtgttgaatatttcatgtgatttattgaatattgtactagaagtgaaaaacagaattgttgtatgggtacttgaattaggtttctactgaatgcatgggacttttggaacatcataaagttgagtcatcttaagttgaggaccatctgtatttccagttttaatttttttagttgcaaagtctgtaatgtagaggaaatcatattatagatatatcccatatttgtaagcacccttccctccctcatttctagaaatctgagttcaggttctatctcctgttyattttgtgtgactttgaataagccattgataccgtaacttttaagctcttcacctgtaggactgataaccactcctgccttgctcctgtaccagtctttagaacaatcaataatgggttggaaataaaaccacagactccgtgaggaaaccacagagcaactacactcaaagtgagtagaggttgggagccctaaatttcactctgcagtgatggtgaatatagatgttacttccagagcactggaggagaaaagagattatgtaaatattaccagg

SEQ ID NO: 102811 - DNA, 583 bp, Homo sapiens
gttgtatgtcatatttcatagatgaaaaagcagtagagtatgcaatgttttaaatttaaggaagactcttgccacacttgcctaggctcctaatgctgctccattttcatagtagtcttgtggccaccaaaatgtaaatattccctgactttctcttttttatttgctgagaaggaaaataagtagcctaatgcttgaattctctaaatacttatttcaacaaaattatttttgtctatgaaatatcatggyaacacagttcatcttatttttgtaaaaagaaggattcaaagtttgagcttatcatttaattccatgtatagtaggtgctcaagtctgttaaattaatgcatatcccacacatgcaattattttgagtaagactctcttttattcttccaggaaatttccccgttggttttcagtatcacctggagcctccctggggacttgtaaaagttgttgaaagtactagaaaccagagatgaattaatttcacttctcacacagagaaagaaagtggattttgcaagcaatagacaggttaggattagatgaattctaagcaggattctgggaaggg

SEQ ID NO: 102812 - DNA, 575 bp, Homo sapiens
atgcatatgttaattaacttgattagctatttcaccatgtatacatattatcaagacatcatgtacaccataaatatatacaatttatatttgtcaattaaaaaaatttaaaaataatctctggaaagkttaataaaagctcccaattcacagagaaaaaataacattaatcccttaaatttctttctttatgcttgaatgggctaggagggacaagggtttttctatagcagtcctgttcaccaggtctgaggaaaagggtaaagctgacttttatgctttggctccactaaacttatccattcatccaatagaaatatttgatgagtggctatcctgtgtcaagcactgcattaggaacattaaaatgaataatgctctcttcttggccctcttcactggtcatggctcaaacacaccagtggctacagacatcccttaaaaagttactgctcttccctgaatggtggctcaatccctccaagctcatcttccctccatctgctgagctgtcatcacacatcacttctccagaatccctgatctgcttgctttgtaagtcatcttttctggtt

SEQ ID NO: 102813 - DNA, 575 bp, Homo sapiens
atgcatatgttaattaacttgattagctatttcaccatgtatacatattatcaagacatcatgtacaccataaatatatacaatttatatttgtcaattaaaaaaatttaaaaataatctctggaaagtttaataaaagctcccaattcacagagaaaaaataacattaatcccttaaatttctttctttatgcttgaatgggctaggrgggacaagggtttttctatagcagtcctgttcaccaggtctgaggaaaagggtaaagctgacttttatgctttggctccactaaacttatccattcatccaatagaaatatttgatgagtggctatcctgtgtcaagcactgcattaggaacattaaaatgaataatgctctcttcttggccctcttcactggtcatggctcaaacacaccagtggctacagacatcccttaaaaagttactgctcttccctgaatggtggctcaatccctccaagctcatcttccctccatctgctgagctgtcatcacacatcacttctccagaatccctgatctgcttgctttgtaagtcatcttttctggtt

SEQ ID NO: 102814 - DNA, 575 bp, Homo sapiens
atgcatatgttaattaacttgattagctatttcaccatgtatacatattatcaagacatcatgtacaccataaatatatacaatttatatttgtcaattaaaaaaatttaaaaataatctctggaaagtttaataaaagctcccaattcacagagaaaaaataacattaatcccttaaatttctttctttatgcttgaatgggctaggagggacaagggtttttctatagyagtcctgttcaccaggtctgaggaaaagggtaaagctgacttttatgctttggctccactaaacttatccattcatccaatagaaatatttgatgagtggctatcctgtgtcaagcactgcattaggaacattaaaatgaataatgctctcttcttggccctcttcactggtcatggctcaaacacaccagtggctacagacatcccttaaaaagttactgctcttccctgaatggtggctcaatccctccaagctcatcttccctccatctgctgagctgtcatcacacatcacttctccagaatccctgatctgcttgctttgtaagtcatcttttctggtt

SEQ ID NO: 102815 - DNA, 575 bp, Homo sapiens
atgcatatgttaattaacttgattagctatttcaccatgtatacatattatcaagacatcatgtacaccataaatatatacaatttatatttgtcaattaaaaaaatttaaaaataatctctggaaagtttaataaaagctcccaattcacagagaaaaaataacattaatcccttaaatttctttctttatgcttgaatgggctaggagggacaagggtttttctatagcmgtcctgttcaccaggtctgaggaaaagggtaaagctgacttttatgctttggctccactaaacttatccattcatccaatagaaatatttgatgagtggctatcctgtgtcaagcactgcattaggaacattaaaatgaataatgctctcttcttggccctcttcactggtcatggctcaaacacaccagtggctacagacatcccttaaaaagttactgctcttccctgaatggtggctcaatccctccaagctcatcttccctccatctgctgagctgtcatcacacatcacttctccagaatccctgatctgcttgctttgtaagtcatcttttctggtt

SEQ ID NO: 102816 - DNA, 628 bp, Homo sapiens
ttggactcaaacctgggtcatggcaggtttagttagcagcctcctccaggccttcaccacttggggagtgagaaagggcaaacctcagtggatctgtcaacttgcagggccatctttcacactagcccattccacagccagcacagctcaaaggtcttctcacacaccccaagagaccctcaagagtagagstggtgggctctctgaattttccttgtgaaataatctacacaaatgcacagtgatttaatgctggcatgaatggtattccaggacctgaatgggatagaaagcctgtggcatcctgcttgccttcagccaggtcgtctgatggatgacaagcctatgcctgcttcaaagccaacctggcctgtgctctccacatcccacagcttggcagcttaactaactaatgcttcaaacagctgggcccctggcttccgggtgacttctgctgtgagaaagttgaagcagcatatgttcatgtcagaatgcaggagcccctcacaggagctcaaattgtgactgtgtagcacagcaatgaacttttcttttctgtcatttgcccacctcatcaaaaatcagagtgtattccttgccctatcttccttttagaaaaaaaaaatga

SEQ ID NO: 102817 - DNA, 628 bp, Homo sapiens
ttggactcaaacctgggtcatggcaggtttagttagcagcctcctccaggccttcaccacttggggagtgagaaagggcaaacctcagtggatctgtcaacttgcagggccatctttcacactagcccattccacagccagcacagctcaaaggtcttctcacacaccccaagagaccctcaagagtagagctggtgggctctctgaattttccttgtgaaataatctacacaaatgcacagtgatttaatgctggcatgaatggtattccaggacctgaatgggatagaaagcctgtggcatcctgcttgccytcagccaggtcgtctgatggatgacaagcctatgcctgcttcaaagccaacctggcctgtgctctccacatcccacagcttggcagcttaactaactaatgcttcaaacagctgggcccctggcttccgggtgacttctgctgtgagaaagttgaagcagcatatgttcatgtcagaatgcaggagcccctcacaggagctcaaattgtgactgtgtagcacagcaatgaacttttcttttctgtcatttgcccacctcatcaaaaatcagagtgtattccttgccctatcttccttttagaaaaaaaaaatga

SEQ ID NO: 102818 - DNA, 680 bp, Homo sapiens
atgtgctacaaataattggctttttgttctctgctcactttttgttaatggaagcagaattttttttaatgatacttagtatataagacaacagaacactacagggaagaaaggcaaatgaggtgtctaatgaagtgacctttggcatcttggactggaaataaaatgaagactgcactaatgcaatgaaaaagtcaatgtttccaaagggttaaaaggatagatcatattatggctcaaagccaaactacacctagaatcctaccatatataaaaatggcaatcctattaatatgaaaagatgataggctctaaaatttagtaaaatgtacaagcagataagattttttaaatgtatactagaatgaatcaatcgttttatgtgaaagatttaggttgttattcagatagagttatactaccagrtacctctttaataataggcaaatatagcacacaagtgaacatagaattaataaatgtaacgtagtaaatgaaagttgtttcacaaagtaacagtactaacataaccactcttactaaaggtgagtgggaacaaattataattaaaatatacaagcatttacatggcactgctatttctaacagtaatataataaaaactgagaataacctctgaacttgaaatcaacccactgattatagaatctgaaaatcag

SEQ ID NO: 102819 - DNA, 631 bp, Homo sapiens
tacctgattatctacattttcatcatccaatttcttaaattttatttttgtgtatactttgccttgtatttcactattagacagtacactggtatctgctaatgcattaggaattttggaatggtaagcatctccagccatccttttcatatttgcaaatgttgacacgcataaaatagtagttgttttggatctggatttctcatgaagaactacatgtttttggaaaattgagcagttatccttttcatatatttaagagctctgaaagaattaccaaaataacctgaacattgtgcttaagcctggaaattcttcccttgaatcacaaattattttattaataaggttaatatatcagaagattctayttgtttttatcattagtttccaaaagcataaacaataaaatacaaaaaaagacgttgtcttccttatattcactttgctttagagcacagcaatgcaaaacatatttctcattattttcgaagcaatgatacctatttttctgggactctatttgttatggaccaggacattgaccatggaggcatgttcatggattactgttttacggtgacagcagtacggatgaggatattgggctttaaagaactgcaatcatgag

SEQ ID NO: 102820 - DNA, 605 bp, Homo sapiens
tgagttgattgaatcagataaaaacaaattgtagaaatataggctcactaatttctagtaatattttgtatgctctagagtacaaatgtgtcgtgtgaaaagttccatttgtgcagaattgagtattttacatacagataattagaaaattgtcaagacataygttgcttttacaaacgtttttgtatttattgttttgcaaatgataccaaaaattatcatggtgccgaatcctgaaaaacctctcaacttagaggtcttcatcagtgactaattgctactatttgtaacccactttaaaagcaaataaagcacccatctggtaattctattaacagtttctatgctaaaatggcaatttgtcctcaaaaaagaaaatatgcaattatgaaatatttgtatttgtgtcactcttgaaaagatacaaatgtatctggcaaaatagagtttatcattccttttcgcattctctattaagtctacaaccttttaaaaaatcaaattggattagcgacatagctatgtagctcatatatttaacaaaatggaaaattagagcaataatctgaataaatgaaggcaaacaaagaaaactcataatcaat

SEQ ID NO: 102821 - DNA, 327 bp, Homo sapiens
acaggtgtgagccaccgggcccggccagcattttttttttttttttttttttttttttaggggggttctgctgttgacagttttttctcttagcatttttttktgtgtgtgtgtttagtgtggttctgctgttgacaaatttttttttcagtgtttgcttgttttctaaagttcatttttaggctaacactgaagtaggataatgaattacaagttggcagttactattgcttcttcaaaccaatcattccattgtcccctggcttccattgtttatacagagaaatcacctatcggttttactgttacttctttgaagataagttt

SEQ ID NO: 102822 - DNA, 589 bp, Homo sapiens
ttgggtggggacacagagccaaaccatatcagcatgttcgccagtaaaacttgaccttacacatctatcatgcccagaggaaactaacacaaatcagtgccaaatgagtactgtcaataaacatatctgccctgtcacacctctttcaactctagaggagtgagaggcccctaaagtggggaagaagcagaagaactctctggggaattaaggaagaagctaacaagcccttttccatagctggtggcccatcctaacaaarggggggagtcttcaacttcaataaactttaaattctattttatgacaatgatattttagctagtgacccgagattgtctaggagacctagaagtaacttgaaaagtcaagactggtcttaactttatccaagaggataaaattaaggggcaagaggagaattgttccagcagaaaaaattttaaagagcaatgagagaaaattaagttgtttcatgattgtattatctatctgtgtcctactccttcaatataatacttgtacactaaaccaaaaaaagcatttttattatgtaaaatataatagcatctatacaatgcatccaagt

SEQ ID NO: 102823 - DNA, 562 bp, Homo sapiens
gtaactgtagtaaccatttattgttttgtgacaaatcgtcctaaaacttagaggctaaaagcaagaacaacttatttcttatggtttctgtaggtcaggaatttcagagcagtttcattgggtrgttggttctctctcaggatctttcatttgaaatgcaggcagatattggctggtgctacagtcattagtcattagaagtcttaactaggactgcaggattactttcaaggtggctcactcaactgtgcaagttggtgctgcctatcagcagggctttcatggctctgcatgtgaacatcctcacagggctccctgtgtgagtcctgaaagctggctttctctggaacaagagatccaaaagtctaaggcaaaagcttcaatgacttcaaaagcttttatgacatatatttggaagtcacacacagtcacttccactgccttctattggtcacacagaccagctctgaatcaatatggaaggaggctatacaaggccatgcattccagctgagggtcacaggggccatctcggaggctgtttacagtaacttacgttaat

SEQ ID NO: 102824 - DNA, 577 bp, Homo sapiens
ctaacttaaaacttcagtttctaggttaaagaaaatgttcacactaagtcacacatagttgactgattcaattaactaaggataatccttattctgtttattttatgaacaattgacataatgaaatcctttttttttttttaagagttggggtctcactatgttccccaggctagaktttgacttctgggctcaatatctcgacttcctgagaagccgggactacaggtgctccccactgtacctggcttatattgaaactttggtgaggtgagatatgggaaaccactttataaattagaattcttatgtaaatgtaaaatgatagtggttttgctaccattgttatgatttaaagggattattaaatactttatcaactttgtattttcttcaaaaaattgatggttttggattataacattcacctttttgggttgttttttagttaatgcagaatttcctgaagtataagttaagccactggtgaacttatacgatagtactggtaactgagcaacatcttaacccttattcatattgtatttttcaccattttattttgttactaaaataa

SEQ ID NO: 102825 - DNA, 577 bp, Homo sapiens
ctaacttaaaacttcagtttctaggttaaagaaaatgttcacactaagtcacacatagttgactgattcaattaactaaggataatccttattctgtttattttatgaacaattgacataatgaaatcctttttttttttttaagagttggggtctcactatgttccccaggctagattttgacttctgggctcaatatctcgacttcctgagaagccgggactacaggtgcwccccactgtacctggcttatattgaaactttggtgaggtgagatatgggaaaccactttataaattagaattcttatgtaaatgtaaaatgatagtggttttgctaccattgttatgatttaaagggattattaaatactttatcaactttgtattttcttcaaaaaattgatggttttggattataacattcacctttttgggttgttttttagttaatgcagaatttcctgaagtataagttaagccactggtgaacttatacgatagtactggtaactgagcaacatcttaacccttattcatattgtatttttcaccattttattttgttactaaaataa

SEQ ID NO: 102826 - DNA, 493 bp, Homo sapiens
cgatgctgcatactgtgtggaatttaaaatcctgtacaattaatggtatttagagggaaaatggaaagtaaaattggtttgctggccacaaatgcttttcacatcatcatcaactacyctctgtttcccttactctctttcactccccttacagctgagtgctgttgaatagaatcaagaaagtatcatgacacagtccactgcaaattgatactctcatgtaatatctctgcagagaccactgctaggcaacaaaggcagccatccattaaaatgttgtccaaaagggttatttcagaaatttcaatcactctcaaacctcgggttagctgtcctcatcaagagctaacctatttcacagaccagactgggatcattaagcataaacttccctgcctacctcccctcccacatagagatagtgcttttcattctatccattttctcctccaagagagtgagaggacatttttcatgtatgctcagatattcc

SEQ ID NO: 102827 - DNA, 635 bp, Homo sapiens
attattggaactttgttgatgttgtttttcttttttctttgctttgcttttccttttttttttttttgacagtgtcaactatccctaagttttcacaatccttgcatattttcactgatgctcacacatttgagaagttggccatgtcttccagcttttgcaggtgatctttggtggtttggtacttaacattagaacataatcatttgtctgctgttactttccattctggggaagacttatcgtgagtaccagaactaaaatactgcacaagacctaacttgctgccctgccattgtttctcagtctggggaacgcttacaaagagcaccaaaacttaagccacagcagaaattaatacgatattgattctttctatccatgaggatgggatgtttttccatttgtttgcgtcttcttttatttccttgagcagtagtttgtagttttccttgaagaggkccttcacatcccttgttaactgtattcctaggtattttattctctttgtagcagttgtgaatgggagttcattcatgatttgagtctctgtttgtctattgttgaagtataggagtgcctgtgatttttgcacattgattttgtatcctgagactttgctgaagttgcttatc

SEQ ID NO: 102828 - DNA, 545 bp, Homo sapiens
aagtctagttgttttcagttgcttataatcaaaagatccttaaaaatgtgggtaaaatgttcacctacccatggtttaagtaatcaaggaattctcacttagaagggtctataaatggaaaaaattggtctcagctttctcacatgtaataatggtatcctaatactcttcttccctgccatattatgaatttatagaaaaaaacctaaggctattaagatatttgccagagacaatgagcagtatgattgwtgtggtggtctgacaaccctgtgtagaccatttcggtcaccccctgtccttaggctccctggccagccagagttgatgctacactatcccaccttaatacatctcctacaaagaataacggcattagacttcccagactaaaataaaaataaactacactgttactgtcaggaaacagaagggggcaccctaagaatatttagtagttgcaaacggcagctctaaagtctttaaatacaatgaatgctttctctcaagcatagaaagcaaagcatggtcaattttacaggtaa

SEQ ID NO: 102829 - DNA, 590 bp, Homo sapiens
atcctatcaaaagaatgacaaatcaatttggaaaagagacccactgaaatgtctgaacagattcaatcttctctatgactgaataattcaactttctttttaaatccaagcctagttttatggagaagccattccttttcttcttgagtctaggaaggcaaatctggattattatatctgcaggattcagcgctcataataattgctttttgattgttttttttttctgtgaggttgctgtaagaccaaccaacaaacagggtgattaaattagggcagagtttacaaacttgatatgcacagccctcaagaattacagctctttggcctgatggtatcttttgtggggtatgcacaatattttrctaatttgatttagttgccagtatttttaaaacaggtgattttacatgttaaaaaaaatccagactttaagcttattagaaaatgtggcaactctgggcctgcgtttccacattcaatagtcagagaaacctatttttgttgggaaacagagcagttaggaatatattctgctgcaagtaatagaggtttaaaccacagggatattcattgcttgttcacaaaga

SEQ ID NO: 102830 - DNA, 624 bp, Homo sapiens
tctgtaggcccatgactcatttgctcttcagaggggagcccccaattttcctctgaaaaatctcccttatcctacttacagtccaaaatgtttatatagtattggtttcatctcaactccagcttctatgggggacaagttattaatttggcttgtgtgagcatttcattgcctccttactcacccaactactacggttggatcaagaatgagtccatacccaatatgagcctttgagacacaatctgggttttattactaggacttgtgtattttgttgaaaaatagaggcatagttcctctttttgctaaacctggacacgtagaaatataaggtctcagtttccatgagctgtatgtagaagaattttacttgagagtgatactaacagaaagggaagataaggctagaggaaaagaaagaaagtccctgttacttggtagcactgctgaatcaagcataaacatttccttttatttttaaactctctctmtatatataatatatatatatataaaaaacattaaactatgttacttattatttttttacataaagtgtatattgtatacagtttaaaaagtcccagctaagcaagccacatgtagacgaatgaaactggg

SEQ ID NO: 102831 - DNA, 584 bp, Homo sapiens
aacaaattcacacacctacagtgaactcattttttacaaaggtgccaagaacgtaaactggggaaaagacagtctcttcaataaatggttctgggaaaactgaatatccataggcagaagaatgaaactagacccctacctatcacaatatacaaaaataaaatcaaaaygtactgaagacttatatctagtatctcaaactataaaactactacaagaaaatattggggaaaatctccaggacattggtcttgggcaaagattcttgagcaaaaccccacaagcacaggcaaccaaagcaaaaatagacaaatgggatcatattaagttaaaaagcttctgcacaacaaaggatacaatcaacaaagtgaagagacaacccacagaacaggagaaaatatttgcaaattatccatctggcaagggattaaaaaccagaatatataaggagctcagacaactctacaggtaaaaaaaatctaataatccaatcaaaaaacaggcaaaagatttgaatagacatttctcaaaagaagacatacaaatggcaaacagacagaagaaaaattgctgaatatcattga

SEQ ID NO: 102832 - DNA, 584 bp, Homo sapiens
aacaaattcacacacctacagtgaactcattttttacaaaggtgccaagaacgtaaactggggaaaagacagtctcttcaataaatggttctgggaaaactgaatatccataggcagaagaatgaaactagacccctacctatcacaatatacaaaaataaaatcaaaatgtactgaagacttatatctagtatctcaaactataaaactactacaagaaaatattggggaaaatctccaggacattggtcttgggcaaagattcttgagcaaaaccccacaagcacaggcaaccaaagcaaaaatagacaaatgggatcatattaagttaaaaarcttctgcacaacaaaggatacaatcaacaaagtgaagagacaacccacagaacaggagaaaatatttgcaaattatccatctggcaagggattaaaaaccagaatatataaggagctcagacaactctacaggtaaaaaaaatctaataatccaatcaaaaaacaggcaaaagatttgaatagacatttctcaaaagaagacatacaaatggcaaacagacagaagaaaaattgctgaatatcattga

SEQ ID NO: 102833 - DNA, 584 bp, Homo sapiens
aacaaattcacacacctacagtgaactcattttttacaaaggtgccaagaacgtaaactggggaaaagacagtctcttcaataaatggttctgggaaaactgaatatccataggcagaagaatgaaactagacccctacctatcacaatatacaaaaataaaatcaaaatgtactgaagacttatatctagtatctcaaactataaaactactacaagaaaatattggggaaaatctccaggacattggtcttgggcaaagattcttgagcaaaaccccacaagcacaggcaaccaaagcaaaaatagacaaatgggatcatattaagttaaaaagcttctgcacaacaaaggatacaatcaacaaagtgaagagacaacccacagaacaggagaaaatatttgcaaattatccatctggcaagggattaaaaaccagaatatataaggagctcagacaactctacaggkaaaaaaaatctaataatccaatcaaaaaacaggcaaaagatttgaatagacatttctcaaaagaagacatacaaatggcaaacagacagaagaaaaattgctgaatatcattga

SEQ ID NO: 102834 - DNA, 577 bp, Homo sapiens
ttctctaggaaggtgaggtggtaaagtatatgggctagtaacwttaacacaatttggaagtcttgatgacaagctttagcaaaggggggaaaaagtgctctaaggcttctgccatcccatcatttgtattcattcattcatacaagaatttgtccattcattcatttggcaaacatgtctaaagtgccagctatttaccagcgtacgatctagttcttgccaccaggtagctaaggagctaataaaggagaaggactaaaacagtttcaattctcttaccaagccatatgctctttgccaataccagtatttctctctagtttacagatgagaaaaccaagtcacaaagaagggaagctattcatccagggtcacatagacggaaattataggtaacttaaattaccaatgcaatataatatttgcaatgataaccttttcatagaaaagtggttttagagaagtgttcctcagaccgaagcctcagaaacctttagacacttgttaaaatggaatttctggggaaagccgagacttttattttgtcatgctttttaggagattctcatgcacataa

SEQ ID NO: 102835 - DNA, 592 bp, Homo sapiens
ggagctaataaaggagaaggactaaaacagtttcaattctcttaccaagccatatgctctttgccaataccagtatttctctctagtttacagatgagaaaaccaagtcacaaagaagggaagctattcatccagggtcacatagacggaaattataggtaacttaaattaccaatgcaatataatatttgcaatgataaccttttcatagaaaagtggttttagagaagtgttcctcagaccgaagcctcagaaacctttagacacttgttaaaatggaatttctggggaaakccgagacttttattttgtcatgctttttaggagattctcatgcacataagtttgggcactgcctctggagagtttctactgctattccgttgttggaaatgaatttcctttagcagtatatgagaacattagctctggttatgtttttatttaaaggaagaaatgaaaaagccaatgtgaacctacatgggccttcccttactccattttctccctttttatttcatctctttctcaagaagacaatgaaaacggcttccattcatttctttcttttggcattgcatccatacagccc

SEQ ID NO: 102836 - DNA, 577 bp, Homo sapiens
ttctctaggaaggtgaggtggtaaagtatatgggctagtaactttaacacaatttggaagtcttgatgacaagctttagcaaaggggggaaaaagtgctctaaggcttctgccatcccatcatttgtattcattcattcatacaagaatttgtccattcattcatttggcaaacatgtctaaagtgccagctatttaccagcgtacgatctagttcttgccaccaggtagctaaggagctaataaaggagaaggactaaaacagtttcaattctcttaccaagccatatgctctttgccaataccagtatttctctctagtttacagatgagaaaaccaagtcacaaagaagggaagctattcatccagggtcacatagacggaaattataggtaacttaaattaccaatgcaatataatatttgcaatgataaccttttcatagaaaagtggttttagagaagtgttcctcagaccgaagcctcagaaacctttagacacttgttaaaatggaatttctggggaaagcygagacttttattttgtcatgctttttaggagattctcatgcacataa

SEQ ID NO: 102837 - DNA, 579 bp, Homo sapiens
tcttcagttatagatgaaaatatcaaagcacaaaaagaataagcaatttatccagggtcactgtcagatggagatgattaatcatttaaaatacaaggagtttagcacctgggaatgtaagccagaaaatgaaagcagcatctaatccagcacttttatattaaagacgaggaaactgcagcccagaaagagtaagaatattgtccaagrttgatttggatggagactggaagccctggtcctgaacagacagtacttttcccacaagaccaatgactgtcaactatggctacacattacaattaccagggggagcttaaaaattaaaaaaaaaaacaaaccctaaagacattgattatcttggtccaacaccagggattctgatcagctggtctgaaataagttctgaagatcagtgttttttaaagctaccccaggtgattctaatgtaaagccaacgttgagaaacattgaaggacaccagtggttctcaaactttagcatatttcagaattgctcggagctggatcctgccctcagaatttctaattcaatatgtttgaggcaagactcaagaat

SEQ ID NO: 102838 - DNA, 504 bp, Homo sapiens
taggcactcaataaatatttgctgaatagatgaatgaataaatgcagccaagacatgcaaaagtattcatagcattaagctaaaaacaaggcagctttgattctctgtagacatgagttggggctcaattaccacatccctttcaaagaattgttccaaatcagtcactcataaggaattatwtaaagacctatttatcataatgctattagaaaacacaagggtgggaaaggggactgtcgcctctgcattgagtgtcttttggttcttactctggccaaaaatccatgtcatctagacagagccaagatcaaaggggaaacacctaggcactcatctccaggtgcctttgttggctgaaaattggcagcaactcaagtgtttagaactgcttagtgagcccttaaaagtcaattagatcattttactccctgtttaaaactacccaatgatattctgtgacacttaaaacccaaactcctcaccataacttaaaaggtccta

SEQ ID NO: 102839 - DNA, 568 bp, Homo sapiens
taccctcttttgtccctgggattccaagtctaaagcctctgtggtttaattctatcaggggccattstttccatcttgtgagggggtcatgaaggcaggagtctagagaactacaggcacaattgctcctcccactgactttcaaaatacctccctatttttagccaccacttgactaccaccatctgaaaaatcagattcctttaattcctgagcctttatgaggctcttcagggcaatctgacacctgagtaaatgactactgtactctgcttagtcatttaccattcctacatctgccttctgtcttcatacattatactttaggagttatatatttaatttaatggaagatgatttgatatgagatggaatttgtattgctgtattccatgatgttctgggagtgattttcaaaaggaggaggttgattttacataattaccttaaggctagaagttcagaaaatagactttaagtggcaaaggcaattgatttccaagcaggtaattcttaatttttacatttattataaatatatctaaactaaaaataggaagatttaaat

SEQ ID NO: 102840 - DNA, 640 bp, Homo sapiens
tgtgtggccttatgttgatgtctatgcatctcaaggagcaaacatctcttcttatctttacagatggttttaataggtaaaaatgttcttatgccaggtccccagacgagtggaactgcttctgggatcacatttaagtggggctggagccaggkcatggggctgttgccaggtctgagttggtaggcctgttactggagtcataaatgggcatggtttctcctgaatccccgtgtggacaggactgaccctgggacctgggtagagcaaggctggaaccaagtctttgggccacttcagggttcacagctaaggctgcattcagcattcacagttggaactgaagtcagtcagtctgttactagaggcagagatgcgtttctctaggtccctgggtgggcaggacaaagagcaaggctagagctgctcacagggcgacttcagtatctgtggttacgtctgccacgagtggccctgtaacaggtaatggacaggcatggtttttccagagccctttggtagatgggactggttttaggactacaatcaaatggaggggatgggactgctttcagtctgttgttaggaccatgtttggcaagcctgataccagggttacgtgtccccattctcaaatcag

SEQ ID NO: 102841 - DNA, 599 bp, Homo sapiens
cataaatacaataacttcctcaggaagtatcaggggaggcttcacagagaagcaatgcctaagcaaattccaggtagtaggaacagcatgtataaatgtatgagtaaatgtgggaggctgaggcaggtggagcacccgaggtcagaagttcaagacgagtctggccaacatagagaatgaaaccccatctctactaaaaatacaaagaaattagccaggtgtagtggtgcatgcctgtagtcccagctacttgggaggctgaggcaggataatcacttgaacctgggaggcagaggttgcaatgagctgagatcacgccattgcactccaaccttggtgacagagtgagactccatctcaaaaaaaaaaaaaatagtataagtggaatagcatagtatgtttccagaaatgtggatggtttgcagttgcagaaggtggaaagaggtaataaataaaagagcaggggcaaaatcacaagaagctttgcataccaggctaaagagcttgtacattatgcagtaaactaaagcktttcacattgtgataactgagtaataaaaacaaaatcctaagctccacatctgactgaacaagccccc

SEQ ID NO: 102842 - DNA, 592 bp, Homo sapiens
ctatttcaggtctttgtggttccatatgaaatttggaattgtttttactatttctgtcaaaaaattaactttgatattttgatagaaattacattgaacctgtagttagctttatatagtacggaaattttaaaatattactttttctaacccaagaacacaagataatctttctacttaattgtattttcttcagatctttcattaacatttatagttttcagggtataggtctttcacttccttatttaaatttattcctaaataatttatttttctagctattgtaaatgggattgttcttttgatttctttttcagatagttcattgatggtgtatagaaactactgatttttgtgtgttttttttttaatcttacaactttactgtattcatttcttaattctagcagtttcttggtagaacattawgggtttttaatgtataagattatattgtcgcaaagagtgacagtttcacttctttatttatctgtttgcgtgcattttacttttttttcttttgcccagttagtctggcaaagccttccaatacaatgttgaatagaagtggtgcaagtgagtgtccttg

SEQ ID NO: 102843 - DNA, 520 bp, Homo sapiens
tacctcaccctttggcaaaaaaactcagaatatatttatcatagcctagtaaatgttatatctggaaagactggtgaagcaggaagtatatagggaaaaggcaaggcttctacattgcacaactgcagggggtacaatacacatgggattcaacgtagaggactcattctggaattcggcaacatagcacccctgagtaagggagaacatttgcttcctgttcagcctttagggtatggtgaacacctgccggcctgatctgcctaggaatgtttctcattcttttagctaagaatgctgkttttcccctgggaactctcccttccccactttacccccaattccatgaaatcttcctgggactctctagtggggattcaagctagccaatctctccttaaaatctgaactgtgagtagaattatgcaaggccagaaattgttggagctgatgcattttacagtaactccctgagaagattgcttattacttccagtgccactcctagccctttgtgatg

SEQ ID NO: 102844 - DNA, 576 bp, Homo sapiens
gcaacatagcacccctgagtaagggagaacatttgcttcctgttcagcctttagggtatggtgaacacctgccggcctgatctgcctaggaatgtttctcattcttttagctaagaatgctgtttttcccctgggaactctcccttccccactttacccccaattccatgaaatcttcctgggactctctagtggggattcaagctagccaatctctccttaaaatctgaactgtgagtagaattaygcaaggccagaaattgttggagctgatgcattttacagtaactccctgagaagattgcttattacttccagtgccactcctagccctttgtgatgcttagaaaagacatggagctcagggaattgaagcatctttcagcaaagaaaaagtcaccctttctccaggcagacaaaaccccctacagagaggcaagccttggtgagcagacagcaaactaaatccaccctaatttacctggtcagccaggtgccctgatgaccctgaaacccctataccctttcctctacttttggaaacctagttgttcagattgtctttcaattctctta

SEQ ID NO: 102845 - DNA, 541 bp, Homo sapiens
gcttttggctgcaagttacaaaacaaccaactgaaattggcttaaagaacaaggaaagtgatgggctcaagacccaaaaagggccgacttcagagttggataagcacagagctcttgctccgtttttctgccacatccacagttgcacctgcttccatgggttggctaagctccctcattgttgcaaaatggmtttagcaacctcatacctcacagacatatggccaatacccagaagagagagagtttctttgggtgacacttcatagagagcaaagatacttttctcccagaaaacttcctttggggactactggagactggcatcttcttacgggatcctacctctattgttagtgatggattgagaagtggataccaaacccaaaatgaactaattatagaatgtaatcccattggccacatcattggtctgtggatgggcatataacccaagcccaggtgattacaatattttcttaggaattttctaactgaagccggggtcaagagacacctctctctggttgcgatgctatat

SEQ ID NO: 102846 - DNA, 483 bp, Homo sapiens
tcctattggaagagaaatgatcagaaatcttaaatgcctactgaggaatgtaattgacctgacattaaattttagaaggggaaatacatttggtaattaaaacaagagtctaaaattcagttccttttgagggacaaggcaaatcattgaggggaggaaagtagagactgagagaaaaacggaaggaaaaaagagtgattgygggcaaagtgagaaggtcattgtcactggtggaggggaaaagatagtgagggaccagtgaagagaagaatggagatgagagtaaagatccaatcaagatgttctgaattaactgatataagcagctcagcaaaactggctctgaaacaagacagagatagagccaatcccagtcccactatgcaccagtgtgtgactagcttccttcccttccctgagcttaattattccatctataaaacaaagatgatattgtttatccagtggggatgttgtagggct

SEQ ID NO: 102847 - DNA, 575 bp, Homo sapiens
cactccttctttccattaacatttcctctttgccttcaacttgaccttcagactcttaacctggattctctcacacttttcttttcttttgaattaattgactttcctggccagccaatactctgcatttagcctttgcatacttttactttcatatttacataaacaccaagcagaaattgccattctttttctttactgcatctccgtcatagagaaacttacagtttgagaatgaatgttgaacttgcaactgttagggcagatgcagatactatttcaaataattctggtcctgaagactagttaaattgtgaggcaattcccagtctgagtctgttcttgagtgggcccagcttgggatgatcttggagtcagtaggtggaattaaagtcctggttccgattaagagtgcacccgaccgggcacgtgtggctcacacctgtaatcccagcactttgggaggccgaggtgggcagatcacraggtcaggagatcgagaccatcctgactaatgcggtgaaaccccatctctactaaaaatacaaaatactagccgggcatggtggtgggca

SEQ ID NO: 102848 - DNA, 685 bp, Homo sapiens
tcttaactttgacacttataattgggtttcacagcactactgccctgaaaatgatgttcatcattaaaacgttttaaagttattctctgatcaaaaacttgtctaacaatgaaaaccwcccaagtaaatcatttctcaaaattgttccacaggctagttctttcctatttacctagcccagcactaaataatatagtgatttttttaagaagctgtaaaatacaatgtttttaaagaaaacacacagtaaaaatatttaataagagaaatgtgtttagtaaagaatgatataatttgaaatcagacatcctggggtccataacccagctctgcctcataccatctagtgtatcggggaaaacgattctgtattcagttttctcaagagtaaaagaagtatcagtatgcctgccttcatggtcataaacatagaaattataggcactggggactccaaaagagaagagtgtgagagtgcttggggtggtggtgagggtggaaaaattatctcttagatataattatctatttaggtgatgggtaccctagaagcctaaacctcactattacacaatctatccacatgacaagcctgtacatgtatcccttgaatctgaaatataataaaagaaagaatgtctgccttatagagtcatgtgcgggataaagataatgtacattacga

SEQ ID NO: 102849 - DNA, 685 bp, Homo sapiens
tcttaactttgacacttataattgggtttcacagcactactgccctgaaaatgatgttcatcattaaaacgttttaaagttattctctgatcaaaaacttgtctaacaatgaaaacctcccaagtaaatcatttctcaaaattgttccacaggctagttctttcctatttacctagcccagcactaaataatatagtgatttttttaagaagctgtaaaatacaatgtttttaaagaaaacacacagtaaaaatatttaataagagaaatgtgtttagtaaagaatgatataatttgaaatcagacatcctggggtccataacccagctctgcctcataccatctagtgtatcggggaaaacgattctgtattcagttttctcaagagtaaaagaagtatcagtatgcctgccttcatggtcataaacatagaaattataggcactggggactccaaaagagaagagtgtgagagtgcttggggtggtggtgagggtggaaaaattatctcttagatataattatctatttaggtgatgggtaccctagaagcctaaacctcactattacacaatctatccacatgacaagcctgtacatgtatcccttgaatctraaatataataaaagaaagaatgtctgccttatagagtcatgtgcgggataaagataatgtacattacga

SEQ ID NO: 102850 - DNA, 504 bp, Homo sapiens
ttttatgtctgccctgtcgtcttgattttgctctaattattaagaaaagctgtatccatataacatacttgaaatgatttaaagttttgcaaattacagcataattagtatagtgactacaggaggattaaataattaaatcatttctaggactttcaaagtaatgttgcttgttatatttatggctgttcttccaggcattgacatttcctatgcaagaaatagactctaggagatgaaaataattaaaaatgcatatacattgtttcaggctcagagaaaggaattgcttcaactatcaattattgatatattttgattcttcttcattcaatacagaagacatatttcactaggggattctctactatgcttttgaagctgagacctctctctttctctctctctctaacatatatatatatatatatataaaacatatatatataacatatatawaaaacatatatatataacatatatatataacatatatatatataa

SEQ ID NO: 102851 - DNA, 504 bp, Homo sapiens
ttttatgtctgccctgtcgtcttgattttgctctaattattaagaaaagctgtatccatataacatacttgaaatgatttaaagttttgcaaattacagcataattagtatagtgactacaggaggattaaataattaaatcatttctaggactttcaaagtaatgttgcttgttatatttatggctgttcttccaggcattgacatttcctatgcaagaaatagactctaggagatgaaaataattaaaaatgcatatacattgtttcaggctcagagaaaggaattgcttcaactatcaattattgatatattttgattcttcttcattcaatacagaagacatatttcactaggggattctctactatgcttttgaagctgagacctctctctttctctctctctctaacatatatatatatatatatataaaacatatatatataacatatataaawaacatatatatataacatatatatataacatatatatatataa

SEQ ID NO: 102852 - DNA, 551 bp, Homo sapiens
accaagctgctccccacaggttctagagggtctgggtttctaacatttctattaaaagaactccagagggtgaatgagggaaatcatccatcaataaatcaagcaactaattatttcactttgccataatctctttaagaaatggtgttccaaagtgaaaggaagaattccacatgagaagacatcaagacagcctatgaagatcttgacataggaatttgtacattgctacacaggaagcatttaccacccaccacagaggaatgcagtttatttgataattatttgtctaggttataaaccctttttgtaacagtttactgaaatataattcacataccatacaattaaccaayttaaaatatacaatataatggtttttactgggctcagagtgtacaagcatttacaacaatcagctttataacttttctcccatataagtgccaaccaggctcaactctgcttagcttccaatatcagaacagattgacacattcaaggtagtgtggctgtagagaatttcatataacattttatcatacccaaaa

SEQ ID NO: 102853 - DNA, 541 bp, Homo sapiens
ttatttcactttgccataatctctttaagaaatggtgttccaaagtgaaaggaagaattccacatgagaagacatcaagacagcctatgaagatcttgacataggaatttgtacattgctacacaggaagcatttaccacccaccacagaggaatgcagtttatttgataattatttgtctaggttataaaccctttttgtaacagtttactgaaatataattcacataccatacaattaaccaacttaaaatatacaatataatggtttttactgggctcagagtgtacaagcatttacaacaatcagctttataacttttctcccatataagtgccaaccaggctcaactctgcttagcttccaatatcagaacagattgacacattcaaggtagtgtggctgtagagaatttcatataacattttatcatacscaaaagaaacccacaccctttagctaccaccttctaacccctacttcttcccactccagctctaagcaagcactcattctactttggtgtctctatagatatgcc

SEQ ID NO: 102854 - DNA, 541 bp, Homo sapiens
ttatttcactttgccataatctctttaagaaatggtgttccaaagtgaaaggaagaattccacatgagaagacatcaagacagcctatgaagatcttgacataggaatttgtacattgctacacaggaagcatttaccacccaccacagaggaatgcagtttatttgataattatttgtctaggttataaaccctttttgtaacagtttactgaaatataattcacataccatacaattaaccaacttaaaatatacaatataatggtttttactgggctcagagtgtacaagcatttacaacaatcagctttataacttttctcccatataagtgccaaccaggctcaactctgcttagcttccaatatcagaacagattgacacattcaaggtagtgtggctgtagagaatttcatataacattttatcatacccaaaagaaacccacaccctttagctaccacctyctaacccctacttcttcccactccagctctaagcaagcactcattctactttggtgtctctatagatatgcc

SEQ ID NO: 102855 - DNA, 622 bp, Homo sapiens
ttgtcacagttcgatattaagttcattagatcaatgattaaccccttaaagaccattgctgatttgtgattttgttcctgagcttcaaccccacaaaatcttgtcttcctatcttattcctctggtcaaatctgactatcaaaagacctggtgtgctcactggtcaagcctagaatgtcctccaatttcaccattgcctctatcacggggtagaaatatattggctttcctttactctgtgtaattcaggtattttataaatcttaaaytccctaatttaagaaattccccaattaacatttctttattcttaccaaaattgttttcagtaaaaaaacaagacttagtaatcttagtcatcatactgattcaactactcacagatttttgcatttcttaactggccaatagacacagctctttttatttgtcatctctcagcttttaaataagaaaaaagtaaaccccaggaatgagtgacagaagtattcaggctttcattattaagttgacaaaacaagccattttatttgttgaaaacgctgatattataccaggatcaaagggaagaatatttgtgtgtgtgagtgtgtgtgtgtctttcctgaagggactcaaaaga

SEQ ID NO: 102856 - DNA, 522 bp, Homo sapiens
tacatgaccctctggcttggctacacactacagctatatgcctgtcttaaaagcccagaaagaaatattgccccagctaggggaggtacacgacacaatccaatcagttgtaaccagaaggtcaattcacatgatctacatcccttctgttctgaaggggaaaagtttaaggcattcattcaaaaacagtttttgcagagttcctattatgtgccaggccatgtggcaggaygctgagagaaaacacagccatcatctaggggttgttgggggaaggaatgtcccagagccaggcagaaccaggcttcagttagaatgcatgaaaaatgagggaaacatttagaaatgaattagattttgttgatgctgggtcatggatttgagagaacacattggaagggagttgggggtggggcagtggagatgggataatggaatcagaacaggaaatggcttttgtacacacatgtcctattagagatgcctattatgttcttacaattatgttctaagaaataatat

SEQ ID NO: 102857 - DNA, 424 bp, Homo sapiens
ttcataaaaggagcccatgacctgaatatcatgctgagcagctggccatatggaaattaaaaagtttaccatcgaggttcctgagttctttaagtaaccacaggacctcaaagactctgttttagcatttaaagtgaaagacataataactaaagagatgagggaatctcagcagagaaatattaactataaaatactactaactggaaattctgaactggaaaggtcaatatatgaaataaaaaattgacttgatggtcaacagtacaatggagacttcagacaaaacagtcagtcaatttaaagacagggcaatagaaactatccagactgaagcacagagagaaaacagactaaaataaatgaacaacctattagttgtttgaagaataatgtaagaycattataacatatgtgtaattgg

SEQ ID NO: 102858 - DNA, 593 bp, Homo sapiens
aacaatctaataagtgaaggttaatatatctaagcaagtaatgtgttcctccaaatatagttgattaaatttgcttaatactgatgctaaagctggcttcctamcactcaaattagagacaacgtgtcttccatgcagacctggcctccctttcctcatcagtgagaatggagagtaagggattcctctggcagccaccgtgaagggtgttttcctgcaagaagagcacacaccacccttggatataagacaaaataagaatcacaaagccaggttgctggctgtaggcagaataggtagacctactaataagataccagtttttttttcccaaggagagaggacagcaagggtgtattggagtcagaattcaataatcgctgtaaagaggtagagtattcaaaattattaaagtgatagagatttttagttttccctgttttcctgtccactttccccaccattaaggtttaaaacacgaagctccttgtgtcataggaaaagaaagtatttacaagagctcagtgtacacatatgaatctcaaagctgacatctttgtaactaacatcttaaaaagcctgaaatcttaaaa

SEQ ID NO: 102859 - DNA, 615 bp, Homo sapiens
aaggaaggtgatggtaggtagataaaacttggtggggtaatatccctccagtttcctacaggagccgtaacgccacatctttatttactttgtgtcaggaagtatgtgacatgctgtatattatcatatttaaattatctctaaaactgtgaaatcgtcattgctgttatgaggaaatagatactcaaagaggggttgcacataagtactggggacagatgtttgcctgtagtgattttattgaggaaagaatgtgtgggcaagtgggcagaggactgggcagaggaagaagttgaactgcaatgcagtttcracaaagacctcagacactctcataggaaggtacggaactggaatggcccttcagattttcccaaatcatggcaaagaagaagggctttgtaccctgaatcaacaaatcattgcaagcaggctgtccccagagaggaaatgtaaccttggttaggtagttccctttagctgggggcaatcccagagaaagtctccagccaccaacattctcatcaactgggagaagggatgctgcagccctgaggatgaggatccgagtgctgttccacagaattcactatgagggattaaacaacttgtcca

SEQ ID NO: 102860 - DNA, 560 bp, Homo sapiens
aatatttgaagcaataatggctgagtattttccaaaattaatgacaaacaccaaccacagattgaggaagttcagagatcaaggaggacaaatttcaaaaaatctctaacgaggcttattatattccaactgaagtaaataaaaaaaaacaaagagacaatcttgaaagaagctgggggagtgggggtacccaccacatccataaaggaacaagaatcaaaattatagtgtacttctcatcagaaatcatgtaacaggaagacccaggagtgaaatatttgaagtgttgaaagaaaaattttttaaaaactagaattgtatatccagtgaaattattcttaaaaagtgaagaaaaagtaaayactttctcgccaaataaagagggagataattagctgccaggaagcttgccttgcaagaaatgttaaaaagaagtacttcagagagaagaaaaatgatagctcagaaactcagatctgtataaagaagagcattagacaaggaataaatgaaggtaaaaaattatttttcttcttaattaacagataacagtttgttgg

SEQ ID NO: 102861 - DNA, 538 bp, Homo sapiens
ggaggcaattcaaccttttgagccaaataggtagtatcacctaaaaagaatcaaatctcagtcaactatggatccccacagattaagccaggttctwctctttcctctgaagagatagggtaaaccaatttgccaaaagcagatccaacacgttgtctgttcattttctaagatcactagtttagaaaataatctccatttatttcataagaagtactgacatttccattaaaatgttctcacagaagaaaaagacacactcaaattcccctatagattttcaaggggtcttgttcagacagctatctattttaactcaagcacctcacaaaactggacgtaagtcgggggtggcttataagtggagcatatctatccttcctcttcctctacccacaaccaactttgctactatgcacctgttctcaaagcccttttcaaaacaggactttgtctcttttccccccaggtcaaaattaaaggtctgagtaagcaatcaacttaacaaactgttttcagtttgcggccaactaggcta

SEQ ID NO: 102862 - DNA, 538 bp, Homo sapiens
ggaggcaattcaaccttttgagccaaataggtagtatcacctaaaaagaatcaaatctcagtcaactatggatccccacagattaagccaggttctactctttcctctgaagagatagggtaaaccaatttgccaaaagcagatccaacacgttgtctgttcattttctaagatcactagtttagaarataatctccatttatttcataagaagtactgacatttccattaaaatgttctcacagaagaaaaagacacactcaaattcccctatagattttcaaggggtcttgttcagacagctatctattttaactcaagcacctcacaaaactggacgtaagtcgggggtggcttataagtggagcatatctatccttcctcttcctctacccacaaccaactttgctactatgcacctgttctcaaagcccttttcaaaacaggactttgtctcttttccccccaggtcaaaattaaaggtctgagtaagcaatcaacttaacaaactgttttcagtttgcggccaactaggcta

SEQ ID NO: 102863 - DNA, 538 bp, Homo sapiens
ggaggcaattcaaccttttgagccaaataggtagtatcacctaaaaagaatcaaatctcagtcaactatggatccccacagattaagccaggttctactctttcctctgaagagatagggtaaaccaatttgccaaaagcagatccaacacgttgtctgttcattttctaagatcactagtttagaaaataatctccatttatttcataagaagtactgacatttccattaaaatgttctcacagaagaaaaagacacactcaaattcccctatagattttcaaggggtcttgttcagacagctatctattttaactcaagcacctcacaaaactggacgtaagtsgggggtggcttataagtggagcatatctatccttcctcttcctctacccacaaccaactttgctactatgcacctgttctcaaagcccttttcaaaacaggactttgtctcttttccccccaggtcaaaattaaaggtctgagtaagcaatcaacttaacaaactgttttcagtttgcggccaactaggcta

SEQ ID NO: 102864 - DNA, 578 bp, Homo sapiens
agtcccccatatgtgattattttagcttgtactttggcctatactaggtagtctattcgggctcatttccttcccttgtgtgtggatgtgttgtaattgaatagtatcagttgtatattaggggctaatgcatgcatgcttcctcctccctatgtatgcatgcttcctgctccctaatgttatgcagattagtgcctggtgtgtacttgaagtttaatgcatccctgtttccttacctcatgtgtgaggaaagttgtagtaaaccagtgcctgggatatacgaggtgcttcataaatactgtttttcttctcttgtatgtcaataagtctgtactggaatagaacctagtatacactgaatgttcaatacatacttccgtcctttcacatatgtatcagtaatgatgtactagaatattgcctggcatatcactgctccatgcaggcttgtagtttatgttattctagaattgtatcttacatacaagtttccaatgtatatttgcttctttcccctagatgtgagtaagttatgatagagtaaaacctgaaatacrttaaacacttaatgcatgctc

SEQ ID NO: 102865 - DNA, 538 bp, Homo sapiens
acaggtccccaaaatgttcctaattcccctgcagtctgttctgttttgaaagctgtttaaaaacatcctgaggaaaaagtcccaggggagtggctaagcgtgccagcmaggtgagtgcattttcatctgctagagtgatataaagtctgaatacaaggaacaccaagaactggagctggaatattgaatccccttccctctatgattataattcaaacttacggggtttctgaatcactcatcttatcacacctggctgccatagtggccatatgtgtagcgtagttggctaaagggtgttccccactgattgtatttgagagcttgtacagtatccagacccagacaatgtctagggctgctgggcatcttggaggcaaatgttatcatcctagaaaatgtcaataaagacattaagctctgaccacctacagagaaacaaatacgtgtacccatacatgtgtgaaggcatcctcacaatgtccttattcttggactcaacccattaggtttaggaccagcacaagacactaaggat

SEQ ID NO: 102866 - DNA, 566 bp, Homo sapiens
cttcatccatagtaagacccctttgggrgagcaaagaataggtcactattctggaaaggactggcagttagatttcacccatatgcctaagtcaaagggatttcaatacttgttggtctgtgttgatgcctttacagattggatagaagctttcccctgcaagacagagaaggtttaggaagtgattaaactcctaattcatgaaataatttctatatttgggcttccccaaagcttacagagtgaaaattgtctggcttttaaggctgcgataactcaaggaatttccagggtgctagcgatacaatatcaccttcactgtgcctggaggccacaatcctcagggaaggtcaagaaggcaaatgaaacacttaagagacacttaaggaaactaacacaagaaacacatctcccatggcctagctattttgaccattgccttgttgagaatccgaaattctcctcacaaaatggggctcagtccatatgaaatgctgtatggacgatcttttctcacaaaagaccccctactggatcaggaaatggcctacttggtcaaagatata

SEQ ID NO: 102867 - DNA, 566 bp, Homo sapiens
cttcatccatagtaagacccctttgggagagcaaagaataggtcactattctggaaaggactggcagttagatttcacccatatgcctaastcaaagggatttcaatacttgttggtctgtgttgatgcctttacagattggatagaagctttcccctgcaagacagagaaggtttaggaagtgattaaactcctaattcatgaaataatttctatatttgggcttccccaaagcttacagagtgaaaattgtctggcttttaaggctgcgataactcaaggaatttccagggtgctagcgatacaatatcaccttcactgtgcctggaggccacaatcctcagggaaggtcaagaaggcaaatgaaacacttaagagacacttaaggaaactaacacaagaaacacatctcccatggcctagctattttgaccattgccttgttgagaatccgaaattctcctcacaaaatggggctcagtccatatgaaatgctgtatggacgatcttttctcacaaaagaccccctactggatcaggaaatggcctacttggtcaaagatata

SEQ ID NO: 102868 - DNA, 566 bp, Homo sapiens
cttcatccatagtaagacccctttgggagagcaaagaataggtcactattctggaaaggactggcagttagatttcacccatatgcctaagtcaaagggatttcaatacttgttggtctgtgttgatgcctttacagattggatagaagctttcccctgcaagacagagaaggtttaggaagtgattaaactcctaattcatgaaataatttctatatttgggcttccccaaagcttacagagtgaaaattgtctggcttttaaggctgcgataactcaaggaatttccagggtgctagcgatacaatatcaccttcactgtgcctggaggccacaatcctcagggaaggtcaagaaggcaaatgaaacacttaagagacacttaaggaaactaacacaagaaacacatctcccatggcctagctattttgaccattgccttgttgagaatcckaaattctcctcacaaaatggggctcagtccatatgaaatgctgtatggacgatcttttctcacaaaagaccccctactggatcaggaaatggcctacttggtcaaagatata

SEQ ID NO: 102869 - DNA, 641 bp, Homo sapiens
gtattgcagcaagttttttctctttatggcwtatgcatttctctgtgtcatgaaaattcttcaagaaatttaatatattaataaaaatctatcccaaggagctgtccttattcatctgactattcaacttttaccagacattttggtcagttttttaccattacaaactagactcagcctctttgtgcataacactttgtctgtgtttcagatgattacattttccagttgtttgtacataaggggtggagcctaatccagagacccacctgcaacgctagctctggacaaaactgcaaaaagtcctcacccttcattcttttctgaagtgtccagtgctttcctgtggcctatccttcctttcacaagtagccagggagacacttttgagagatttctctattccttgcctccccgccccccaaaaaacaatgcaacaaaaccaaaggccactccagcaaggagaccgcctctttgacttttgcatgaggtaccttctcttggccaccttctgttaaacgtggatttgttaatatgccctgtgacccatccattttaggccctgcctgggcaaaacctctcagctcaagctgagaagatggatcacagccaagggcacaatcttcatactccatcctagg

SEQ ID NO: 102870 - DNA, 599 bp, Homo sapiens
tttcaaaatactgaaaaaataaatatcacccccaaattctacacacagagaagatacattgaaagaacaaaggtaagaaaaaggcattttcagatatccaaaaattggaagtttaccactacgaaatctcactgaaagttatactccagggtagaaaaataaataaaataaaaagaaatcccagaaagaaagtctgaggtggaagaataaataaagtggtatatgggtaaatctaatcaaacattaactgcatyaaattatttaaaaagcaatatatcaaaagtatatatattatatgaaaagtaatatctttttaaatatagaattaaaaggcatgaaaagggacttacacttttgctctcaaagctttaaactgctacaggatttgctctaccacagtaaacaattcaaaacaaaaaattaagaaagaaacgttggctaggtgtggtggctcatgcctgtaatcctagcactttgggaggccaagtgatttggtttggccatgtcctcacccaaaatttcattttgaattgtaatccccataatacccatgtgtcaagagtgggaccaggtggaggtaagtggatcatggatgtggt

SEQ ID NO: 102871 - DNA, 624 bp, Homo sapiens
catggtatgaaatctttaacacattttctcagtaatcaaaggaataaacagattttttaagacaggagagacagatattcagtcaatttgttaaactttactggatggacatgagtagtcctctatatccaatggctacagaagacactttcttttcaatcattgtcccccagctttagctgggacattgaggctctaggaagattactgyttggtgcagcaagatgcagtgaaacaagatctcaatttgagtctcctctcacctgaatcactgattttccactttttctggatagctctaaatgtctcctgcaacccttagtgcaaatgttcctgtccccaaagccacacccagcatctcaaagccagcccaaagccagcatgacattgctgaaggctgaggtgttataaggaaggaagaaggcaggaagcaatgcaggacaaaggcattgttgcccacagcccagctgctagggtttgcccgaggaggatgtccacagactttcggtgtggttggctggctgttcccagacccagtcaaggaagctggaagatccaagcttaagacagctctagaatctccatcactgcataccttagacagtgggctcctgggccttagga

SEQ ID NO: 102872 - DNA, 624 bp, Homo sapiens
catggtatgaaatctttaacacattttctcagtaatcaaaggaataaacagattttttaagacaggagagacagatattcagtcaatttgttaaactttactggatggacatgagtagtcctctatatccaatggctacagaagacactttcttttcaatcattgtcccccagctttagctgggacattgaggctctaggaagattactgcttggtgcagcaagatgcagtgaaacaagatctcaatttgagtctcctctcacctgaatcactrattttccactttttctggatagctctaaatgtctcctgcaacccttagtgcaaatgttcctgtccccaaagccacacccagcatctcaaagccagcccaaagccagcatgacattgctgaaggctgaggtgttataaggaaggaagaaggcaggaagcaatgcaggacaaaggcattgttgcccacagcccagctgctagggtttgcccgaggaggatgtccacagactttcggtgtggttggctggctgttcccagacccagtcaaggaagctggaagatccaagcttaagacagctctagaatctccatcactgcataccttagacagtgggctcctgggccttagga

SEQ ID NO: 102873 - DNA, 624 bp, Homo sapiens
catggtatgaaatctttaacacattttctcagtaatcaaaggaataaacagattttttaagacaggagagacagatattcagtcaatttgttaaactttactggatggacatgagtagtcctctatatccaatggctacagaagacactttcttttcaatcattgtcccccagctttagctgggacattgaggctctaggaagattactgcttggtgcagcaagatgcagtgaaacaagatctcaatttgagtctcctctcacctgaatcactgattttccactttttctggatagctctaaatgyctcctgcaacccttagtgcaaatgttcctgtccccaaagccacacccagcatctcaaagccagcccaaagccagcatgacattgctgaaggctgaggtgttataaggaaggaagaaggcaggaagcaatgcaggacaaaggcattgttgcccacagcccagctgctagggtttgcccgaggaggatgtccacagactttcggtgtggttggctggctgttcccagacccagtcaaggaagctggaagatccaagcttaagacagctctagaatctccatcactgcataccttagacagtgggctcctgggccttagga

SEQ ID NO: 102874 - DNA, 628 bp, Homo sapiens
cctgaccttggctgggtacgtgacccctggcctctaccattgactaagccctaaccctgatcacagactaagcccagtgtctggctgcagaatgatccccaaacaccaatcaatcaattaatcaaccatctgacagctctgtatggaagagcttctgtagaggctgaatgttattccaggatgctgggggatgaaggcattgcctctggggctcacctgggtctagggtagccacgctcagggatgctggcttctgctcactgtygggatgggttttctatttgctcccccacaataataagggctgctcttttaagcagtcagctccccatcagaggaagtgtctagttggtagctggtggacaatcatccatcagtgacttttaaagaggatgctggcactgagtggggccttcactggacacaatgcttgctgactgagtgacctgggccaatgagtttcttcttgaagcctcagttttcacgtcactacaatggagataaagaagtatgtattggctgggtgaggtggcccacgcctgttatcccaggactttgggaggctaaggtgggaggacctcttgagcctgggagtttgagaccagtctgggaaatatagtaagatctc

SEQ ID NO: 102875 - DNA, 628 bp, Homo sapiens
cctgaccttggctgggtacgtgacccctggcctctaccattgactaagccctaaccctgatcacagactaagcccagtgtctggctgcagaatgatccccaaacaccaatcaatcaattaatcaaccatctgacagctctgtatggaagagcttctgtagaggctgaatgttattccaggatgctgggggatgaaggcattgcctctggggctcacctgggtctagggtagccacgctcagggatgctggcttctgctcactgttgggatgggttttctatttgctcccccacaataataagggctgctcttttaagcagtcagctccccatcagaggaagtgtctagttggtagctggtggacaatcatccatcagtgacttttaaagaggatgctggcactgagtggggccttcactggacacaatgcttgctgactgagtgacctgggccaatgagtttcttcttgaagcctcagttttcaygtcactacaatggagataaagaagtatgtattggctgggtgaggtggcccacgcctgttatcccaggactttgggaggctaaggtgggaggacctcttgagcctgggagtttgagaccagtctgggaaatatagtaagatctc

SEQ ID NO: 102876 - DNA, 563 bp, Homo sapiens
taatagcctagaccaaataaaataaattatttcagaacttaaagacaggtcttttgaattaattcagttagataaaataaggaaaagataatttttaaaartgaacaaagtctttgagaaagaatcatgtaaagtgttcaaaactatgagtcatgggtatttctgagagagaagaagaaaaagtaaaatgtctggaaaacctatttgagattttcctcaaatatttcctatttgagggaataactgaagaaaaattcactagtgctgccagagatttaaatatcaagatacaagaaactcaaaaacctactgaaaaatacattgcaagacaaacttcaccaaggcacatagtcatcaggctttctaaactgaatgtgaaagaaaaagtcctgaaccagcaacacatgaggatgtaattacctataaaataaatcccaaaagactaacagtgcacttctctgcagaaaccttacgaatctgaagaaattaggttcctattttcagtcctttaaaatcaaatatagatatagatatagatatagataagccaagaattttgtatc

SEQ ID NO: 102877 - DNA, 563 bp, Homo sapiens
taatagcctagaccaaataaaataaattatttcagaacttaaagacaggtcttttgaattaattcagttagataaaataaggaaaagataatttttaaaagtgaacaaagtctttgagaaagaatcatgtaaagtgttcaaaactatgagtcatgggtatttctgagagagaagaagaaaaagtaaaatgtctggaaaacctatttgagattttcctcaaatatttcctatttgagggaataactgaagaaaaattcactagtgctgccagagatttaaatatcaagatacaagaaactcaaaaacctactgaaaaatacattgcaagacaaacttcaccaaggcacatagtcatcaggctttctaaactgaatgtgaaagaaaaagtcctgaaccagcaacacatgaggatgtaattacctataaaataaatcccaaaagactaacagtgcacttctctgcagaaaccttacgaatctgaagaaattaggwtcctattttcagtcctttaaaatcaaatatagatatagatatagatatagataagccaagaattttgtatc

SEQ ID NO: 102878 - DNA, 618 bp, Homo sapiens
tattatttctctgatatcattttggaatatatacaagtacatatggatttgtgtaaggtaataactcagtttaatttctgttaaatgaaaaattggttcagagtatttaattagtttataataaggttaccttctgtgtaatgtcctagatagtagatattccatattcaccagaataacttttcacgctttgtgctgactttttaaaagatgttatgctataaagaattactttgaattatcttatrctccatatttatttctgtaattattttaaatagatttattgaaatataaatcaataaccatacaatgtacccttttaaagtatataattcaaagggttctagtgtgttaatgtagttgtacaataaccaccacaatcgattgttgaacattttcatcacgccaaaaatgaaacccccagtccatcagcactcactccctacttctcccaagccttcccacctgacccaagtcctaagtaagcactagttcttctttctctgtagatttttctattctggacatttcataccaatggaatcttataatatggagtctctctgactggctcctttcattagtgtgatgaagattcatgcactttgtagtaca

SEQ ID NO: 102879 - DNA, 618 bp, Homo sapiens
tattatttctctgatatcattttggaatatatacaagtacatatggatttgtgtaaggtaataactcagtttaatttctgttaaatgaaaaattggttcagagtatttaattagtttataataaggttaccttctgtgtaatgtcctagatagtagatattccatattcaccagaataacttttcacgctttgtgctgactttttaaaagatgttatgctataaagaattactttgaattatcttataytccatatttatttctgtaattattttaaatagatttattgaaatataaatcaataaccatacaatgtacccttttaaagtatataattcaaagggttctagtgtgttaatgtagttgtacaataaccaccacaatcgattgttgaacattttcatcacgccaaaaatgaaacccccagtccatcagcactcactccctacttctcccaagccttcccacctgacccaagtcctaagtaagcactagttcttctttctctgtagatttttctattctggacatttcataccaatggaatcttataatatggagtctctctgactggctcctttcattagtgtgatgaagattcatgcactttgtagtaca

SEQ ID NO: 102880 - DNA, 618 bp, Homo sapiens
tattatttctctgatatcattttggaatatatacaagtacatatggatttgtgtaaggtaataactcagtttaatttctgttaaatgaaaaattggttcagagtatttaattagtttataataaggttaccttctgtgtaatgtcctagatagtagatattccatattcaccagaataacttttcacgctttgtgctgactttttaaaagatgttatgctataaagaattactttgaattatcttatactccatatttatttctgtaattattttaaatagatttattgaaatatamatcaataaccatacaatgtacccttttaaagtatataattcaaagggttctagtgtgttaatgtagttgtacaataaccaccacaatcgattgttgaacattttcatcacgccaaaaatgaaacccccagtccatcagcactcactccctacttctcccaagccttcccacctgacccaagtcctaagtaagcactagttcttctttctctgtagatttttctattctggacatttcataccaatggaatcttataatatggagtctctctgactggctcctttcattagtgtgatgaagattcatgcactttgtagtaca

SEQ ID NO: 102881 - DNA, 618 bp, Homo sapiens
tattatttctctgatatcattttggaatatatacaagtacatatggatttgtgtaaggtaataactcagtttaatttctgttaaatgaaaaattggttcagagtatttaattagtttataataaggttaccttctgtgtaatgtcctagatagtagatattccatattcaccagaataacttttcacgctttgtgctgactttttaaaagatgttatgctataaagaattactttgaattatcttatactccatatttatttctgtaattattttaaatagatttattgaaatataartcaataaccatacaatgtacccttttaaagtatataattcaaagggttctagtgtgttaatgtagttgtacaataaccaccacaatcgattgttgaacattttcatcacgccaaaaatgaaacccccagtccatcagcactcactccctacttctcccaagccttcccacctgacccaagtcctaagtaagcactagttcttctttctctgtagatttttctattctggacatttcataccaatggaatcttataatatggagtctctctgactggctcctttcattagtgtgatgaagattcatgcactttgtagtaca

SEQ ID NO: 102882 - DNA, 602 bp, Homo sapiens
aacatgaaaaaatgctcaacatcactaatgatcagggaaatgcaaatcaaaaccaaaatgcaataccaccttactcctgcaagaatggccataataaaaaaattaaaaaaatagaagatgttggtgtgggtgtggtgaacagggaacacttctacactgctggtgggaatgtaaactagtacaaccactgtggaaaacagtatggagatttccttaaaaaataaaagtagaactaccatttgatccagcaatcccactatggggtttctacccagaggaaaataagtcattatacraaaaagatacttgcacatacatgtttatagcagcacaattcgcaatcacaaaaatgtggaaccaacccaaatgtcattaaccaatgagtggataaagaaactgagatatatatatatatatatatatatatatatatatatatatatgaatgatggaatactactcagccataaaaaggaatgaattaacagcattcacagtgacctggatgagattggagactattactctaagtgaagtaacttaggaatggaaaaccaaacatcgtatgttctcactcataagtggcagctaagctgtgaggg

SEQ ID NO: 102883 - DNA, 602 bp, Homo sapiens
aacatgaaaaaatgctcaacatcactaatgatcagggaaatgcaaatcaaaaccaaaatgcaataccaccttactcctgcaagaatggccataataaaaaaattaaaaaaatagaagatgttggtgtgggtgtggtgaacagggaacacttctacactgctggtgggaatgtaaactagtacaaccactgtggaaaacagtatggagatttccttaaaaaataaaagtagaactaccatttgatccagcaatcccactatggggtttctacccagaggaaaataagtcattatacaaaaaagatacttgcacatacatgtttatagcagcacaattcgcaatcacaaaaatgtggaaccaacccaaatgtcattaaccaatgagtggataaagaaactgagatatatatatatatatatatatatatatatatatatatatatgaatgatggaatactactcagccataaaaaggaatgaattaacagcattcacagtgacctggatgagattggagactattactctaagtgaagtaactyaggaatggaaaaccaaacatcgtatgttctcactcataagtggcagctaagctgtgaggg

SEQ ID NO: 102884 - DNA, 580 bp, Homo sapiens
tacatcaatttgttaacagacacaaattataattttgttacaatttacaaaagtaaattgtgacatcaaaacttaaaatatggcagaagaatcagaaatacagtttttatatttgatggaggttacaagttctcattagcttaaaatggcctgttttaaatataaaatgttttacataggcctcatggtagttacaaattgaaaacctatagtagataaacaaaagataaagtgaaaggaatcaaagcacaccaaaatcgtcaattcacaaggrgaaagaacgtaataaaaagaaaggattgaagatctataaaacagaaaacaataacaaaatggcaatagtaagtcctacctatcaataattaccttaaatgtaaatggattaaattctctaatcaaaagacatagaatggctagattaaaaagaagaagaaccaactgtatgttgatcacaggagactcacatcacctggggacagaaaaagatattccatgcaaatggaaaccaaaagagaaaagagtagctatacttatattagacaaagtagactttaagtcaaaaactgtaaaaggagacaaa

SEQ ID NO: 102885 - DNA, 401 bp, Homo sapiens
gaattcaaaggagaaagagttcaaggtccctggggttgggccctgtggtggaccaagaaaatagatatggtttactagatggagttaaggagatggcatatgtatacatatgtaacaaacctgcacactgtgcacatgtaccctaaaacttaaagtataataaaaaaaaataaaagtacacagcatgggcaaagacactcaaaaataaagggctggcttttggaggaagtaaaccatcctggtgtgaggaaaracccatggcaatgatgtaaaggaaaattcaactcagattctggaagcctttggatatctatctaaaggatttggaccttattctgatagatgtaggaaaacaactaaatctttaaggaagaatatgcctgcttggttttttgttcata

SEQ ID NO: 102886 - DNA, 611 bp, Homo sapiens
ttactacctcagtcaagggtttacaggtgatcgataccactatattttacccctcctcccccacaagaaaagatttaatatagagaattggatgcttagaaaattgyagcaaggaccagagaagcacaatataggctgcacttccagtagtgacacccaaaatagcattttggaacccagaaactgaatgttggaatatcaaaaagtccctgttcaagtgctcaccccaagactacactttagccatcacccaggtatctggaagctcctccatagctgttgattctaggaccacactttgttagccttcaagatggaaattccaaatggaatgtaactgtcaacagttgcaaactacctaggatcaaaccactgagatgctgctacagccaccctagaaaacaaaatgcttttccaactctggttgccagcaacaacagaagcacattctctgcctcattttcagttccaaatatctcctgtgaatgtctgcttatagaagttggatcacatgtggaacataagcagaaagggtgtctggtaaatgtaatcttaggatttacagcttttagcatccaataagtcatgctacaaaagtttgaaataatgtt

SEQ ID NO: 102887 - DNA, 626 bp, Homo sapiens
tatctccttccctttccgcttttagtttggacagtctgtactgaaatagcaactcactctaacatcatgatatttttttcttctaagttgagtaccaaggtggaacatgacagtttcaccatcgctttcactatcccataaaaagattaccaacttcaatgtgggaaaggggaatccttattgtacctcagtctacttaaattctgtcacttccatgtaggtctgtcactcataacatcctattcctagtactgatttatatrttggctaggacccatttggctgtaagggaaagaaaacgctagctttaaaaataaaaagctcagggaaggtgttggcccatgtatccaataagtacaaggggtgtaggtggccttaggtggggctggatccagaagctcatatagctcaaaagtatacagaccagaagtctatatttttctctatctcctggttcaatttttcctcagtgttggctttgtctcaagcagacgctccaggtggtggaaagaaggtaacctatgttcttggcttatgttgttctcataactggtattccagcaaaaatagaatgcttctttctgacgattttgttagaagacctagaaaaggctctaattgcccag

SEQ ID NO: 102888 - DNA, 655 bp, Homo sapiens
aattcttccaaactcattattggaggccagtattaccttgataccaaaaccagatgaggacacaacaataacyaaagaaaattataggggaatatccttgattaatatggatgcaataatcctcagcaacatactagcaaactgaatccagcagcatgttaaaaagattatttactatgatcaagtgggactcatcaaaaggatgcaagaatggctcaaaatatacaaatcaataaatgtaatacattacattaacagaatcaaggaaaaaaccatatgatcatttcaacagacatagaaaaagcatttgataaaaatcaacatcctttcatgattaaaaaatcctcaacagattaggtctagaatgaacatacctcaacaaaatagaggccacatatgacaaactaatggctaaccccacatttaacatggaaaagttaaaagcttatcctcagagatctggaactagataagcatccccacttttaccacttctattgaatattgtactggaagtcctagccagagcaatcaggaaagaggaaggaaataagggacatccaaaatggaaaaaaggaagtcaaattgtccctttagagtattctatatataagacatgatcttacatatagaatacgctaaagattctaccaat

SEQ ID NO: 102889 - DNA, 535 bp, Homo sapiens
tttatggggccccaactttgttttccagccctcgaagttaggaatccactgcactggtgggactatgatggtgtcagtcaaagtgttttgtagtgcagtgacatcaggatctatcctcgtttgcacatgccagcagcagtggcagcggccacatgacaaggtgcatgctcattggctgcagtagggtgctagcargtgccagggtgcctgcctccatgtgggtgttcaccacagtggcagaagcaacacagctcaggagggcagagggccactgctggcaactgtgtgtgtagtcgtgctggtagtggtgttggcatgggggtgagccattggcaaacacaggtctgtgtgcattctctgtgagctgaaggcagaattggtctcactcagggtgaaggagggtctgtgttctccatgcctagtttcactcttgcagcagtgttggcacaagggcagggcactggtgtgggcagggttggttgactctgtgcccaccaaggctccaattgcaatggcagtagtgaggggagggaga

SEQ ID NO: 102890 - DNA, 598 bp, Homo sapiens
accatagtttctgcgtatattcttccattgacagacacctaggctgattccacatcttggctattacgacgaacaggggagtgcagctacgtctttgaggaactgctttaatttcctttggatatattcccagaagagggactgctgggtcatatggtagttccatttttaattttttgaggaacctccatagtgttttccatagtggctgtactaatttacattcccaccaacagtgtgcaagggttttattttctccatactctcaccaacacttctctttcatctttttgagagaaaattaaactttaactgggaatcctatattttatctagtaactctatttaatgataatcttgctttagcttagctacacagtaacctatgtggagtatttaaaatcgtcttactgataaagaaactgagattyagtggcacttaataacttgtccaaaatcacgttggtaatgaagggcagagcaggattcagaattgagcctcatgaatacctcttgtccctgcactactagtgagcctcagtttcccttctggcccaggaaaccaatcatcctcacagaaaatcagctttagtgtgct

SEQ ID NO: 102891 - DNA, 577 bp, Homo sapiens
agccttggaaacaagcaccagaaaattcatagcccaggcctttctggatctgtctgccaggaattgtactgaatctgcctccctcccacccctgcaatatcttccagcagaattcagagggccctggagaagccaatggtacctgctgaaggggttgacaatcgatgctgggtagaagggawaccccacatgggaagatgagaaagtgacctttgggatcccaagtgtaccacttcctgggaagaggctataggatacaagacatgaaaaacaaacaccagacttccttctcaccagtgtgtaaaggaatgtatttgtcctcttttctccctctagattctgaccttcaagaagtctgcctctttgatagatcttctctgtctggctttactggggtcaccttccttacatggtaagtcatgagtgtgagtcttctagaaggaaagaggtggtcagtgtgggctggagaggtcagggcagatgcacacgcttggtcctagggcctgtgtctgcttcaggacacagtggggatgaggagaggagaaagcacaagtgggaggctcacagtaagtatgtt

SEQ ID NO: 102892 - DNA, 577 bp, Homo sapiens
agccttggaaacaagcaccagaaaattcatagcccaggcctttctggatctgtctgccaggaattgtactgaatctgcctccctcccacccctgcaatatcttccagcagaattcagagggccctggagaagccaatggtacctgctgaaggggttgacaatcgatgctgggtagaagggataccccacatgggaagatgagaaagtgacctttgggatcccaagtgtaccacttcctgggaagaggctataggatacaagacatgaaaaacaaacaccagacttccttctcaccagtgtgtaaaggaatgtatttgtcctcttttctccctctagattctgaccttcaagaagtctgyctctttgatagatcttctctgtctggctttactggggtcaccttccttacatggtaagtcatgagtgtgagtcttctagaaggaaagaggtggtcagtgtgggctggagaggtcagggcagatgcacacgcttggtcctagggcctgtgtctgcttcaggacacagtggggatgaggagaggagaaagcacaagtgggaggctcacagtaagtatgtt

SEQ ID NO: 102893 - DNA, 641 bp, Homo sapiens
aggactatcagcaaactacatggatacaacagacattgggaatgtgccaagcttctgaatgaggaagggaggggcattatgaacatggcaagaccacaccataaggaggcaagaasctggggtttatgatctgccactaattaacagtgtcaccttcaacaaggggaacgatatgggcttctgtttttccatttataagataagctcatctctaaggtccctctaattctgacttttgattattgtaaattaatagtaaattcacttttatcaaaattaaaaactttattagtgtccccagcctctctgcttacgtgcgtctttcagagcctgagtacttctccaatcctatctgttattattctttgcctcacacttttacagcccatggacctaggcacatcattaaattttttcatacaagtccttcttcatctcaggttgtactatttcctttatgaccacacatacacacacacatttttggccaggtttatatttgttattttacagattctgtttagctataatttcttccaggaagagctttctgataaaccttcccaggatgagtgacatacttaccttctgtgctcctctctagtgcttgatgggagtgcatggtgtgctgtagcactaac

SEQ ID NO: 102894 - DNA, 579 bp, Homo sapiens
gctgctgatctgtccttttctccagtctctcacagtgatacaaattgagaactgctcctgtaggagaccagagactagagaggtctgcagtatgattgccgtgtgttgagatgatgcttcctttcatcattcacctgctgcagttacccatgtttctcttttctggccctcattttatgasaacagctggtagcactctttaaaatgtccacttctgtaaaaagtgctacctggtagcacttctgatgtcataagcagagagcatgcccttttctataattaggtaattctctacagagagaggaaattataccatcttcttggcagcagtaggaggagaggaacaatattcttgttttgctttgaccatttttttttatcttttaaccattaccttacagcattcacccctacattccctaatagacattaagaattttttctgtagccaaaagcaaataggaaacatgagttttcagattcacaaccaattaagttaaaattagggaaatggagaggagaaaaattgagaaatgatacagggtgaagagttcaaaaaacaagccttttgggaaggag

SEQ ID NO: 102895 - DNA, 638 bp, Homo sapiens
tctgtggggcaggccagcaggctggaaattcaagtgggatttctttgttacagtcttgagtaagaattccttcttccctaggaaaactcaatttttgctgttaatgyctccaactgatggataagactcacccatattatggaaagtaataacttttacttaaaatcatctgattgtgatattgatcacattctcaaaataccttaaaagcaacatctagactaatatttgaccaaaacaactgatcaccgtagccttaccaagtttacatataaaatataccatcaaaatatttaataaatggtagctattatttttaaagatggtattttctattacttcaattattattattttattccataaacatctcttgaggatctaccacataccaggcactgtgctaggtatgtgtgtgtgcacacatggaggtgggggaaagggagagggataaaggtggataagttataccacttgttctctaggcgtctatattccaatggaagagacaagtcaaagggaaatgataatgtattaggaattatggatagatatataatactgtaaattatatatttatgcttttgtattgtatttatttatattgatacctatatttatcttggtaaaattctgtc

SEQ ID NO: 102896 - DNA, 590 bp, Homo sapiens
tgggatgattgagcttggtggagggaggggtgtctgccattactgaggctttaataggggcatttccccaacagtgctaaggagactgggaggtctgggctgagcatggcaaggcggctgtggccagactgcttctctagatttcccctctctaggcaggccatctctgaaggaaaggtaacagccccagacaggggcatacagacaaaacccccatctccctgggacagagcatcaggggaaggggtggatgtttacacagcttcagtggattctcattcctgccttccagctctgagagatcctgacaagagcgattcaaccagcacagccaccagctctgctaagggacagactgcctcctcaagtgggtcactgacccctgtggctcctgaatggaagagacctcccaacaggggtcaacagacacctcatacaggagagctccagctggcatcaggaaggagsaagccgcaatccttgctgtgctgcagcctctgcttgtgatacccagtcgaacagggtctagactggacctccagccaactgcagcagatgtgcaggagagaggcctgactgttagaagaaaa

SEQ ID NO: 102897 - DNA, 649 bp, Homo sapiens
gtccctcctacctcctctaaaagatatccataactcatccccaaaacctgtaaatatagatgatatggcagtagaggctttgaagatgaaattaagggtaaggacactaagatgaaaaaattatatttttattcaagtggcccaatctaatcatgtgagtttttttaaaaagaaccctttcctgattatggtcaaaaagagatgtgaacacagaagaggatcagagagatgctactttactggctttgaagattaggaaagtgaaacccggatcaatgaatgcagacagcatctgaaagctggaaaagcaaagaaataagattgccccctagaatcaccagaaaggcagccctgctgaagccttgattttagcccagggatctctatgtcagacttctgaactgcggaacaaccataagaaaataaatttatgttaagccactgtgcttatgataatttgttacatcagcaatgaaaaccaaatacagagtcctattttgttcaataatccagttgaccctttaacaatatgactttggactacacaggtctgatgcaakgcaggtaagcctcaaatgtggggcttagcctaggagtgttcctggcttcacccaagaaagaattcgagggcaagctgctggtggtagca

SEQ ID NO: 102898 - DNA, 587 bp, Homo sapiens
gatctaatgtaattgtttaatttatatttctatgaatgtgttttatttgtggcaggtaataatggcaatccgttgtagctgccaactttgaaaaagcaaaagtcatgaagatggcacacatgaaggtagtgactaaaaattgtgaaatgactaatctagtctcacatagatgaagagttttctggcagtaaggggaacacatttttcatgacaataaagccaatggaggaaacttaaagtgatattaatatttataataagcartcattcatactaatggtaaaaaaagaaggtcatctgtttctgaaattttgcataatttatacgtgtctttatacaagggaatcagcataacatactgggaatagtatgaacttttatactcgaactaacctgggtttgaatcacagctcttttaatgtgtgacaggagcaagtggattaacctctccaggctttaattttatcattcaaagtgtaatgagaatgatatcaaactcactgtcatggagattaaataaggtaacataaataaatccctaatatgggcccctgttgaaagcctgagctagcctctagtagcttgca

SEQ ID NO: 102899 - DNA, 619 bp, Homo sapiens
aggttgtgcttattaaaaatattttaggataggcactataagttatagcaattgtaggcatattattcatgtctgaccacgaacccaggcaacttggattctagatttggctctgtctttacttattctgtgactgggaaaaatcacaaaccctctgtgaattttcattttctcatatctaaagtaaaatattactgaagaaacacttttcacatctctcacagtcttaagattttcatttcagcccctccaattgtagggttcctccccttctttggggttcccaggttcttgctgtgttttgaggggtgtctgcaggaagttatcagaagccgactgttgtatgtgatatcacatgtcactcctgatcacaaatctttgtggaagtgacgcatactgacaaagttaagtcctcagtgggtgttcatggggaggcacagttggcaaaggcccctcgacctgggtgataaaatattcaccactatgtggaagcttggtagttggggatgasagatcggttcctaggtagttcctgggcatttggacaatgcagtgaacttgatgagttccacttgccaggctcttcctatatagctgacctatcctgctatgaaaactt

SEQ ID NO: 102900 - DNA, 593 bp, Homo sapiens
aaattgaggctgagtggcaggcaaaccatttgacattgatgtttgttttaggtagactctatggaagggctaactcacaataaacatttctgtgatttattttaagcatatacttaagaataaggaaaacagaagtctcagccaaggctcacaggcagccagttcccatgggatgaagccaaacatctaggcctcatgagaagtctctgaatcacagaaggtccaggtctcaaggagtatggaactggaaggtcattcagcaactggggaacatctagggacctcaccagcataggtctgtgtagcatttatgggacttcacttttttagattttttgcttcattctgaatcagtcttttttccttcaatgcctgtggccagcactactgagttcatcttcctctggctggcacagccatgcctgggtgggcacaatttggatcaagcagcacacactggatttccttccctactcccccygagccagattccctgtgtaaggaatacctactcaaccttatatatggccctgccttatatacacttagttcctcacctttctatatcttttctattccaatagctccttgct

SEQ ID NO: 102901 - DNA, 569 bp, Homo sapiens
actccagaccctatttgcatgtgtattgccagcagaggctgcagaacagcaaagattgctgcctatttcttcctctgggagcttcatcccagaggggcccctgccagatgccagccagagctctcctgtatgaggtgtctttcggcccctgctgggaggtatctcccagtcaggatatataggggtcagggactcacttggggaggcagtctgactcttagaggagctcaagtgctgtgctgggagatccgctgctctcttcagagctggcaggcaagaacgtttaagtctactgaagctgtgcccacagccgccccttcccccaggtgcactgtcccagagagatgggagttttatctataagcccctgactggggctgctgcctttctttcagagatgccctacccagagaggaygagtctagagatgcaggatgcagtctggctacagcagctttactatgctgcagtgggctccacccagtctgaatgtcccggcagctttgtttaccctgtgaggggaaaaccacttattcaagcctcagtaatggtggatgcccctcccccca

SEQ ID NO: 102902 - DNA, 381 bp, Homo sapiens
agtcctccctccataatcattgtggtagacagactagaccctagtgtggtttcattttcatgactctataatcccttcctcttagtgtgggtggaccaagaacttgcttctaaccaatataaaatgtggtgggaaagtgatggaaagtcattttcatcattacattattgtattgatatataactctgtgtagctagcatgcattagaaagactctttacattgctsccttgaagaagtaagctgccacatcatgagagggcctatggagggggccaatggcaaggaactgcaggtggcctatatttgctgagagtggcccccaactgacatccagcaacaaaacagggcctcagtcctacaaccacaaggagatgaattc

SEQ ID NO: 102903 - DNA, 557 bp, Homo sapiens
atgaagaagcttggaagttctttccccagtctagcctctgatgagcccacagccttgaccaacatctggattgcagccttttgagacccagagcagagggcacagctaagctgaatctggacttctgaactatggaaactgtgagataatgagtattgttttgagcctctaagtttttggtaatttgttatgcagcaataaaaaactaatatgtccatttaccatggtcaatcacggtagttttcaaggctttctttagttgtggagacctgtttttaagcmaaagcacacatggaagcacaatatgtaaacaaagaaaggtagaatgtctccatttacagctgggtagaaggaatggatcccttcccacctgggttctcctgaacttacagggccacaagaggaaactctgtgaacagtctgaaaacttaaataaatggaagaaggactagaacatgctgacccagacacacatttcaggctgcagggaagagacacactcaagtgtccttccgtgatggagcacagtggataatgttgatgcactttgagaattc

SEQ ID NO: 102904 - DNA, 620 bp, Homo sapiens
tggcatatagaaatgctagtgatgtttgtacattgattttgtattctggaactttactgaatttatcagttctagttttcttgtggaatgtttaggtttttccaaatataagattatatcaccaacaaacaggtataatttgacttcttccttcccratttgtatgcctttgatatctttctcttgtctgattgagctagataggacttccagtactatgttaaataacagtggtgacagtgggcatccttgtgttgcaggtcttagaggaaagattttcagtttttcctcattcagcatgatactagctgtgggtctgtcatatatggcttttattatgttgagatatgttccttccatatccagttttttgagggtttttatcatgaagggatattgaattttttaatcaaatgttttttcaacatcagttgaaatgatcatatggttattctttatttttttgatatgatatatcatgttaattgattttgtgttttgaaccatccttgcatcccacagataaatcccacttgatcatgatgaatgatctttctaatatattgttgaattcagttgtgctagtattttgttgaggatttctgcattaatactcatca

SEQ ID NO: 102905 - DNA, 625 bp, Homo sapiens
tgtatctacccagctttcagctggcttgtatggaacgtggagtgaaggtgggggcaggcatgggagaagaaccaactcagctttctcccaggagagaaatgacacctccctccagctctktgtggccagtgcctctagattccagtttcaaatttgtaaattatcttcgtcaatgttgaggtttctcccaagatccataaccaagtatatgtcctatgtcactatgactaaatgattactctgatggtcctgaaacaaagaaggtattatccactggaaccagcagtttttggaggttcaaaatacagaaatttgtattccactcaggtatttatttttagtaagcatgttatacatgagttctgcattttcctttttcattcccagtgtattttaggagtcagtccatattagtctatagagactttcctcattctttataatttatttcatagcataatttatttaactagcagaactagttccctcttagagggcatttgggttattattaaccctcttcattggtaataaatgagatcttttcatcaagttaacaaaaattctacttaaatggacaagcaaaaaattttaaatgtatttattatctgttattaaatatatt

SEQ ID NO: 102906 - DNA, 625 bp, Homo sapiens
tgtatctacccagctttcagctggcttgtatggaacgtggagtgaaggtgggggcaggcatgggagaagaaccaactcagctttctcccaggagagaaatgacacctccctccagctctttgtggccagtgcctctagattccagtttcaaatttgtaaattatcttcgtcaatgttgaggtttctcccaagatccataaccaagtatatgtcctatgtcactatgactaaatgattactmtgatggtcctgaaacaaagaaggtattatccactggaaccagcagtttttggaggttcaaaatacagaaatttgtattccactcaggtatttatttttagtaagcatgttatacatgagttctgcattttcctttttcattcccagtgtattttaggagtcagtccatattagtctatagagactttcctcattctttataatttatttcatagcataatttatttaactagcagaactagttccctcttagagggcatttgggttattattaaccctcttcattggtaataaatgagatcttttcatcaagttaacaaaaattctacttaaatggacaagcaaaaaattttaaatgtatttattatctgttattaaatatatt

SEQ ID NO: 102907 - DNA, 529 bp, Homo sapiens
gtcattgatttgagcttgtattgccaaattgcatacctacatgcataatgaaattggattagtagtagtattcctttgatagtttgtggaaaggagggctcagagggagaaattttgtgtgaagatttcrttaaataatagcccagagttttgccgttacaaattcataaaaatttaagaatcagttggatttttaaaaaataccttatttctatatcagatttcatgatcatataaaattaaatatggttaaacatggacctggctaatattttgttagcttctttatgaataatttcaccgctgatgtacttccctgaagatgcctgttccttattaattttcagctaaaatttactcaagataagaactgaggaggttgacaaaattatttcttttaataatataaattaatgggactcaagtttatggaattttctacacaaacatcatccaagaaacagtttaggactggataagaagtctactgctgcattttttattttaacacagaattctgattattttt

SEQ ID NO: 102908 - DNA, 478 bp, Homo sapiens
aaagaaaacaagtctggaaacttgcattgagtaactagtcgctaagmggaatcaattgcctttaacccggagagagagtccctcgcactacccagccaagcaaacagaacaaggtcgtgaccctgggtcacggccgccagtaccgctcccgcccggcagcggggaagccacctgttaggcccgagcctcacctggcaggaaagaggaagcgattgcccggcagctcgcccgacgcgagggcggtgagcgtggaacccgcccctcttgctgcagcggctagacccccgtcggcacgtgggcttcacccaggccccggcagctctgacaggcgggtcgcccgcggaccccggcccgccgtctcgcgcaggtccccggggcaggacccccgtttccctcgcaaccaccccgccgagcgggcgtcccagcggcccacaccgccggtccgccctgcttcccttccttcccggacggcgcgatc

SEQ ID NO: 102909 - DNA, 626 bp, Homo sapiens
tgccaataaattggaatatctagaagaaatggatacatttgtagacaaatacaacctacagagattgarccatgaagaaatccaaaacctgaacagaccaataacgtaatgagattgaagccataataaaacgtcttccagcaaaaaaagcccaggcccttatggcttcactgctgaattctattaaacatttaaagaggaactaataccaatgctacttaaactagtctgaaaaatagaggaggagggaatacttccaaactcattttttgaggccagtattaccctgataccaaaaccagacaaagatacatcaaaaaaaggaaactgcaggccagtatcacagatgaatattgatacaaaaatcctcaacaaaatactagcaaaacaaattcaacgacacattaaaaaggtcattcatcggccaggcgcgatggctcacgcctgtaatcccagcactgtgggaggctgaggcaggtggatcacctgtggtcaggagtttgagaccagcctggccaacatggtgaaacctcatctctactaaaaatacaaaaattagctggtatggtggtgggaacctgtaatcccagctactcaggaggctaagacaggagaattgcttagaa

SEQ ID NO: 102910 - DNA, 626 bp, Homo sapiens
tgccaataaattggaatatctagaagaaatggatacatttgtagacaaatacaacctacagagattgagccatgaagaaatccaaaacctgaacagaccaataacgtaatgagattgaagccataataaaacrtcttccagcaaaaaaagcccaggcccttatggcttcactgctgaattctattaaacatttaaagaggaactaataccaatgctacttaaactagtctgaaaaatagaggaggagggaatacttccaaactcattttttgaggccagtattaccctgataccaaaaccagacaaagatacatcaaaaaaaggaaactgcaggccagtatcacagatgaatattgatacaaaaatcctcaacaaaatactagcaaaacaaattcaacgacacattaaaaaggtcattcatcggccaggcgcgatggctcacgcctgtaatcccagcactgtgggaggctgaggcaggtggatcacctgtggtcaggagtttgagaccagcctggccaacatggtgaaacctcatctctactaaaaatacaaaaattagctggtatggtggtgggaacctgtaatcccagctactcaggaggctaagacaggagaattgcttagaa

SEQ ID NO: 102911 - DNA, 576 bp, Homo sapiens
accacccttatcttgttcttgatcttagagggaaatgttcattttttcatcattaagtataatattagttgtaggtttttcctagacatgccttatgaaagttgaggatgttatcttctattcctagtttgtgtttttaccatgaaagagtgttgggtttcgttaaatgctttttttttttttyttttttgactggtcaagtacccaataatgagaaaggggaaagagtagaacaagcagtttgatctgtgattgactgtgaacaatcaaatgagataactcactacctttacaccagtttgtttaatgcttttttggcagctattgagacgactatgtgtttttttctaatatgcatactttttaccttatttggtttttatgggttcatgaaactattttgtgaatgcataaatgcattattactttcacaaattcagggatggtatatagttgtcttttggtagctgcaggtatttgttctaggacccctgtatagatatcaaaatctgcagatgctcaagtctcatataaaatggtatagtatttgcatataatttatgcacatcctccagt

SEQ ID NO: 102912 - DNA, 576 bp, Homo sapiens
accacccttatcttgttcttgatcttagagggaaatgttcattttttcatcattaagtataatattagttgtaggtttttcctagacatgccttatgaaagttgaggatgttatcttctattcctagtttgtgtttttaccatgaaagagtgttgggtttcgttaaatgcttttttttttttttttttttgactggtcaartacccaataatgagaaaggggaaagagtagaacaagcagtttgatctgtgattgactgtgaacaatcaaatgagataactcactacctttacaccagtttgtttaatgcttttttggcagctattgagacgactatgtgtttttttctaatatgcatactttttaccttatttggtttttatgggttcatgaaactattttgtgaatgcataaatgcattattactttcacaaattcagggatggtatatagttgtcttttggtagctgcaggtatttgttctaggacccctgtatagatatcaaaatctgcagatgctcaagtctcatataaaatggtatagtatttgcatataatttatgcacatcctccagt

SEQ ID NO: 102913 - DNA, 541 bp, Homo sapiens
ggtatatacccaaaggaaaatagatcattatatgaaaaagacacatgcgcttgtatgttcgtcgttggactattcacaacagcagtgacagggaatcaacttaggtgcccaacaatggtggattggataaataaaatgtacatatacaccatggaatattacacaaccataaaaaggagtgaaagcatgtcttttgcagcaacatgggtggactagaggcygtaatcctaagtgaattaaggcataaacagaaaaccagatactgcacgttctcacttgtaagtgggagctcaacattgagcacacatgcacataaaatgggaacaacagacactgcagactgctagagggagtacgggaatgggttgaaaaaactccgttgggtactgtgcttactacctgggtgcaatatgttcatatatcaaacctgcacctgcaccccctgtttctaaaataaaagttgaaagaaagagaaagctacaccaaaacctgaataggacatttgttacaatgaagtatttgacacatcaatatttctttt

SEQ ID NO: 102914 - DNA, 574 bp, Homo sapiens
tctatctacacctccatttaggttataatttgtcatgtacagataaacctttaggctgaacttaaaatatgtaaggaagtggctttaggctaaacttgatttaccaatgccctgcctgggtatcctttaccaagatatacaagagaatattgtactttctgaatggggaactctactagccaccatcttgagtgtccacacttagtagcattattgatagtgcggcaacttttacactgaactcagttaagccccaacacctaattttcagtttacgagagaargggaggttgggagggcatataggaacaagttaaataacctcattaaagaaaggtcagtcaagtcagaatgtgaaacattttacaagaaaactgatgtggacttttaaagaagtcaatgccattaaaaacttgttttttgttttttgtttttttaagaaaagcaaggcaactattctagactaacagagaccaaaaggcctaatagccaaatgctttgtgtgaacacagactagatcctgctttaagaaaaagctataaaagacattcttaggataactgaagaaatttaa

SEQ ID NO: 102915 - DNA, 574 bp, Homo sapiens
tctatctacacctccatttaggttataatttgtcatgtacagataaacctttaggctgaacttaaaatatgtaaggaagtggctttaggctaaacttgatttaccaatgccctgcctgggtatcctttaccaagatatacaagagaatattgtactttctgaatggggaactctactagccaccatcttgagtgtccacacttagtagcattattgatagtgcggcaacttttacactgaactcagttaagccccaacacctaattttcagtttacgagagaaggggaggttgggagggyatataggaacaagttaaataacctcattaaagaaaggtcagtcaagtcagaatgtgaaacattttacaagaaaactgatgtggacttttaaagaagtcaatgccattaaaaacttgttttttgttttttgtttttttaagaaaagcaaggcaactattctagactaacagagaccaaaaggcctaatagccaaatgctttgtgtgaacacagactagatcctgctttaagaaaaagctataaaagacattcttaggataactgaagaaatttaa

SEQ ID NO: 102916 - DNA, 428 bp, Homo sapiens
ccacccccagcttatactcctctggagtgcatcctcaaccactgggactgctttgaccctcagagtctggaagaaaaatgcctcatagccctctgcacaaaggtttggccaaattgtgaaggatggcttggcttcaggaaggaacaattcatttcaataccatccagcagytggatcttttctgtagatatgaggacagatggtctgaggccccatatgtgcaggctttctttaccttgcagggtaatccagacatttgccgacactgtaggattgatccagacctcctgtttgccatctcaggagagggctgcaagaaacaatcccaggtaactaaagaaacgaatcccagaggcacccccagcagaggagccagctccctccaaccctgctcctctgggtccaccctgatctccctatccagcttc

SEQ ID NO: 102917 - DNA, 408 bp, Homo sapiens
tttccctcctctccaacttaaaattcgtgcagatgatttttctatgtctatttttctgtgtctggctaatgcatgccttgatctcatgtctctcaaagaagcagtgaagtcacatagacctgcaaaacctgagccaagctgcttcacctttcacttctttctgcccacattatacaaccagacatagataacagctgatgtactggtgttgggaggattaaatgagatgctacaaatttatgtatgacaccttcttgacacattmtaggttctcagtaagtgccctccctttctgctgctgctcctcatcctctgaatttggtggcctcagaagattatgttgttgaccttctcttaaatatgtactctgcttggcaagtttatcctctctcatgatttaaactatca

SEQ ID NO: 102918 - DNA, 279 bp, Homo sapiens
gaattctaagtttcacctgtctctctatcctagtggtcatggtaggtccttaccctgggccctggggtaagaggtgggtgaggtggggttgagaagtccttcgggttcttcacactggaacttctatgagatgaatagacttttctctacatattattgactgtgttccatakcttaacggcatttaatatgctaaacaaaatatctgcctcctgtggggtgagaaaggggaaaagagagaaggaaatcccattcttctgcacatattcttggtggtga

SEQ ID NO: 102919 - DNA, 609 bp, Homo sapiens
tagatagaatccctggctccatggagcttgcatttgagagtggagaacaatgaaaataatacataaatacattctgaagcatacggagaaaagcggtatggaagaatgaagtagagcatggcaaatgtgttgggaagcagggagggagcatagccactttaaatctgtctgctgagaaggaggcatttgagcaaggcctgaagcagtggagaaaaaagccctgcagatatttctaggcaaagtgttctagagggagggaagagctaaggtaaaggccacaggaargaaatgtagatgcctgtactaagaacagtgaggtgtggaagccaggaaaaagagatgaggtcagaaagcaatcatgtgggatcttgaggataaccataaagccattagcttctactctgcatatactagaaattgttgagtataggcatgatataacttaatttacattttataattacaaagtagataccaaaatgccccattgtgttcataagaaatgggtcgtttactacaggtgccacaaagcaataagaaaaatgattcctagtgcacatcatgttgaagaaatgaactgataaaattaaataccaaagaagtaaataa

SEQ ID NO: 102920 - DNA, 603 bp, Homo sapiens
gtctgctgagaaggaggcatttgagcaaggcctgaagcagtggagaaaaaagccctgcagatatttctaggcaaagtgttctagagggagggaagagctaaggtaaaggccacaggaaagaaatgtagatgcctgtactaagaacagtgaggtgtggaagccaggaaaaagagatgaggtcagaaagcaatcatgtgggatcttgaggataaccataaagccattagcttctactctgcatatactagaaattgttgagtataggcatgatataacttaatttacattttataattacaaagtagataccaaaatgccccattgtgttcataagaaaygggtcgtttactacaggtgccacaaagcaataagaaaaatgattcctagtgcacatcatgttgaagaaatgaactgataaaattaaataccaaagaagtaaataagctctataataaaaactataaaacactttgatgaaagaaattgaagaggaaaccaaaatgtaaagatgttcaatgttcacagattagaaagatcagtattgttaaaatctccacaatatccaaagcaatctaaagattgaatgcaatccctatcaataat

SEQ ID NO: 102921 - DNA, 507 bp, Homo sapiens
tgggtatctgacttcaggtgctgctggatccagttgctccaataatgtcagagttagtctttctctttctccagactctgctttttcccccttacttccttaatttttagttgtttgtaccccacaattgtcaattatgtccaataaacttcaaatatatatctcattgcctgatcgtgttttcattgcctgtctctgaatcaggtttatagccaaggagatacttcttggcaagatcttgagtctgtgcttatcctgtggagttggagatagggccaacccagtttaaatcatataaactgagaagaggtgagggtaatgatgccccaaaggataatcaaaggawcgatgtcagaaaagggagaatggataccaaggagacaaaaatactactctagaagagatcctgcatcatttgcctttaagaccgatacataatataacagtttcctttgagaagtccaggagaaatgagcttagagaattatcttttcatctttgttttta

SEQ ID NO: 102922 - DNA, 362 bp, Homo sapiens
cagccatttgccaggagataggtcatcgcttgtaggagctgtgacaagagaaacaagtagaataagtaaattgagaaagcaatcaaacatctcatggagagcagagttttgaaatttttgccagtctctaagctgtggctttccatttacttttttaatagtaggcagaaactgtctgctacgtttttagctccaaagtcacttgatcttttgcagaatttacaattttscaatatgtcatctaattatctctctaaattcaatgtgttccattctattcatccccttttgattaccacctgaagaggaatgctttgtcttttcaggataactggccccatatagcagagtaataaatgcag

SEQ ID NO: 102923 - DNA, 647 bp, Homo sapiens
gtctgctacgtttttagctccaaagtcacttgatcttttgcagaatttacaattttgcaatatgtcatctaattatctctctaaattcaatgtgttccattctattcatccccttttgattaccacctgaagaggaatgctttgtcttttcaggataactggccccatatagcagagtaataaatgcagtctgtggtctgatctctgctttttccaaaaacctgtgttggtataaatcctgaaacattaacttgagctaagttaattgcagtcttgaatttaaaatacctacttcataagctttctctctatggggcaataattcctgtggacttcaaaccattttgtcacagagttaggtgggataggtggatatatgatccaagtgcctgtttccagaaaagcttttgccttgctattaaaataatttaatactttcttatttgtgttaatttgaatggtgtgacctgtggtagcagacatatttaatcaccagtacagaacttgctatgtaaaaaataaatttgttctgacttmatgtttgtcatgaaatgtataccatcaatttccctcagtgcttttggtttaaatcagatacatctctgtcttggagaaggaatgatgtgcagacagctccagtgtgcttt

SEQ ID NO: 102924 - DNA, 531 bp, Homo sapiens
actttacataattgctttagttgagttctcacaagatcttattttaaamtgcaaatagtgaagctcagaattaagtgacttacatttaattctccagtagtaaggggttgagcccttattgctgtcactccaagacttgaatattagtcgtgggcaatctgtatgctctttgctgaagattgactgaattagagaataatgtcatgttcatttgtgtacccctatccatgcagaggtgaatgtttcttgtgagtaggctattgacttgctttgctgggaaagtggctaaatcctgagggctatgcgttttaaacatgctcagccagtccatattggcctttttagcattgacctctggattagtagttctcacactgtccatcacaccccctggataattcaagaagtctgcaaagtagctacaaacacttttgcccactcagagtgaataatgatgtggatatggatcctgttatgacaaatatatggtatcaattacatcctcttagactctcaaattcttagtaaagt

SEQ ID NO: 102925 - DNA, 597 bp, Homo sapiens
tgattagtttagacatggacctggacataggattaacctcaggaaaacctgggatcagagtaagagatggtgggcccccaaataaaccttggggctctgttttaccggaagagtgattgatagaccacaggtagcaaaaatacgggtgctcaccacagaatgtggccaatgagcccagrtttggggttgtcctgcagaagggagagaatggtgtgcctgtgcataagtctgtaggtggtctgcaggagtagtaggagatgaggtcatctgctggtggaggggatggggaagggattaaattgaggactcagaaggaaagggatgaaggtttcaggtgttccagagaagaatggagatgagacaatccagggtacacaaaaggacaaagggcagcaccaagggcccagctgctactggaggtcctgaccctcagggcgggccatgttctgttctccaggctggctgccacactgagccagggttgatgttttgtcaggcgtgtgtggcagaaggagggatatgagagaatcctgggaggtagtgagagagccattttgatggaccactgaaggcaccacgcattgcagggaaggaaga

SEQ ID NO: 102926 - DNA, 597 bp, Homo sapiens
tgattagtttagacatggacctggacataggattaacctcaggaaaacctgggatcagagtaagagatggtgggcccccaaataaaccttggggctctgttttaccggaagagtgattgatagaccacaggtagcaaaaatacgggtgctcaccacagaatgtggccaatgagcccagatttggkgttgtcctgcagaagggagagaatggtgtgcctgtgcataagtctgtaggtggtctgcaggagtagtaggagatgaggtcatctgctggtggaggggatggggaagggattaaattgaggactcagaaggaaagggatgaaggtttcaggtgttccagagaagaatggagatgagacaatccagggtacacaaaaggacaaagggcagcaccaagggcccagctgctactggaggtcctgaccctcagggcgggccatgttctgttctccaggctggctgccacactgagccagggttgatgttttgtcaggcgtgtgtggcagaaggagggatatgagagaatcctgggaggtagtgagagagccattttgatggaccactgaaggcaccacgcattgcagggaaggaaga

SEQ ID NO: 102927 - DNA, 609 bp, Homo sapiens
ccagaagaaggtgaaaagcaccagctaagaaaagggtggcatcatctgtggcttcttattgcccaagctcttctgtccccaaaccaggacattcttcagaaagggataaagatgggcacacagagatgaaaccgcaagttgttttgttccaaccactgactataacccatacacacagagctaccagccacatgtttatgcccagactctagaacaaaaggcaaaggataaaaacacataagaatcccatacaaggggtgagatgggcatccccagagagaaggcttcagtatgtttgtgtkcacgttgcacttacctggatgctacgggtcaacagagtgctgcccaaagctctgcaaggggtctaggtggtcagagttcccccaaagtcttaattattttcatcattgcttcatctcaacgtagtttaaattggtataaatacacttatgaataagatgtttggcatgaagatatgcattttctccacacaaacaattttatacatgatgtttaggttataagtttaatccataaagctctgtttaaaccataaattcagaaatactgtcttttaatgaaaaaaatatttatgttagaacatatgaa

SEQ ID NO: 102928 - DNA, 627 bp, Homo sapiens
  misc_feature (1)...(627): n = A,T,C or G
gctagcaggctgaccacacggagaggtaagaatccaaggtcggatgtaggacaggaaagaagagaaagaggcggggcacrgtggctcacgcctgtaatcccagcactttgggaggccaaggcgggcggatcacgaggtcaggagatcgagaccatcctggctaacacggtgaacccccatctctactaaaattacaaaaaattagccgggcatagtaatgggtgcctgtagtccctgctactcgggaggctgaggcaggagaatagtgtgaacccgggaagcggagcttgcagtgagctgagattgcaccactgcactccagcctgggcaacagagccagactccatctcanaaataaataaattaataaataactatataaataaataaataaataaaagaaaagaataagtgctcctaccaccccacttcccaaaatgcaatgactgaagaggagcgagaagagcaagataaatatcagtccctgcaaggggtcactggactgtgtaccctgagcacctggaaggcaggaatgttaaagacccccagggagtaacttggcgatctgagcctcagatactccgtgttctacttccattgcctagcccaggagacagcaatctgcag

SEQ ID NO: 102929 - DNA, 607 bp, Homo sapiens
cccagaaaataattatcatttaaaccaatagggcatggaattcttgcaatgtttctgtaaaaatactttctttgttcaaaactatgtttgactactgtttaacattgcatctagagcagcactatccaacagaacttcctgtgaggatggatatgttctataaaatctttactatccatacataatatacaaattcataatatacaaattcagagaagtgagccaaccttgaacgtctgactcattcattcattcatttgtcaaacatttactgagagcctgatttggcttaggtaatgtggctaggccctgggaatacaatggtgaataagatacagcccctaccctcaaggaacatgtgagctaagaggaacaygtacagacaattagaatactagaggatgtctgtaagttttatggtggtggttacagggtcctgaggaaaagtacagagacacccaacccagtggggggagaaggatccagggttcaagagttggaatatgctatgtactttaattaatttttcacagtaaatgtcgcctcatccccattttgcaagtgaaaaaacttagtctcaaaagctgcagtgatttacccaagtcca

SEQ ID NO: 102930 - DNA, 649 bp, Homo sapiens
gcaccaccatgcccagctaattattgtattttgtgtagagagaaggttttgccaggtggcccaggctggtctcgaactcctaagttcaaatcatctgcccacctgggcctcccaaagtgctgagactacaggtgtgagccaccatgcccagcctagtctggacttttctgagaaaggttggttaacatggaggagatcctagtctgattatttttcttgtgcatgtatgtgatcaaactgttaaagatcccccaattactcaaaagtacccgagaattctacagggaagtcacaattatttcatcrcttgcatataacattttgtgctccccgtgggagtttgtatctcagttaaagaagaatagaaaatgataaagctgaactcatcccaaaaatgggatttgggatttggttgggacctgattcttaatccccttcccttaccaacttctttcattttgactacaccaaaacaccaaattccttatcatttcatgaagcacaccatgctctttcatgcattcttgtacatgctgtactctctgcctgcaaagcctgctatgtgacccccttcctccttcagctggtgaacatctactacccacctctgacgttacctttctgaaaagttttcacagaaaatcctaag

SEQ ID NO: 102931 - DNA, 532 bp, Homo sapiens
tgacactcttcacttttgttttcaatgtttytgctgatttttttccttttctttcaaattaatgctcagctggtgactatccttttgtcaagagtgagattttagtaatttcatttcaaatcaagcattacttatatatcttttaacttcaaaatatcataccatcttaataataccagtgtgttttcaactaactcgttcattgaaacttcctgactcaaatgagtgcaattaatttctggcttgttatataatatgtatttagaatgtatgtataatattaataacaaactttgtcattaaaaaatgtttttacagaaaatatttcatttacctctgacatgtactctgtgatgtaggcattattgtccctacttcatggataaattgagcaccagagctttaaagcaatttgcgtgttgtcacagggcaaatgcattgcaaaactggtaccaaatccatatcttctgattcttaaccctggatttgttccattatacatcaggctaccatttgactaaattcttatgca

SEQ ID NO: 102932 - DNA, 586 bp, Homo sapiens
tcactattgggaatctttttagtgtttcgatactgaacataatgccaatttggctcaaggcagaggttcagtatagatgtatatttggacaaacatttaattatagagacaacaggtatgtagaaaagatatcactattatcatgttaaagaaataatcttcaaatattctacatttttaatcaaaattatattatacatataatttcatatataagtcaaatagaaggagaatgatcttctggtaatagtggcatgaatagattatagaatttccttttgcagaaaacaagtataaaactggggggaaatatcttaaacaactatctggaaattgatcaaaggcaaacaacaaattgtaaaatgtttattcttggaatattgctgcagtttcaggtaagaatgcagtagtacaagaccttctagcctgggcggctcacatcctctctctcctactttgtcctttatcctacaytgcttggtagggtggcatccctgatttggagtcaggcaagagtaacacgtgaaaacccatatattattggctaaaagtggcagtctccattaggaatgaatggtcaaagacc

SEQ ID NO: 102933 - DNA, 552 bp, Homo sapiens
catcagaagcgagattactttataggacaaaagaaaattgcaggaggtcttctctcaggatctctgatgtccttgccccttcygccaccgtccaggccatgcagggcacatcatcaccagatgttcctctggccatgcctgtgactcacgggatgtctggggaaaaccacgagccaaggccattacaatcccctagagtcaaccgctgcccactgctgccacctcatctaagaaaagagggctgacacctcagtctggaggccatgaaggcaacaaaatcatgatcacaaccaggaaacctccacccccactcatccaaaccataactttttaactcaagtctctctgcctatggcatctctcagtgctgtgtccttggtgctagtagcctctgacctgggtcttctctattcataggatgttacctccatgtcacgtgttccaacttctgcttgaaggggaggccttagggagaaccataagaactgaaatcagctttccaccctcaccaccatcatctcattcttcaacaaatatagggccacactgttc

SEQ ID NO: 102934 - DNA, 552 bp, Homo sapiens
catcagaagcgagattactttataggacaaaagaaaattgcaggaggtcttctctcaggatctctgatgtccttgccccttctgccaccgtccaggccatgcagggcacatcatcaccagatgttcctctggccatgcctgtgactcacgggatgtctggggraaaccacgagccaaggccattacaatcccctagagtcaaccgctgcccactgctgccacctcatctaagaaaagagggctgacacctcagtctggaggccatgaaggcaacaaaatcatgatcacaaccaggaaacctccacccccactcatccaaaccataactttttaactcaagtctctctgcctatggcatctctcagtgctgtgtccttggtgctagtagcctctgacctgggtcttctctattcataggatgttacctccatgtcacgtgttccaacttctgcttgaaggggaggccttagggagaaccataagaactgaaatcagctttccaccctcaccaccatcatctcattcttcaacaaatatagggccacactgttc

SEQ ID NO: 102935 - DNA, 628 bp, Homo sapiens
tcctggtgatgagcccaggtctcccagtctagactccctcatcctttgttatgtgtccccagtcggagatcttggtgtccatttgtgttaacagaacacaaacagtaccatctcaatcctcagactttgagtgttaagtatctcaatgctataaagtcttattctaaacataagattctaaaaaatatgaacttcaaagtgaaatgtgttggagtctctatcccttttcttccagaaatctctttgaccactttacaaaccctcccctgagtgaacaggtcagtatccagaaattataagagcacagcaaatcaaaagagtattcaggtattyccccaattccattttctattcctagttacatgggaagatgatatatcagttacatctgattcagtgattataatgaaaatgagataacacctggtatcagaaaatactatcaacatggacacttcataagtgtccatacatagaaagcaacaaccaaaaaccaaaaattaataaatattactctggaaagtcatatttattaattatgttaattgcttaccatgtatacccaattaccctgccaaacaacaacatcattacaatgtatgtaagtcaattttgttatggactttct

SEQ ID NO: 102936 - DNA, 535 bp, Homo sapiens
ttctataaaagtctacactcttccccaaagtgagcttttctcttaataccaatgtggataaacagttatgwgctgcccacaggcctggagtgaggaacatgtgttttagaaaagttcagttgaaatgattatacgaacgtaagaagcgactagtactcttttacagttgttgctcagacgagaatagatgggaccgttctctcatcaacagtgaatcttagatggtcttcatacccctgcacttacagctccaacacacacttatctctacagcacagcatagcacaaacgcttggtgggtctcctcagagattacagctttagaaacagttaaaaaaaaaaagtcatcataattatactagcaaagagcctctactgaaatttttccatggcttatcttttaatctttacaattactctccaaggtgagcattatcatcttcattttggagataaggaaatgaagctgagaggctaaataatttctctaaggtcacataactagatgcaggcaaaactaaaactcaggtgaaat

SEQ ID NO: 102937 - DNA, 535 bp, Homo sapiens
ttctataaaagtctacactcttccccaaagtgagcttttctcttaataccaatgtggataaacagttatgtgctgcccacaggcctggagtgaggaacatgtgttttagaaaagttcagttgaaatgattatacgaacgtaagaagcgactagtactcttttacagttgttgctcagacgagaatagatgggaccgttctctcatcaacagtgaatcttagatggtcttcatacccctgcacttacagctccaacacacacttatctctacagcacagcatagcacaaacgcttggtgggtctcctcagakattacagctttagaaacagttaaaaaaaaaaagtcatcataattatactagcaaagagcctctactgaaatttttccatggcttatcttttaatctttacaattactctccaaggtgagcattatcatcttcattttggagataaggaaatgaagctgagaggctaaataatttctctaaggtcacataactagatgcaggcaaaactaaaactcaggtgaaat

SEQ ID NO: 102938 - DNA, 594 bp, Homo sapiens
cgctatcattgaaatttctccagtctgctgcacagaaatagggtatgttcaccctgagaagcagatgggtgggggcatgacatagacagcatgacttattatgactctttgacataactgagagagctcacattgtatgttatatacctcaacaactttctccatcagactcttgatgagaattaacaactagaagaaaaatggcttttcctgaggtttttcctttccctttccttaccctgtcagagtggattttttaaaaaagaagtgaaattctataatataagcttgggaaagagaagaaggaagaacccagktatccctgtaaacaaaatgacatgtgatggtctttcatggtttggagaccttagtagagactgacctattaatggtaacccaggaaatatggattctcctagttaaaaagaagcaacacacacttatcatattagactctcaataaatgcatgtgtgtagaaaaaaaattatttgtcttatttaatggccctatccccaactttccaggactaagagattttacaacagagttctcaccttaaagattccactagatggagatcctgagccatattc

SEQ ID NO: 102939 - DNA, 419 bp, Homo sapiens
aattgccatcagggtacactaatggctgagctattttgcttaaacagcaccctcatttcgagtttcatactcaaagtgtggctkgggaccagcgacaatgataccacctggaaccttattagaaatggagaatcccaggccccaccccagacctcctgatccccaggtgcttagtctggactttagagtccccaggggtattaatttcgagcacttattctggcccctgactgcattttgtaataatggaggagctttttaaaatactgatgcctgggtccaacttacagagattctgatttacttggtctggggtacagccttggcatcatgattttgaactccctatgtgattctaatatgcagcgaatttgagatcactaaattatacaatatagcaatacatagtagaagaattc

SEQ ID NO: 102940 - DNA, 405 bp, Homo sapiens
gtacactaatggctgagctattttgcttaaacagcaccctcatttcgagtttcatactcaaagtgtggctggggaccagcgacaatgataccacctggaaccttattagaaatggagaatcccaggccccaccccagacctcctgatcmccaggtgcttagtctggactttagagtccccaggggtattaatttcgagcacttattctggcccctgactgcattttgtaataatggaggagctttttaaaatactgatgcctgggtccaacttacagagattctgatttacttggtctggggtacagccttggcatcatgattttgaactccctatgtgattctaatatgcagcgaatttgagatcactaaattatacaatatagcaatacatagtagaagaatt

SEQ ID NO: 102941 - DNA, 635 bp, Homo sapiens
ttgcagcggcaacagaagagaaagtagtatggacttttcgtgctagaggagattttagagatctgccggcccaacccacacattttacacatgaagaaatccgcactcataaaatttagatggctaacttaagggtgtacagctattaagtggsagaacagagactcggatctcagatctcaggcagaacaaatctcagatccccaatccattgagcttcacaacccagctctattatatttttgtctccagaaagaaagtctttattattaggttggtgcaaaagtaattgtggtttttatcattaaaactgcaaaaactgcaattacttgtgcactgacctataattgaagcaagcccaaatatatatcatgctttgtcaactgcatgattgcttattaccttttagttctcacctcaaaggttagtaccccaaagggctccttgaccactacctacagtcagttccactccttgttccccaggttttccatgataccattcttttcttacattcaggtcacatgccccaatctttaatcaccttgtgcatttgtgtcctcatttactcttccagtaaaatatgaggctccatgaaggtaaagattgtttctcttcttcacgtctgcatccct

SEQ ID NO: 102942 - DNA, 635 bp, Homo sapiens
ttgcagcggcaacagaagagaaagtagtatggacttttcgtgctagaggagattttagagatctgccggcccaacccacacattttacacatgaagaaatccgcactcataaaatttagatggctaacttaagggtgtacagctattaagtggcaraacagagactcggatctcagatctcaggcagaacaaatctcagatccccaatccattgagcttcacaacccagctctattatatttttgtctccagaaagaaagtctttattattaggttggtgcaaaagtaattgtggtttttatcattaaaactgcaaaaactgcaattacttgtgcactgacctataattgaagcaagcccaaatatatatcatgctttgtcaactgcatgattgcttattaccttttagttctcacctcaaaggttagtaccccaaagggctccttgaccactacctacagtcagttccactccttgttccccaggttttccatgataccattcttttcttacattcaggtcacatgccccaatctttaatcaccttgtgcatttgtgtcctcatttactcttccagtaaaatatgaggctccatgaaggtaaagattgtttctcttcttcacgtctgcatccct

SEQ ID NO: 102943 - DNA, 395 bp, Homo sapiens
gtgaccaacctgatgatcagagaatggtctgtgattgaggaatctttcaaagccatcaggggtgcagatggaagaaagtaagatgcttggtagacacaacagggggcttcttacaagctcttttctcctacacatgcagagaaataggaaasaacctagtccacaggaccatccttaacaaatatatattgggtagtaggcttgatacttcatagccaatttccctggatattctttaaaggcttcctgtgggatctgcaaacaaaagcgttagcttgtatttctgatggattggttgtgagaggtaggaaatacagcaaacgaaggagactcttaagtttctggccgaagcacctgggtgagtggaggtaccatatatttagatggttagaatt

SEQ ID NO: 102944 - DNA, 508 bp, Homo sapiens
ttattatttactccagtttgaattttgtgtgtgcatgtttgtttttctgttaattgtaaccaaacacatcctacttctttctttctatgctattttcatcctggaaggttactatcaggtaattaaagatctttcttctagcttactaaaaattattcaaaatcacaggttttattttccttgacctggctggtgtattctagaactgtgctgtccaatacagtagctatcaaccaratgtggctatttaaatttaaaatagtttcttggttgcacttctgacgtttcaaatgcttaatagctacatgtcaatagtggctaccatattagccagcagaaatagagaacatcttccacactgccgaaagttctcttgaatagtgctctctctctctctcattctctctatcccccccccctctctctctctctctctgtgtgtgtgtgtgtatgtgtgtgtctacgttggagggaggggaagcatacaaaagagtaacattagattggg

SEQ ID NO: 102945 - DNA, 613 bp, Homo sapiens
tctattcaattttgacagctactccattcaaaataattcaaagactatacttacaagtgtagtaaaaaattaaatccctaaggttttcagtcacaggtttggggatttttctcctctataagtttagaaaagactataggagttgtcttgagggactgaagaggcttcacttggcaaatagggaaaggacttttactttccaaatcttttgatatcaagagaaaaagtcactttgcctttgtagcagagagaaaataacaccagacaagcactttttcctttctttgggaataaagagaagatgaattttgtttaaaatttgtataacctaattgaattccccaaagataatamcctcaaagcacttagggaactctgttggcccattatttctttctcttttcccaacttcatataataaagttccaaaaaagaaaagaaaaatgatattatcacagggtttctccaagaaaatggataggaatgctgagggatctgcctattcattaagcagatctttctttaacgcagggaaggagtcaaaccaagttgttctctgagtctgcaagggaggaagacctctcacatccttaggtgtggcattgttctactg

SEQ ID NO: 102946 - DNA, 605 bp, Homo sapiens
tgtgtttcatctatactgctgtatgtaccctgtattttctactctgaatacaaaatgacatctatgtgtattaagaattacataactaacaaggtgtgtactattttgagctctagcaagaaagaaaagaagaaggaaaaaaagaagttatcagtagtcagtatcttatgatttaagactccagggaatgtgagctagtgtgagagagtagcctatatagttaaaaccatggtttaaagacattataagatgatggtaaatttgcaattagtgtttcagggtctcctaagaatttgtacatgacaggcattagctctctacygaagagggcaaaaaccatatagaagccttaccaagtgctttgatcaaactttattatctcttttttactgtcctcattaacatacttcaaaaacgctgttaagtatttctggcaagcagagcatcagagtaattttacagtagtgtaaaggatttattaattataatcttttcattagtctatttatattcaattgtgacattaataggttgccaaaacaaactagatttaattgtatttaattaaattgttgaaagtcactaagggtagtttattattattg

SEQ ID NO: 102947 - DNA, 563 bp, Homo sapiens
tattttcaaagcagtcttgtgcattacaatcctgtgacacaattctatgcagaagaaatgcctgtggttttattatcttagcatatgcctcaaagaagatgcccatctgtacatgcaagtttcccttttgcatctgaaaagataaaatgtctctcaaaatagtaactctctcaagggcatgtaatttttggagaattgaaggtttcatcagtattttgtttgggagctatgacttataaagtcagtaatagaattcttgtgaattgcttaactaaattaggaatctaaaagttaaaattacagaaactataggaaggctctcctcaaagtcaatagtggtatgactttaaagttaccgtttctcagttgtaagtattgtgttgcaatacaaaaggctttatcaatcaaggatatagtcattttcagataatatcaactgttttgactttattgtgtgagttactttaacattaatgcacagattaactactacttgtttcagttattcrtttaaaataagtcttatgaaaagagactttatatgcaggtcatgaccattctga

SEQ ID NO: 102948 - DNA, 446 bp, Homo sapiens
gaaattgaattgcacaaactgtggatttgactactcagtcttcactataatccatggtggagctggagtgggggcagtgtttatgaactcttcccayggtcatacatttttctggtaattgaatgctttcttgtttagagaccgtattcatctttccattgtcattagcgtccctctttcacctgacttcgatttcttgatgttagtagacacaaaaattttggctatggtggagaaataactgttacttctcccatttactcctcaactttattgctttctccttgacttctcccgtctattaaaaaataaaaaatcctccctctggttcccaggaaataaagtgatagcgatggaatttctttccatattatttctcagatttcatatttacttctcagtctcttctttcagaatgcccactcttcacaccactcttgtttgtg

SEQ ID NO: 102949 - DNA, 446 bp, Homo sapiens
gaaattgaattgcacaaactgtggatttgactactcagtcttcactataatccatggtggagctggagtgggggcagtgtttatgaactcttcccatggtcatacatttttctggtaattgaatgctttcttgtttagagaccgtattcatctttccattgtcattagcgtccctctttcacctgayttcgatttcttgatgttagtagacacaaaaattttggctatggtggagaaataactgttacttctcccatttactcctcaactttattgctttctccttgacttctcccgtctattaaaaaataaaaaatcctccctctggttcccaggaaataaagtgatagcgatggaatttctttccatattatttctcagatttcatatttacttctcagtctcttctttcagaatgcccactcttcacaccactcttgtttgtg

SEQ ID NO: 102950 - DNA, 588 bp, Homo sapiens
aagactggataatttataaataacagaaatttatttcttacagttctggggctgggaagttcaagatcaatatggaggcaggtttggtgtctggtgaaggctgatctctgattccaagatggtgccttgatgttgtatcctccaagatgatgaaaggggataaagccactttcccaaccccttttataaggggctgctactcccaaccatgagggctctgctctcatgattcatgcacctcttccaggccccatgtcttaatacgataacattggtgattaagtttctaaaacaaatacgggtggacacattcaggtcatagcaaggaccaactccttaatatggctccacagatactccatgattgagcatctacttagcagtcttggtccatagggaattayagtctcttttcctgttatttctataagatgcttcctctgattagaaaatgtttccatactccccttgctgccagacatttttgattctggacaactcctacttattattttggtttatttcaatgtctaggtaaatgtaggtgccatgcaatgtattcttgtggcaccttatatttcacctatt

SEQ ID NO: 102951 - DNA, 588 bp, Homo sapiens
aagactggataatttataaataacagaaatttatttcttacagttctggggctgggaagttcaagatcaatatggaggcaggtttggtgtctggtgaaggctgatctctgattccaagatggtgccttgatgttgtatcctccaagatgatgaaaggggataaagccactttcccaaccccttttataaggggctgctactcccaaccatgagggctctgctctcatgattcatgcacctcttccaggccccatgtcttaatacgataacattggtgattaagtttctaaaacaaatacgggtggacacattcaggtcatagcaaggaccaactccttaatatggctccacagatactccatgattgagcatctacttagcagtcttggtccatagggaattatagtctcttttcctgttatttctataagatgcttcctckgattagaaaatgtttccatactccccttgctgccagacatttttgattctggacaactcctacttattattttggtttatttcaatgtctaggtaaatgtaggtgccatgcaatgtattcttgtggcaccttatatttcacctatt

SEQ ID NO: 102952 - DNA, 580 bp, Homo sapiens
aacaatatgttagatagaattaggcattaatttgaaagaaaaaatttagaataaaactacactttttgacaaagtataagataaattaagaaaatacaaaatatactcaagaaaaaagatcagcataaccttggataattgaaatcattttctattatgaatttcagtttatgatgatagaaagatattttgtaggaacatatttcacgagagtcaaagttaaggctgtaactgaacatgattagaacataaaaaattaacaatgktagaatcattaacagcagggctgttgaagacagaatccataattcttcaggctcaaggagaatcatctcagtttccccagtaattacttgtaagccttatcttaagaaaacttccacattttcgaagggaaatgtatatcactttgacagaaacatggaaaactcttttgtccaaaacttctaggtgatgacttaaccgacagtaggtatgcaatgttaagaatttctataattacatctaattcaggacttgattgtccgacatagataaaaatagacccttaatttcactttacttctcaatgaatcacatg

SEQ ID NO: 102953 - DNA, 576 bp, Homo sapiens
agggtagcagtaaaggcttttaaactaattaagtaccccatggttattgggttactactgtttatcagccacttttctaagagctttctatcctttgactaatttaacggkcatcatgtcattgtgaggttactactgaggaaacagaggcacaggaaattgaattatttgcctgtagtgactccactgttaagtggtcaacctgaaatttgaatctaggaagtttgactccacagtctgtgtccttcttcacagtgtactaaagccaacaactatgtggacagaactagtctacaaatatgggtattttaaaactacataaagtcataatttggtatgtataagtgtagcgatagatgcagaaaaatggaatacacttgaatttaaaaagccaaaaaaagaaatggctggaggaaatttttaaacaacacattaaacttagataatactataaaactctagtcaaaatagattcattttaatataaataaatgatcatgttaattatttttgactttcaaaatacatctatattttcattttttaaaagattaaacatagatggatcaacatggg

SEQ ID NO: 102954 - DNA, 348 bp, Homo sapiens
aataagtgaccctaaaaacattacttcaacaaaaaaaagcttatttttatttttttcgaatacgtatccacaggtagaaatcttagtgagggccagccagcttctagctttctgctttgccatcactacgctgtggacttctttgtgggctaagataatttcagaacccacatttacatatcaagcagaaaaatgaagagcaaggacaaagggaggatkctagccatattttaagaaagagtccccagaactaccacataaaacttctacttatgaacttggccagaacttcatgtcctagtgacacttagctataagtcatactagacaatatctttattttggaag

SEQ ID NO: 102955 - DNA, 596 bp, Homo sapiens
aaaactgtgatatctggaaattgaattttgaaaaatacttgtctactagtccaaccaccccaagatgactaaataaatagtaagtmttataaattgtaatatttgggggtttagccatgcggttctaaatcatttctaatgctatagcttctaatcacaagtttgcatttatcttttcccgtcataatccatttaatgcagttgccctaatccatctcctcgcctcatttttttctagtaaaataacagaacttagatctatcaattttgtacactgatttgtccccatgatgccaaaaaggtggatgtaaaatactaatttaataaaattccctgttatatagcagaatttaatctttagccaaagaaatcataaatctctcaagccagcttgtgtgtggaaaccacggctttttttcattttctactcaccatgtttatattagcttctttttaagaagcctgtattgtaaaacatataactaaagactacatgaaatgtattaaacaacttactcaatattgtgcgagtttctattctaggcaccagagttactgcagcaaacaacacagccagatgtcattttttgtaaagc

SEQ ID NO: 102956 - DNA, 596 bp, Homo sapiens
aaaactgtgatatctggaaattgaattttgaaaaatacttgtctactagtccaaccaccccaagatgactaaataaatagtaagtcttataaattgtaatatttgggggtttagccatgcggttctaaatcatttctaatgctatagcttctaatcacaagtttgcatttatcttttcccgtcataatccatttaatgcagttgccctaatccatctcctcgcctcatttttttctagtaaaataacagaacttagatctatcaattttrtacactgatttgtccccatgatgccaaaaaggtggatgtaaaatactaatttaataaaattccctgttatatagcagaatttaatctttagccaaagaaatcataaatctctcaagccagcttgtgtgtggaaaccacggctttttttcattttctactcaccatgtttatattagcttctttttaagaagcctgtattgtaaaacatataactaaagactacatgaaatgtattaaacaacttactcaatattgtgcgagtttctattctaggcaccagagttactgcagcaaacaacacagccagatgtcattttttgtaaagc

SEQ ID NO: 102957 - DNA, 580 bp, Homo sapiens
tttatatataacttccatacattcctcagccatgatctagctttggtggatctcaaaatattggaaaaaaatggtgctatcaaatgtcatctgtgacaaactcaaccacaaatctcacacgttgcctcttactggccctcacgcaattcatctctgtagcgtttgactctgttgaccaccattctttccagtactgtctcctggttctccttgactgactccatctcactccaatatcagcttagggttttcaaattgtcccttaaacattatgacttaatttcctgaatattttgctttgaccacttttaattatatttcactttattccattcaactcaactacctaaatatatattgagtttactgatgtccagcgccccagcaatgcatgggaagttgagaatggtatgtttaaagaaaaataagactcattcttcacccttaagaaagttttattcactggaggtaccagtagaaacccacayagctttttaaaattcttaacctgagtgacctgaagcgttttccaaacgcataacaaaggtataagttttgcatatttatctctactttaaac

SEQ ID NO: 102958 - DNA, 581 bp, Homo sapiens
tcttgcaaacattattttactgatatttagtaaagtacactgaaaatacactgctagaaaacaaaattgtgaatccaaagacaaaaatgcacatccaattttaaaattattattgatttcacaagcataaaattactctgtctaacggccataaamctttgttatgaatgattatgctcaatttctgtcttcattttattaatggcaagtaacaaatttctccatccagcatttgtctacagtccatactggaagacacttaaatcttcaattcaccaagggaggtctggaaatgggactatttgctactcagttttctaaagggtctttaaagcataattactggggaacattttcttagcactgtatattgacaatggcttcttcatccccttcaaatcatctaagacaggacacaccctggccatggtttttcccagctctcactcatacaactgtggaataaccctcagtggtggtaaagttgtttatttatgtatttactttgcctccctaatggcagattatttctgttaatcccaacaagctctttgtttcatcagccaattctttaaaatatt

SEQ ID NO: 102959 - DNA, 547 bp, Homo sapiens
aaatcatcatggcatggatcatctgaaatgtatagctcaaacctagattattcctgtgcacttcagaattgaatattcaagtgcaagcctgtacttaatgcctccctcaaatgtttctaagggagctgaaacatcagtatgtccaaaataatctgaactggctcctcaatctaagtttttaaaaaacatatcctttgaaygaaggcctcattgtagaaatttatcttagggaaattcataccgtcattgtatctctctttatgaaagcataataactactaataaaggataacttaaataaaataaactaaatagctattcaatggaatattattcagctaaatgaatgagacaggtttgtataatatatcctagcatgaaaagatatgactcaagaaacactattaagttaaaaaggcaattgcagcactattcacaatagcaaagacttggaaccaacccagatgtccaccaatgatagactggataaagaaaatgtggcacatatacaccttggaatactacgcatccatagaaaggatgagtg

SEQ ID NO: 102960 - DNA, 611 bp, Homo sapiens
tcaaggctatataatattttatggtagaacagatgacaatctatttcttcagtttkctgttgatagaattttgactattctcttacgataaaaatcagcaattccacccctgcgaatattaataggagaaattcttgcacatatgcatcaggaatgttcacagccatactattcataaaatttaaaaaattgtaaccccgctttttcaactttaaccaaagaaatttctttattagaaaggaccaacattctcatgcatgggcctgttgtgaaatcaagtgaatattaaggtatctttacttttgatttgaacttcaaatttgacctttaaatttatatatataaatatatatatatatacacacacatatgtacacacatgcatatgtatatacgcacacatatatgtacgtgtgtgtatatatatataaaaaaattataatcaaggaaaatttttctgaatttgtgtctttattttcatttatactactagcacaagaactaacactacccaaaatagatctctggtaattctctagcttagttttaattcttggtatagcgcttcttatgatctaattttcttttcatttgattatttttctatctcc

SEQ ID NO: 102961 - DNA, 611 bp, Homo sapiens
tcaaggctatataatattttatggtagaacagatgacaatctatttcttcagttttctgttgatagaattttgactattctcttacgataaaaatcagcaattccacccctgcgaatattaatagragaaattcttgcacatatgcatcaggaatgttcacagccatactattcataaaatttaaaaaattgtaaccccgctttttcaactttaaccaaagaaatttctttattagaaaggaccaacattctcatgcatgggcctgttgtgaaatcaagtgaatattaaggtatctttacttttgatttgaacttcaaatttgacctttaaatttatatatataaatatatatatatatacacacacatatgtacacacatgcatatgtatatacgcacacatatatgtacgtgtgtgtatatatatataaaaaaattataatcaaggaaaatttttctgaatttgtgtctttattttcatttatactactagcacaagaactaacactacccaaaatagatctctggtaattctctagcttagttttaattcttggtatagcgcttcttatgatctaattttcttttcatttgattatttttctatctcc

SEQ ID NO: 102962 - DNA, 611 bp, Homo sapiens
tcaaggctatataatattttatggtagaacagatgacaatctatttcttcagttttctgttgatagaattttgactattctcttacgataaaaatcagcaattccacccctgcgaatattaataggagaaattcttgcacatatgcatcaggaatgttcacagccatactattcataaaatttaaaaaattgtaaccccgctttttcaactttaaccaaagaaatttctttattagaaaggaccaacattctcatgcatgggcctgttgtgaaatcaagtgaatattaaggtatctttacttttgatttgaacttcaaatttgacctttaaatttatatatataaatatatatatatatacacacacatatgtacacacatgcatatgtatatacgcacacatatatgtacgtgtgtgtatatatatataaaaaaattataatcaaggaaaatttttctgaatttgtgtctttattttcatttatactactagcacaagaactaacactacccaaaatagatctctggtaattctctagcttagttttaattcttggtmtagcgcttcttatgatctaattttcttttcatttgattatttttctatctcc

SEQ ID NO: 102963 - DNA, 617 bp, Homo sapiens
  misc_feature (1)...(617): n = A,T,C or G
gctattcagcctgccactgcagttgataacatttcgaaggngtgaataccacatacttaatcacatagtaataattyaataagctatatttcagtataatttgtgtctgaagatgatttattttatgtatttaaaaatattgttttgagaaagtgtcaataagctatacaaaacttctaaagtagtgaatgacccacataaataaaaaaatataaacactccttattctataggcttttttccttagattatgatctaagaactaatcttgtatttgtgatctttctgaaaatgtattgagcagatttttacaaacaacaccaaaaatttatatcctttggttacataacatgctacaaacttccaccttcaaaagttgaagttcttttctgaatcaactcaaacattttactctgtcagttggttgatgtgttgctgtctaaaatgtagattgatggttgacagcattgatgtcataaattatgcatgccaatttcatgaacacaattaaactgaggcactatgggtaatttaaataattatacgtataaatagtagtattagtcttgtcaaaatctgcacctatactaaatgtcagcatttaatatcaacaaagt

SEQ ID NO: 102964 - DNA, 580 bp, Homo sapiens
aaatcccatctctagctggcttttgctctgtatgatttacttagagaaaagagcctggtagattctaaggccccaggacatttccatgagctcctttcatccatcattccagtcttggaaagggaaagtgcgatgtccctaattcttgtgcttctcgatcaatcttcctgctacaccagatcctaacatgggatgtgtagtctacagagagatggctgggtcatcattcttgctctgccccttacaagctgagtgaccttgaacaagttatttaacatctctgagtcttagttttctcctaggcagcacctgtctcacaaggtggtggatgaaactaagagagaatgcatgggagtgagtsggaggcatttagcataatgtctggcacctaataagtgctcaataaatatcagctactatgatttggttagttcttattagtacttaatctgtgatgtgcgcagagaggagaaataagattttaatataagaacgctagcaggctttcacatcttttgcaagccaatagagccttggggaaaggtttggcttctattagtttctccaatggctttaatta

SEQ ID NO: 102965 - DNA, 592 bp, Homo sapiens
cagggctttcagcaggcaatggtacccagctagaatttaataactttttttcatgatattcatgaaatatagcttctatatttatagcaagggatactggttttctatttgctgcagtaattatgagtttccttttcattgaacaatgtaagaaacataaaaattaaatgaaaacataataagtaaacaacatagktattatgtagatatgacaaaagtgttgaaggttgggaagactgaggaggactgaagtttgggaaaaccacccttggtacagtgacagacctttccccttttgggcttacttccaaagtagatctaccttcccttgaagccagatgtctggatgcattagtttgtgagattctctatgaatgcacaaagacaagatctccacagggataaagagtgtgctagggaacattttagctttagtcttcagtctttaagtagctttatgagagaaagaggcccactaggttctttccataggagaaagttcagggcagcagggagatggggctttagagtttggttgacttgggttttcatctcagccagaaaggtaccattgtggactctggatttatat

SEQ ID NO: 102966 - DNA, 592 bp, Homo sapiens
cagggctttcagcaggcaatggtacccagctagaatttaataactttttttcatgatattcatgaaatatagcttctatatttatagcaagggatactggttttctatttgctgcagtaattatgagtttccttttcattgaacaatgtaagaaacataaaaattaaatgaaaacataataagtaaacaacataggtattatgtagatrtgacaaaagtgttgaaggttgggaagactgaggaggactgaagtttgggaaaaccacccttggtacagtgacagacctttccccttttgggcttacttccaaagtagatctaccttcccttgaagccagatgtctggatgcattagtttgtgagattctctatgaatgcacaaagacaagatctccacagggataaagagtgtgctagggaacattttagctttagtcttcagtctttaagtagctttatgagagaaagaggcccactaggttctttccataggagaaagttcagggcagcagggagatggggctttagagtttggttgacttgggttttcatctcagccagaaaggtaccattgtggactctggatttatat

SEQ ID NO: 102967 - DNA, 592 bp, Homo sapiens
cagggctttcagcaggcaatggtacccagctagaatttaataactttttttcatgatattcatgaaatatagcttctatatttatagcaagggatactggttttctatttgctgcagtaattatgagtttccttttcattgaacaatgtaagaaacataaaaattaaatgaaaacataataagtaaacaacataggtattatgtagatatgacaaaagtgttgaaggttgggaagactgaggaggactgaagtttgggaaaaccacccttggtacagtgacagacctttccccttttgggcttacttccaaagtagatctaccttcccttgaagccagatgtctggatgcattagtttgtgagattctctatgaatgcacaaagacaagatctccacagggataaagagygtgctagggaacattttagctttagtcttcagtctttaagtagctttatgagagaaagaggcccactaggttctttccataggagaaagttcagggcagcagggagatggggctttagagtttggttgacttgggttttcatctcagccagaaaggtaccattgtggactctggatttatat

SEQ ID NO: 102968 - DNA, 694 bp, Homo sapiens
tggtccacaaagataagaaaaatcatgacaaaatgggaatgaatgcaatttggggaacactgtattcgcccaagtgatgtttatttaggcatgtggtcagatggtaaagaaaagaaagtgggagggtagcctaggcaggattcagcatgatctgagaatcttgcaagtagaaccaagttggttggggaaatccaggcccattttggtttctgctacctggctgtagtgtgaccagggaggcaggtgctgggcagggttgtattaacaaggcaggtaaggaagaagtccagcaggcgaggaggtgggaggtccttcaaggcagaaataggccagtagataaggtgaagaggctaagaagactatttggagggtacaaggrgagatgggacagggagaaggaagtggctagagaggtgagctcttttagcaaggagggcagtacacagactaagagaatggcctttagggtgggactgcctggattcaaatctgagctttgccacttaccgttggccttgaactaataatacttaacatccttaagccttagttttctcatcacttgcaagacaggataataacagggtctacatcttataaattcttagcaagtgtgttggctagtgttatcaattccagggctgagccctatcatgtctgcctctgtgcatgttgagaattgtgcagttttgca

SEQ ID NO: 102969 - DNA, 622 bp, Homo sapiens
cctaaaacaagtcactgagtgagtgtcttgtatttttgtttgctaaatctggcaaccatactcctggggtattgactacctttgacctccaccacattcttttaccataggaccttagcttttaccacgagaagcctcgattaataccttactcactccttaggacagctctgaggattagggattagtgagggtcattttagagctgaaggaggtacatttcctccccagatttgagtgtctcattataataagttgttttggatctgaattctgatcataacttttaatccttctacaaagtagttagttaggtccaaaagatacagatcactggggaaccatggagatgaaaawtacttttactcctagaaacaacctctgtggagtttttagtgctcgctgtcattaggtcagtgttatttagcctaaaaataatgctaatgactgacagtagtagcagcagcagggaatattaaataccacttaactatgtgtcaggcacggcactgctcaccactctttttcctactcccattttagaaaggggaaaactgagacacaaagagattaaaggaacttttgttcttctcattgttcaagctcagacctaactaactct

SEQ ID NO: 102970 - DNA, 622 bp, Homo sapiens
cctaaaacaagtcactgagtgagtgtcttgtatttttgtttgctaaatctggcaaccatactcctggggtattgactacctttgacctccaccacattcttttaccataggaccttagcttttaccacgagaagcctcgattaataccttactcactccttaggacagctctgaggattagggattagtgagggtcattttagagctgaaggaggtacatttcctccccagatttgagtgtctcattataataagttgttttggatctgaattctgatcataacttttaatccttctacaaagtagttagttaggtccaaaagatacagatcactggggaaccatggagatgaaaattacttttactcctagaaacaacctctgtggagtttttagtgctcgctgtcattaggtcagtgttatttagcctaaaaataatgctaatgactgacagtagtagcagcagcagggaatattaaataccacttaactatgtgtcaggcacggcactgctcaccactctttttcctactcccattttasaaaggggaaaactgagacacaaagagattaaaggaacttttgttcttctcattgttcaagctcagacctaactaactct

SEQ ID NO: 102971 - DNA, 570 bp, Homo sapiens
aattgtacagaatgaccatatgccattcctagtccctgcccaggacagccagaacccaaattctgtagatgattcctgggaatttgtccttcattgtgcttctgagggtgcagaagtgtgattgttataaagccaggtgatacgcaaaataccaagagatgtaaaagcataacctcaccttagggcccgagaatctactaaagaaaatatgattattatatatgaagtggtacatttaaaaaccagcatgatgagagtaygtgtgtagaatctggcccaggactggggatcactcagatcaattgccttaagcactaggcaatgaccagtttccttggaattttgaagggggctgacctttagtttggaggtcagccttcaaggactagtcttgagctaattgaatttctaagcacaggcatatagatgtggtttgaatactcaaatacctcaggtggcaggcagatacatgagggagggaagcaggccaatgtgagatggagtaagacgtggagtaggctgtggaaaattggaacgttcctggccctgctagaaggggcaactaattct

SEQ ID NO: 102972 - DNA, 587 bp, Homo sapiens
cactaattaatataagagctttatttcagcattttggccccacaggcagcactaaaaatacttgcttttactcaagtaagttatgcttaagtcaaagctttggcaactaatcaaatgattaatgctccattgattacttgaatttctgttcagaaaaggaggaggaactgggcttttgaactttcacagtaagtagaaggacctgaaggtaatttgtttgcacatagatatctcacagtctagtgcttagtccaaggtccagttcacaggatagagaagggaagcaatgaacatatttttmtactaagtaatattcaaagaacttcagcgttctaaggtatcacaagtggcaggcagaggtttatggtccaagaccattttctgcctcaagtgaaagcacctggtgattcattgggccaccaagaaagtccagcgtgggcgccagtctgctcagtaaccagcacatagacaaaggaagctccatgtctggcaggaaacatgtactgaaaggacagtgccagggaggtgccagaagcatgaaagcatccagaatcgtgaaatatgactcaatcagaatggtccaggaa

SEQ ID NO: 102973 - DNA, 618 bp, Homo sapiens
aatggactttcctgaaacaactgctaggcagaaggtgggtgaaagccacaagcatagcctgcctcatagtagttccacgaaagtccattttacccctcttcccatagaaatggacactatctatgggtccctgtgtgtggctgtctcctgccatgtcgctggattttctcaggatccctgacaagtagggatttttggtcaatctttcatagacactcttatctcctcaaatggagacaccatcactggcattgaaatgctaaggtgagaactcaccaagacacactgtaggtaaagttccagctcagcttagggtttgatatgtaacgggcccaataaatgatagtgattggtattaggattgctttgttcttgttacagatgaagaagtagaatgtcagtggattacagtgaacagtccaagctacaaaatgtgttgcaactggaatttgcattccatgtgtctggttccttctctatgtacaggartgaatcaggagagcacactggctctaccttcttccactctgacttctcagctttaatccctggagttccagggtggtatggactgaatgtgtgtgcccccaccacttccccaaaattcattaacaccac

SEQ ID NO: 102974 - DNA, 534 bp, Homo sapiens
cctggcaacctccattctactttttatctctattaatttgactactttacttcatataagtggaatcgaacagtatttgtcattttgtgatgggcttatttcacttagcataatgttctcaagatttacccatggtacagcatctgtcaaaatttccttcctttttaaggctgaataatattctgttttatgtacttacttcattttgtttatgcattcatttgtccaggaacacttgggttgcttccatattttggctattgtgaataatgttgctatgaatataggtgtacaaatatcactttgagattctgttttcaattcttttggatatatacccagaagtggaattgctgggtcctatgaaaattctatttttaattatttgaaaaacgccattctggtttttcataccagtggcaccattttacattcccaccaatagtgcaaaagggtttcaatttctcartatccttaccagtacttgttattttcttttttttttccaatagctatcataatgggtgtgagata

SEQ ID NO: 102975 - DNA, 556 bp, Homo sapiens
ctttaaatatgggtgacagatgtcttgaaaaaaaagaggttgaaaaaatttccatgtaaacaatcagcataagaaagctagtatttcgtgccaatatcagacaaagtagacttcaaggcaaacaatacaaaaactaaaagtcctttccataatgataaaaaaaatcatgtcattatggaggagataacgattttgaatgtgtaggcacctaacaacaatgcttcaaaatacagcatgcacaaattgacagatctaaagagaaaaattgaaaatccacaataatagttgaagactttaaaagcactctttcagttatgaatacaacaagcagatcccacccccctcaaaaaaaaaaaaagacagtagagacagaaaaggcttgaaaaacagaatcaaccagtgttcctaacaggcatttayggaataccaacccaacaccactagagcatatggtcttttcaaatgcatgtagaacattcaccaagacagatcatgttttgctctataaaacaagtttcaaaaacatcacccaattgaaataataaatagtatgtta

SEQ ID NO: 102976 - DNA, 340 bp, Homo sapiens
cataatgtaaattacttacaaaatagtttgtgttcaaattgtaaggctatggagggtgtcattcagctgtgcagctgttaactatgatsccaatttaggagaattttaaatcatgattagaatagtatatgtttggtttcagatgtatctggaagtaagaaaccaaaagatagcaaatcccatggtgagatgtagatttatacatatatatctttatgtttcccaatatccttcaaatgtcttaaccaacatgtacaatatattttttcatgtcatctcattagagttaaaagaaacatgaaaccactttgaacattttggacataaaataaaaaagctt

SEQ ID NO: 102977 - DNA, 532 bp, Homo sapiens
ataagtgtagggcaagtttctctatagaggcttgagagcaagcaggtagacacagaacatggcctgaaataaaactagttcttccggcctacttttgccgtsgttattactattactatttagactaaaatactgtgagctggtacttaagattagacgtatgtgttattaaagaagacagaattaaaggaaatggttatttctgagtcgtattagctgcattatcttcaattttgaacaagtttactctttgataagtacgtcgcaattgcaatatacactattgatttagaaaaaccatggggtatggagtaggtgcaagttacaatttaattccacaaatatttactgagcaatcactatgtaacattgtctagaataaaattagaggttcactgaatctcagagtgggaagaaaataatgaagtctggtccaacatatactaaaacagaaattcattcatgtttacacattaaggtctttatgtgttactcttctcatttccaaagatagaccttctctttccccaca

SEQ ID NO: 102978 - DNA, 532 bp, Homo sapiens
ataagtgtagggcaagtttctctatagaggcttgagagcaagcaggtagacacagaacatggcctgaaataaaactagttcttccggcctacttttgccgtcgttattactattactatttagactaaaatactgtgagctggtacttaagattagacgtatgtgttattaaagaagacagaattaaaggaaatggttatttctgagtcgtattagctgcattmtcttcaattttgaacaagtttactctttgataagtacgtcgcaattgcaatatacactattgatttagaaaaaccatggggtatggagtaggtgcaagttacaatttaattccacaaatatttactgagcaatcactatgtaacattgtctagaataaaattagaggttcactgaatctcagagtgggaagaaaataatgaagtctggtccaacatatactaaaacagaaattcattcatgtttacacattaaggtctttatgtgttactcttctcatttccaaagatagaccttctctttccccaca

SEQ ID NO: 102979 - DNA, 462 bp, Homo sapiens
aaaacattttcattacccccaaagtaaaccctgtccccattaagcagttactctccattctttcatctacctctctgttggtaaacaccaatctactttctgactgcrtggatttacccactctggatattttatataaacagataataggatatataacgttttatatcttgcttgtttcacttagcttaatgtttttaggttcattcatgtcgtagaatgtatcagtgtgccccattcttttttatgctgaataatattccattgtatgtatatattataatttgtttatacatttatctgtggatgaatatttgggtcatttccaccttttggctattgcaaataatgctgttatgaacatgcctatacacgtatttgtttcaacacatgtttttagttcttttggatatataccttctatgtttaacattttcaggaaacgccaaactgttttccata

SEQ ID NO: 102980 - DNA, 614 bp, Homo sapiens
agtatacttgtttggtagaataaaagattttaagaggaaggagagcagacatcttttgcttagaggacaagagtttcgtatctgggtttacagaccagtttcccacttactggataagttactcaatagttactgcctacatttttgcacatgtaaaacagatataaagttactacttttttcagttattttgagaattacaagagacaatgcatatcaactactcagaatggacagaacattcaataaatgccactcatttgtgttctttttttcccccagatcctctatcttagagcaaacccagctcctcttgatttctaaagctttctttactcmcaacttctccaggccctatgagtatcccacaaacagcctgactcagaataacaataaacttgcttgaatatacatctgtaatgtttgtctttaaggtagatgaaccttaatcctttgtttcctgatgagtcagcaaaattatcagacaggaaccatttcttctgttgtagtatcagaactcggtttcaatgattaaaaggggaacagactgagctacttgtcttccatagctttctctctagtttcacctcctttattccttatttatttatata

SEQ ID NO: 102981 - DNA, 582 bp, Homo sapiens
tgatttgatcattcaacaaacagttattaaaaagagtacttcataatagacactctgctctgaaaaaaacagaaatgaaagaaattggctgtagcctcacagaagttacagcccatgacggggatagatgtgcaaactagtaatgatagcttcttggggtacagagatgaatagacaacgtccccctcctggaagaactcccagtctgctgtcatgcaattttgatctaatgctatttactcttgaaactaagtgactttaaagtgattaacttcatmaacataatgactttgattcttacccaaagacttcccacatttagatgcagcttaaaagaatccgccttataacttgcaacagaacagagacttttttcaattgagaatgaggaaaactactacgctgtgaaaaatacagcgtagtattttggctttgttagttttgtatctactcaagggtactgaaagatagaaaaggcatggcagataataccccctactgtgccactgtaaaaataataacgtaattgtgttcccttcatgggaacagaagaatagaaaccaatatatgcagaaaatagaa

SEQ ID NO: 102982 - DNA, 617 bp, Homo sapiens
tgacatacattttgtactgtgtccctaggactgtgtaatatggatttaatcaatgatttttaagtgacatctgtgagaaaataaacaaaagacatcctcagtttcttcacttacaaaaataaaaaggtcaaagtaaaaaatttccaaaagccttacattgtagccatttaaaattttataattctaaaggtagaatagcaaatttcaatttaataattggttcttgaatcaaaagtagtcattgtttctctagatggtgctgtttctcattttggctagcaatacttgtattattattaaaaaaaaaaaacaacaacccttccagttttctrtggctttttatcatgttccaaaggcttagagtagaaaaaaaaaatcaaggtttaaggaaatgacaactagaaactggtgtcttccctaatggtgttgaatattccaggaaaacaaataaggagcaggaagggggacagggtatttttggacatcacatttgagacatttttcagctgtagttcaagattttattggtaactaacagacagacatggaattccatccatctattcccaatgaaagcactagtagtagctaaacaacttaaaaggtaaagaaaaaaa

SEQ ID NO: 102983 - DNA, 516 bp, Homo sapiens
tgcaagtttccctataaagtgtccacatgaatagctgttgtgaaacagaatgcatggttataaataactagtgttttctgaaggacttttgtttgtattatttatctacatagagactcagtgaatgccatttcctgcatctgctcctcccttcaggacaaaggcatcagttgctccagctgatagaagtattgcctcttggcagctaatagttgtctctccccagaagttgcgttagacttaagggagctgtttcccccaaggttaagccttctcctcagggcaatttgtatccaaaaactggtcaaaatggtggtaccaaaaaaaaaaaatagtgctacccttgcttcaacgggtggagggttagacaacttagagggcatgtcctagcttgaaagctgcttagggtattaattgaagtccttgttgaaaatactttgcagtttaactactccrtgtatccaattctgtttatctcactctctcacaggtgtttattccttcccccaataaacc

SEQ ID NO: 102984 - DNA, 527 bp, Homo sapiens
tctagatgacaaatacctcagctagtgagaggcaaacatatagactggaaatatttaaagaaaagtacactctacacaaatgtctaggccagtgagttttcacaaactgaacacacccttataaccratattcacatcaagaaacagaaccttaagagtagcctaggaatccctttttgtttctgttttgctttgctttgcttttttagtcattatctccactcttgtcaagggtaaccacttctcctcctaacattatagattagtttttgcctgtgttttaaatttacgtgattgaaactacatagtatgtattctagtgtccagtttcttttactcagcactaagtttgtgagattaatctatattttcaaggtttagttataaagggttaattgttcctgctgggtagtttcattgtgtgactatatcacaatttatttaactgatctactgtgaatatgcctttacatagcttcaaatttagactattacaaataatgccagtataaacaaggttgtgcttg

SEQ ID NO: 102985 - DNA, 645 bp, Homo sapiens
atccaaattgtaaaggaaaaaagtaaagttatctgtgttgtcagatgacatgagtatttacatagaaaactctaatgatttcacacacaataaaatctgttagaactaacaaacacagcaaacttgcaggacgtaaaaccaatgttacaaaaaccagatgtgttgatatacactaaaaataaactttatgaaaaggaaactaggaaagcaactccatttgcaacaacaccaaaaagaataaaatacttagaaataaaagyggcaaaagacttttacactaaaataacaaatcatttatggaagaaatttaaacagaaaaaaactcatgttcattaaagacaatattgttaaaatatgcaaagcaattctcagattaaatgcaatctttatcaaagcaattctcagattaaatgcaatctttatcaaaatctcaataacatttttttgcagaggtagcaaatccaatcctaaaattcatataaaatctcaaagagctctgaatagccaaaacaatcttcagaaagaaaaataaagctggcagcctcacatttcctgacttaaaaacatattacaaagttataatattcaaaacagtatggtactggcataaagcagacatatagatcgatggaacagagagcccag

SEQ ID NO: 102986 - DNA, 645 bp, Homo sapiens
atccaaattgtaaaggaaaaaagtaaagttatctgtgttgtcagatgacatgagtatttacatagaaaactctaatgatttcacacacaataaaatctgttagaactaacaaacacagcaaacttgcaggacgtaaaaccaatgttacaaaaaccagatgtgttgatatacactaaaaataaactttatgaaaaggaaactaggaaagcaactccatttgcaacaacaccaaaaagaataaaatacttagaaataaaagcggcaaaagacttttacactaaaataacaaatcatttatgraagaaatttaaacagaaaaaaactcatgttcattaaagacaatattgttaaaatatgcaaagcaattctcagattaaatgcaatctttatcaaagcaattctcagattaaatgcaatctttatcaaaatctcaataacatttttttgcagaggtagcaaatccaatcctaaaattcatataaaatctcaaagagctctgaatagccaaaacaatcttcagaaagaaaaataaagctggcagcctcacatttcctgacttaaaaacatattacaaagttataatattcaaaacagtatggtactggcataaagcagacatatagatcgatggaacagagagcccag

SEQ ID NO: 102987 - DNA, 645 bp, Homo sapiens
atccaaattgtaaaggaaaaaagtaaagttatctgtgttgtcagatgacatgagtatttacatagaaaactctaatgatttcacacacaataaaatctgttagaactaacaaacacagcaaacttgcaggacgtaaaaccaatgttacaaaaaccagatgtgttgatatacactaaaaataaactttatgaaaaggaaactaggaaagcaactccatttgcaacaacaccaaaaagaataaaatacttagaaataaaagcggcaaaagacttttacactaaaataacaaatcatttatggaagaaayttaaacagaaaaaaactcatgttcattaaagacaatattgttaaaatatgcaaagcaattctcagattaaatgcaatctttatcaaagcaattctcagattaaatgcaatctttatcaaaatctcaataacatttttttgcagaggtagcaaatccaatcctaaaattcatataaaatctcaaagagctctgaatagccaaaacaatcttcagaaagaaaaataaagctggcagcctcacatttcctgacttaaaaacatattacaaagttataatattcaaaacagtatggtactggcataaagcagacatatagatcgatggaacagagagcccag

SEQ ID NO: 102988 - DNA, 645 bp, Homo sapiens
atccaaattgtaaaggaaaaaagtaaagttatctgtgttgtcagatgacatgagtatttacatagaaaactctaatgatttcacacacaataaaatctgttagaactaacaaacacagcaaacttgcaggacgtaaaaccaatgttacaaaaaccagatgtgttgatatacactaaaaataaactttatgaaaaggaaactaggaaagcaactccatttgcaacaacaccaaaaagaataaaatacttagaaataaaagcggcaaaagacttttacactaaaataacaaatcatttatggaagaaatttaaacagaaaaaaactcatgttcattaaagacaatattgttaaaatatgcaaagcaattctcagattaaatgcaatctttatcaaagcaattctcagattaaatgcaatctttatcaaaatctcaataacatttttttgcagaggtagcaaatccaatcctaaaattcatataaaatctcaaagagctctgaatagccaaaacaatcttcagaaagaaaaataaagctggcagcctcacatttcctgacttaaaaacatattacaaagttataatattcaaaacwgtatggtactggcataaagcagacatatagatcgatggaacagagagcccag

SEQ ID NO: 102989 - DNA, 380 bp, Homo sapiens
ggccaatccagtgcagcttggttctacatattttagggaggcatgaggcatcaatcaaatacatttaaggagtgtagggggtgggggttctaggctataggtaaatttaaatattttctggttgacaattagttgagtttgtctgaagacctgggattttatcatgcagatgaaacatccaggtagcaagcttcagatagaatagactgtgaatgttaatgccagagaggtataatgaagcatgtcccacctcccactttccatcatggcctgaaccctggaggaagaggaagtccattcagatagwtgtggggggccttcgaattttcattttcatttacgttcttccccttctggccaagatttgccagaggcaacat

SEQ ID NO: 102990 - DNA, 521 bp, Homo sapiens
tcttcacctgcttcattctagccacactggcagcagattgtatggtgcccatcgacactgagggtgggtctccctctcccagtccaccgacacaaatgtcaatctcctctggcaacaccctcacagacaacccagaaacaatactttaccagccatctaggatccttcaatctactcaagttgacacctaatattaaccaacacaagcccaccgcttgtcaacttggcattcacacacatctcctgaaatcatacttaatctacaaataaatacaataaggtcataattacgcctaacataatgcaactatccttcgtacagcyggaagcgcacccgtccttaacctaaatattattacataaagtagcaacacttaaatgctgatataaagtcaacaaatcttacgttacatgacaaaggaaaaagaaaggaaataaaacagattttcttagtaaaggtgtgtacatgcacaaacatattcttaacaaaataaggaggaaatattcatgacaattacagt

SEQ ID NO: 102991 - DNA, 589 bp, Homo sapiens
aagtattttatgttgtgaccacacacacacacacacacagtgtgattgtatatggacacaaacaacattgcacatacacttttgtgaagtaatacatatccttactatgatgatagttttatttcagtttttaaaaacatttaggttgtaaccaccaagttgatttctctgcccactaatggacagataatgcagagaaggaaaatactgctctaagtgacctgaccgcgaggcaaatgatgtttaaaaccataaagcctgagaccaaaaaatrccatatatattataaatgtgaggctgttttgagatgactccatctaaatctaggaaaacagactagcagctttgagacttttgatggaaatatgtggtggaaacaatctttaggttctcagatgggcatttcctaaaatgtgttaagtagaagtcttgtaacttgtataaaaaatatgaaatcccagcactttgggggccattgaggcaggagaattgcttgagcccaggagtttgagactagcctgggcaagatagcaagacctcagtttttttttgttgttgtttttttttgtttgtttgtttttaaaggata

SEQ ID NO: 102992 - DNA, 566 bp, Homo sapiens
ctagtgcttcagctcaggctgttctttgacactcagtgccattctccttctcctccacactctcccatctaagccagattataacgtgttcagtttccagcttcataacttatcactgcatgactccgaacaaatagcctaacttctctgagccttactttccttatctataaatttgaaataatatccacatsacagtaattgtgataatgaaaaaaacacatacaaatatttgagcatagtttctgccaaatatcaaatatttaatcagtgttatctgccactattactattataactctgtttttatagctattatgacaattctattcttcctcaattagttaaaaattgactttccccagaaaccctttctgattgttcttatatacctctaattttttctcagatctgtttcctcttagcacctggcttccctttggactatgttaatctacctatgttattatatttctttcatcattcttcagcgaacagcaacaaatactttgcatctatcatatgccaagtactctgctattataaagggatccatgggcatatag

SEQ ID NO: 102993 - DNA, 640 bp, Homo sapiens
tgaaaagcagtatggcaattcctcaaagaactaaaagcagaactaccatttgatccagcaatcccattactgagtatatgcccaaggaatataaatcattctccattaaagacacatgcccgcgaaagtacactgcagcactcttcacaatagcaaagacatggaatcagcctaaatgcccatcaatgatagattggataaagaaaatgtggaacatatacaccaygaaacactatgcagccataaaaaaggatgagattatgtcgtttgtggcatcatggatggagctggaggctattatcatcagcaaatgatcactagaacagaaaaccaaataccacatgttttcacttataagtgggagctaaatgatgagaacttatgaacacagatgtgtaaacaacagacacttgaggtctacttgagggtggagggtgggaggagggagagcagaaaagataactattaggtactgggcttaattcctgggtgatgaaataatctctacaacaaactcccgtgacatgagtttacctatgtaacaaaccttcacatgtaccccgaacctaaaataaaagttaaacaaaaaaagaatgcaaaacaaacatgaatcaacacctagaatgagtaattacatgag

SEQ ID NO: 102994 - DNA, 536 bp, Homo sapiens
cttaaaaaatgcaaaaatttagccaagcgtggcggtgggcacctgtaatcccagctactcaggaggctgatgcaggagaatcactgggaactgggaggcagaggttacagtgagccgagatcacaccactgcactccagcctggatgacagagagcgagactcttgtctcaaaaaaaaaataaataaataaaataaaaakaaaagaaaagaaaagaaaacttaaatctgtaatgggaagttctattagcaggcaacattgtattaaatatttgcttggaaaaatacaaaagcaagaaatttatagcaggaatctgtatgagtgagctttcacaagactataataggagacagccaactctagtccttaatgtctataccctgttttcccttctgctgcttacctcatctgccacaatgattttttctattgttcttaaatctcatcctaataacaccttgaattggaaaattgtcttaaaatgtacattttcacatttattatcttaatttaatccggaggttctcaaccatgggc

SEQ ID NO: 102995 - DNA, 554 bp, Homo sapiens
ttctaccttgaaattctagttcctgccatccagttcccagatgagggaaatttccccaatttattatcttctaagaatgattctgaagagcaataaaaataattaagtctcttacatatttcaaacaggaagggaatgaaagttgtgaccattgttccctccttagccattttgtataatctcttttattaatcttaaggtcatttaaattttatctattcatatataccacctacttccaaaataaatttgaggggttcagtgtaaggtgcatatatgctattaggtctttaaaatagaaataggaataaatataaaaatagtgatgcttcttcattggctaatattggtgctgtgattgagcaccaaatgtaattatgagcagcctggaagccaaagcaaaaagagagaaaggtatataattgctattcagtaaagaaaaactgccagactgttcctagttctaaattctggagggaattttttcatgtggtacacawtccttttacagaaactgcagataaaaattcttgactagcccttttttgctgagg

SEQ ID NO: 102996 - DNA, 550 bp, Homo sapiens
atccattaaactcttcagttgcctattcggttcagatgcctattggccctgcccataaataccactkattcagttggtgggaagccccaggcaactagtaatacctaatgagcaaaaatatttgttttgtttttttggaaatactctcttgctacacatgccacaaccttggaataaatcctggaattttttttttttttttttttttttgatgtgtgtttgctgggtggttttgtttctggtttgttttacaaaacagacatatcactttgttgtctgtcaacacatgacatcttttcttctgaagaatttccaagtgcattctttttcttcagaacatttcagtaggaaattgaggaggaaatttgccagttttcttggtaatgaatgattatctatttggcagaaggctgtaaggtggggcatagttgctccaatcagtgctatcagattggggatttatcaagtggtcagcatattaatgggtctaaccatactttgtttccttccttaggcctagcaagtgctttcactttgcatttcatcatta

SEQ ID NO: 102997 - DNA, 550 bp, Homo sapiens
atccattaaactcttcagttgcctattcggttcagatgcctattggccctgcccataaataccacttattcagttggtgggaagccccaggcaactagtaatacctaatgagcaaaaatatttgttttgtttttttggaaatactctcttgctacacatgccacaaccttggaataaatcctggaattttttttttttttttttttttttgatgtgtgtttgctgggtggttttgtttctggtttgttttacaaaacagacatatcactttgttgtctgtcaacacatgacatcttttcttctgaagaatttccaagtgcattctttttcttcagaacatttcagtaggaaattgaggaggaaatttgccagttttcttggtaatgaatgattatctatttggcagaaggctgtaaggtgrggcatagttgctccaatcagtgctatcagattggggatttatcaagtggtcagcatattaatgggtctaaccatactttgtttccttccttaggcctagcaagtgctttcactttgcatttcatcatta

SEQ ID NO: 102998 - DNA, 500 bp, Homo sapiens
gcaggtgcacaaaattctatgtacaaaaatattcgccatggcattgcatttaacaacaaatgattaaaaacagcttaagtgtccaagcaataggagaatctgtaaataaattatggaatatctatactttataatctttgtaataaaattagaccatcacaaaaatgggtctatacagaaccatctctatgacatttttaagtgaaaaatgggttagaatatgccattatktgtagtcatggaaatttaaaatgtgtgtatatgttcacatatgcatatgttgaagagggtacagagatcattaacagcatgagtgggaagacatttttcaacgtactttggtgtggtttcaatttttcactttgtatgtatattatctatttaaaagctataaattaagacaattgtggatattatatctatgtatatttttactccctgatgtaaagatgtatttggttctttctgggctgtattgtacttgacttttgttttgacag

SEQ ID NO: 102999 - DNA, 550 bp, Homo sapiens
atcagaattgaagccttttaacttttcggtggactatagggacagtagcaggagatcagctacatatcccagaagcaatgtttcttccaggtcagtatcatgtcattcacaagtgaaaaaataaacactaaaaataaatagaagttctataacagagacaggaaagggactctccttgctgtctcctgtctacatgtccttttagccttaacaccttccaaaggaaggagaaaaatagctttgcaggtttgcaaatgtgtgtagttagcattttaagaacaaaaacgggctgcctctcacagctgtgttggaatttgcttcagattctgccttcaaatyacagaagacgtgagtaagggcacgtccgtgactcagtcctcaacccttgccaaagtagtagttttctagatataaaactacagggaaagaaaaatagaaagtcagaagaggaagaaaaactgcatgttcataaatcttgcacaaaactgaatctcgaaggtgtgataaaaagatcaggatcggggagtgtttaggaaagagaaacacacat

SEQ ID NO: 103000 - DNA, 368 bp, Homo sapiens
taggaaaaatgaggcaatgtcaattaatgagaatattacataaaatcaataaatgatgttagaaaaattggttgatcatttggaaaacatcaytttgatcttagcctcatatcctgctaaaaataaactacagatgaattaagagtacgtactataattcgtagtgaatgctttttcaagttatatatttttttaaaaagctggaataaaatacatgtgaatatttctgacacttagataaggatggatttcctatgctgagaagtgatgaaagacagcacaataaaataaactaaaaatgaattaaaatactaaatgctctaaaataaacataaaacaacaagactaaaatatatgcagatatttct

SEQ ID NO: 103001 - DNA, 368 bp, Homo sapiens
taggaaaaatgaggcaatgtcaattaatgagaatattacataaaatcaataaatgatgttagaaaaattggttgatcatttggaaaacatcactttgatcttagcctcatatcctgctaaaaataaactacagatgwattaagagtacgtactataattcgtagtgaatgctttttcaagttatatatttttttaaaaagctggaataaaatacatgtgaatatttctgacacttagataaggatggatttcctatgctgagaagtgatgaaagacagcacaataaaataaactaaaaatgaattaaaatactaaatgctctaaaataaacataaaacaacaagactaaaatatatgcagatatttct

SEQ ID NO: 103002 - DNA, 368 bp, Homo sapiens
taggaaaaatgaggcaatgtcaattaatgagaatattacataaaatcaataaatgatgttagaaaaattggttgatcatttggaaaacatcactttgatcttagcctcatatcctgctaaaaataaactacagatgaattaagagtaygtactataattcgtagtgaatgctttttcaagttatatatttttttaaaaagctggaataaaatacatgtgaatatttctgacacttagataaggatggatttcctatgctgagaagtgatgaaagacagcacaataaaataaactaaaaatgaattaaaatactaaatgctctaaaataaacataaaacaacaagactaaaatatatgcagatatttct

SEQ ID NO: 103003 - DNA, 368 bp, Homo sapiens
taggaaaaatgaggcaatgtcaattaatgagaatattacataaaatcaataaatgatgttagaaaaattggttgatcatttggaaaacatcactttgatcttagcctcatatcctgctaaaaataaactacagatgaattaagagtacgtactataattcgtagtgaatgctttttcaagttatatatttttttaaaaagctggaataaaatacatgtgaatatttctgacacttagataaggatggatttcctatgctgagaagtgatgaaagayagcacaataaaataaactaaaaatgaattaaaatactaaatgctctaaaataaacataaaacaacaagactaaaatatatgcagatatttct

SEQ ID NO: 103004 - DNA, 466 bp, Homo sapiens
ttctgcccaaaagttcccagatctgataaacaacttcagcaaagtttaagcatacaaagatcagtacatttctatacacaaacggcatccaagctgagacccaaatcaagaacacaatcccattcacagtagacacacacacacacacacwcacacacacatacctaggaatacggctaaccagggaggagaaagatctctacaacaagaatgacaaaacactgctgaaagaaatcatagaggacaaaaacaaatggaaagggttcaatgctcatggatggaaagaatcaatattgttaaaatggccaaaccgtacaaagcaatgtaaagattcaatgctctttatatcaaactaccaatgacatttttcacataactagaaaaaagctattctaaaattcatatggaaccaaaaaagcctgaatagccacttgaatcctaagcaaaaacaacaaagctggagaca

SEQ ID NO: 103005 - DNA, 661 bp, Homo sapiens
aaaagctgctggctaatggatcccaagatgaaccttgagaggaacaatgccctgtcatctaactgaggaacaacacaatctgatctggccccgctctgaaacatactttattgatgacttggaaaacaaggcacataaatgaatggttggagacatatattgaagtttatatgatttrtaaaacattctaatctacaggcgtatgtcaaaattccacaggagacagtagaagaggatcctagaagaagataacaaagtgaacaaagagaaagagaagacaacttgaagtgtcccagaatttaagcaaacaagaatacctgtaacatttttatacaaagagaattttttagtgaagtatattaagtcatcaacttatgtcactaaaaaaattttcaattgttaacaagtcaaagaaaatccaaaacctcagctatttataaacagaaaacacctaggtatttcaaaatgccaactgccttttcaagatctcacttcatcagttacctcttctctgttctgtcattttttttttttttgtaaacctacttgttttacatatttaacctcattctcaccagtttcttccctgtctcctaaaaagatgttcagggattacatatacttaataacctttcctcatcaaactctaatcacctattca

SEQ ID NO: 103006 - DNA, 578 bp, Homo sapiens
gtgtatttctgaataacctttagttacctaaatcttattaatctgttactgtgattattacttactaatttcttcatgaattttaagtgataactctagcctagacctttctaacagtaattgtacttcataataattgtatcatatattttatatttatattttacatcatttttgtttttgacattggttaagtaatgttgaatatgtatattttatattctaaccatgtgtayaaatttcttaaagacaaatattataaatatattggtacttgcatatacaaactcttgcactaataaaatcttacactaacttgtatctttctgtgtttaaatattcaaaattagaaatttaataatgaattgagaaagcattcctgcttggactagagaattatgcatcatcaaaatattcaagctcctttgatcgtggattccatctggtttaggtgttctctttagctagtttcatcactagctaaactggatgatatttattcaacaaacactgagtctgtactaatccccaggaggaaacaaagcactcaaagtgacaaagaaggtccctaccctcat

SEQ ID NO: 103007 - DNA, 578 bp, Homo sapiens
gtgtatttctgaataacctttagttacctaaatcttattaatctgttactgtgattattacttactaatttcttcatgaattttaagtgataactctagcctagacctttctaacagtaattgtacttcataataattgtatcatatattttatatttatattttacatcatttttgtttttgacattggttaagtaatgttgaatatgtatattttatattctaaccatgtgtataaatttcttaaagacaaatattataaatatattggtacttgyatatacaaactcttgcactaataaaatcttacactaacttgtatctttctgtgtttaaatattcaaaattagaaatttaataatgaattgagaaagcattcctgcttggactagagaattatgcatcatcaaaatattcaagctcctttgatcgtggattccatctggtttaggtgttctctttagctagtttcatcactagctaaactggatgatatttattcaacaaacactgagtctgtactaatccccaggaggaaacaaagcactcaaagtgacaaagaaggtccctaccctcat

SEQ ID NO: 103008 - DNA, 640 bp, Homo sapiens
atcccttagctattttttctgatgctctccctcccmctgctcccaccctgagaggcccaagtgtgtgtcgttctcccacatgtgaacaagtgttcttatctttcagctcccacttatgagaacatgtggtgtttggttttctgttcctgcgttagtttgctaagaataatggcttccagctctatctatgtccttgaaaaggacatgacctccttcctttttatggctgtatagtattccataatgtatatgtgccacattttctttatccagtctactgttaatgagcatctgggttgattccatgcctttgatattgtaaatagtgctgcaatgaacatacgtgtgcatgtatctttataatagaatgatttatattcctttgggtttatacccagtagtgggattgctgagtcaaatggtatttctgcctctaggtcttcgaggaataactatgtaggaaattactgtaccttcctcccttactctgaatttaaaactgagtgaaaaaaattgccttaaaaaagatgaagaatgtgaactgaaacattaattagggcatgaactaattgaaagttggtttgtacttggatccttggggtatttcatgaagacacccacccacccacacacccacaga

SEQ ID NO: 103009 - DNA, 475 bp, Homo sapiens
ttgattttccttttgattagaaaaattaccaaaaaaatccagctctacagttcataacctgagaatggtagaaacccaagacgtagagcacattatgcaacactcttaaacaaatctgcctcttgggatctctctccttttatagaaagagactctccagcagcccctagagacattcccatactaagtgagtcagctaaataaaattaagcaactaataaaacaatatgtcatcttgttctcattgtcataattaaaatcctttttctttaagatgaaaggtggcagctatagagtagccttcaaaatcataggctatgccgaagcaggatcttctctccaacgctgtacagacaacgcagctgtccctgacatcaccactkgaaattattccctatttgatatttttgacattaaaaggctgaagtcttttttcttctgcaagttacttccatgcttgcttattaagcattcc

SEQ ID NO: 103010 - DNA, 475 bp, Homo sapiens
ttgattttccttttgattagaaaaattaccaaaaaaatccagctctacagttcataacctgagaatggtagaaacccaagacgtagagcacattatgcaacactcttaaacaaatctgcctcttgggatctctctccttttatagaaagagactctccagcagcccctagagacattcccatactaagtgagtcagctaaataaaattaagcaactaataaaacaatatgtcatcttgttctcattgtcataattaaaatcctttttctttaagatgaaaggtggcagctatagagtagccttcaaaatcataggctatgccgaagcaggatcttctctccaacgctgtacagacaacgcagctgtccctgacatcaccacttgaaattattccctatttgatatttttgayattaaaaggctgaagtcttttttcttctgcaagttacttccatgcttgcttattaagcattcc

SEQ ID NO: 103011 - DNA, 566 bp, Homo sapiens
tagtaattatgagaagaattaaacttggaaattttaaacatgatttcctctagagaggtggagtggaattgagaattgtgagctgacaaaacaatttcttactcttttatataattattttctaaactcatgtatttatatcggattgattttttttttctcagaaaattaaactgctaggcatagtgagagaagtgaagagtatgagataacagtgcatgatgatgacatagtttaagctttaatatggtctcatgattttataatactaggtcttgtgtatgtcataaaggttgtagtcactatttcaaatattttcatgtaaaaataattaaaattattcttaaattaagtgttattttatagaatatatttgatatcaaagagtcatcataatttaattcataagctttgacttccttctgtttttacatcaatcattttaggctgaaagtattattgtttcaaacattaggtggatctactgtactgaaattgggacmgaaaaccaattctgtttaaaggtaagagctatttaccttggtgacactgacacaataatgaaa

SEQ ID NO: 103012 - DNA, 591 bp, Homo sapiens
ccctatgggtttaattctttaaaataaatgtcctcaatattttatattttcagmagtctttcacatcttatccttatttatatatttctaggcatttgatcttttaatgctgctccaaatggatgtgtgtgtgtgtgtgtgtgtgtgtgtgtgtatgtgtgaatgtgtgtattcttgtttggttagaacctagaaatgcaatcaagattttattgatcttatatcttgaaatattgtaaaactcattttttagacctaatgattttataggacgtttggatcagctatatatagaatcatctgaactattaattatggcattttaatctttattaatacctttgttgtgtttttcttattattccactggctagcaccgccaatacaatatcaagtaaaaatgatgacaataggctttcatgttcattcctaatcttagaggaaatgatttcataatttcatcatgcagagtaatgtttgctgtaatattatgctatctatagaatagcatttgcctagcatttcttgaataaggcaatttttgtgtgttgtgcattttatttgtcagtatatttaatttacattttgttt

SEQ ID NO: 103013 - DNA, 591 bp, Homo sapiens
ccctatgggtttaattctttaaaataaatgtcctcaatattttatattttcagaagtctttcacatcttatccttatttatatatttctaggcatttgatcttttaatgctgytccaaatggatgtgtgtgtgtgtgtgtgtgtgtgtgtgtgtatgtgtgaatgtgtgtattcttgtttggttagaacctagaaatgcaatcaagattttattgatcttatatcttgaaatattgtaaaactcattttttagacctaatgattttataggacgtttggatcagctatatatagaatcatctgaactattaattatggcattttaatctttattaatacctttgttgtgtttttcttattattccactggctagcaccgccaatacaatatcaagtaaaaatgatgacaataggctttcatgttcattcctaatcttagaggaaatgatttcataatttcatcatgcagagtaatgtttgctgtaatattatgctatctatagaatagcatttgcctagcatttcttgaataaggcaatttttgtgtgttgtgcattttatttgtcagtatatttaatttacattttgttt

SEQ ID NO: 103014 - DNA, 564 bp, Homo sapiens
gagaatctgtgcacttgggagagagaaagccaagtgactattaggcttggcattgaattcagtgctsccctgtcacagcagaaagcagaagcaggctgtgtctgcccgaagagggagctttgaaacagcccttagccagaggggaatcgcccgtcccagtagttggagcttgagttctggcgagccttgccaccatgggctagagcactctgtggccctaggtgaacttcatggccacaaggaatgtaattcctaggcaagttgtatggctgatctggggctgagacccagtggaatgagaggaatcattacctactaagacaccagccaggacagctaagggagcacttactccacacttccccataccccagcagcagccacgtggcacagagaaatctgtgagcttgggagagggagaacacagcaactggaggctttccattgaagtcaatgctgccctgtaacagcagagacctgaaaggattcatcacctgcagactgaagaggccctgggctctgaataaccaagagttatacccagttaattcactgtgggcttgg

SEQ ID NO: 103015 - DNA, 564 bp, Homo sapiens
gagaatctgtgcacttgggagagagaaagccaagtgactattaggcttggcattgaattcagtgctgccctgtcacagcagaaagcagaagcaggctgtgtctgcccgaagagggagctttgaaacagcccttagccagaggggaatcrcccgtcccagtagttggagcttgagttctggcgagccttgccaccatgggctagagcactctgtggccctaggtgaacttcatggccacaaggaatgtaattcctaggcaagttgtatggctgatctggggctgagacccagtggaatgagaggaatcattacctactaagacaccagccaggacagctaagggagcacttactccacacttccccataccccagcagcagccacgtggcacagagaaatctgtgagcttgggagagggagaacacagcaactggaggctttccattgaagtcaatgctgccctgtaacagcagagacctgaaaggattcatcacctgcagactgaagaggccctgggctctgaataaccaagagttatacccagttaattcactgtgggcttgg

SEQ ID NO: 103016 - DNA, 605 bp, Homo sapiens
tttttgacttctcagcccctgagtccaggatggcacttctagaccaacctgagggctgggggaccttgcaaccctgaaggaaaggacacaggactggctggttttgccacttgctgaatgtagagccccagggccttcagtgaatatacacagtaccaaggcagtggttacagcaggtcttgggtaagacccagtgctgtgctggcttcagatctgacccagtgcagtcagagtagtggtggtcacaggggtgcttatgtcactccaccaccatcttaaggtggctccaaaaagagggagaaactctgtatgtttgggagacagtaagggaaaattaagagtctgcctggtaatccagagaattctcctggatctggtcccagaccaccaatgttgtacctctaagattctgcaataaccacagtgttactgggcttgggrcgtcccctaaagcaaatacagcttacatcacagcagtcaagttttttcaaatatctggaaatccttcccaagaaaaatagctacaaaaaagcacagacaatgaagactacaataaatacctaacccctcaatgctcagacatgaaagaacatatactaacaaca

SEQ ID NO: 103017 - DNA, 614 bp, Homo sapiens
caaaagaaaggaaatcactatatagaagaggtatytgtactcctatatttgttgcagcactgtttataatagctaagatttggaagcaacctaagtgtccatcaaaagttgaataaatttaagaaacatagtacatatacacaatggagtacaattcagccataaaaaagagtgaaatccagtcatttgccacaacatggatagaactggagatcattatgttaagtgaaataaaccaggtataaaaagacaaatgtcacatgtcctcacttatttgtgggatctaaaaattaaaccaattgaactgatagatatagacagtagaaagatggttactagaggcttggaaaggtagtgggggattgatgggggggaagatggggatagttaatggatacaaataatattaatagtttgtaagaataagatctattatttgatagcataaaagggtgactggagtaaaaaataattatacattgttaaatagtgtaattgaattatttgtaacttaaaggacaaatgcttgtggaaatgaataccccattctccgtgatgtgcttattttacattgcacgcctgtatcaaaacatctcatgtactccataagtata

SEQ ID NO: 103018 - DNA, 614 bp, Homo sapiens
caaaagaaaggaaatcactatatagaagaggtatctgtactcctatatttgttgcagcactgtttataatagctaagatttggaagcaacctaagtgtccatcaaaagttgaataaatttaaraaacatagtacatatacacaatggagtacaattcagccataaaaaagagtgaaatccagtcatttgccacaacatggatagaactggagatcattatgttaagtgaaataaaccaggtataaaaagacaaatgtcacatgtcctcacttatttgtgggatctaaaaattaaaccaattgaactgatagatatagacagtagaaagatggttactagaggcttggaaaggtagtgggggattgatgggggggaagatggggatagttaatggatacaaataatattaatagtttgtaagaataagatctattatttgatagcataaaagggtgactggagtaaaaaataattatacattgttaaatagtgtaattgaattatttgtaacttaaaggacaaatgcttgtggaaatgaataccccattctccgtgatgtgcttattttacattgcacgcctgtatcaaaacatctcatgtactccataagtata

SEQ ID NO: 103019 - DNA, 614 bp, Homo sapiens
caaaagaaaggaaatcactatatagaagaggtatctgtactcctatatttgttgcagcactgtttataatagctaagatttggaagcaacctaagtgtccatcaaaagttgaataaatttaagaaacatagtacatatacacaatggagtacaattcagccataaaaaagagtgaaatccagtcatttgcmacaacatggatagaactggagatcattatgttaagtgaaataaaccaggtataaaaagacaaatgtcacatgtcctcacttatttgtgggatctaaaaattaaaccaattgaactgatagatatagacagtagaaagatggttactagaggcttggaaaggtagtgggggattgatgggggggaagatggggatagttaatggatacaaataatattaatagtttgtaagaataagatctattatttgatagcataaaagggtgactggagtaaaaaataattatacattgttaaatagtgtaattgaattatttgtaacttaaaggacaaatgcttgtggaaatgaataccccattctccgtgatgtgcttattttacattgcacgcctgtatcaaaacatctcatgtactccataagtata

SEQ ID NO: 103020 - DNA, 614 bp, Homo sapiens
caaaagaaaggaaatcactatatagaagaggtatctgtactcctatatttgttgcagcactgtttataatagctaagatttggaagcaacctaagtgtccatcaaaagttgaataaatttaagaaacatagtacatatacacaatggagtacaattcagccataaaaaagagtgaaatccagtcatttgccacaacatggatagaactggagatcattatgttaagtgaaataaaccaggtataaaaagacaaatgtcacatgtcctcacttatttgtgggatctaaaaattaaaccaattgaactgatagatatagacagtagaaagatggttactagaggcttggaaaggtagtgggggattgatgggggggaagatggggatagttaatggrtacaaataatattaatagtttgtaagaataagatctattatttgatagcataaaagggtgactggagtaaaaaataattatacattgttaaatagtgtaattgaattatttgtaacttaaaggacaaatgcttgtggaaatgaataccccattctccgtgatgtgcttattttacattgcacgcctgtatcaaaacatctcatgtactccataagtata

SEQ ID NO: 103021 - DNA, 621 bp, Homo sapiens
agagtggaaagatatatcttggtacattttctggagtttatgggttcatgttattaatctcaagttgcttacagatcccaagcctatagaaagtgtataaggttgccagatgcctacgtctaaaattaaatcagagttgagagttaggaccatatttgtagggtttacaatccaatgtattcatctgttacaatatggcttattatgagagatggattattatgttgagaaattgcaaacactaaatctttttcaatgctggtcaaaacatatttattgagctgggcttgtgtcgactgcattacctattcccttcccctggtactgaaattttcagtcttcacccattttacattcctccagtgatactgacaccaaaactactaagaagaaggtactgtgctggcaaaccactgcttaattgcaatttctaaatataatcacggcaaatgctttttattttcctctaaaaaaaggaaattctgtccacacattctatttgataactgaattgtgtgtgtgtgcatgtacatatgttttctctaactatatwtttgttagaaaattaatattcattcatgtaaacatgaatacatataattataaacataactgaaacca

SEQ ID NO: 103022 - DNA, 619 bp, Homo sapiens
atacaacctgatttattcttaatccttttatccagtttctgatatttgcttttttcaaatgttattttttctattcactctctatagagaattaacttgtcttaaaacctgactttaaacttgaaaatggtaactgtttagtacaattccatattttcaagtgtgtaagaaataaaaaaatattttacagaagatgtatttgcctatcacttgcttgttaaaatttcttgataaaaacttttactcataagtgtatataataaattaacctaaataatgaataatgagtttttcttaatttttaaaaaaattccagaatataaaaattaaaacatgaaaacacaaagtttcaccatattaacaattatgactacataaactaaaacaatgtcaataattttaaacaggatgtaatcactgtacattcttgctrtgaattcaatatcaataaatattactttgatatgtcaaaattttaccattttagccaactttaaggcattctaatgcccgttttatttgagggctaaaaaattaattttcagaatttgcatcatttttttctatcattgatgtattacactaaaggatgcatatgagagacctaagtcgaactggc

SEQ ID NO: 103023 - DNA, 594 bp, Homo sapiens
agctaatctcttgttttcctcccatttcatattgtaatttgtctaaaaaagtcaccatacatagcctactcttttatatatatgtgtgtatacatattwatataaaattacatataattataaatgtattatgtatgttatatataatatgatatgtttatataaaattatatataattatttatataattattatatttatttttatattaataatacataatatataatttatatatatttctatattatatatgtaaaaatatatattttatatatactagagacagggtcttgctctgtcttccagctggagtgtgcagtggcaccatcacagctcactgcaatcttgactgcctgggcttaagtgatcctctcagctcagccactccagtagctgggactacaggagcacaccaacatgcctggctaagtttttaaaatttctgatagagatgtggtttcattatgttacccaggctggtctcaaactcctgagctgaagcagtcctttcatctcggcctctcaaaggcctaggattacaggcctgagccactgcacccagtcacagcctactcttaagcaatagaaaa

SEQ ID NO: 103024 - DNA, 594 bp, Homo sapiens
agctaatctcttgttttcctcccatttcatattgtaatttgtctaaaaaagtcaccatacatagcctactcttttatatatatgtgtgtatacatatttatataaaattacatataattataaatgtattatgtatgttatatataatatgatatgtttatataaaattatatataattatttatataattattatatttatttttatattaataatacataatatataatttatatatatttctatattatatatgtaaaaatatatattttatatatactagagacagggtcttgctctgtcwtccagctggagtgtgcagtggcaccatcacagctcactgcaatcttgactgcctgggcttaagtgatcctctcagctcagccactccagtagctgggactacaggagcacaccaacatgcctggctaagtttttaaaatttctgatagagatgtggtttcattatgttacccaggctggtctcaaactcctgagctgaagcagtcctttcatctcggcctctcaaaggcctaggattacaggcctgagccactgcacccagtcacagcctactcttaagcaatagaaaa

SEQ ID NO: 103025 - DNA, 594 bp, Homo sapiens
agctaatctcttgttttcctcccatttcatattgtaatttgtctaaaaaagtcaccatacatagcctactcttttatatatatgtgtgtatacatatttatataaaattacatataattataaatgtattatgtatgttatatataatatgatatgtttatataaaattatatataattatttatataattattatatttatttttatattaataatacataatatataatttatatatatttctatattatatatgtaaaaatatatattttatatatactagagacagggtcttgctctgtcttccagctggagtgtgcagtggcaccatcacagctcactgcartcttgactgcctgggcttaagtgatcctctcagctcagccactccagtagctgggactacaggagcacaccaacatgcctggctaagtttttaaaatttctgatagagatgtggtttcattatgttacccaggctggtctcaaactcctgagctgaagcagtcctttcatctcggcctctcaaaggcctaggattacaggcctgagccactgcacccagtcacagcctactcttaagcaatagaaaa

SEQ ID NO: 103026 - DNA, 594 bp, Homo sapiens
agctaatctcttgttttcctcccatttcatattgtaatttgtctaaaaaagtcaccatacatagcctactcttttatatatatgtgtgtatacatatttatataaaattacatataattataaatgtattatgtatgttatatataatatgatatgtttatataaaattatatataattatttatataattattatatttatttttatattaataatacataatatataatttatatatatttctatattatatatgtaaaaatatatattttatatatactagagacagggtcttgctctgtcttccagctggagtgtgcagtggcaccatcacagctcactgcaaycttgactgcctgggcttaagtgatcctctcagctcagccactccagtagctgggactacaggagcacaccaacatgcctggctaagtttttaaaatttctgatagagatgtggtttcattatgttacccaggctggtctcaaactcctgagctgaagcagtcctttcatctcggcctctcaaaggcctaggattacaggcctgagccactgcacccagtcacagcctactcttaagcaatagaaaa

SEQ ID NO: 103027 - DNA, 610 bp, Homo sapiens
tgaactttccatcaaatccatcgattactttacaggcattcctgacaactacagaactagaatttgagcaaaactaccatggtcagtctctgagaactgatttcatgataattagagcttgtgttaacaccaaactrgggaagaaaggtgggtggaattgttgaagaaacttcaagtacaattctttgctaaattttaataatgcaattttctttcctcaaagactgctggaaatgtatattattagatgaatattttgattagtttttatttcagggatttattcattctatttgagcaaaggttttgtctttgaagttttaggacaagcagaagcctgatatttggggacaatgtaaatcttctctcttttgaaacagaaaaaaaatgacaattagttttgaaaagaaacctatttcagcaatacaattctatgcattcctagattcaactaaatttttcattgctccctgtcaccccaaaacattttacatctagaaataatttcatggatctgtttgagtcatgaaatatgggacacaatattgaggtaaatatattaccctagagatttgcatgcctagcaaaggagattttatttcattctatt

SEQ ID NO: 103028 - DNA, 610 bp, Homo sapiens
tgaactttccatcaaatccatcgattactttacaggcattcctgacaactacagaactagaatttgagcaaaactaccatggtcagtctctgagaactgatttcatgataattagagcttgtgttaacaccaaactggggaagaaaggtgggtggaattgttgaagaaacttcaagtacarttctttgctaaattttaataatgcaattttctttcctcaaagactgctggaaatgtatattattagatgaatattttgattagtttttatttcagggatttattcattctatttgagcaaaggttttgtctttgaagttttaggacaagcagaagcctgatatttggggacaatgtaaatcttctctcttttgaaacagaaaaaaaatgacaattagttttgaaaagaaacctatttcagcaatacaattctatgcattcctagattcaactaaatttttcattgctccctgtcaccccaaaacattttacatctagaaataatttcatggatctgtttgagtcatgaaatatgggacacaatattgaggtaaatatattaccctagagatttgcatgcctagcaaaggagattttatttcattctatt

SEQ ID NO: 103029 - DNA, 610 bp, Homo sapiens
tgaactttccatcaaatccatcgattactttacaggcattcctgacaactacagaactagaatttgagcaaaactaccatggtcagtctctgagaactgatttcatgataattagagcttgtgttaacaccaaactggggaagaaaggtgggtggaattgttgaagaaacttcaagtacaattctttgctaaattttaataatgcaattttctttcctcaaagactgctggaaatgtatattattagatgaatattttgattagtttttatttcagggatttattcattctatttgagcaaaggttttgtctttgaagttttaggacaagcagaagcctgatatttggggacaatgtaaatcttctctcttttgaaacagaaaaaaaatgacaattagttttgaaaagaaacctatttcagcaatacaattctatgcattcctagattcaactaaatttttcattgctcyctgtcaccccaaaacattttacatctagaaataatttcatggatctgtttgagtcatgaaatatgggacacaatattgaggtaaatatattaccctagagatttgcatgcctagcaaaggagattttatttcattctatt

SEQ ID NO: 103030 - DNA, 631 bp, Homo sapiens
gggttaaatcttgtttgcacatcgtggaatatttcactctaatcaaaaggaatactgctatattcattcacttgatttaatatcctaatcatgatattgatttaaaaaaactaaaatcacagatagattatttagtatagttcttttatgtaaatttcaaaacaagcaaaactaggttatgcatacttacgaacacagataggtaaatatcactagttaaagcaagagcacagcacaaaaggcaggagagtggtaacctcaggggtaaagagaaagctctgtagctattgcacagcacacttgggattcctataggactagaaatattttatctgagtctaataatatgtcgaagggtatacatcttattattattctttaaaytctgtgcacgcattttagtatgtacatttcacaataaaaacttttgaaaactttaaaatgagtttttaaatctatgcagtcttgcaaaatatttacctcatttttattcaaaaagtatttattgtcagacaacaactaggtattttctagcaaaatcataaacctcctaatcactgttttgaaaggagtaacctctctaccattgctttaaaaaagaattccaaatctgcgattttattgaaagcat

SEQ ID NO: 103031 - DNA, 594 bp, Homo sapiens
acaatattcaaagactcaatcaaccattttttttccactttgcaactagtttaggcaagcttaaaaaggtttagctattatttttatattattatttagttattgtttcaaaatagagggaagacataggtgatttaatatcctttcgaattttgaaaataattttgggacgcagcgtatggtcaggtaagttataatttgatcatcttgtgagtaatggacaatgactgcacctattataaacatctgtgaatgtgaaaggggagttctgaaggactgaagcctagaggacttctttactttttgtaaggaatcactccagtttttctgttctttggtgaggatgatcaagtttgcctatcaaattatttttggaaaggagctccagaattttgtttgaggattgttggatcagtagcttatagttctatatgtgtatattttgaatcaaaactaaatgccagttaaaagagcctcctggaggaaagtgagttaagggcatactggatctccccgtgtttcttacaagtttatractctacaattaccttaacattaaaagctataaaaaaaggtttttttttttttaactca

SEQ ID NO: 103032 - DNA, 509 bp, Homo sapiens
ggatagccaggatctcagccctggtgttttctttctttttttatggtggtccctgaggttgtgagtgtctgaaatatatagtgaattctacaatgcaattcaaatataaggaagtcttgtttattaccaggtgcaaacttgttgcttcattaccatgtgawccagggctatcttatttgtgtaactgaggttataggagagatatcaactatgaaggaaaatgtatgtggagaccaaaagtgtatatgaaataatgaataatttcacgtgaatatgtagttagtgattgcccaccttctaagttaaaaatagatttcttaatgacataggacaaataccaggttgctgaaagttacttcttccatattgtaaagaggctgtttcaatgaagaaagatattatcaatgaccttattggaaagtcacatttaaggtgggtgaatccttcatgctctatttttgcccttcaacaaacatatcttttttggtgcttcttgagtgtataagaca

SEQ ID NO: 103033 - DNA, 541 bp, Homo sapiens
gctttgtgctgtttgctgggttataggagttctccctatgtcctagytaattttatcaaaaattgtaacattacagtgagtgctagaataacagggcagcagaggtacaaaaaaagagagaagagttaaccctgcctaggtctgagtgtttggagcaagaatactaggaaaggaatggtgtcaattcaagtttcaagaaggaatctctttagcaaaggataaaagatatatggactatctccaagacattggggacattgtgaatagaagacggaaagtagcacacatcatggagcagatgatgttattttcatttttcagaagaattaaggagtaactagtccaagttcacaaagatggtaaatagcagagccatgatgccaagctaggtctgcttgactccgattttcatgaaatatcatctctcttctatgtgttttatctggtttggcatggctttttagagagtatagtctcttcaagggatcttcagggaatagaagcaggaggcataaagacatgagatttgtttgggaaaaat

SEQ ID NO: 103034 - DNA, 541 bp, Homo sapiens
gctttgtgctgtttgctgggttataggagttctccctatgtcctagttaattttatcaaaaattgtaacattacagtgagtgctagaataacagggcagcagaggtacaaaaaaagagagaagagttaaccctgcctaggtctgagtgtttggagcaagaatactaggaaaggaatggtgtcaattcaagtttcaagaaggaatctctttagcaaaggataaaagatatatggactatctccaagacattggggacattgtgaatagargacggaaagtagcacacatcatggagcagatgatgttattttcatttttcagaagaattaaggagtaactagtccaagttcacaaagatggtaaatagcagagccatgatgccaagctaggtctgcttgactccgattttcatgaaatatcatctctcttctatgtgttttatctggtttggcatggctttttagagagtatagtctcttcaagggatcttcagggaatagaagcaggaggcataaagacatgagatttgtttgggaaaaat

SEQ ID NO: 103035 - DNA, 562 bp, Homo sapiens
ctcagcctctttataaatcacagctaatgtttaaaacatatcagaaatcccaatgttcactcatcacccccataattctactttggcttttaatgcagacccttttgctgacttgaacacagttctcattctcccctgaagtgacagattgagtttgttgactaggttgaatatgtcacacaaataggcaagttytgggacccattctgtgtcactgaaatgtgctgccagtggtgattgttgttctaaaaatctctggagtagttctcataactcaaaaactctggccagggatctacctttaaaaagccatctcacttctgtgtataagggaagatgtagctgggcgcagtggctcacacctgtaatcccagcactttgggaggctaaggcgggcagatcacttgaggtcaggagttcaatgccagcctggccaacatggagaaaccctgtctctactaaaaccacaaaaattagccgggcatggtgatgggcaccctataatctcagctacttgggaggctgaggcaggagaatcactggaacccaggaggcagaggtt

SEQ ID NO: 103036 - DNA, 580 bp, Homo sapiens
ctgtattaaatataacaactgctgagttgtgattgcatcatcaaatacttagaatgagactaggagaacgttgacccatgagaagtctaacccaataaacaaattattttatttgaagtgatctgaaaatccaagtcaagtcctgacyaagtgttttaatcacaaactgcacaggaaaaacttgttaattgaattaatgagtagctagccatgagttatactccttttcaggttttcagttcaattttaaattattcttaagtagtatataccaatatgattaatttttatattttgaccttgtattctgtgatcttgctaaactcactttttaattcttatcttttttgtagatacctcagagacaatgagaaatgtcatcattgaacagagttttattcctttctctccaatatttatagcatttatttatataactattaatttacttgccttattgcattggttaggatccccagtatgatgttaaataggagtggttgtgagaaagtgcatttttctctttccaaatcttaaatggaaagaattgagtctttcacataacttaagtattatgtta

SEQ ID NO: 103037 - DNA, 580 bp, Homo sapiens
ctgtattaaatataacaactgctgagttgtgattgcatcatcaaatacttagaatgagactaggagaacgttgacccatgagaagtctaacccaataaacaaattattttatttgaagtgatctgaaaatccaagtcaagtcctgactaagtgttttaatcacaaactgcacaggaaaaacttgttaattgaattaatgagtagctagccatgagttatactccttttcaggttttcagttcaattttaaattattcttaagtagtatataccaatatgattaatttttatattttgaccttgtattctgtgatcttgctaaactcactttttaattcttatcttttttgtagatacctcagagacaatgagaaatgtcatcattgaacagagttttattcctttctctccaatatttatagcatttatttatatarctattaatttacttgccttattgcattggttaggatccccagtatgatgttaaataggagtggttgtgagaaagtgcatttttctctttccaaatcttaaatggaaagaattgagtctttcacataacttaagtattatgtta

SEQ ID NO: 103038 - DNA, 604 bp, Homo sapiens
tgagaatttttgtttctgtggttatactctgtgaaccacaggcctcaaattcctctcctggagctggtttaccagagaatttttcttaatatcttctccttgttcaggcttagactttcccactgtgatgaaattcagaaattacatctcttgtagcttgccagcactatttcatgtttacctttactggacacttgttagcctgctgaagtggaatataggagtcatagcacaaaactccattaggaccctttatctcctattcccaacaattctacagattcctttttccctcatagtgggaatagggcaggaattcactctgtcaaccagggtggagtgcagtggtgygatctcagctcactggaacctctacttcccaggctcaagcaatcctcttgcctcagcctcccaagtagggaggcactacaggcatgccaccatgcctggctaatatttgggtttgtttgtttgtttgtttgtagggcaggctttcaccatgttgcccaggctggtctcaaactcctaggctcaagagatccacccaatgccttggcctcccacagtgctgggattacaggtagcatgagcaacacacaaggcc

SEQ ID NO: 103039 - DNA, 623 bp, Homo sapiens
taaatgaaataatgcatgtaaagtgcttaatgtagcatggactacttggcatgcagaataaactaaaagaggatagatattatttttgtaataattacttgtaattaaaatctacagagatgagaaatgggggccaaaaacttgtctttcaagctctttttgccgtggttctcctaattggagttctctgaaactcttgtgtaagcatttgcagttttacctatattcgtggattgtgatttagcaaaaaatactgaatatcaaacatgtctctgttttctgatttcttgtgrcactttctactctgccttgttcttgtcactcctgctagactgtgagtactttctgagcatagactgagttactcatcactctactcccacaacccatagtagtagtcaatatattgctaatgatgaatgaatatagttatttctatgatctcactgactctttttctttctacccttgaacatgctcattttttagaacttcatgataaggaaaatgcatacttaaatgcagcatcaaatattaactttatacagatttgattaacttccaaattatatgtgaagccaagctgtacactctgcaaaatttccatctttcaaggggtttac

SEQ ID NO: 103040 - DNA, 414 bp, Homo sapiens
gaattctccaatagcccaaaagctttacatcttgaaacagtttatgaccagttataagtggttaatcatactggctaatataatcttggagttttatatgccagatattgttgtaagtactttatgtgttttatttatcttaatcctcaagataacattatgagacagatactgcaagaactgtggaaggtstgagattttaccctacttttgggccaacaaattagtctactgaagcttcatgtatgttagcagaatacattcatgagactcctgaatcagagacagaggatagttttaatgcacacagtagtagcagtttccaaagtgtctgcattttcttgtatcagttctctcagctccacttcctatagaataaagtgaaaaaatcaggttatatttgttcatacaatg

SEQ ID NO: 103041 - DNA, 488 bp, Homo sapiens
tgattgtattcatggtcttcaccctagcagagtatagaagctagaagagctggagtgcatttctgtagtcagcaagaactgtgtgatgggttcatcatcttgctagggagcctgggggctaatatgtgcccttctgagacagattgcaggtttcccccagtagcaggtttcagtgggtgcatggctgccacacagcctgaagtcccagcatccttcaccctgcaaggctcatgactgagtgctggccaccacatgtgagcagatgcaacacaggcaccttcctggatgtgtcctgctgcctctstttccccttcacagaggttagtggatgtggtgcactctctttcaccctatggatgagagcagtgtccagaggtggcagaggaattaaaggcaagaacctggatttctgacactgttgaacacctaactgttctcctggacttaggagaaaaagaaatataaaccatgtcttttgtttgttttgt

SEQ ID NO: 103042 - DNA, 551 bp, Homo sapiens
tggggcttgcacactctgaaacaatggcctgagctgtaccttggtaccttttccccatggctggagcggctgggagacagggcaccaagaaccaggctacacatagcaagggagccctggatctggctcatctgacccattttttcctccgggcctccaggcctgtgatgggaggggctgccccaaaggtctctgacatgccctggagacaatttccctattgtcttgrtgattaacatttggctccttgctacttaacgcaaatttctgcagctggcttgaatttctcccccaaaaatagctttttcttttctattactttgtcaggctgcaaagtttccaaactttgacgcctgtttcccttttaacataagttctgtgaaaggaaaataaatgttgggactccaaaatcactaagctaaatggaaaagtcaagctgggaactgcttggggcaaacctgagaagtggaggttgcagtgagccaagattgtgtcactgcactccagcctgggtgacagagcaaccgaatttagacacatgcgatgtgacc

SEQ ID NO: 103043 - DNA, 555 bp, Homo sapiens
attcttcaatttgaaagaaaaggatgttaattagaaagaagaaattatctgaaggtacaaaacttactggtaatactaagtacatagaaaaacagaatattataacactgtattatactgttaaagtactcatatcttatgtagtttatactttaaatgacaaaccaattaaaaataacttcttaagatgtaatacaataagatatacatggaaacaacaaagagaaatcagggggatgaagtggaactgtagagtttttactagtttttgctcgttttttaatgcaataagtgttaaattgtcatcagtttacaataatgggttatattatttgcaagcctcatggtaacctcaaatcaaaaaacatacaayggatacacaaaaaataaaaagaaattaaaacataccacaagagaaaatcaccgacgggaaggaaggaaagaagaaaagaccgcagaacaaccagaaaacaagtaagaaaatggcaggagtaagtcattatttatcaataacactgaatgtaaatggacgaaactctccaatcagtttgagta

SEQ ID NO: 103044 - DNA, 473 bp, Homo sapiens
cacgggggctgcggctcctggacccacctggccttctcggcctgcctctctccctccagccgccccacattcttttttcctaattggaaaaaactattcacgctgctcctccagggcatttcaaccttctagaaagattcgacaagattcgaaactgtttataaagagaacgtgcttgtgccygaatgctgagtgtgagcgcgcagtgatgccctagagtgcagtcatcccgggcttggcgcccagcgggtggaaatacggccgcagggtggaaatgcggcggcggggctgcccaggctcctgtgggacccgcgcggcgcgggcacgcacattctcagggacgcgcgtcctcaggccacgagaacacctgaaggccccggccagcgtcctcccgtgaagacccggaccggcgtcgtcacccgccgcgcaggcctaaatctcaggtcttcaccgtcatctcccagcgatcgcag

SEQ ID NO: 103045 - DNA, 486 bp, Homo sapiens
tgcaccgccacctccatgtttctaggcggaaactgaggcacgggggctgcggctcctggacccacctggccttctcggcctgcctctctccctccagccgccccacattcttttttcctaattggaaaaaactattcacgctgctcctccagggcatttcaaccttctagaaagattcgacaagattcgaaactgtttataaagagaacgtgcttgtgcccgaatgctgagtgtgagcgcgcagtgatgccctagagtgcagtcatcccgggcttggcgcccagcgggtggaaatacggccgcagggtggaaatgcggcggcggggctgcccaggctcctgtgggacccgcgcggcgcgggcacgcacattctcagggacgcgcgtcctcaggccacgagaacacctgaaggccccggscagcgtcctcccgtgaagacccggaccggcgtcgtcacccgccgcgcaggcctaaatctcaggtctt

SEQ ID NO: 103046 - DNA, 486 bp, Homo sapiens
tgcaccgccacctccatgtttctaggcggaaactgaggcacgggggctgcggctcctggacccacctggccttctcggcctgcctctctccctccagccgccccacattcttttttcctaattggaaaaaactattcacgctgctcctccagggcatttcaaccttctagaaagattcgacaagattcgaaactgtttataaagagaacgtgcttgtgcccgaatgctgagtgtgagcgcgcagtgatgccctagagtgcagtcatcccgggcttggcgcccagcgggtggaaatacggccgcagggtggaaatgcggcggcggggctgcccaggctcctgtgggacccgcgcggcgcgggcacgcacattctcagggacgcgcgtcctcaggccacgagaacacctgaaggccccggccrgcgtcctcccgtgaagacccggaccggcgtcgtcacccgccgcgcaggcctaaatctcaggtctt

SEQ ID NO: 103047 - DNA, 473 bp, Homo sapiens
cacgggggctgcggctcctggacccacctggccttctcggcctgcctctctccctccagccgccccacattcttttttcctaattggaaaaaactattcacgctgctcctccagggcatttcaaccttctagaaagattcgacaagattcgaaactgtttataaagagaacgtgcttgtgcccgaatgctgagtgtgagcgcgcagtgatgccctagagtgcagtcatcccgggcttggcgcccagcgggtggaaatacggccgcagggtggaaatgcggcggcggggctgcccaggctcctgtgggacccgcgcggcgcgggcacgcacattctcagggacgcgcgtcctcaggccacgagaacacctgaaggccccggccagcgtcctccmgtgaagacccggaccggcgtcgtcacccgccgcgcaggcctaaatctcaggtcttcaccgtcatctcccagcgatcgcag

SEQ ID NO: 103048 - DNA, 606 bp, Homo sapiens
tccaggtttcaggaatgcctcactctcaggggagccaaagcattgtttctgaattgtatcagcagttttatttttcatcctacttagtggctataaatactagttacatctttatccaaagttttaattatttctacaatattctagagttctgttgaaacaaaatgacactttttattgtactaccctcaatgccagggcaacaaaaaaagaaactgtttatgttgctagttgtggaaacaggactggtcaaaaggggagaaaggagtcaaatataatcactctttattctctgcgatccttgagctggtcactsccatcatcaatactgggagaatatccttactatctaggtattcatactagcctaactccttaggctaggactgtgtccccacgaagcctttttttatcagaatctaacaaccacaaaacacatactttcacaggtagggtccagagtacacacacaagacacacacacacacagagacacacacacacttactcacacgcttgactttacctgtttttatgccgagtctttagcaagtttcttccaaagggagccatggtctgtcgggcaaacgaataaagaaattatct

SEQ ID NO: 103049 - DNA, 606 bp, Homo sapiens
tccaggtttcaggaatgcctcactctcaggggagccaaagcattgtttctgaattgtatcagcagttttatttttcatcctacttagtggctataaatactagttacatctttatccaaagttttaattatttctacaatattctagagttctgttgaaacaaaatgacactttttattgtactaccctcaatgccagggcaacaaaaaaagaaactgtttatgttgctagttgtggaaacaggactggtcaaaaggggagaaaggagtcaaatataatcactctttattctctgcgatccttgagctggtcactcccatcatcaatactgggagaatatccttactatctaggtattcatactagcctaactccttaggctaggactgtgtccccacgaagcctttttttatcagaatctaacaaccacaaaacayatactttcacaggtagggtccagagtacacacacaagacacacacacacacagagacacacacacacttactcacacgcttgactttacctgtttttatgccgagtctttagcaagtttcttccaaagggagccatggtctgtcgggcaaacgaataaagaaattatct

SEQ ID NO: 103050 - DNA, 624 bp, Homo sapiens
accgtctagacagagtgaaatgaaagctgaaacaacagtcaaatcaaaaactgctttggtctcaaatccatgtttttcagaaaagatattcagatccagttatctggcaaatggtctcaaacatacatttcaatttcaatgttaaaaataggatattaaacatctcagaaaatattgggattattgaagcaaattctaccctggacttggagtaaatgtgatgaacagattaatgaggtggaagggactagaactttgggaaagtgcaaccttgttatcttaatatttttatagctyagaaagagaatgctatgcaactcatattttgatcttttaatgttaaagaattcaaataaaaaccataaacctgaaactctaaaagaaaaattctgttttgagagagatggcctcctctagtacacttttaataaatttaaagtatctaaaaggatgcacaaagatctctaatgtgctgtgattttcaaaggatgtcatgtataaaagatttgagtgagaacatgaaagcaaaagcaagttcagaagaggaacacaaccaggaggacagtgtgtcaggaaaatccaagaataagtggaggtgtaaaggctaaaaaataatgcaaatgg

SEQ ID NO: 103051 - DNA, 610 bp, Homo sapiens
tttttcctagacacgagaagcaagattataggtgaagtcagcaatggctgcaatgtggagcatggttagttaaatacagtaactcattaacatgtaagtcccaagcaaaccgtattttgtaattacggtttaagttgcaaaatatgctttgactacagaagtcagtcatcaatttttccaggttaattacctatatggatgcaataacagagataggaagagctgaaaggaaatgagctaggaatttgtaaggattatgggcaaagcaaggttacatgcagattgggaaaytgaacgtttgtttacatttacctaaatctccaaggttgggttatacacatcctatgtgggtgtatgcatgcacacatccatctgtatttctagaaaatatactttaattgaacagaaaaatcaattgggttcacagactttgacatcattatttgttcagatgaatcagagttacagcttcaaatgatagactcatttatagaaatggagcaaactcacaatttatctaaacattcagctgatgattgtacatgatccaaggacaatcttcttgaatgatttttttaaagttaacatttccagtcagagaggaaaagga

SEQ ID NO: 103052 - DNA, 616 bp, Homo sapiens
tttttactgaattccaagaaataatcttgatactaaaagtcaaaacatatttgcaaagttatggtttaagtgttttgaaaaataattatcaataattgatatgcaactttgactcargtttccatgattaattgcagtaaatagtcaactctaataatgattcttcagaatattttgtgaggtggagttgctcagtaataacaaaaacctgatgttaaaaacacagaaaacaagatttaaaaatattaatttagaaatttgagagggctaacttcagtacacattagttttaaaaccttaataaggatatagggaggcagagcaagatggccgaatagaagcctccaccaattaattgtcctgccagcaggaacaccaaagtcaacaactatccacacaaaaaaagcatcttcgtaagaaccaaaaaccaggcgagtgatcacagtacctggttttaattttctatcactgaaaggagcactgaagagagtcggaaactcagtcttaccttgccaacaccgtgcctcctccatcccccagcagggaggagaatctgtgcacttgttgggagggaaagtgcagtgactgggagactttgcaatggaactcggggctg

SEQ ID NO: 103053 - DNA, 606 bp, Homo sapiens
ccatatgttaggccacaaaacaagtcttaaaaaatttgaaaaaactgaaattgtatcaagtgtattctctgactaccatggaataaaactagaattaacaagaggaattttggaattaaaaagaygaattttggaaactatataaacacatgaaaataaaatggtatgttcctgaatgaccagtggtccagtgaaaaaatttagaaaaaaaatttaaaagttccttgaaacaaatgatagtgaaaacacaacataccaaaacctatgagataaagcaaaagtagtaccaagaggaaagtttatagctataagcatctacataaaaaagtagaacaacttcaagtaaacaaccaaatgatgtatctttaaaaagcagaaaagcaagagcaaaccaaaaccaaaattagtagaaacaatagagatcaagcaaaataaatgaaattgaaatgaagaaaatgatacaaaggtcaatggaacataaagttggctttttgaaaagataaacaaaattgaaaaatatttagccagataaagataaaaagaaagaagacccagataaataaagttagagatgaaaaaggagacataatacaactgatgtcacaa

SEQ ID NO: 103054 - DNA, 606 bp, Homo sapiens
ccatatgttaggccacaaaacaagtcttaaaaaatttgaaaaaactgaaattgtatcaagtgtattctctgactaccatggaataaaactagaattaacaagaggaattttggaattaaaaagatgaattttggaaactatataaacacatgaaaataaaatggtatgttcctgaatgaccagtggtccagtgaaaaaatttagaaaaaaaatttaaaagttccttgaaacaaatgatagtgaaaacacaacataccaaaacytatgagataaagcaaaagtagtaccaagaggaaagtttatagctataagcatctacataaaaaagtagaacaacttcaagtaaacaaccaaatgatgtatctttaaaaagcagaaaagcaagagcaaaccaaaaccaaaattagtagaaacaatagagatcaagcaaaataaatgaaattgaaatgaagaaaatgatacaaaggtcaatggaacataaagttggctttttgaaaagataaacaaaattgaaaaatatttagccagataaagataaaaagaaagaagacccagataaataaagttagagatgaaaaaggagacataatacaactgatgtcacaa

SEQ ID NO: 103055 - DNA, 546 bp, Homo sapiens
gcaaagaacaaccagccagtttctgataatatatctaataaatatgatatataaatacatatatgtacacacacatatatatatatacacatatgtaatatgcttttttaccttcaacatttttacatttggcagtttggtttcaagtatagtataatgttattgttagtagtataacagatatgcccccatcacaggtagagggtacacattaggtcgcattacttttattaatcaaatttaactcctaggagcccccattctgccaaacccaagaaagcattttgcttctttgacttcctgggtgataaattaatccaggatgtcagttcttgtgtttagtgccttctagaaagctggaaaatccactaaagcagaatctcttaagcttccatgtgcatgtaaagcctctgcagascttattgaaatgcaggttctgatttggtgggaaggaggcccaagactccacatatctgatgacctccctggagatccctgcactgccactttgtacaccacattcagagcagcaaggcaagaggaggt

SEQ ID NO: 103056 - DNA, 566 bp, Homo sapiens
cattaaaaggaaaaatgagttgtccaaagatattttccaggttggagacaaagctctatctgcttcctgtcagatcggagtgcaactcaagtgcaacctcttcattcaggtgcccccagcacccacctactggctatggctcactggatggatgtcctctcccacccagagctgagtactcagtggaagcaaagacacttatttaaaataaaatgaggcagttatccttcacaccatgtcacttttgatagcaaggaagaaccagaatgagtgtgcctgtccctggcatcccagtcacaatcaattttttatatcttatctctgagatccaagacagagaacacacaatagagtgagttaatgcaatccttctcagactctggcctaccccatctgcctcctcctcccctcctctgtgttkcagccatgattctttctcaacaattctcgcaagcaccttcctgctcattattttattccaagtgcctagataaatccccagatggctcacttgctctaaacctatctactccgacatgtcaggggattcctaccagaaacagtta

SEQ ID NO: 103057 - DNA, 484 bp, Homo sapiens
tccctccttctcattctgtcccatgtcacatcctcaggtgagtggagctgggtgctggggtatggtcacaagggtctttggtgttgacctatgccctagagcaggagtgtccaatcttttgtcttccctgggccacactggaagaagaattgtcttgggccatacataaaatacactaacaatagctgatgagaaaaaaaatcacaaaagaaacacataatgttttaagaaagtttatgaatttgtgttgggctgcattcaaagccatcctgggctgcatgtggtccatgggctgtgggttggacaagcttgtcctaaaggataaagcaattaatcttgccactattgacctgrtagccttgaaattggatatcccccatttgtgtagcaaatgtccttggaatactatgtagaacagacacttctgaccatcacaccttctttcaagctgtgactccatagcttttcctgtgttggatggatg

SEQ ID NO: 103058 - DNA, 514 bp, Homo sapiens
gtgttggatggatgcgtgaatagattttcattcatctgctagttccctgcagattaatgtttaggtcacattctttttaaaattttcaaagaaatggtttcttcatgatgtcatatatgtagagatttgttatcaggagtcactaatttcttaagttcgcttcacttaaatctaaatctaaatcatgctgtacatccacaatgggccatagcagaggacattatcttttkctaccacttggtaacacaggcagaacttaaggacaagataagagctctggttctggtttaattagagccctggcagtctcacctagaactcaggtgggaccgccaaagggagggatagtaactatcaaaatgacctttttcttccagacccagcctcagctgcatagggaaagcagttgccctgtcacttggacctgcatagatgggacccaggtctctgtcctttatagtagactaaggcataggaaggctggtgaaaggcgcatggcactagaaagctggag

SEQ ID NO: 103059 - DNA, 598 bp, Homo sapiens
tatcttagtggcttatagcaatgaaggatttgtttctcattcttgtcacactcttaagggctgtggggaggcggaggtctcctccatgtagataggaagcaggtagaaaaagcaacccctttctgggacactccatttatgaggcagaaggaaaaaggtgctggcaaaaccatatagtrgttcttcaaacttttgtctagacgaggaggcatagataacttccactcttggttcattggtcaaggcaagtcataggtccaagcttgatcacagtgagataagactacacttcccacagggaggggcagcagggagctaccttagagggaatgagacagcaaatattttgaacaaataacataatctactgtatctattatctttcagcattattaaattttgaaactgcgttttcttatttattatctgcccccctcaaattgcaagctgcgtaagggaaaagatcatatcttacgtttgtcacgtagtaggggcaggtatttaggacgtactcaatagatatttgctggataaataaatgaagtttctgcttttccttctgaaaatggaacatgttgatatctgttctttataggaa

SEQ ID NO: 103060 - DNA, 587 bp, Homo sapiens
ataatcttattcttttttatggccgcacagtattctatggtttatatgaaccacatttgctttatccagtccaccactgatgggcattcaggatgtttccatgtctttgctgttgtaaatagtgctgtgatgaacatatgaatgcatgtgactttgctgtagaacgatttatatttctttgggtatgagcctaataatgggactgctaggttaaatggtaattgtgttttaagttctttgagaaatcaccaaactgctttctgcaatagctgaactaatttacattcccaccagcgtgtattcagtgttcttttttctcttcaatcttaccatcatctgttaatttttgactttttaataatacccattctggttggtgtgagattgtatatctcattgtggttttgatttgcatttttctaataattagtgatgttgggcattttttcatatgcttattggccatgttatgccttctgtagaaaagtgtctcttcatgtcytttgcccactttttaatacaactgttctttgcttataaatctgtaagttacttacatattctggatattagacctttgttggatg

SEQ ID NO: 103061 - DNA, 587 bp, Homo sapiens
ataatcttattcttttttatggccgcacagtattctatggtttatatgaaccacatttgctttatccagtccaccactgatgggcattcaggatgtttccatgtctttgctgttgtaaatagtgctgtgatgaacatatgaatgcatgtgactttgctgtagaacgatttatatttctttgggtatgagcctaataatgggactgctaggttaaatggtaattgtgttttaagttctttgagaaatcaccaaactgctttctgcaatagctgaactaatttacattcccaccagcgtgtattcagtgttcttttttctcttcaatcttaccatcatctgttaatttttgactttttaataatacccattctggttggtgtgagattgtatatctcattgtggttttgatttgcatttttctaataattagtgatgttgggcattttttcatatgcttattggccatgttatgccttctgtagaaaagtgtctcttcatgtcctttgcccactttttaatacaactgttctttgcttataaatctgtaagttacttayatattctggatattagacctttgttggatg

SEQ ID NO: 103062 - DNA, 566 bp, Homo sapiens
cattaaaaggaaaaatgagttgyccaaagatattttccaggttggagacaaagctctatctgcttcctgtcagatcggagtgcaactcaagtgcaacctcttcattcaggtgcccccagcacccacctactggctatggctcactggatggatgtcctctcccacccagagctgagtactcagtggaagcaaagacacttatttaaaataaaatgaggcagttatccttcacaccatgtcacttttgatagcaaggaagaaccagaatgagtgtgcctgtccctggcatcccagtcacaatcaattttttatatcttatctctgagatccaagacagagaacacacaatagagtgagttaatgcaatccttctcagactctggcctaccccatctgcctcctcctcccctcctctgtgttgcagccatgattctttctcaacaattctcgcaagcaccttcctgctcattattttattccaagtgcctagataaatccccagatggctcacttgctctaaacctatctactccgacatgtcaggggattcctaccagaaacagtta

SEQ ID NO: 103063 - DNA, 556 bp, Homo sapiens
atgctgagaagggttgtgggagtgggtaagtgaggctggttagtgggtatgaaatatagttagaatgcataagatctagtctttgacagcataacagggtgattttagtcaacaataatttattataaatctaaaaataactaaaatagtatagtyggaatgtttgtaacacaaagaaatgacaaatccttcaagtggtgtatactccatttaccccgaggtgattattacacattgtatgccatatcaaaatatcttaagtagcccataaatatatacacctactatgtatccataaaccatttttaaaaaaatcaaaatcttaggagtaaatttaaccaaggaggtaaaatatctgtatactaaaaactatagaaatagaagatgacacaaataaaagatatctggcgttcatgaactggaagaattaagatgtccatactaactaatgtgagctacagattcaatgccaccctatcaaaattcgaacatcattttttacagaaatagaaaaaaacaatcctaaaattcatatggacccaaaaaagaccctaaa

SEQ ID NO: 103064 - DNA, 556 bp, Homo sapiens
atgctgagaagggttgtgggagtgggtaagtgaggctggttagtgggtatgaaatatagttagaatgcataagatctagtctttgacagcataacagggtgattttagtcaacaataatttattataaatctaaaaataactaaaatagtatagttggaatgtttgtaacacaaagaaatgacaaatccttcaagtggtgtatactccatttaccccgakgtgattattacacattgtatgccatatcaaaatatcttaagtagcccataaatatatacacctactatgtatccataaaccatttttaaaaaaatcaaaatcttaggagtaaatttaaccaaggaggtaaaatatctgtatactaaaaactatagaaatagaagatgacacaaataaaagatatctggcgttcatgaactggaagaattaagatgtccatactaactaatgtgagctacagattcaatgccaccctatcaaaattcgaacatcattttttacagaaatagaaaaaaacaatcctaaaattcatatggacccaaaaaagaccctaaa

SEQ ID NO: 103065 - DNA, 558 bp, Homo sapiens
tgaagatctgtcgttttagaaaagtggctgcctctgtcaccagccccatggttactgtcctgtagtgtgactgtcaggaggtgtttctcagtccttcgttgtaagaatgtagatgccggttgcaccttctgttgtcttggaagagactgcagtgcttggctggaaaataagctgctcgggactcctctgagaagccaaagtgaagctcagagatggaagtgggtatacttgtgctaacccagggttgctgaggttgggtgagcttccgcttctcmgaggtggaggagaggcagctcctgagccatttctggcctcgtggtcagagctgcccaatttcagtgtgagaaataccagagaggcagaactttggctgccttctctaaaagcatatgaatgattgcaggagcgtattttacgtcctttccttttccttaacgttgaaagtcacaaactgtagtaaaatcaggaagaacgtaaaaatgctgggggccagcgctgggggtgggggactggggaggactgaggagggggccactcagtctttgaggcctgacttga

SEQ ID NO: 103066 - DNA, 513 bp, Homo sapiens
gaattcaaaagaattaaaatttgagtcttcagaaatagtctaagtttcagaaactgttttctgcaatccaatcaagcctttccttaagtaccccagactctctckcagcatccatattctgtaaacagaggttaaacacagagcttcagtctacccgcacctctgctcattccacactgctgataggaacgcaagcctctcctcctcatctccaactccacaccagaggtgtccaaagacaggcagagggacaaaagccgtcggcatgagcatggctggagcactccaggcattcgggtcctcctgggcagtctcatggcaacttgtggtgaaatgtgggcagcccctgtgcacacaggacctttgacctaagtgactccatcttagaaaaagactccatcttacatttttaaaagacatcatgccaacaggagccagatgtttgtctaatcaacagtgactatacccaatcagataaggttcactttatcagtcctcaccagaggactcggg

SEQ ID NO: 103067 - DNA, 513 bp, Homo sapiens
gaattcaaaagaattaaaatttgagtcttcagaaatagtctaagtttcagaaactgttttctgcaatccaatcaagcctttccttaagtaccccagactctctcgcagcrtccatattctgtaaacagaggttaaacacagagcttcagtctacccgcacctctgctcattccacactgctgataggaacgcaagcctctcctcctcatctccaactccacaccagaggtgtccaaagacaggcagagggacaaaagccgtcggcatgagcatggctggagcactccaggcattcgggtcctcctgggcagtctcatggcaacttgtggtgaaatgtgggcagcccctgtgcacacaggacctttgacctaagtgactccatcttagaaaaagactccatcttacatttttaaaagacatcatgccaacaggagccagatgtttgtctaatcaacagtgactatacccaatcagataaggttcactttatcagtcctcaccagaggactcggg

SEQ ID NO: 103068 - DNA, 591 bp, Homo sapiens
atttcatgagactcaagaaaagtcaatttgccataagtattaattacatmcatagaaagagaatgcttgtatgagatgaatgaatcatagtgactacttataacattgaggctgctttaaaggatttattcacccattcaacaacattgtattgatatttatattataaatatatattcataataaatatacatttattgaaaatatctatgtctcatataggacagtcatacttgttatattcattatatttatttgtacatgtttacatattcattaaaatatattacatccaaaacattgatatcgatgtgtctatgaagatatgtaatttgcttgggggaaactagggagattccaaaaatcactcagcattacacagtgacatttgaggacaaatttgatgatgccgttggtatgcaatgtcaacttcattccttgcctctgtgctttgtcattatttcaaagcactgtcttctaggtcacagtgtgactccatgcgcaccagaaaagatgtctggtcttagtctagcatgaaagacgtggcatatgtggtgcagctgtcaccaacatcctgagtcagaaccagaa

SEQ ID NO: 103069 - DNA, 591 bp, Homo sapiens
atttcatgagactcaagaaaagtcaatttgccataagtattaattacatacatagaaagagaatgcttgtatgagatgaatgaatcayagtgactacttataacattgaggctgctttaaaggatttattcacccattcaacaacattgtattgatatttatattataaatatatattcataataaatatacatttattgaaaatatctatgtctcatataggacagtcatacttgttatattcattatatttatttgtacatgtttacatattcattaaaatatattacatccaaaacattgatatcgatgtgtctatgaagatatgtaatttgcttgggggaaactagggagattccaaaaatcactcagcattacacagtgacatttgaggacaaatttgatgatgccgttggtatgcaatgtcaacttcattccttgcctctgtgctttgtcattatttcaaagcactgtcttctaggtcacagtgtgactccatgcgcaccagaaaagatgtctggtcttagtctagcatgaaagacgtggcatatgtggtgcagctgtcaccaacatcctgagtcagaaccagaa

SEQ ID NO: 103070 - DNA, 591 bp, Homo sapiens
atttcatgagactcaagaaaagtcaatttgccataagtattaattacatacatagaaagagaatgcttgtatgagatgaatgaatcatagtgactacttataacattgaggctgctttaaaggatttattcacccattcaacaacattgtattgatatttatattataaatatatattcataataaatatacatttattgaaaatatctatgtctcatataggacagtcatacttgttatattcattatatttatttgtacatgtttacatattcattaaaatatattacatycaaaacattgatatcgatgtgtctatgaagatatgtaatttgcttgggggaaactagggagattccaaaaatcactcagcattacacagtgacatttgaggacaaatttgatgatgccgttggtatgcaatgtcaacttcattccttgcctctgtgctttgtcattatttcaaagcactgtcttctaggtcacagtgtgactccatgcgcaccagaaaagatgtctggtcttagtctagcatgaaagacgtggcatatgtggtgcagctgtcaccaacatcctgagtcagaaccagaa

SEQ ID NO: 103071 - DNA, 591 bp, Homo sapiens
atttcatgagactcaagaaaagtcaatttgccataagtattaattacatacatagaaagagaatgcttgtatgagatgaatgaatcatagtgactacttataacattgaggctgctttaaaggatttattcacccattcaacaacattgtattgatatttatattataaatatatattcataataaatatacatttattgaaaatatctatgtctcatataggacagtcatacttgttatattcattatatttatttgtacatgtttacatattcattaaaatatattacatccaaaacattgatatcgatgtgyctatgaagatatgtaatttgcttgggggaaactagggagattccaaaaatcactcagcattacacagtgacatttgaggacaaatttgatgatgccgttggtatgcaatgtcaacttcattccttgcctctgtgctttgtcattatttcaaagcactgtcttctaggtcacagtgtgactccatgcgcaccagaaaagatgtctggtcttagtctagcatgaaagacgtggcatatgtggtgcagctgtcaccaacatcctgagtcagaaccagaa

SEQ ID NO: 103072 - DNA, 546 bp, Homo sapiens
accctgctggccatcaaagacaaatattagcattcctttctcttctgtgatggggcccttcaaagcaaaaaaaaagtcctaattaaaattctagaaatattaccacttgaaaaactgcattagcattagtgaatttctcatgcaagttcctttctggctagcttggccaaaaaaaaaaaaaraaaaaaaagctgttaattttcaatgcaattccatgaactgtggttccttgttcaaaatgtatagcaaagaaaatggaaactgccataatgacttatattgtggccaaaactcttccaactctggtagaaaatcacatttcatttctttggcgggtgagagaggcaacacaatacattggaaatgagagaatggaagagtcggatgccatgtttccttctaactaggattccagttttcacccacatcacttcagcaatgcaaagtggcataaaagcaggtcaccgcacagtgcctgagcagtgaatgcaaatacagtacttggttcctgaccacagcatgtgaaagcacataaaagagagaggg

SEQ ID NO: 103073 - DNA, 586 bp, Homo sapiens
gcctgggcagagggatccaggagccagttgcgtaactggcctgagatgtgcgtctgaaaagactttttgcaggcaaatgtggctccagcctcctgctgcctccagscagtcctcccttcccagtctgggagcctggcctgttcatgctacactgtttggttttggctgtggcctccaccctggtgcaacctgtgcatctaaggaggctcaactggaggaatccaggccccttcccaggaaaatgtgtttgttggtggcagatagccaggctgacagaggtgttccccctcaggtgaggggcctcatggccacagcactaatggggggtaggaaggggttcacgtccgcttcctgagctgagctgcctctgtagcacctgtgcctcctctagggcggcatcctacttccagttcattcttgatcccacagaatgcagggacagggcactaagtgttcagctctgctgcctcagccactcgctctgagctcccagtggtatgagtctgtcagagacactggtaccaagaggtccaacatgtgacacttccaagcagtcagtgtggaagtttctcacaacagtccaaga

SEQ ID NO: 103074 - DNA, 586 bp, Homo sapiens
gcctgggcagagggatccaggagccagttgcgtaactggcctgagatgtgcgtctgaaaagactttttgcaggcaaatgtggctccagcctcctgctgcctccaggcagtcctcccttcccastctgggagcctggcctgttcatgctacactgtttggttttggctgtggcctccaccctggtgcaacctgtgcatctaaggaggctcaactggaggaatccaggccccttcccaggaaaatgtgtttgttggtggcagatagccaggctgacagaggtgttccccctcaggtgaggggcctcatggccacagcactaatggggggtaggaaggggttcacgtccgcttcctgagctgagctgcctctgtagcacctgtgcctcctctagggcggcatcctacttccagttcattcttgatcccacagaatgcagggacagggcactaagtgttcagctctgctgcctcagccactcgctctgagctcccagtggtatgagtctgtcagagacactggtaccaagaggtccaacatgtgacacttccaagcagtcagtgtggaagtttctcacaacagtccaaga

SEQ ID NO: 103075 - DNA, 586 bp, Homo sapiens
cactaagctaagagccaactccctagtgaatcaccttccacacccgtgacctcaagtccaggacccgtgtaaagctagtttttaccatgtcttctatgactgctgggggatggtacactatcatcctagatccaattacaaacagaaaaaarcaaaaaacaactaaaccagctactactgagcttgagcatgactagcactgaactacctaatttctgactgttacaaattaatcaagtcacagcacatttgcgattcatatcagctacctagggcgtttctgtagacagctaacccatttgggaagcagtcagctaatactatctggatgtcagatgcatctcatgttttggcagctctttatagtctttcaaggggattgtgttgacaggcacttgcccttcaacttgctgctctgtttggcagcggctctgttttcagtcttgccttcactgcacttgaggattttccacagccatgcatggggatgttctcgtgtaagagggtcagacgggcaaaaatccgggaagaaggtaggtgcattcacaaagccatgcctggaaactctagatcagagggtggactc

SEQ ID NO: 103076 - DNA, 589 bp, Homo sapiens
tttataaattttctttctctggtgaactttcataagcctttctgtctagaagtccagaagagaggtaggcaggcattttctgcctctttttcctcagtatccattctgtcccatggaaccctccataatttaattcctcccagccagtccagacctgtacttctccagacacagttaataaaaatgtccctctccctaacatttgtaatttcttattttctatctctaaaaatgactcctccaggattcctggaaaagaaggtaggagtgacccagcttgtgtgttagcccccagtgcttataatttttgtgagacactttgtgttatatctagtatttgaattctccacaatttcctttttaaatccatactctcactggggtgcagacagctcaaaggtgtcttgcctgagataggatgctggcttctttcaggctgatttaattaaggttatttggatataagacactgacatgcactctaacttactgacataaaagaagwtgattttggaaggacaagggtttatctcaatgcacccaagattaagcgtatagctaagttgcacgaggaactagggaaaaaagg

SEQ ID NO: 103077 - DNA, 609 bp, Homo sapiens
actaacaaacagttgacttcaaatggacaatttcaatgaagcctgacttcatatttagctcctttaagcttccttagrcatcagctctctacaattctcacattgagaatatgtgtattttgttagctcaaaccttgttagacatgttaaatgtttagaaatataaatttaacctaccccttgaggtaggtcttgagaggtttgtgagcctaaaaagacatggaggaaccacttattgccacaagcacattgttctaaattatttggaatcagttaattcttccccatctcctacccatgcctgacaccaaagaggagcctctaaatttacagggaatacaaggaagtctactgttctctgctcctctctgggttattagggcacatgggagccctcagttgttttctgctgagcaagagcaaagtccaccttggacttagacagcttgccaaattttttgccagaaggggacctgagttgtgaccactcccagtgtgtgccgggaaaaggctcgtactggtgccagaatctcttactgtcaatgctcccaaaactcaccgcttgcccccaccccttttgcttaaatgacgtggttcttatctcagatc

SEQ ID NO: 103078 - DNA, 609 bp, Homo sapiens
actaacaaacagttgacttcaaatggacaatttcaatgaagcctgacttcatatttagctcctttaagcttccttaggcatcagctctctacaattctcacattgagaatatgtgtattttgttagctcaaaccttgttagacatgttaaatgtttagaaatataaatttaacctaccccttgaggtaggtcttgagaggtttgtgagcctaaaaagacatggaggaaccacttattgccacaagcacattgttctaaattatttggaatcagttaattcttccccatctcctacccatgcctgacaccaaagaggagcctctaaatttacagggaatacaaggaagtctactgttctctgctcctctctgggttattagggcacatgggagccctcagttgttttctgctgagcaagagcaaagtccaccttggacttagacagcttgccaaattttttgccagaaggggacctgagttgtgaccactcccagtgtgtgccgggaaaaggctcrtactggtgccagaatctcttactgtcaatgctcccaaaactcaccgcttgcccccaccccttttgcttaaatgacgtggttcttatctcagatc

SEQ ID NO: 103079 - DNA, 494 bp, Homo sapiens
attacccactgaatttgaacatgtgcatgctataagagccagaaattctgttcatatctatattctttagaaaatatattgtacatcataggtaaataccttacagaaaaaatcttgtgatatgtatatcagtgacacccacaagaatgcccataagagcagtgtctgtaagaacaaaaaacctgaaataattactgtgtccaccatcagtagaataataagtaaaataaatatttattcaayagaaaaaatagaaaaaagaatgggttgctagtgcatgcatcaacttgggttaaccttcaaaagataatcaccatttttatggctgcatagtattccatggtgcatatgtgccacattttctttatccagtctatcattgatgggcatttggattggttccaggtctttgctattgtgaaaagtgctgcaataaacatacacgtgcatgtttctttagagtagaatgttttataatcctttgggtatatacc

SEQ ID NO: 103080 - DNA, 482 bp, Homo sapiens
atttgaacatgtgcatgctataagagccagaaattctgttcatatctatattctttagaaaatatattgtacatcataggtaaataccttacagaaaaaatcttgtgatatgtatatcagtgacacccacaagaatgcccataagagcagtgtctgtaagaacaaaaaacctgaaataattactgtgtccaccatcagtagaataataagtaaaataaatatttattcaacagaaaaaatagaaaaaagaatgggttgctagtgcatgcatcaacttgggttaaccttcaaaagataatcaccatttttatggctgcatagtattccatggtgcatatgtgccacattttctttatccagtctatcattgatgggcatttggattggttccaggtctttgctattgtgaaaagtgctgcaataaacatacaygtgcatgtttctttagagtagaatgttttataatcctttgggtatatacc

SEQ ID NO: 103081 - DNA, 545 bp, Homo sapiens
ctctgcagagaagaaagctttattgattcatgcaaccccctgaatgttgagtacctgcatttatgagccaggtggggtaaaaggtcagattcttgactgtcctcaaaccagatgtgttaagctgtaggaggctagagaacaaatgtacaaagactgaaggtcctactgctatttccccttaatgcaacagagtaagtggagctgtccactgcttttcatttaatgggaaaacgtaaatgttcaacacaagaagcttcrcttaaaattttatgtagaaaaaaattgttttgaaggaagtagaagacatttccagttctcttgatgaccttgaacacgtcaagagtttttttaagtaatatgtatatttaaaggtgtaaaaatccaagcccaagagatctaataagaatacaatgaaacttgtgatataagcatgttgaagagagagatgttactatcatccatatgcatgttcatggatacatcatagtctccccaaagtatttctacatcattggtctcaccagattctcctattatacccttaa

SEQ ID NO: 103082 - DNA, 545 bp, Homo sapiens
ctctgcagagaagaaagctttattgattcatgcaaccccctgaatgttgagtacctgcatttatgagccaggtggggtaaaaggtcagattcttgactgtcctcaaaccagatgtgttaagctgtaggaggctagagaacaaatgtacaaagactgaaggtcctactgctatttccccttaatgcaacagagtaagtggagctgtccactgcttttcatttaatgggaaaacgtaaatgttcaacacaagaagcttcacttaamattttatgtagaaaaaaattgttttgaaggaagtagaagacatttccagttctcttgatgaccttgaacacgtcaagagtttttttaagtaatatgtatatttaaaggtgtaaaaatccaagcccaagagatctaataagaatacaatgaaacttgtgatataagcatgttgaagagagagatgttactatcatccatatgcatgttcatggatacatcatagtctccccaaagtatttctacatcattggtctcaccagattctcctattatacccttaa

SEQ ID NO: 103083 - DNA, 457 bp, Homo sapiens
gtgtttggtggctcaaatctctgagcaagatagactaaatgaaaatttttcactgtgaatttgggttttatgagatgtgcwtctctttgtacaaaaaaatgttaggtttttagactcctgccaatagcaaaatcactccccctgcttcacagggacctggcaggatggacagcaatgcctgagaatgtctgtcctatggaaatgcagaagaccagatggcaagaggccaaggtgacaggctgagcttagcacctctgttctttgcacagttgatacttgtgaaatactacttccctgccaccttaatccaaagagaagctgccagtgcctagaactgacggttgcgctacactgtgatcaagcaggaacatcagatggaacaattctatagcagcctgattcatgtggagggccactcaggagaggttggacaccttcatgggactgtcctggtatg

SEQ ID NO: 103084 - DNA, 457 bp, Homo sapiens
gtgtttggtggctcaaatctctgagcaagatagactaaatgaaaatttttcactgtgaatttgggttttatgagatgtgcttctctttgtacaaaaaaatgttaggtttttagactcctgccaatagcaaaatcactccccctgcttcacagggacctggcaggatggacagcaatgyctgagaatgtctgtcctatggaaatgcagaagaccagatggcaagaggccaaggtgacaggctgagcttagcacctctgttctttgcacagttgatacttgtgaaatactacttccctgccaccttaatccaaagagaagctgccagtgcctagaactgacggttgcgctacactgtgatcaagcaggaacatcagatggaacaattctatagcagcctgattcatgtggagggccactcaggagaggttggacaccttcatgggactgtcctggtatg

SEQ ID NO: 103085 - DNA, 345 bp, Homo sapiens
ctgcttgctctatagaggacaactggaagctgttgctgtagtccaggagacaagtgatgatggtagcctgtgctagagtttaggagtagtgacaatcttttgaatattaaacctttgttaactctatagattttggaaggaacaatttgtcrgtgaggccacatttcgcacttcacttagctcatattataagaaatagtggcaaaagatcactgtatggggggtgttggtaggtacctgaacagtgctatttttaaattgccagttaattttagctagagagatcagcaaaattccaagaaactaaatacaaaaagacactttttttttttttttatgatggag

SEQ ID NO: 103086 - DNA, 605 bp, Homo sapiens
gtttcatattaatcaactataaaatgaggagtatttactatccacctcacatactgtatgcccaataaaagataacctgtgttaagtggcagaaacatagtaagcactcaatatatattaatcccctttccttcctcttccacatataaacaacaaatgaatgtcaataatgcaatacttaaattattttcccaaaatgttgcccaaggtatccagaaaaasaaaaaaggaagaaaaggaaaaatatcccaacaaatcaacatcagaatttaccttggggaaagaagtatggctatatatgaggattcgtctgcaaggatattcatgacattatttataatagtcaaaaactggaaaactgaacaggaactaattatgtaggaacatgaaaatcagttttatgatagatgaataaaaatatgtataatctagaaataaatacaaataagtgctattatagaaaagcattcctgggttttaccaaactatacattagtcaaaattaggacaaaggtgtttttcaacatagtactggaagtcctagacagagcaattaggcaagaaaaaagaaataagagatattctaataggtaaggactgagcaa

SEQ ID NO: 103087 - DNA, 558 bp, Homo sapiens
ttaaaggtatttttttttgtcctttagctctrtgtcatttattttatatttatcggctccttttccttatcttcctcgtgtgtggcactttaatctttgtcttgtaagacttgaaaatctctactcactgcctttagaggctttgtgtctttttttttaaattgacgtataattctcatactatacaatgagtacaatcaccaccatcaattttagaaatttccctcaccccaaaagaaaaccccatacccaccaggagtcactctttattccttatcttcagcccaaggaaaccactaacctactttcttatagatttgcctattctggacattttatataaaaggaatcaggctgtatgtggtctcttgtggcttctaacacttggcataatgttttcaaggttcatccatgttgtagcatgtatcagtacttcattccttttcattgcagaataatatttgacaataaatacacctttatacagtaagaatactaatgctctaggatttagcgttccaaaaccttgcctgatttttctgtcttctggcagcagtt

SEQ ID NO: 103088 - DNA, 558 bp, Homo sapiens
ttaaaggtatttttttttgtcctttagctctatgtcatttattttatatttatcggctccttttccttatcttcctcgtgtgtggmactttaatctttgtcttgtaagacttgaaaatctctactcactgcctttagaggctttgtgtctttttttttaaattgacgtataattctcatactatacaatgagtacaatcaccaccatcaattttagaaatttccctcaccccaaaagaaaaccccatacccaccaggagtcactctttattccttatcttcagcccaaggaaaccactaacctactttcttatagatttgcctattctggacattttatataaaaggaatcaggctgtatgtggtctcttgtggcttctaacacttggcataatgttttcaaggttcatccatgttgtagcatgtatcagtacttcattccttttcattgcagaataatatttgacaataaatacacctttatacagtaagaatactaatgctctaggatttagcgttccaaaaccttgcctgatttttctgtcttctggcagcagtt

SEQ ID NO: 103089 - DNA, 569 bp, Homo sapiens
agaagtgtctaggattctggatatttttgggggtggatattggaatattttcataggcatgctgagatatattagggataggaccaaagtctacacataaaatctatttatgtttcataggtacgttatatacctagcctgaaggtaattttatatattttaaataattttgtgcatgaaataaaatgtgtgcacactgaaccatcagaaagcaatggtgtcaacaatctcagccatccacatggacagtctgtggttgtttgtcatccccatcattcctgactttgaatttacatgctatcaataagcaatcatttctttacacwtattcacacataagtaattaacagtaaaaaatatgacataccattagtacagtgaaaaattaatgtgttcaggataagtaagcagcacagtagcacccccagaacacttgtatcagctgttaaacaacaacagcaacaagcagcaggcattcagtttccagttatgatgtggcattttgtttaaaatattactgtacactgcattttactttatttttaggtgaaaacatcagaagcagttca

SEQ ID NO: 103090 - DNA, 642 bp, Homo sapiens
ctaaattttctggcttagtatgtgggactgaattagataatggggaaaatcaaatgaattatctaatcattaattgaatctcacctataattctctcaatttcctctcatgctttagacatgagtagttttcaactattatatttatatttcatagatctcaagagcttttaaaaaccacctgttcctaccatctaccaggaacaattaatttgggtctctgcacatgaagtcagaatccaggcatttataatgttttacagccccaagatgagtctaagatgcagccaggcagaaggtccactgcatctacttaaggttatgacctattaggggtgccttttcatgcatggaaagaagagcttccaggatgaaggaagggctcttggcyacggcatcctcatcctcctcaccagcatggtaacaatgatgaagacacaaaaagtgcttcccttgcctaggcactgtgctaaacactttacagactttacataaaggctttaggaagttaaggaatagtcaccaagactcaaagctccttcatcatggacctcactgttggcatctttggtgatgtggactaaaatcaatagcacctaattgttggtcaaaggatcattctagatctttgagttagatttac

SEQ ID NO: 103091 - DNA, 561 bp, Homo sapiens
ggaggcaaatttaaaataatttttagtccctgatgggagttccaaggcaagggcatacatgagtgcttgtacgggaacacacacggaagatgacgattctaacctagcatctcagtgaggtgcccaaagccacattttgcagatagacgaaattagagagcaggtgmttcctcctccctttaaataggaatgaaatgatgtcccagaaggggatcctgtggagagaggctgacaggaagggggaacacaagcaggtggttacaagaactgaaagacttgagagcagcaggaaacagaaaagggagataagtaaacaccagcccttggagaagccagagctgcttgtctgatttctccaccaagatctgtgcagtgaagtctaaaaccctctttccacactctacagaagaccctggacaacttgcatctcatttatttgtttttaaaaaaatagttcaggggctcactaaaaggtcccactggattgaggatggaagtgggaggaagtgaagtaaggaggagggaaggacacaatgaggaaatagtatttactgcacgtgg

SEQ ID NO: 103092 - DNA, 561 bp, Homo sapiens
ggaggcaaatttaaaataatttttagtccctgatgggagttccaaggcaagggcatacatgagtgcttgtacgggaacacacacggaagatgacgattctaacctagcatctcagtgaggtgcccaaagccacattttgcagatagacgaaattagagagcaggtgattcctcctccctttaaataggaatgaaatgatgtcccagaaggggatcctgtggagagaggctgacaggaagggggaacacaagcaggtggttacaagaactgaaagacttgagagcagcaggaaacagaaaagggagataagtaaacaccagcccttggagaagccagagctgcttgtctgatttctccaccaagatctgtgcagtgaagtctaaaaccctctttccacactctacagaagaccctggacaacttgcatctcatttatttgttttwaaaaaaatagttcaggggctcactaaaaggtcccactggattgaggatggaagtgggaggaagtgaagtaaggaggagggaaggacacaatgaggaaatagtatttactgcacgtgg

SEQ ID NO: 103093 - DNA, 542 bp, Homo sapiens
catacagccagagtgcatagcatatttgctcacgggcccattccctagatgattctgtccctgcaacccctgcccccacccgactccccccaactcactgccacccaaagaaggcagggctccaaggaagcaaggcacaagttccagagaaggaattatggagaaatgaagattcctgcaaagtcagaggggaaggaataattaggaccaagtctaagcctgctttagaaggttacccaggcctcaactagacagaaccaaccagagaatttgtaggccctagtgsaaaatgaaaatgcagaatcccttctttaaaaattgttaagactcagcataaaaacagcagagcattaaatgaagcctggagtccttctgccatggggccctgtgcagttgctcaagttgcaggttcatggcctgccctgactccagagcctccttgcaaacatctaaggagagtcttgggatacttactcagaatagatggtgacggatcaggtttgaggtaacacaggaagtacgttcactaaaagcctcacaca

SEQ ID NO: 103094 - DNA, 518 bp, Homo sapiens
aaaaacattaaatgaatcttctgacatgactgttcaagaaaaacaaaccaaagaaaagaaaacccaaatggccaataaatgtgaaaatatgttcaacttcttaataagataawtgcaaattgaagaccatggttagattccgttttacatctatcatataagcaaaaatgaacaggactaatacaaagatttaaagagatataagaaggttgcaacttttcattccttgctgtgggaacataaacaggctcaatccttttgcagaacaaattggcaatctctggtgatgttgaagatgcccacatcctatgacccagaaattttacttacaggcatatatcattaagaaaatttctcatctgtgcaaagatgttctgtgtttcgttgatttaatgacaaagtgcccatcattcagttcatggataagtaaaatttttatacatccatagggtggatatttaaaatataaatagttaaaataaatccactaaagctacatttataaacacagataaatc

SEQ ID NO: 103095 - DNA, 531 bp, Homo sapiens
gtttccatttctgagcagtaaaagataaataagtgattaaaaactatcatctatttccactactcccattatttcttaaaaataggtaaatagtttctcattaataaaaaaattcaaacattctcagaatgaaagcagtacttcacgtggacttcatttggcttaaataagaaatgtactagttaggagtagctttggcagcatgtaaataaatcatattagggaggctaagtaagaatttcttgttataaaaacaatatctggaagacgtagtttaggcagagtgtagttactaaaaaaatttttcaagaactcaagtttgtttgttttaagcttcattctcgactaaaatttagttctcactattttaagatggttggtgtactagcaggcattgcctccacattttaaataaaactaaaagagaaatgtgtaggacacattctaactttatgtttctcagaagctycatactcagtctgtccacttttgctaatgtctaggttgcatgatcaaatctatttgcaaaga

SEQ ID NO: 103096 - DNA, 585 bp, Homo sapiens
gaagtttctgttggtctagccagtggcggaatggcagccttaggaaggagtaagccctctccttctcgaaaaacccgagcaaggctggagacttctctgcagtggtggggtagtgaaaatatatacgtgaaaggggtgacctagattgttttaaatagggctttttytctcaactcacaaccctataaatcaaagaaatataaactgaaatggccacattgaagttagcaaggaaagtagggaggaaggacatctctttcaactgacatgtagatttgaactgaggaggtgatacagtttggctgtgttctcacctaaatctcaccttgaattgttataatccccatgtgtcaagggcagggccaagtggagacaactgaatcatgggggaagttttccccattctgttctcatggtagtgaataagtttcacaaggtctgatggttttacaaatgggagtccccgttcacaagcctttttgcctgctgccatgtaagatgtccctttgctcttccttcatcttctgccataattgggaggcatccccagccatgtggaactgtgagtccattaaacctctttcc

SEQ ID NO: 103097 - DNA, 585 bp, Homo sapiens
gaagtttctgttggtctagccagtggcggaatggcagccttaggaaggagtaagccctctccttctcgaaaaacccgagcaaggctggagacttctctgcagtggtggggtagtgaaaatatatacgtgaaaggggtgacctagattgttttaaatagggctttttctctcaactcacaaccctataaatcaaagaaatataaactgaaatggccacattgaagttagcaaggaaagtagggaggaaggacatctctttcaactgacatgtagatttgaactgaggaggtgatacagtttggctgtgttcycacctaaatctcaccttgaattgttataatccccatgtgtcaagggcagggccaagtggagacaactgaatcatgggggaagttttccccattctgttctcatggtagtgaataagtttcacaaggtctgatggttttacaaatgggagtccccgttcacaagcctttttgcctgctgccatgtaagatgtccctttgctcttccttcatcttctgccataattgggaggcatccccagccatgtggaactgtgagtccattaaacctctttcc

SEQ ID NO: 103098 - DNA, 640 bp, Homo sapiens
gcacataaaaagatactcaacatccttggccagcaaggaaaccaraatcagtaccacttcacatccacaaggatggctgtaatcaattagacagagggtaaggttggtgaggatgtaaaaaaaaattcaaaccatcatatattgctaatggtaatgtaaaacagtgcagccactttggaaaacagtttagctcttccttaaaaggttaaacacagttaccacatgacccagcaattttactcgttaatacttacccaagagaagtgatcacatacatccacacagaaacttacacatgaatgttcacagcaataatatttgtaatagccaaacattgaagcaacccaaatgttcatcaattggtaaatggataaacaactgtagcatatacatgtaatggaatattatttgacaataaaaggaaatgaagtattaatacatgctacaacacggatgaacctcgaaaacattatgctaagtcaaagcagctggtcataaaaagcacacatattgtaggattccatatatgtgaaatatccagaataagtcaatctatagagacataaagtaagttagtggttatctagagcttggggcagcagatttggagggaaaggggactgaataggtacaggttgtc

SEQ ID NO: 103099 - DNA, 640 bp, Homo sapiens
gcacataaaaagatactcaacatccttggccagcaaggaaaccaaaatcagtaccacttcacatccacaaggatggctgtaatcaattagacagagggtaaggttggtgaggatgtaaaaaaaaattcaaaccatcatatattgctaatggtaatgtaaaacagtgcagccactttggaaaacagtttagctcttccttaaaaggttaaacacagttaccacatgacccagcaattttactcgttaatacttacccaagrgaagtgatcacatacatccacacagaaacttacacatgaatgttcacagcaataatatttgtaatagccaaacattgaagcaacccaaatgttcatcaattggtaaatggataaacaactgtagcatatacatgtaatggaatattatttgacaataaaaggaaatgaagtattaatacatgctacaacacggatgaacctcgaaaacattatgctaagtcaaagcagctggtcataaaaagcacacatattgtaggattccatatatgtgaaatatccagaataagtcaatctatagagacataaagtaagttagtggttatctagagcttggggcagcagatttggagggaaaggggactgaataggtacaggttgtc

SEQ ID NO: 103100 - DNA, 573 bp, Homo sapiens
tgtgtgtctgcagagtaagagagagagagactgatggattaattttaaggaattagttcctgtaattgtaggggctggcaattcaaaatttgtgggacaggccagcaggccggagacccagggaagagctggtgttacaatcttgagtctgaaggttgtctgaggcagaaattccctcttcttcaggacacctcaatctattttcctcttaaagccttcaattgattagatgaggctcagtcacgttacgaaagataatctgctttactcaaagtctaccaatttaaatgttaatctcatctgaataatataccttcacagcaacatctagactgatgtttgaccaagtatctgggtatcatggcctagccaagctggcatacaattaaccatcacaagttcaytctgtcaatttggtagtcagacacatcttaaaatccatatctctgaaaaaagactgaaagactagaaaggcttcaatatttttggcttgaacaacactgggtaagtgggaaatactggaaggggtaagctgctagagtggtgctactgggtggagtagcagaaaggagg

SEQ ID NO: 103101 - DNA, 533 bp, Homo sapiens
cctgacctgtgttggtggctaagggtttgatcaagttccttagggttgactcatggtaagcaaagccaccccagggtgctgctagtcccatcactatcccgattcctgccagcattaattctactactcacttactcctggtattcttgggtcttatgggattagacacagtggcccctggagggtcaagaatggccaacgtacattcatctctkttccaagttttcaatatacaagggaaaactgcccctaaaaaacaagtgactccctagggagttgggagcagttatggggtgtgattttttcctgtttatggccacaaacaaaaatgagcccagttgggccacaaatagaggctctacagggtgtgatattttatactttgctgccaagttgggtctgcagagatattctctccccttgccacaccctggttctagtgagggtggttggacaatccttgttttccagagcggagcggggagtactcccaccttcccagactaggcagttgtttttccgttgtatgttct

SEQ ID NO: 103102 - DNA, 533 bp, Homo sapiens
cctgacctgtgttggtggctaagggtttgatcaagttccttagggttgactcatggtaagcaaagccaccccagggtgctgctagtcccatcactatcccgattcctgccagcattaattctactactcacttactcctggtattcttgggtcttatgggattagacacagtggcccctggagggtcaagaatggccaacgtacattcatctcttttccargttttcaatatacaagggaaaactgcccctaaaaaacaagtgactccctagggagttgggagcagttatggggtgtgattttttcctgtttatggccacaaacaaaaatgagcccagttgggccacaaatagaggctctacagggtgtgatattttatactttgctgccaagttgggtctgcagagatattctctccccttgccacaccctggttctagtgagggtggttggacaatccttgttttccagagcggagcggggagtactcccaccttcccagactaggcagttgtttttccgttgtatgttct

SEQ ID NO: 103103 - DNA, 604 bp, Homo sapiens
cattactattatgactactaactttctaaggttcagtgtgaaggatgggtttggggaggagacgggagactggggaatatggggctggagaggagcaaggacagctggggggcagtggggtgggccccatgtctggccactcctccctctgtctccagctgtaactgacattaatggaactctagtttctaatcctttttgcaatttgaaaagtggtttatttggtccctgcaratggaggtacactattagctctgctttgcttttcccctatcttaacgtggaggatgtttataacaattgtgtacaaaaaatgttgtctcctagttaagcaataataataataataataataataataataataataatggtaccaaaaaaagggcatcatgtgagggtgagagggaatcaggtagaggaaaggagaggaaaggaggcctaagtgcatgctggtgactacaaggagaagatgagaacgagtcatgtagccaaattatttttagctaagagtagttccattcacttcataatggacaatccttgctgtcccctgtgatatgagggatttttcctattattattttcccacctgccataaggc

SEQ ID NO: 103104 - DNA, 604 bp, Homo sapiens
cattactattatgactactaactttctaaggttcagtgtgaaggatgggtttggggaggagacgggagactggggaatatggggctggagaggagcaaggacagctggggggcagtggggtgggccccatgtctggccactcctccctctgtctccagctgtaactgacattaatggaactctagtttctaatcctttttgcaatttgaaaagtggtttatttggtccctgcagatggaggtacactattagctctgctttgcttttcccctatcttaacgtggaggatgtttataacaattgtgtacaaaaaatgttgtctcctagttaagcaataataataataataataataataataataataataatggtaccaaaaaaagggcatcatgtgagggtgagagggaatcaggtagaggaaaggagaggaaaggaggcctaagtgcatgctggtgactacaaggagaagatgagaacragtcatgtagccaaattatttttagctaagagtagttccattcacttcataatggacaatccttgctgtcccctgtgatatgagggatttttcctattattattttcccacctgccataaggc

SEQ ID NO: 103105 - DNA, 551 bp, Homo sapiens
aaactgataaattggatgtcatcaaaagttaaaatttttgttctgccaaagactatcaagacaatgaagataagctagagtggaagaaaatatttgcaaacaacatatacaacaaagaatttgtacgcgaactgtataaggaactctcaaaactcagcaataagaaaacaaataattaaaatgtggggaaagatatctgaagaatgatagacatacagatcaatggaacaggccagagaactcagaaataaacctacaaaaatatgaccaactgatttttgacaagggtacaaaagtaattcaatgaagaaaaaatagccctttcaacaaatgttgttgaaacaattgaacattcataggccaaaaaaaaaaaaaaagaacttcatgctaagtctcatatgttatacaaaattaactgaaaatgattcatgggcttaagtgtaraatacaaagctataaaagttttagaacataacatagggaaaaaatcttcacaatctagggctaggcagagttctcagacttgagaccaagagtacaatttgtaaagg

SEQ ID NO: 103106 - DNA, 540 bp, Homo sapiens
aactctggctggaggcaggtggcggcttctaagacctctctgctgaccaccttcccccaggcattttgacccctcattccctatcaggcagcccaggacactgtggtctaagcacttcaatttagggatggggatgctgagttgcagagaaaatgcggacctacccaaggtcacccagggagccagagcgagagcagactctgcacctccccacttactcagcagagccactgccaggctgggcacactgggycagatggcactggatcccagggctgccaggagcagataagcaggatgtcggggggatgacagagcacctgccaggatgccctttttgaacctggcccaaggccaggctgaagcaggagagagaacctaccagtaagacagtgtagggcggcctacccagggcgctaagctctgactgtctcctggcttagtctttgaacaacttcccaataaaaacactttaaactgtcatttaatgagtgtttactatgtgccaggagcttcaggtacatcatccatgagtacatt

SEQ ID NO: 103107 - DNA, 540 bp, Homo sapiens
aactctggctggaggcaggtggcggcttctaagacctctctgctgaccaccttcccccaggcattttgacccctcattccctatcaggcagcccaggacactgtggtctaagcacttcaatttagggatggggatgctgagttgcagagaaaatgcggacctacccaaggtcacccagggagccagagcgagagcagactctgcacctccccacttactcagcagagccactgccaggctgggcacactgggtcagatggcactggatcccagggctgccaggagcagataagcaggatgtcggggggaygacagagcacctgccaggatgccctttttgaacctggcccaaggccaggctgaagcaggagagagaacctaccagtaagacagtgtagggcggcctacccagggcgctaagctctgactgtctcctggcttagtctttgaacaacttcccaataaaaacactttaaactgtcatttaatgagtgtttactatgtgccaggagcttcaggtacatcatccatgagtacatt

SEQ ID NO: 103108 - DNA, 632 bp, Homo sapiens
gcaccttaaagcctagattctgaactgacaatgatcacctttgcccacataccattgtctgaaagaagtcatgggctgaacccaaagtcaagaggctaggaggtttactctgccttctgtaggagtagctgcagtcatgtggcagagtgcttgggtccagagaaaggtgaaaaattaggaccagttctctaatacagcgtctcatatccacaaatggccactgcagtcaggtcatggtgcaagatrgctaaactcactttggacactttaaaaatgacaatattcctcctgattctaaagcaatacagaagtatagtgaaaaagtgtaaaggagaacatgagtattgccataattccatttcctcagacgacccctgttaggattttgctgcatgtccttgcaatatgcacatcaatttacatactcaaataaacataagcatatatttacgttaacaaaagtgggagcatactttatctggttttgtacactacatttttcactgaatctcattttttgagctttttcttgcatgattagatattcttttgaaaccaggctttttcatggctgtactgtattttaaagttgcactataaattacctagacctgcacactccaatgtggtag

SEQ ID NO: 103109 - DNA, 413 bp, Homo sapiens
gtgtgtgtgtgtgtgtgtgtgtgtgtgtgtgtgtgtgtgtgtggcttatgtgacgtcaatggaaaatagaggaagatgcaagggcatcatccatccccaagcatctttggactaattttaattatccttgaaaaaaggttttggattcagaagcagatgggactcctgaaagggcctttctgagagtatgggaawaagaattgctgcttctggggcccggatgaccacatgtggctcagagttggaaggacaccattttccttggctctgcacagaacccagcacctcaccagagttgcagtgactggaaacccatgcagcatcagtgagcgcgcatccctggcgagaacattccattctctcggtgctaatgaggatgctctaatagtctggttttggcagcatttgtagaa

SEQ ID NO: 103110 - DNA, 510 bp, Homo sapiens
atgagcagacagcaccaacaatgagcgattatttgtggagcacgcattacatttactcagcatcaccctggttactgggggacatgcacatagagtatggagcccacaggtagtaagtgctttattagagtttgttaagtaaacatgtaattacatagaagataaactaaagtttttattatttttatatgaaagttatcaaacatacagaaaagatgaaakatttttacagttaagacccataaacccatcactagattctacaattaacacttaatttaattctctttatcagaaatttacctgctactcatccatcaatctgacacttttgattgtataaaggtagattctacttgaggaaacatgatgtatacgcatgaaacaattactcagtattttctaggacaacgctaaatagtgagacagaggcacacgtctggatggagttaagaaggtgatcatccgtgaggaataatatgttcagagactgtgtcatggagggaagtg

SEQ ID NO: 103111 - DNA, 540 bp, Homo sapiens
tgctctctgtcaggcactgtcctaggagattcaagggtgatgaaggcagccctcatctctgcccacttgggatctatcacgtatggggaaaagacagataggacaccatcatcacatgagttattttgttgtaatagttacatgtgytactgagggatggtgagtgttttaagagtgtgtaacggaaagcccacttagagctgcctgagaggcagggtggccgtgagggaattagtcttatatttatattaaaacttagggaatgagtgtgagaattccaggggcattggaggttgaggtaacaaggttaagatgagttctcatttctgattatgagaatatctgcacagaagcatgccggtaaattcactctgtccaaaaggcaaatgcttactccagggtctccagcatagcctgccttgttcatgaatgagagggtggaagagctgctcctggaggttctgtctggggactggggttgtagggatttactccgatcaccagctgcttgtctttccaccctgagtgttctgtggagtc

SEQ ID NO: 103112 - DNA, 528 bp, Homo sapiens
agagattattttcgttaacaagtgccttctatccagatgacatttttctgctcccaaatctctcctgaattggagtcgtaccccgtactgtctctccatggaaagatcgggccctttctcttraagagtgagaaactgaaggcaggctactcagtcatctctcgagttggtgaccaaaatgtgcctgtccccacatggatttcttctagggggctggagcactgtccacctgcgggcactggaatctccaggagtttcttcttttgctcaccagacacagccccatcacatgagccacagcagcctcatgctagcttaggggataaaggcctgcaggctcttttccttatttttaaagcaaattgctctattccctctcatggcttcagcacgtgggtgttggggaggagttcggctgtgcaggtgtgggagctagacgcccagtgtggtgtctggggagggttgatggacagcagctctaacgtgcttagagagtcaaggctggctcggcctttggaaatccaaata

SEQ ID NO: 103113 - DNA, 594 bp, Homo sapiens
gtgctgttttgctactggaacactgaaaaacaaacattggacctgtgtgagtttataaaaaataagcaaaaattgcacagagttcaattatttttaaaaataagaatactgaaagataaggtttcctcaaagattagtgttatttacatgtatccaatatttggaatgcacagtgtaatacatttggcatggctatagttagaaacgtggagaaaatatttgctgtccataaactctcatttggttaaatggagaaatacaatatccttctttatttgttgtccgtgggtaattcttcagtgcatacagttacataaaaatcctaagtttttaaaattggytttgtctgaaattatacataggcaatcctcactttgcatggttctgatatttacaaaatttacttactactgttagttcattaaaatcagtccccacaaaacatggttgaaatttgtcatcaaggtgtattaatccatttttatactgctataaaaaaactgcctgaaacttggaaatttataaagaaaaaagctttaattgactcatagttctgcatggctagggaagcctcaggaaacttacaatcatggt

SEQ ID NO: 103114 - DNA, 559 bp, Homo sapiens
tgtacatacatataaatatgtcaaagggcacatatcccttgtttgtttgggtgatgatcatggataatggtaatgatggagggaggaaacaggtaattacaagaaatatcaactttattatattatcccaattacgtatataacaagatatttgaaaataaatggtcattaaaatgtttacacgcttacctcaaagtgttgggatatgagttgatctttacacaacacatttcctgtgtcatttagaatttgaaaaatgaaaaataatggtaaaaatattttaaaattgtctttgagatatatatttatatacacatatgcatgacatattagtatttttatttcaatatgagaagcctattaaacttttgtgatatatrccaaactaacaatcactactgattccttcttaagtaatttaagaaaaagcctttatttaaaaattccattgaaaaatcatctgtaaatatttggaagaaatgtcacaggcaatcatttgatttgcttatggtgtttgtccttctgtgcaaaaaaatattgactatcccatgtgagacac

SEQ ID NO: 103115 - DNA, 578 bp, Homo sapiens
atccattcaacttacctgaatgttcagtcacataattagaatgtaatattaactatagcttaagaaatatttctaagaaggtttcmacaatggaacacattactagctctgcaggaacaacaggattattaatcgctggcaggccagatgtaaattgtcatttttaaaaagaattgtggagaaaaaagacataaattcattcaaatcctcttgcctacgttttctgctttgtgcctgattgcttaggaaccacaacttcatagaactacaaattgtaacagcatatatatttttgttaaattctctcattcctttgtctctccagattcaaaaacttataatggttaaaggaataatgacaatactattactactaataaaaataacaatgataataataattgctgccagttaatgagaacctactgtgaaactgtaactctaatagttgtcatatttttactcttatagttttttttatttttactttaatagagcaatgctacaaagtgatttaatattacacatatagagaagcagatggtgactctccaatgtactatcctagtggggccagt

SEQ ID NO: 103116 - DNA, 578 bp, Homo sapiens
atccattcaacttacctgaatgttcagtcacataattagaatgtaatattaactatagcttaagaaatatttctaagaaggtttccacaatggaacacattactagctctgcaggaacaacaggattattaatcgctggcaggccagatgtaaattgtcatttttaaaaagaattgtggagaaaaaagacataaattcattcaaatcctcttgcctacgttttctgctttgtgcctgattgcttaggaaccacaacttcatagaactacaaattgtaacagcatatatatttttgttaaattctctcattcctttgtctctccagattcaaaaacttataatggttaaaggaataatgacaatactattactactaataaaaataacaatgataataataattgctgccagttaatgagaacctactgtgaaactgtaactctaatagttgtcatatttttactcttatagttttttttatttttactttaatagagcaatgctacaaagtgatttaatattacacatatagakaagcagatggtgactctccaatgtactatcctagtggggccagt

SEQ ID NO: 103117 - DNA, 583 bp, Homo sapiens
caggacaacagtttggtctttaattgtaaagactatttcctgccatgaaagtgaggccttggttaattttctttcactratgtacctactcttttatttcatcagaatttatagaggaaaaatgaagttttatattgcagttatatcaaataagggatttcagttcatatgtggatgcaaggatcataacttactattttaggaccctatttctgtttatataacagaagaaatgagcacaactaaaagtgtttgaaaccacacattgccgtgactaaaagaaatatatcatttgaaaaaataataaatcaatgtttacactgaagattttatatttgctaacttaaagaagatcctaaatattgatgatgggctgattgggcttcaatatacaaacttcaacatattgggcttcaacatataaattaaattgcctaagaactcaaaggaccttgtcatacaattcaggtgtttttcaaacactatatactttcgtacaataatccattactcaaaagaagacaattgacacaaaagcaatgtaaacaaataaaaatagaacaatgatttcaaagaaggggta

SEQ ID NO: 103118 - DNA, 594 bp, Homo sapiens
aaaagacataatcttggatttttattgttgtataatattccatgttataaatgtaccacattttctttatctaatatgtcatcgaggggcatttaggttgattccatgtctttgctattgtaaacagtgctgcaatgaagatttgcatgcatgagtctttatagtagaatggtttatattcctttgggtatatactcagtaatgggatttctgggttgaatgacagttctgcttatagctctttcaggaattgcaatactgttctccacaatggttgaactaattttgaactaattttacactcccaccaactgtgtataagtgttctgttttctctgtaacctcacgagcatctgtgatttttgattttttaaataatagtcattctgactgatgtgagatggtatctcattgtggttttgatttgcatttctctaatgatcagtgatttcagctttttctcatatgcttgttggcgtgtatttrtttttcttttaaaaagtgtctactcatttactttgcccactttttaatgaggttgttcatttatttctagtaaatttcttaacttctttatagattctggatattaga

SEQ ID NO: 103119 - DNA, 594 bp, Homo sapiens
aaaagacataatcttggatttttattgttgtataatattccatgttataaatgtaccacattttctttatctaatatgtcatcgaggggcatttaggttgattccatgtctttgctattgtaaacagtgctgcaatgaagatttgcatgcatgagtctttatagtagaatggtttatattcctttgggtatatactcagtaatgggatttctgggttgaatgacagttctgcttatagctctttcaggaattgcaatactgttctccacaatggttgaactaattttgaactaattttacactcccaccaactgtgtataagtgttctgttttctctgtaacctcacgagcatctgtgatttttgattttttaaataatagtcattctgactgatgtgagatggtatctcattgtggttttgatttgcatttctctaatgatcagtgatttcagctttttctcatatgcttgttggcgtgtatttatttttcttttaaaaagtgtctactcatttactttgcccrctttttaatgaggttgttcatttatttctagtaaatttcttaacttctttatagattctggatattaga

SEQ ID NO: 103120 - DNA, 620 bp, Homo sapiens
gactctgtaattagagagcataaaaaatatgtttgaacataagtttgaaacagcataatctagcggtaatataacagccagtaccagaagacgtgactttgaaaaaaagtatgtgacttttaaaatacacactatgaaattggttgaattaagacatattttaagctattttttgtgtagaggtaaaaatagaaatttaaaatatggaaattaaaaagtctgattttcctcctaggtatattatttctctagctaacattatatttcatggatttttttctctgtcatgttggcatagattcatattcctgttaactgtataaattataatgtaatgttcttttttaaaaaaaattgtgtcagggtggttgcttttgtgcccagagcaatatgacaagtgtatggccaaataagctaaacaaacaagaaattaaaaacatgaatctgatcaagaacaattttagaagagattttaatacattttactgagttatacatgwttccaaatataataggattataacacataaagtaaggctctaaaaagttaaaattaaaccattgctatgcatagtatattgtgcatgccattataatggaaaaaaagcaaacaactcctc

SEQ ID NO: 103121 - DNA, 514 bp, Homo sapiens
ctgatgttcaatgaacacttcaatcttcacactcgggccagtttttgtttttggttattgttcaaaaattaatttttcatcaattataactaatcaaatggttattgtttctttgtctttgtctcttatttccatactttgtatttaattatccacctgtgtcagcacaatcatcactgtatgtagtaaactctttgatttttaaatttttattcattttttaaaatatttttttgagatggaatcgtgctctgtcaccargcaggagtgcattggcgtgatctctgctcactgcaacctctgcctcctgggttcaagcgattcttctgcctcagccttccaagtagctgggattacaggtgcctgccaccatgctcagctaatttttgtatttttagtatagatggggtttcaccatgttggccaggctggtctcaaactcctgacctcaagtgatttgcccacctcggcttcccaaagtgctgggattacaggtgtgagccaccatacccgg

SEQ ID NO: 103122 - DNA, 514 bp, Homo sapiens
ctgatgttcaatgaacacttcaatcttcacactcgggccagtttttgtttttggttattgttcaaaaattaatttttcatcaattataactaatcaaatggttattgtttctttgtctttgtctcttatttccatactttgtatttaattatccacctgtgtcagcacaatcatcactgtatgtagtaaactctttgatttttaaatttttattcattttttaaaatatttttttgagatggaatcgtgctctgtcaccaggcaggagtgcattggcgtgatctctgctcactgcaacctctgcctcctgggttcaagcgattcttctgcctcagccttccaagtagctgggattacaggtgcctgccaccatgctcagctaatttttgtatttttagtatagatggggtttcaccatgttggccakgctggtctcaaactcctgacctcaagtgatttgcccacctcggcttcccaaagtgctgggattacaggtgtgagccaccatacccgg

SEQ ID NO: 103123 - DNA, 588 bp, Homo sapiens
ggattagcatcaagagatgagatagaacaatcccagggaatatcttggatcaggagcaaaatcacaaagttgcaaacagtggcctgatgttgttttgtttggcctcaaggtatttwaaaaataaatgaactagttggcaccattaatgtattataaataccccaaagacagagattctgaattctaagagccacggtattcttgaggataggagcctgtgttcttgcttggatacagcattggaactgagtaaggtctgcactaagatggtcaagcaattttggggttaccataaatcctagagagacttccgtttatttcacgagactaagttctcattactcatttgcctagccattgtaggaatttgagtttgtaactcctgatgaagagcctgctgaaatcatgaatggatcagaattacctgctgagtttaccataccactctttggctaggttataccccaaataccctttgcatttgttcagtctgttgcttgtacataagctaaatctaaaggcaaccagctgggcacagtggctcatgtctgtaatcttgacattttgggaggccaaggtaggaggttt

SEQ ID NO: 103124 - DNA, 356 bp, Homo sapiens
gtagcaaggcatagtatttgaatggctacctttcattttaactctacttcctaaattcaaaattggatttgggtttgtttcaagttgttcacaatttactaacgaaatgtgcatctctcattcttcccccaaaagaaagaagtcatccactccagctacatataagtctccaatttctatacgtgaaaaccgaaataccactcattgaaaaaaaaatgtacagagaattggcaggctgcatgtttatgtraaccttcagaaaacatggaaacacgcagccccaactcaccaggaaaatcaacacttctgatcaaactattttgtgacattttatgtcttttatacatttcacttca

SEQ ID NO: 103125 - DNA, 356 bp, Homo sapiens
gtagcaaggcatagtatttgaatggctacctttcattttaactctacttcctaaattcaaaattggatttgggtttgtttcaagttgttcacaatttactaacgaaatgtgcatctctcattcttcccccaaaagaaagaagtcatccactccagctacatataagtctccaatttctatacgtgaaaaccgaaataccactcattgaaaaaaaaatgtacagagaattggcaggctgcatgtttatgtaaaccttcagaaaacatggaaacacgcagccccaactcaccaggaaaatcaacacttstgatcaaactattttgtgacattttatgtcttttatacatttcacttca

SEQ ID NO: 103126 - DNA, 582 bp, Homo sapiens
ttggccaaaacaaaggggctactggtcccatgcaagtctgaatttcaatagggcagtcattaaatgttaaagttccaaaatgacctcctttgactccatgtctcatgtccagggtacgcttgcatagctatcttggatagctctgctcttgtggttttgcaggttacagaccccctcctggctggtcctcggctttagtgatgagttttttkattatgaatttaatatttttccttgttataggtctattcatattttttatttcttcttgagtgagtttcagtagttcatgtctttctggaaatacttctcattaggttatttaaatttagggcatacggtttatgaatttatttaaacacaatttttaataaagagatcatttatttttattttttcttttttgtgaggatttttattagtatgtttccttttaaaattttttttattatactttcagttttagggtacatgtgtacaatgtgcaggtttgttacatatgtatacatgtgccatgttggtgtgctacacccattaactcatcatttacattaggtatatctcctaatgctatcccccccc

SEQ ID NO: 103127 - DNA, 589 bp, Homo sapiens
ataataaaatgttataattaaaataacattaaattatgttccttttggtgttaaggaacaatatgcaaaatatgtaaatctattgtttaagtyatgtaaaattatacatatatactctgttttctatatactctctgtatatatataaaacacacacgtacctgtgttttgtataaaatgttttgccctctttatttaatgtgatagaaatttcttccaaatatttaggataaatacatagaattggaaatagttcacccatcagtaatttattttttatttttattattttttatttttttcacccatcagtaatttttaaaatcctagcatcaattagagacatgcacaatcatataggcttctgatttctcaaccagacaaaacatcaaatttgagggtgtgccagcagaaaaactgacatggatctctgaacactaagtaacaggaacctagtctaactgagctttgggcaggccagcaaatgataataaatcacgttttccttaacttgtaatttaaatcatttgagttaaatcaaattcaccaaagaagaatatatctagtgcaagacaaagaaacagaatga

SEQ ID NO: 103128 - DNA, 607 bp, Homo sapiens
tctaactgtaagtgtacacttaaaaatgttgacatttagtttgcrttgattttcccctacaaagtaggaatgatatgtaacagctttgaagcccacatcatagggattttgtaaatgacaaatcacatgtttgtaaatctattttgaaaagatgagatatgtatttctacagagaaatcttaagtcttctggagagtaaatgtttaaaaaatcttctaaaaatctgtgcctttattacctctttgtgaatgattctaccctccatccaatcacttaagccaaaaatatgggaatccagcaccaacttttaaaatccagtttagtggtactttgacagcgcctacactgagactctgagagaccaacataacgagttaggcaacattgtcttccttaaagattctcaaggtattctggacctaccagctttttacattttgtatcttattcattgacacgaatggtaaaacacaagctgagcccattccataacgtgtttgggacgaaaagtctaatgaaaaataatttgaacatggtccactatgaatttcagagttgtttgatagatgatggggagggggacagtgaaagttgaattgaagagata

SEQ ID NO: 103129 - DNA, 607 bp, Homo sapiens
tctaactgtaagtgtacacttaaaaatgttgacatttagtttgcgttgattttcccctacaaagtaggaatgatatgtaacagctttgaagcccacatcatagggattttgtaaatgacaaatcacatgtttgtaaatctattttgaaaagatgagatatgtatttctacagagaaatcttaagtcttctggagagtaaatgtttaaaaaatcttctaaaaatctgtgcctttattacctctttgtgaatgattctaccctccatccaatcacttaagccaaaaatatgggaatccagcaccaacttttaaaatccagtttagtggtactttgacagcgcctacactgagactctgagagaccaacataaygagttaggcaacattgtcttccttaaagattctcaaggtattctggacctaccagctttttacattttgtatcttattcattgacacgaatggtaaaacacaagctgagcccattccataacgtgtttgggacgaaaagtctaatgaaaaataatttgaacatggtccactatgaatttcagagttgtttgatagatgatggggagggggacagtgaaagttgaattgaagagata

SEQ ID NO: 103130 - DNA, 521 bp, Homo sapiens
ctcattaacattatatacaatttattcatgttggtccatcgtcttattctctttcccactttgaatccctgggaaagcaagaagatgcaatagaagagcaaaatctgggtgaacgtgatggagaaagcctgcttttaatttctagtgattacttttaatatattttgaatgaattttgtttaaactgctatggtactctcaaacacggccattggattaaattatttcaaaaaattaaaagcctactaaaccctggtactamaaatgtgttaaaaaggacaagacagatgaaggagaaggttcttttttttcttttttttttaattgtgtttgatgttcttggctttggaatatttcagttaggttattaagcatctgatttaacctttcaaattacatgcctatttcagaaagttgaacactctcagcaacctgctcccagaagtcagaggtttaatccaacagttaccagaaatgctcttaaactttctgcttccaggtcaggaagtttttggcaggcc

SEQ ID NO: 103131 - DNA, 596 bp, Homo sapiens
cttctgccatgtaagatgacatattcttaggtttgagggcctaagatatatgggacatagctctacattctgtgaccattctgaaaggtccattcatgtactttccaccctccagatcttattgtcacaattttctagcctaattctttcccaggtcctgatcagctaacaacccaccagccagtccccatttataagtacagatccatactcagcctacctgtatttacacatgaagtagataatacagtgtcctcccccaacccggtcctttaccactatatttcagggcccccttgagtggagcagtaaggcagcagttttctaatttcagctcgtaccaacatgccatgcagattggtcaatgatgcaggtccttgattcctccttgtctgcctctttcattaactggccacagggaactccctatgagggygtaaggacggctggaggaaggtaccaggagcaggtactgtgggcttctgggccacctgcttgtgatagttcatggtgccttctgggctgtttcagcctggtctcatacatgatcgcttctatttggaatgctactgtgcatgtttaattatatgatttga

SEQ ID NO: 103132 - DNA, 550 bp, Homo sapiens
agtttatagtttaaccttgaaacaagaataataatagtccctccctaaacctcatcccctcctcgttcaggggttgaaaccacccttgtaatactaatgaaaggacacaaaactgaaattatgaaagaggcctgaattctcctaaaatgtagctatagtttctataatcccttactgctcaaaagtcatgtggccagaggtcacaagatttgtgactcgcctatatatagataatatagatgatagtactgttgtagaacctcaggttggtcttctgagatgattttcagactggcctcacctggactcaygactcaaccagtcctgtgacctcccatccagaggcagactcagtgcacagttttccacacttttataattgcatcccccccaaccaatcagcagcatccattccctagtcccatgcccaccaaactttccttgaaaaaccctgacctccaagacttcagggaaactcattgagtaataactccagttctcccacatggctaatctcatgttactgaaactcttctttactgcaatacca

SEQ ID NO: 103133 - DNA, 596 bp, Homo sapiens
gctgcataaaaacaattattataaaagcgtgttgattgggttataacatataaagatataacttgtatgaaaattacagtacaaaggggtgaaaaacatgaaatgaagttggaataatgtttgtatgccattgaaattaaattagtattttatctgaacaaattttttctaaattaagatgctagttgtaaattacaaggcaatggctaaataaataacacaaaaaatagtaaaaaggaacaatagcaaatataaaagatacagcagaaaatatctaacaaaaaaggagtgagaaatccaagaatggagaaacaaaaatgacatatgatatgtagaaaacaaatattattaaataaatggccaatatatgttctaccttattaataattgcattaaatgaaaataaacacatgaatcaaaatgtgtaggttgacaggataaattttttwaaaataattatatgctgtatacaaaggatatattctaaattgaagacactaataagtttaaaataaaaaggtgaaaaaggtataccatgaaactggtaaacaaaacaaggatagaatggtttcactaacatcaaatgaaatacactc

SEQ ID NO: 103134 - DNA, 510 bp, Homo sapiens
attacaggtaactatattttaaaagaactcactattactgtttatgtatctactgatttgaaagtgaaaatgtaaaaatgtttttatcaacatcaccaagatgtttttctacaaattctaactgaattgtattctactctataaactgatagacctttgctttagaaacttatgtggaaataccaatccagagaaatcctgtctccctatctcccacctgggactctttagaacctttagtattcacttcaaaacgtctgatatgggaattatagtgtggtgttcttkaacttttaatatcacagatcccataatttggagcatcatgtaacattttgtagagctactattcctcagaacacaatttgagaaatgttctaatagagtcattttccacaaataggaaagtcctacaaatattattatactaaatcataatgaaaactagtctgatttgatgtattaattataaagtagtttagattactttaacttttggtgattattgcc

SEQ ID NO: 103135 - DNA, 615 bp, Homo sapiens
aacccttacattgcaaaatgaagattcagttagacattatttatggctatatgcatgttgatggactttaagcaactatataaacatatatgataaaacaatagaatattaagaaatattaatcaagttaacagaacttacatatgtacttcatatatgaaaattagtcttgaacatagtccttttagaaatgatatatttattccagtaatgttatcattgctcaaaacattttagagcacacctgatgaaattgcttttagactgggcatgtaaaccacacagtaaacttggtgatattactcaatggtcactcctagtttttgatcagaagtgatattaaccaacctagtcatccatttcattcaccagatgaatcaccaaattacttttgacagttttcaaaaatgcattttacactcagatgaaattacagtaccaatgaagatcttcaaagtgaatgtcatgcaagcatgaagcagggataggaggagtgaatgggaaagagcaagartttcagattgagatcaagttataggtaaatagaaaatgaccaatgaccctaaaaaatgtgaaaaaacacttagggccatgagacctctataataaacatgc

SEQ ID NO: 103136 - DNA, 646 bp, Homo sapiens
gattccagttgagtacttggtctggatcagctcttggtctgataagattatcttttacatgggactttcctactcataaggatcaagataatcaagacttgtttgaacaagggataagtgacaaacatcgaactcaccgacttcatctctcttaatgtgggacattctcaagataaaattttgagagtggaaagttggaaaaacaaatgttttggtcagagagtgaagggaaaggaaaaagaaaaaagacacttagttctgggaaacaatgttatccctatgtgaaataaagaagtaaacagacccatataagaagctgaataaaaagttataaacccagccgaaacagtcttaaaagtayacagaaacaataataaaaaaaaataccagaggcttttgatgtttcttgttgagaaaaagaccataacaggaaaatactgttaaagacttgtgaaatttaaaagctaagaagagaaagggttttggagatcatacggtgaaaatattaatcatcactagactctaatgtatcagaaacatcaactgcagcttcaggtaaagaacctgcttccagtggtcctccagctgaaggaaaaaaatattcccaaagacacaggagccaactgaaagagttccccatggccaa

SEQ ID NO: 103137 - DNA, 668 bp, Homo sapiens
tctgtggttcctatatttggatgttagcttttttggtcatattagggaacttatcatccattatttctttaaatatgctttgtgacccttgtattcctcctctctgtatttaattccttttactcatggcttgggtctcttgatggtgtaccaacattcccataaattttccttcttccattttttttttctttttgctcctctgcttggataatttcaaatgttctgtcttcacactcactgattcttcagtgtgatttcactggctgttgaaamtttctattgcattttttcagttcagtcattatattcttcttctctatgatttatttttggggttttaaaatcatttctatttctttctcaaacttctcattttgttcaagtactgttttccaaattttactttttgcccatatattcttggagttcattgaattattttacggagttattctgaattatttttctgtcatttcttagatatccctttctttgggcgtcattgctggagcatttttggtttctttttgagatgccatgattccttgagtttttgtaaacctgtgtccttgcattggtgtttgtgcatttgtggaggcagccaccttttctggcctttacaagtgttctttgacagagatagacctgtggatgggtgcagaatt

SEQ ID NO: 103138 - DNA, 517 bp, Homo sapiens
ggaaacagcccaaatatccatcaactggttaatggatatataaaatgtgatatggccatacaatggaatattggtggtagaaggaaatgaagtactaatacatgctacagcatagrtgaatcttgaacacattatgctaaatgagaagctagtcacaaagaccacatattctatgattccatttatatggcatgttcagaacacacaaaaatccatagagacaaagttgattagatgttgcctgggactaagggttgtgggaaatagggagtgactgctaatgggtagagagtttcttttgggagtgacaaaaatgttctaaaattgactgtggtgatggttgtacaactctatgaatatactaaaaataattgagttagatactttgaatgggagacatatggtaagtgaattatatcttaataaagctgttaaaataaaaccagttttctttaagctttgaaaatggagaacaattgccattcctctcaatgagcaaatgccttggaaaggagct

SEQ ID NO: 103139 - DNA, 580 bp, Homo sapiens
tgtgttggagcagatgctcctggtgctccctaagctccttggccttctgctgccactgaacgcagcccactcttttgtctttgcctgggtctttgtgcgcctctccaggcagcctgtgagccatagggccaggagccctgtcttattgtctccatagccccaaggcccagtgcagggctagacgtggcagtttttattggattcagctactgactggtcccttccttggcttgctcttctcctctccagcccccttcacttgctcaagtttcaggtttcaggctgactctgtctctccttttcacacttaggtccccagacatttctttgtcttgttctgaattaacccttcctytttcgagggaagctcggggaggggaagtgccagctttctcttggctggctagcaaagcttagatgaaaggccagaaaaaggtatccaaactctcagcaattgttttcctgcttttattattctttattcctcaggctaggcccctccttccctccttgctttctctgtcttgcattgtcacccaaccatactcccttcccagaatgtgacagactcctcacacct

SEQ ID NO: 103140 - DNA, 563 bp, Homo sapiens
aaggacgaaagtgcccaagctcataaaatacgacaggcagagttgaagcttcctagtgtctaatgcccattccactcatttatgctaatgttcatgttttggtcattagctcaagttcaatcaagaagagcatcacctaacaaggtttctattttacagttaatctttgggaaatggattctagaaaataggtcagtggttatatttgatccaattaacaatttaaaaaggcaaaattgaagaatgaaatatggaaatcaaagcactcttattcttttgatttgactctttcgttgtygcataggaaaaccagcattgtttgtactgttcttatactttgggtttgtttatctgtgtcccctttatctatttcctaatggtacagacacattttaggatttttttaaattagttgttaaaaatggacagaaaagatcagtgagggagtaaatcaagaatggcaatcttaaaacctgctctgagaacagaatgtttacttgacaaaatatgtggcttttgaactctttgaattaccaaagcatcataaacaaaatgtttgtagt

SEQ ID NO: 103141 - DNA, 464 bp, Homo sapiens
actccctagtttctcgggaacttcgatgatttctgtatgcataagtttaagcaacaaattttaaattttcaacttgtagtatccgatatatgactaacttacaacttaaacaaaattaaaaggccaaacatctaaatagatatttctccaaataaaatgggcaaacgcccaaaaagcacatgggacagatactcatattcagtgattcagaaaatgcatttcttttttttattatactttaagttctagggtccatgtgcatgatgagttaatgggtgcagaaaatgcatttcaaatccaaaatgrgatatcatatttcacacacagatgaatggcaataaattttcaaaagcaggaaataacaagtgttggagaggatgtagataaattggagccctgatacaatgttagttggaatgaacaatttaagaaatctatttgacaaatccacaaaaagttacagt

SEQ ID NO: 103142 - DNA, 538 bp, Homo sapiens
gtgtactcaatgtttagctcctacttataataatgaaaacatgcagtatttggttttctgttcctgcgttagtttgctaaggacaatggtttccagctgcatccatgttgctgcaaaggacatgatttcattcttttttatggctgcatagtattccatgatatgtgtcacattttctttattcagtccactgttgatgggcatttagattgattccatgtctttgctattgtgaatagtgctgtgatgaacatatgcatgcatgtgtctttgtggtagaatgatttatattcctttgggtacatatacagtaaygagattggtgggctgaatggtattctttgaggatctccaaactgctctccacattggctgaactgacttatactctaatcagcagaatcagcagtgtataagcattctcttttctctgcaacctcaccaacatctgttatttttcactttttaatactaaccattctgactggcatgagatgctatgtcatttcggttttgatttgcaacatgattagccatg

SEQ ID NO: 103143 - DNA, 538 bp, Homo sapiens
gtgtactcaatgtttagctcctacttataataatgaaaacatgcagtatttggttttctgttcctgcgttagtttgctaaggacaatggtttccagctgcatccatgttgctgcaaaggacatgatttcattcttttttatggctgcatagtattccatgatatgtgtcacattttctttattcagtccactgttgatgggcatttagattgattccatgtctttgctattgtgaatagtgctgtgatgaacatatgcatgcatgtgtctttgtggtagaatgatttatattcctttgggtacatatacagtaacgagattggtgggctgaatggtattctttgaggatctccaaactgctctccacattggctgaactgacttatactctaatcagcagaatcagcagtgtataagcattctcttttctctgcaacctcaccaacatctgttatttttcactttttaatactaaccattctgactggcatgagatgcyatgtcatttcggttttgatttgcaacatgattagccatg

SEQ ID NO: 103144 - DNA, 538 bp, Homo sapiens
gtgtactcaatgtttagctcctacttataataatgaaaacatgcagtatttggttttctgttcctgcgttagtttgctaaggacaatggtttccagctgcatccatgttgctgcaaaggacatgatttcattcttttttatggctgcatagtattccatgatatgtgtcacattttctttattcagtccactgttgatgggcatttagattgattccatgtctttgctattgtgaatagtgctgtgatgaacatatgcatgcatgtgtctttgtggtagaatgatttatattcctttgggtacatatacagtaacgagattggtgggctgaatggtattctttgaggatctccaaactgctctccacattggctgaactgacttatactctaatcagcagaatcagcagtgtataagcattctcttttctctgcaacctcaccaacatctgttatttttcactttttaatactaaccattctgactggcatgagatgctatstcatttcggttttgatttgcaacatgattagccatg

SEQ ID NO: 103145 - DNA, 593 bp, Homo sapiens
tttgcacacacttttttcactctgtggcttcttgttcactcatttagtagtacactttgagacataagttcctaattttaagatagtcaaagttatcaacctaatcttttaccattagcacttttcatatccaatttaaaaagctgagtcacaaatataaataagaaaatgatgggccagcttaccctagtgattgcatgttatgcatgaatagactgtaaggtatgttggtaagttattgctgcaataaagctacataacaaaaaaaggagttgagtcacatggagatgtttgatgacataatatgatgtgatgaagacactcagcaggatccctattttacagaggccactgaaccttacatagattaggtcctcttaaaccaaatgggcacgttggggagggaagtgcatgtagctgtgcaggaggggaagaagatacacacctgcctcagcttacgtgccacctaagatctgatgagggtcaggaggtagctaagcatccaccctgtctcaccaggcgkcattctagcccttctgcccacaacttgcaaaggcaagactccaggctcattgctcactagaccaagtggg

SEQ ID NO: 103146 - DNA, 593 bp, Homo sapiens
tttgcacacacttttttcactctgtggcttcttgttcactcatttagtagtacactttgagacataagttcctaattttaagatagtcaaagttatcaacctaatcttttaccattagcacttttcatatccaatttaaaaagctgagtcacaaatataaataagaaaatgatgggccagcttaccctagtgattgcatgttatgcatgaatagactgtaaggtatgttggtaagttattgctgcaataaagctacataacaaaaaaaggagttgagtcacatggagatgtttgatgacataatatgatgtgatgaagacactcagcaggatccctattttacagaggccactgaaccttacatagattaggtcctcttaaaccaaatgggcacgttggggagggaagtgcatgtagctgtgcaggaggggaagaagatacacacctgcctcagcttacgtgccacctaagatctgatgagggtcaggaggtagctaagcatccaccctgtctcaccaggcgtcattctagcccttctgcccacaacttgcaraggcaagactccaggctcattgctcactagaccaagtggg

SEQ ID NO: 103147 - DNA, 560 bp, Homo sapiens
ttgcagtgtacatgtcttcttcctacatcagtggaactttgcactttaaaatgaagacactgaatattcagaccatgtcctgaccatatataaaaaagaattctgaactgcaatctgcagtgatcagtctgcaaagttcaacatcatccatttctgaggagctgattttaactatcatctctgtagcagccccaaaccaccaggacttgattaatgactgacagcttccctagtttcctcccctgctcctcaagcacgacgaaacacagaaagccagatatggacctccaaccaatcacacaggatgcttcattttcttgtgagccacctagggcttcccaacactagcaacctccaatgagggcacaccgggggccttttgttttcacactataaaactttccgccttctctgcctgcctttgaataccatatgcaagtgatgatgggtrcctcccttgctctagcaaacctggaataaacattctctctttgtcctcatttcagtggtcttcatttatttccacaataatgaaatgaatgcctcacgaataacagcag

SEQ ID NO: 103148 - DNA, 560 bp, Homo sapiens
ttgcagtgtacatgtcttcttcctacatcagtggaactttgcactttaaaatgaagacactgaatattcagaccatgtcctgaccatatataaaaaagaattctgaactgcaatctgcagtgatcagtctgcaaagttcaacatcatccatttctgaggagctgattttaactatcatctctgtagcagccccaaaccaccaggacttgattaatgactgacagcttccctagtttcctcccctgctcctcaagcacgacgaaacacagaaagccagatatggacctccaaccaatcacacaggatgcttcattttcttgtgagccacctagggcttcccaacactagcaacctccaatgagggcacaccgggggccttttgttttcacactataaaactttccgccttctctgcctgcctttgaataccatatgcaagtgatgatgggtgcctcccttgctctagcaaacctggaataaacattctctctttgtcctcatttcagtggtcttcrtttatttccacaataatgaaatgaatgcctcacgaataacagcag

SEQ ID NO: 103149 - DNA, 379 bp, Homo sapiens
gaattcatgattaagcccagccaacataaattcagaggaaggtaatttgactctcaacattttaaaaaaccctgmaaatatgctttatgattattaaaggtgcatctgcatccgacaaactccctctcgtctttctcatttttattaggcacgctgacttcatagcagcccctgtggttctcatcttccccagtggcttctgagacactgcaagccttcaaatcaaagcaggtctactcctctagaatgagaatgaggagatttatttcctgccaagtattcaggagtgcttgagaggacagagtgtgctttctcaagactcttcaacaaaatatctctaacaaacacgtggagaggttaaaagagaattatatatccg

SEQ ID NO: 103150 - DNA, 517 bp, Homo sapiens
aattccgtcatagattcaaaaagcccaaatagattttgtcttcttttccctcttatctttttctcttggcccatcttatgtaaagatgctgcccctggcttatatctttggtattctccttyatccagtggaatttgtgctgtgtcttaagagctcttctgaatcataagtagtgtattaattaattattgagcaagtgaaacaaattgcacatcagtgtattttataattattctccaattagatttggtttattgagttagaggaggaggagaatgggatttctggttagactagagggagcagcatgcagggttatgttctgaattgggaaatattttgagctttcttattaaataaaatcagtcattacatgtatccacagcagctggaagagtgtagagagaatgttattccaagaatcagatgccatgttccttatttgcaggatttccccaacttttggaaaggctgcagctgatatgcaagtgcgaaatgctgtctggagaagatatgc

SEQ ID NO: 103151 - DNA, 569 bp, Homo sapiens
  misc_feature (1)...(569): n = A,T,C or G
nnnnnnnnnnnagcgacgtcgacactagaggatccccatggcttttctcctcctgaaaaacaaacaaacaaaagggccaaagggctgtacgtccatgtgccaacagcggtggcgtgggagagacaccaaataccccttggaaagggccccagacattctgaattcaaaccatttattagctttggaaatgtaacatgcagtcagcttgccagttttaatcttggacttccattaaacacaccacaactgcatcataaaacagaaaagggaagaatttataaacaaataaaacagttawttggggcaataaaatagcagttccctcccaagtgtggaattggtgtgtctcaacccacagaactctgaaatctgttcttcaggggtctagcaactgcaagaaacaaatataaatcagagatttcaggagtactcctgggtccactattcttagctccacatccatgtcctcagccccctctgaactctcactttgcattggctacaaaaaaattgttccagggagatgaccagttccgagcccattagtctcctgatctctgttctatagc

SEQ ID NO: 103152 - DNA, 608 bp, Homo sapiens
  misc_feature (1)...(608): n = A,T,C or G
nnnnnnnnnnnagcgacgtcgacactagaggatccccatggcttttctcctcctgaaaaacaaacaaacaaaagggccaaagggctgtacgtccatgtgccaacagcggtggcgtgggagagacaccaaataccccttggaaagggccccagacattctgaattcaaaccatttattagctttggaaatgtaacatgcagtcagcttgccagttttaatcttggacttccattaaacacaccacaactgcatcataaaacagaaaagggaagaatttataaacaaataaaacagttatttggggcaataaaatagcagttccctcccaagtgtggaaytggtgtgtctcaacccacagaactctgaaatctgttcttcaggggtctagcaactgcaagaaacaaatataaatcagagatttcaggagtactcctgggtccactattcttagctccacatccatgtcctcagccccctctgaactctcactttgcattggctacaaaaaaattgttccagggagatgaccagttccgagcccattagtctcctgatctctgttctatagccagggttctgatcaaaaaacaaaaagctagaagatccat

SEQ ID NO: 103153 - DNA, 627 bp, Homo sapiens
gtttacattagggagctatattttccttatatttatttttaaatcatttgggctttccaataaaatagcattctcattttcttccctcttcccagattaatgcatttattattttaatgcatgaaggggtccacgtggcgctatggttggtggctgggatgctctggagtggtgcgcttggaaaacaatgtgttatttgcacttgagaaaatactttgttggctaagtgtctaggcactgaaacagtaacagttcatcaaaagacagttatcccagatacgcttccaagagtggcaatcagttttcctaaagagtcaaagaaaagagtgagaattgtgggaagtgggagactagaaggacagactcatttggaaacaggaagtggttcaaggaacttaggatttggaatataggaaaagaaatggggaaacatacccatgccttctcttctctgtagacatccaatttgaacctactccagattagtaggaagtaaaatcattatctgatgttctgtggccacatggaaaatacattggtagttgcaaccagactagagtcaacaytgagaaaccaatagaaccactaacttgggctggtgaggcacagctactggtcaaaacctgc

SEQ ID NO: 103154 - DNA, 610 bp, Homo sapiens
aaggactttttcctcagacttccttcttgcattggccctgagccttaacttctgcccacctctgcataagaccaacaaagttcagcagatgtcttctgcataaaagcgtctgtggtgctcaggtcttgctttcctctcttgcttccctctttctcttaggtttgggcctggtagttccttacagctttgtcagcttgttgacatttttgtgaaactttttaaattaatgttttattatatatttttagtttttttctgcaggagatttcatctgaaaaaacctgtctcaccatctctgaaaatagaacttctctagatattaaactgagttgacagttcccaagcatctgatagtcaactaaatcttaccgcaaggccctgcattaaatcagggctttcagatttagaacaaggagatcattttctgcttctcctatactggttgacarcgtatgttccaccatttttcattaataaaattgtatattagagattttataggaatcctgttttatctcagccctatactaggcagtacatgtgatggtataaaatatgatttatttccatataattctaaggaatttgggatgctgtttattttaaagaa

SEQ ID NO: 103155 - DNA, 610 bp, Homo sapiens
aaggactttttcctcagacttccttcttgcattggccctgagccttaacttctgcccacctctgcataagaccaacaaagttcagcagatgtcttctgcataaaagcgtctgtggtgctcaggtcttgctttcctctcttgcttccctctttctcttaggtttgggcctggtagttccttacagctttgtcagcttgttgacatttttgtgaaactttttaaattaatgttttattatatatttttagtttttttctgcaggagatttcatctgaaaaaacctgtctcaccatctctgaaaatagaacttctctagatattaaactgagttgacagttcccaagcatctgatagtcaactaaatcttaccgcaaggccctgcattaaatcagggctttcagatttagaacaaggagatcattttctgcttctcctatactggttgacaacgtatgttccacmatttttcattaataaaattgtatattagagattttataggaatcctgttttatctcagccctatactaggcagtacatgtgatggtataaaatatgatttatttccatataattctaaggaatttgggatgctgtttattttaaagaa

SEQ ID NO: 103156 - DNA, 627 bp, Homo sapiens
tcctgaatcccaatctgacccattgtcgcatggcatggcaacttttcaactttcagaaaaacattgaattaaggcccttgcactattatttcaaagcacacgagtgcaattggatatgattttgaacacagttaaaaacaacagaggcattcttgggaatcaagtttccaataagctaaagggcaatccattttacttggaaacggtttttatattcagttaaaaagtgatcyttatttttaacttacctaacaataatacatctagttcatagatggaagtgaatgccttcctgtctactactgagggaagctctcattttcacctgctcactaagaagcaaacatactttgaattcgcctcttcatgcatttacacttcaatcttctttttagctttcacgtttcaccttaaacagttttaaagtccagtccaatgttcagttgtatcttgagggtgaagttttgaaagcttttgtaactttcttctatgtaaagtcaacttaggtcttaggaaacactttgtttggtatttgtgagggaaagaaaacccaccaaaggcagctaaagccattaggaactccacatgcgagaagaggtgctgatgtgttttgttagagagctacta

SEQ ID NO: 103157 - DNA, 627 bp, Homo sapiens
tcctgaatcccaatctgacccattgtcgcatggcatggcaacttttcaactttcagaaaaacattgaattaaggcccttgcactattatttcaaagcacacgagtgcaattggatatgattttgaacacagttaaaaacaacagaggcattcttgggaatcaagtttccaataagctaaagggcaatccattttacttggaaacggtttttatattcagttaaaaagtgatctttatttttaacttacctaacaataatacatctagttcatagatggaagtgaatgccttcctgtctactactgagggaagctctcattttcacctgctcactaagaagcaaacatactttgaattcgcctcttcatgcatttacacttcaatcttctttttagctttcacgtttcaccttaaacagttttaaagtccagtccaatgytcagttgtatcttgagggtgaagttttgaaagcttttgtaactttcttctatgtaaagtcaacttaggtcttaggaaacactttgtttggtatttgtgagggaaagaaaacccaccaaaggcagctaaagccattaggaactccacatgcgagaagaggtgctgatgtgttttgttagagagctacta

SEQ ID NO: 103158 - DNA, 572 bp, Homo sapiens
taggtccatattttgtaattttgctaaagcatgaatttacatgtctccatgctgatatgaaactttgccagtgggtatcctattcaatcattcaatatccacatcttgaaataatttataacgcttcattttagtggactgtgtaagcattgcatagtaaaactcatattctatagtgatagattattgaattatcaatgcaggaaagtttagggattgatttctaagactgcacccattaaaatgacttttttatctgcacaaacattcatacgaattcatgttaagtttaagtgtattttccatctcaagaaaagtaacccttcattccaattctatgcactgtttttcaccttgtctccrattcaaatcctcctactcatttatttgagttatattattatatttatttaagctagaaaaatcctctgatgaaaatgttaaagcattcttcattacagttaaggattaaactggattttttcctttatatgtgagtaggatttatgtggaatgttgtagtgcaacagctccagttaaatgtgaaatagcattaagtcaaaaagatcatt

SEQ ID NO: 103159 - DNA, 534 bp, Homo sapiens
aatgacatgaaaattgagtattttacattttgcatcagttaaagaataaactatagcagtaagcctaacagtttgatgttgcctayctatatcttatcacatccatgacagcattgtttaatttattgcatacttgtataaccttatttttatgaatctgtattctatatagtatcctcttaaacttgtacagtataaaacactgtgtttctctgtgtgtcagcaccaccaagagctagaaaagacagcctttcctgacatttgattattcactaagactaatatggcatgtgatatggacaaacaaaggcaggctgagttcattccacatcacctttcaagacagaacaaagaatctgcctttttttaatcagctgaggaaatatggtatgatcatcactgaggaatatgaatgaagcaaaatgatgctatcttagcattctgaatctttacctagatgaatacatgaatatagctgcgaggaggaaacagataccagctctgtagttaaacctaactacaggttaaaattaa

SEQ ID NO: 103160 - DNA, 590 bp, Homo sapiens
cctagatttcagaagatatatggaaacacctggatgcccaggtagaaatttgctgcaggggcggggcccttgtgaagaacctctgctggggcagtgtggaagggaaatgtgaggtcagagtccccacacagagtctctactggggcactgctagtggagctgtgagaagagggccaccatcttccagaaaccaaaatggtagatccactgacagcttgcactgtatgcctggaaaagacactcagcgccaacccatgaaagcagccaggagggaggttgcaccctgcaaagccacaagggcggagctgcccatgaccatgagagcccactttttgcatcagcatgacctggatgtgagacytgagtcaaagatcattttggagctctaaaatttgactgctctgctggattttggaattgcatggggcctctaacccctttgttttggacttgcatggggcctatagcccctgtgttttggccaatttttcccatttggaatggctgtatttacctaatacctgtacccccattgcatctaagaagtaactaacttgcttttgatttcacaggctcataggcaggagaga

SEQ ID NO: 103161 - DNA, 649 bp, Homo sapiens
acaaacaaatggaaggatatcctgtgttcattaattggaacctttagtatttttaaaatgtctctatttcccaaagcgttctaaagactcaatgcaatttctaccaaaattcctatagcatttttacagaaacagaaaaatatattctttaaatatattcttttttttttttttttttttagacagaatttcgctctgtcrcccaggctggagtgcagtggcacaatcttggctcactgcaagctccacctcccgggttcatgccattctcctgcctcagcctcctgagtagctaggactacaggcgcccgccaccatgcccagctaattttttgtatttttagtagagacagggtttcaccgtgttagtcaggatggtctcaatctcctgaccttgtgatctgcccgcctcggcctcccaaagtgctgaaattacaggcgtgagccaccacacccagcagaaaaagatattctaaaattcatatggaaccacaaaagacaatgaatagccaaatgaatccagagaaggaagaacaaagttggaggcatcaaatgtactaatttcaaaatatattacaaagctacagtaatcaaaacagtatgttactggcataaagacagataggttaatgaaacagaaagggaccaa

SEQ ID NO: 103162 - DNA, 550 bp, Homo sapiens
actgcataacactagccagataaggctacagatatattcaggagacagtaagttattgagcaaccagtatgacatgtattgtcctaggaagataaatatgaataagataaattgtatgacctcaaggacttcaaaatatcattggaacaccaaataaaaaattacaaacaagtgtgaccaaagaggtatagaaaagctatagtgttagcatagaggatgataatacagattagctccctcgcagaggatcaagtaaggcctcctagaggagtaacagaaaacttgactcaaagtggctttagcaataatacttcacataacaagaagtcccaacatacaaaagccccrggctaggttaatctggcaattaattcagcattactttcatgatgttatcaaaagtgaaatatgaaggaagatgccagtaggtgctgtccaccctggtggaaaatgatatttttatcactgacattgttcagaatgcctggcatatggtgatcatcaaaaccagatagactttagtcaattttattattgtttttaaattctc

SEQ ID NO: 103163 - DNA, 550 bp, Homo sapiens
actgcataacactagccagataaggctacagatatattcaggagacagtaagttattgagcaaccagtatgacatgtattgtcctaggaagataaatatgaataagataaattgtatgacctcaaggacttcaaaatatcattggaacaccaaataaaaaattacaaacaagtgtgaccaaagaggtatagaaaagctatagtgttagcatagaggatgataatacagattagctccctcgcagaggatcaagtaaggcctcctagaggagtaacagaaaacttgactcaaagtggctttagcaataatacttcacataacaagaagtcccaacatacaaaagccccaggctaggttaatctggcaattaattcagcattamtttcatgatgttatcaaaagtgaaatatgaaggaagatgccagtaggtgctgtccaccctggtggaaaatgatatttttatcactgacattgttcagaatgcctggcatatggtgatcatcaaaaccagatagactttagtcaattttattattgtttttaaattctc

SEQ ID NO: 103164 - DNA, 516 bp, Homo sapiens
gacttctttgttgggaagtgggaagggggctgtcctgtgcgctgtagggtatttaacagcgtccctggcttctgccttctagataccattagcacttcctttataaccaagaatgtcttcagacatttccaaatgtcccctaagtgacaaaattgctactggctgagaaccactgtccatgcatcagagtcacctgaaggtttgttaaagcacasattgctgggcctcattcacagtttctgattcggttggtctggggtggggcctgagaacttgcatttctaagttcccaggtgatgctggcgctgatgatgctagttgggtactgaacttgagaactgcttctagaaagacagatggctctcaagcaggcttgtcagacactgctgcagaatgacacccgaggacatacagccatcttctgccttatttccaggttttaggtcccttctttttttttgcaattctttctaaagaagtgtaaggtgaaggcaattctacatagttataaaggtc

SEQ ID NO: 103165 - DNA, 607 bp, Homo sapiens
  misc_feature (1)...(607): n = A,T,C or G
tagctttatgatgattaagatgtttatcaacttattatatttcctactcaggtcattgtaaatgttgtgattaagtgggcatgtgttgcacgggtgtctcatgtaaacttattgttataaaatcaaacaacagtccaacagccrtatcagctcctttgtttcagcattctcttatgggtttttcagatgttaagaaaattagagtgattagcacaagaaagggcaaagactgcagctagaaatacttaaatgataattaaggaaagaatgaaaatgaagtggatgttgatgaatttcaagcaaagtcttaagtcagaggttagatggactggtaggagacctttgtgatcccccaacatttaatggttgaaacaaatctattctgttcaaacaggttgggatatttttaaagccagaaggcaaagatggcagtgagaaatctgaactggaatcaacaggggcaaattaatcaggttgaagattaacagagtcttggtttccttagcctgagcctgggtttgtgtttatatgagngggcacggctgcgggtcgaatggccaggactggaggagacatctctctgatgcttcgtcgcatggagcccaat

SEQ ID NO: 103166 - DNA, 607 bp, Homo sapiens
  misc_feature (1)...(607): n = A,T,C or G
tagctttatgatgattaagatgtttatcaacttattatatttcctactcaggtcattgtaaatgttgtgattaagtgggcatgtgttgcacgggtgtctcatgtaaacttattgttataaaatcaaacaacagtccaacagccgtatcagctyctttgtttcagcattctcttatgggtttttcagatgttaagaaaattagagtgattagcacaagaaagggcaaagactgcagctagaaatacttaaatgataattaaggaaagaatgaaaatgaagtggatgttgatgaatttcaagcaaagtcttaagtcagaggttagatggactggtaggagacctttgtgatcccccaacatttaatggttgaaacaaatctattctgttcaaacaggttgggatatttttaaagccagaaggcaaagatggcagtgagaaatctgaactggaatcaacaggggcaaattaatcaggttgaagattaacagagtcttggtttccttagcctgagcctgggtttgtgtttatatgagngggcacggctgcgggtcgaatggccaggactggaggagacatctctctgatgcttcgtcgcatggagcccaat

SEQ ID NO: 103167 - DNA, 607 bp, Homo sapiens
  misc_feature (1)...(607): n = A,T,C or G
tagctttatgatgattaagatgtttatcaacttattatatttcctactcaggtcattgtaaatgttgtgattaagtgggcatgtgttgcacgggtgtctcatgtaaacttattgttataaaatcaaacaacagtccaacagccgtatcagctcctttgtttcagcattctcttatgggtttttcagatgttaagaaaattagagtgattagcacaagaaagggcaaagactgcagctagaaatacttaaatgataattaaggaaagaatgaaaatgaagtggatgttgatgaatttcaagcaaagtcttaagtcagaggttagatggactggtaggagacctttstgatcccccaacatttaatggttgaaacaaatctattctgttcaaacaggttgggatatttttaaagccagaaggcaaagatggcagtgagaaatctgaactggaatcaacaggggcaaattaatcaggttgaagattaacagagtcttggtttccttagcctgagcctgggtttgtgtttatatgagngggcacggctgcgggtcgaatggccaggactggaggagacatctctctgatgcttcgtcgcatggagcccaat

SEQ ID NO: 103168 - DNA, 615 bp, Homo sapiens
ctaataatgacatgtcaaatgactactgattatctgatctgaatgttaaaaacaaaaatctgtattcttagatattaaagtaactgtttattccactcattttttcccactgcctcattagttttcatctattcaacctatattacataaaatttgtcatcaaattaacattaattacatccccccaatactcccctttattattcctctactcaatttcctgttacttgttcaaaactatagttgaattgacatttctagagtaccaagtatttaaggaacacttaattttagtggccagaagacatgtcagaaagagctgcttacaagagtaaataattataataaatgtcaagactttgaaaccttcattctaaatcaagtgagtaaaccttgaatctttattacagtgagattaaaacactaattttactttgtagaagtattacctatgaagttcccaggtttaggaatagttggcattaacatattaatcatagtaattaattacaaaataattggtgcggtgaaaatggaatgaattttasaaccagacatataatgggttcctttatatatctactgttcactttttggtgatttggcaaaattagt

SEQ ID NO: 103169 - DNA, 542 bp, Homo sapiens
ttctaccaatttatttttctgatgcatcatgcttgtttgattataagcacatctttattttctgtttgcaaattttatagtgtaattttagaagtagcctacatcaggcatctcaaaattatgaatggcttttaagctagtacatcgaagccatttcactttttttttcttctatttattcatttactaaaccactagagggaaataaagcacatcatccttttccatagtgaatgccaatgattgggttactagaccttatcaaggctctgactttcatatttattctagcagctatrctcttcttctctcacagtcaaagtaaaggcaagataatattccttcaattacatagttttcagtatgctaataacctttaatctcagctacattgttgagagctaaaacaagaataaagaaactctgggcatagacttatttccagatgtctgtgttggcaaatgaagaagacatctcatataatgtgccttgaaattgtttcaaatattttaagcaaaaaataatgtatatgtctactaatt

SEQ ID NO: 103170 - DNA, 625 bp, Homo sapiens
ctgtattggggctgtagtctccctaccactccctcattatgggctaaagtcggtgccctcaaaattcatatattgaaaccctaacccccagggacttcagaatattgrcagcctttggagatggggcttttaaataggtgataaagttaaaatcaggccatcagggtgggttctaatccaatgggactagaagaaatttggacacagacacacacagagggaagaccatgggggtatcatgagaggctggtgatcagcaacccgggaaagagagcttgggggaaatcagcccggctgacaccttgatcttaaccttccagcttccagagctgtgagagaataaacatttgctgtgtaagcccccgtctctggtgttttgttgtggcaccctagccaaccagtacttatacactgtctgcctttctgtctttctgtgtctgcctctgtctcttcatggcccccaccatggctccttgcctgtgtccctgcagtagctccctcttgccttggagacacacattctctctccagtcccccaaccactgcagtctgtcctccaccctccgcagggtgatgggtgattctagctggagccatggctttgtttgtctaaactccaaggtca

SEQ ID NO: 103171 - DNA, 571 bp, Homo sapiens
caggcactctgaaggctgagatgggaggattgcttaagcccagttggtcaggactgmcactgcacaccagcctgattgacaagagtgagaccctgtctcagaaataaataaataaagccattatttaagccactaagttttatgagaatttgttgcacttacctacttctcagaattgagaatattgaatgagacaaagtgaaagatatttgtaagtgatggggtgctacactgaatagattatcagtctccagtaccttgagggtgaggtaaagtgaaccatacaagccctgcgtgtaggagctgtgactgtgacccatgttagtaatgctctgtctggaggagggagagatcactaggagcagcggtgacctagcgagtcccaggcagcattaaagcttaaaacacaaacacagtgtacagctgcacaaaaatatttttctctttatattcttactccgtaagcttttttctatttttaaaattatttatttatttttaaactttttgtattaaaaatgaagggacaaacacacacattaacttaggtctactcagggtcagagttatc

SEQ ID NO: 103172 - DNA, 571 bp, Homo sapiens
caggcactctgaaggctgagatgggaggattgcttaagcccagttggtcaggactgccactgcacaccagcctgattgacaagagtgagaccctgtctcagaaataaataaataaagccattatttaagccactaagttttatgagaatttgttgcacttacctacttctcagaattgrgaatattgaatgagacaaagtgaaagatatttgtaagtgatggggtgctacactgaatagattatcagtctccagtaccttgagggtgaggtaaagtgaaccatacaagccctgcgtgtaggagctgtgactgtgacccatgttagtaatgctctgtctggaggagggagagatcactaggagcagcggtgacctagcgagtcccaggcagcattaaagcttaaaacacaaacacagtgtacagctgcacaaaaatatttttctctttatattcttactccgtaagcttttttctatttttaaaattatttatttatttttaaactttttgtattaaaaatgaagggacaaacacacacattaacttaggtctactcagggtcagagttatc

SEQ ID NO: 103173 - DNA, 571 bp, Homo sapiens
caggcactctgaaggctgagatgggaggattgcttaagcccagttggtcaggactgccactgcacaccagcctgattgacaagagtgagaccctgtctcagaaataaataaataaagccattatttaagccactaagttttatgagaatttgttgcacttacctacttctcagaattgagaatattgaatgagacaaagtgaaagatatttgtaagtgatggggtgctacactgaatagattatcagtctccagtaccttgagggtgaggtaaagtgaaccatacaagccctgcgtgtaggagctgtgactgtgacccatgttagtaatgctctgtctggaggagggagagatcactaggagcagcggtgacctagcgagtcccaggcagcattaaagcttaaaacacaaacacagtgtacagctgcacaaaaatatttttctctttatattcttactccgtaagcttttttctatttttaaaattatttatttatttttaaactttttgtattaaaaatgaagggacaaacacacacattaacytaggtctactcagggtcagagttatc

SEQ ID NO: 103174 - DNA, 574 bp, Homo sapiens
tattccataatatgcatattatgtaatttattctactatacttcctgattagcatttaaattgttgtcaggtttttcatcctcccacaacaaacagtgctataatttagagatgttagaattttcaggctttaaaagactgattcaaatttgaggtattggattaagtaatatactaaattataaaattattattaaaatacattgcaagctaatttctataagttccataaataatttcacacttytacaattaaagtaggggtttgtgtttcctcacagtattattagcattgaatttatttttattttgtattttgcctatctgatgagagaaaatattgccctatcattgacttaaattttactaaatacatattttgtcgtagattagctatttctatttcctcttctactgaaattcttgattcatttttctagtgaattaaaactattcatgattcataaaacctatttttctcacaaatgcggcttaaattttttcctcagaattaaaatatgtatattcgttaactcaccaaatatgatattttttctattttgcatcctatgtt

SEQ ID NO: 103175 - DNA, 574 bp, Homo sapiens
tattccataatatgcatattatgtaatttattctactatacttcctgattagcatttaaattgttgtcaggtttttcatcctcccacaacaaacagtgctataatttagagatgttagaattttcaggctttaaaagactgattcaaatttgaggtattggattaagtaatatactaaattataaaattattattaaaatacattgcaagctaatttctataagttccataaataatttcacacttctacaattaaagtaggggtttgtgtttcctcacagtattattagcattgaatttatttttattttgtattttgcctatctgatgagagaaaatattgccctatcattgacttaaattttactaaatacatattttgtygtagattagctatttctatttcctcttctactgaaattcttgattcatttttctagtgaattaaaactattcatgattcataaaacctatttttctcacaaatgcggcttaaattttttcctcagaattaaaatatgtatattcgttaactcaccaaatatgatattttttctattttgcatcctatgtt

SEQ ID NO: 103176 - DNA, 516 bp, Homo sapiens
ttttttgtatttgcaaacatctagaaataatccaaagttaataaacatagcaccatatttcattaattaatacattaataattgttatttttttctttttcaacttttagattctgggtctgcatgtgcagatattgggatattaggccttgaggattgcaaaggtatattgtatgatgctggggtttgaagtacaattgaacctctcaccaaggaagtacatatagtaaccaatargtagttttttaagatttttaaccctcgacctcctccttccctgcccccttttggattcctcagtgtgtattgttcctatatttatgtccatgtatacccaatggtataagagataatatgtggtatttagttttctgttcctgtgttagtttgcttgggataatggcctacagctacatccgcggtattgccaaagaaatagtttttttatggtagtgtagtattccatagtgtctgtgtatcacatcattgtctttatttaatccaccattgttgggt

SEQ ID NO: 103177 - DNA, 441 bp, Homo sapiens
ctattctcaatatatttcatgtatatagatgaaaaaaattcttctaattttttattttttgtgtgtgttatgtaattgctcctccatttccaccaagatgtctggatttgattactctggtacatagtaacaacgtggctatgtagctcctgtcaccaccactggacactacttacatctcacttactgaaatgttactgttagaaacagaagaatgaattytaaactgtttctgtttctttttgctcctgattttcttttgctttattaaagtcttcaaggaaaaatatgattatcttagcttacgttagatgtgtacatgcatgctgtatctcactttctcagactttccaagagtgttccagcatgtgcaagttccgtgctcatgaaaaacgtatactatgatggctttccaaaatatactgcccatgatctgaattc

SEQ ID NO: 103178 - DNA, 587 bp, Homo sapiens
tgtactaatttacatttgcactgacagtgtatgaggcctcccacttctccacatcctcactggcattttttattgcctgtcttttggatagaactcattttaactatggtgagatgacatcttattgtagttttgatttgcatttatctgataattaacaatgttaaacaccttttcatatacttgtttctcatttgcatgtattctttcagaaatacctatttggatcttttgcccattaaactttttgttgtttctatgtatatcttattatactgtctaggtcttcaaaactcgttttagttattattttgatatgttaaacatttagtctttctactcaagatatgagtagtttacccaccacaattactgtgtataacattctgcrtttgtctgtgtacttaatattaccagtgagttttgtacctttagaggatgtcttattactcattaatgtccttttctttcaaatgaactctcttcagcatttcttataggacagagtgagtgttgatgaaatctctcaccttttgctttctaggaaagtctatttctatctctccttcatgtttgaaagatatttt

SEQ ID NO: 103179 - DNA, 546 bp, Homo sapiens
caataatttgtgtcttcccacatgcttttcacatattccatgtcccaatctccctgtcttttatgccattagagaaaggggaagaccatgtaaatatctatttactaccacaccaacaaataatcactttatagcatccagaatcatacagtttataatctacatttaagaagtacaacaaaaacatattttttctttacctttattcattgtttytgtgtatcattttacaaatattcaaaaataggtcatttgttttactgttactaatattcaattaagagaagaaaataaattgggattggattattttgacaatattgtatatctacttcaacagggtaactggcgttttcaggattcaaagctacacaatcattatatggttatctagctgcatgtcactttatatatctgtcagctaaatcacatatataaatacaacatctagcatttgggaatattatgtggattcatgacacttcctgaaagaatctgaatctagaaaattatgaatgaattacaagcagaaaaatacattgtttt

SEQ ID NO: 103180 - DNA, 634 bp, Homo sapiens
gggaggtaagaaacttcctatcaggtatgatgctcactaccatggtgatgggatccatattccgaacctcaacatcacgcaatattttcatgtaacaaatctgcacttgtacycctgtatctaaaataaatgttgaaaaaagaagaaaaaaagaaattttgtctaacagactttaaaagaaccttcagaggaatcaagctgtcttatttgctgtgtgtcctcggacaattcacttagcctctctgggtcccaggttccctggctttagtagaagaagcggaattgatctatccagttccctagcatctctaaaattatgtgagcctagattctcaggtatataaaagtttaaaatataaaatataatagaatttcaaatatataatttaaagaaaagaaaatgcagaacaattatttttatggagaatcatctgtgcagtcttcatcacttctgacattgggagaaacttttccacatgcctagattctatgagactcaccagaagtcacgagatgctcttgttgactgaaaaatgcatgcaggggtcatcactgtgcctgtgaagggggagtatgtgttgacattacagatgtggagttgttcttaaaaatacaataaccaaaacagtaatat

SEQ ID NO: 103181 - DNA, 634 bp, Homo sapiens
gggaggtaagaaacttcctatcaggtatgatgctcactaccatggtgatgggatccatattccgaacctcaacatcacgcaatattttcatgtaacaaatctgcacttgtacccctgtatctaaaataaatgttgaaaaaagaagaaaaaaagaaattttgtctaacagactttaaaagaaccttcagaggaatcaagctgtcttatttgctgtgtgtcctcggacaattcacttagcctctctgggtcccaggttccctggctttagtagaagaagcggaattgatctatccagttccctagcatctctaaaattatgtgagcctagattctcagstatataaaagtttaaaatataaaatataatagaatttcaaatatataatttaaagaaaagaaaatgcagaacaattatttttatggagaatcatctgtgcagtcttcatcacttctgacattgggagaaacttttccacatgcctagattctatgagactcaccagaagtcacgagatgctcttgttgactgaaaaatgcatgcaggggtcatcactgtgcctgtgaagggggagtatgtgttgacattacagatgtggagttgttcttaaaaatacaataaccaaaacagtaatat

SEQ ID NO: 103182 - DNA, 634 bp, Homo sapiens
gggaggtaagaaacttcctatcaggtatgatgctcactaccatggtgatgggatccatattccgaacctcaacatcacgcaatattttcatgtaacaaatctgcacttgtacccctgtatctaaaataaatgttgaaaaaagaagaaaaaaagaaattttgtctaacagactttaaaagaaccttcagaggaatcaagctgtcttatttgctgtgtgtcctcggacaattcacttagcctctctgggtcccaggttccctggctttagtagaagaagcggaattgatctatccagttccctagcatctctaaaattatgtgagcctagattctcaggtatataaaagtttaaaatataaaatataataraatttcaaatatataatttaaagaaaagaaaatgcagaacaattatttttatggagaatcatctgtgcagtcttcatcacttctgacattgggagaaacttttccacatgcctagattctatgagactcaccagaagtcacgagatgctcttgttgactgaaaaatgcatgcaggggtcatcactgtgcctgtgaagggggagtatgtgttgacattacagatgtggagttgttcttaaaaatacaataaccaaaacagtaatat

SEQ ID NO: 103183 - DNA, 634 bp, Homo sapiens
gggaggtaagaaacttcctatcaggtatgatgctcactaccatggtgatgggatccatattccgaacctcaacatcacgcaatattttcatgtaacaaatctgcacttgtacccctgtatctaaaataaatgttgaaaaaagaagaaaaaaagaaattttgtctaacagactttaaaagaaccttcagaggaatcaagctgtcttatttgctgtgtgtcctcggacaattcacttagcctctctgggtcccaggttccctggctttagtagaagaagcggaattgatctatccagttccctagcatctctaaaattatgtgagcctagattctcaggtatataaaagtttaaaatataaaatataatagaatttcaaatayataatttaaagaaaagaaaatgcagaacaattatttttatggagaatcatctgtgcagtcttcatcacttctgacattgggagaaacttttccacatgcctagattctatgagactcaccagaagtcacgagatgctcttgttgactgaaaaatgcatgcaggggtcatcactgtgcctgtgaagggggagtatgtgttgacattacagatgtggagttgttcttaaaaatacaataaccaaaacagtaatat

SEQ ID NO: 103184 - DNA, 567 bp, Homo sapiens
gaaaaggatgagtctgggtgcttaaaataatatgaagagatactcaatgcatcggtaatcagagaaatgccagattaactatatttttctttcatttcatacccctgggattctttaggttcaaaaagcctaataaatccaagtgttggctaaggatggatggaaacagaaatccaagcgcacagaggtggggtaggaataaacccgggtatctgctttgacaacgatctggtcgtatctagtgaaaattactgactgatgtaccctagggcatggattaatgcaaagacacagtgacatagragatagtgttcaatgctgcattgagcagagtttgtgtagctcagagacgcaggcccaaggggtgtgtggctgagaagaatggtgtctgaaccaggtagaggctcactatgggacaatgcatcaccagcaaacaagaccagcccctgtcctgtggtagaagcacaaggcactgctgagaagccagtgaaggcctagcccaacactcttagtcatttaaaaatgtctaagtaggctgggggcagtggctcagtcctgtaatcccag

SEQ ID NO: 103185 - DNA, 620 bp, Homo sapiens
gcagggtgtggtggctcacgcctataatcccagcattttgggaggccaaggcaggtgggtcacttgagctcaggagttcgaaaccagcctaggcaacatggcgaaaccctgtctctacaaaaaaatacaaaaaattagccaggtgtggtggcagcacctgtggtcccagctacttgagaggctgagacaggaggatcacttgagccggaaggggacaggggacagagttttagtgagccaagatcgcaccactgtactccagcctgggtgacagagcgagactctgtctcaaacaacaataacaacaatgtttttaggtatttattaaatgtttatttaatggtggtgtggttgtgactaaaaggagtaatttctgttttttatgtagtaataatttctactttcccaraagcaggagcaacgtacattttggtagttacaaaagatagctgtggaaagtagaggtagttggtatatatttcgtctctctctctcacacacatatatgttcctgcaatacttgggtgaatctttgtggatttgttgagctagcctgatgctcaatctggctctgaatgccaggtttcccttgtatcagttagcagttgctgaataacaaa

SEQ ID NO: 103186 - DNA, 620 bp, Homo sapiens
gcagggtgtggtggctcacgcctataatcccagcattttgggaggccaaggcaggtgggtcacttgagctcaggagttcgaaaccagcctaggcaacatggcgaaaccctgtctctacaaaaaaatacaaaaaattagccaggtgtggtggcagcacctgtggtcccagctacttgagaggctgagacaggaggatcacttgagccggaaggggacaggggacagagttttagtgagccaagatcgcaccactgtactccagcctgggtgacagagcgagactctgtctcaaacaacaataacaacaatgtttttaggtatttattaaatgtttatttaatggtggtgtggttgtgactaaaaggagtaatttctgttttttatgtagtaataatttctactttcccaaaagcaggagcaacgtacattttgstagttacaaaagatagctgtggaaagtagaggtagttggtatatatttcgtctctctctctcacacacatatatgttcctgcaatacttgggtgaatctttgtggatttgttgagctagcctgatgctcaatctggctctgaatgccaggtttcccttgtatcagttagcagttgctgaataacaaa

SEQ ID NO: 103187 - DNA, 589 bp, Homo sapiens
acaatttacttctgaggccctggattagtcagaggtctccagagagggacaggactaataygatatatatatgtaaactccctttcatatatatgaaatatatattattatatattatatccatatatatatatatatatgaaagggagtttatgaagaagtattgactcacacaatcacaaggtgaagtcccacagtaggccatctgcaagctgaggagctaggaaaccagagtccaaaaacctcaaaagtagcctacagtgcagctttcagtttgtggccaaaggcctgagagcccctggagaaccactggtgtaagtccaagggtccaaaagctgatgaacttggagttcaatgttcgaggacaggaagcatccagcacaggagaaagatggagaccaaagacttagccagtctagcccttccaccttcctctgcctgcttttatcctagcctcactggcagctgattagatggtgtccacccagattgagaagttggtctgcatctcccggttcactgactcaaatgttcatttcctttatcgacatcctcgcagacacacccaggaacaatactttgcatcttt

SEQ ID NO: 103188 - DNA, 589 bp, Homo sapiens
acaatttacttctgaggccctggattagtcagaggtctccagagagggacaggactaatacgatatatatatgtaaactccctttcatatatatgaaatatatattattatatattatatccatatatatatatatatatgaaagggagtttatkaagaagtattgactcacacaatcacaaggtgaagtcccacagtaggccatctgcaagctgaggagctaggaaaccagagtccaaaaacctcaaaagtagcctacagtgcagctttcagtttgtggccaaaggcctgagagcccctggagaaccactggtgtaagtccaagggtccaaaagctgatgaacttggagttcaatgttcgaggacaggaagcatccagcacaggagaaagatggagaccaaagacttagccagtctagcccttccaccttcctctgcctgcttttatcctagcctcactggcagctgattagatggtgtccacccagattgagaagttggtctgcatctcccggttcactgactcaaatgttcatttcctttatcgacatcctcgcagacacacccaggaacaatactttgcatcttt

SEQ ID NO: 103189 - DNA, 589 bp, Homo sapiens
acaatttacttctgaggccctggattagtcagaggtctccagagagggacaggactaatacgatatatatatgtaaactccctttcatatatatgaaatatatattattatatattatatccatatatatatatatatatgaaagggagtttatgaagaagtattgactcacacaatcacaaggtgaagtcccacagtaggccatctgcaagctgaggagctaggaaaccagagtccaaaaacctcaaaagtagcctacagtgcagctttcagtttgtggccaaaggcctgagagcccmtggagaaccactggtgtaagtccaagggtccaaaagctgatgaacttggagttcaatgttcgaggacaggaagcatccagcacaggagaaagatggagaccaaagacttagccagtctagcccttccaccttcctctgcctgcttttatcctagcctcactggcagctgattagatggtgtccacccagattgagaagttggtctgcatctcccggttcactgactcaaatgttcatttcctttatcgacatcctcgcagacacacccaggaacaatactttgcatcttt

SEQ ID NO: 103190 - DNA, 591 bp, Homo sapiens
cacaggcatgagacacaatgcctggtctttttttaaggatgaattatattatattgtgtatgtagatcatagttaaaacttgtattcattcactaatggaaacctaagttgattccatgtcatggctattgtgaataatgctgcaatgaacgtaagagaacatatatatctgtttgacatactgatattatttcagttggatatataaccagtattgggatttctgaatcagatggtagttctatttttaattttttgaggaacctccatgctgctatttttagtgtctctactaatttacatttcaatcaacagtgctraaggactcccttttctctacagttgaaggcttttttgttaatgttccaataaaatgatttaagacatctattatagttctagccacatggagagtcactgaatagcagtgttaggcattattactaaatttttaactgcaaatgtttccatcaaaaaacttgatttttttattcatgagatttcagataaggtggccaaaaggagaggcttaacccacacaggaatattctacttggcacattaggagacttttagagtcaaggaatatct

SEQ ID NO: 103191 - DNA, 543 bp, Homo sapiens
acatcactgaataactctacaccatgcatcagtgtaactgactgaaagcagcacagataaaatcaaaagatttgaacagagacccaagctaatgcctaaaatggtgtttgtagtttaagcccagccaagataatttcctgctgaaacaaaggaaacaacattaatcagagaaaaataaagaacccagamtctccacatgttaacactcataatgtctaaaacacaatttaaaagtacctgacatataaggaagcaggaaaatagaaactgttttcaagagaaaagaaatcaagtcacttatttcaagatgacccagatactgcaaaaatcaggcaaggatttgaaagcagcataggtaactattctcacttaagtaaaattatatatacacattataagtgaaaaagatggaaaatagtaagaattgactttagagagaaaaaatgattaaataaaagaatcatggtcaaaacataagctacctacaaaagacacactttaagcataaagatatagatagaccaaaagtaaatggatagctag

SEQ ID NO: 103192 - DNA, 543 bp, Homo sapiens
acatcactgaataactctacaccatgcatcagtgtaactgactgaaagcagcacagataaaatcaaaagatttgaacagagacccaagctaatgcctaaaatggtgtttgtagtttaagcccagccaagataatttcctgctgaaacaaaggaaacaacattaatcagagaaaaataaagaacccagactctccacatgttaacactcataatgtctaaaacacaatttaaaagtacctgacatataaggaagcaggaaaatagaaactgttttcaagagaaaagaaatcaagtcacttatttcaagatgacccagatactrcaaaaatcaggcaaggatttgaaagcagcataggtaactattctcacttaagtaaaattatatatacacattataagtgaaaaagatggaaaatagtaagaattgactttagagagaaaaaatgattaaataaaagaatcatggtcaaaacataagctacctacaaaagacacactttaagcataaagatatagatagaccaaaagtaaatggatagctag

SEQ ID NO: 103193 - DNA, 633 bp, Homo sapiens
tttttgtatttttgtagagatggggtttcaccatgttgttggtcaagctggtcttgaactcctgacctcaaacgatccacccgcctcagcctcccaaagtgctaggattacaggtgtaagccactgtgcccagcctgtatgaatattttttctaagcaccagacaaaactgagatccattgagcaaagcagagaagttgtaggtggtatctgtaacacctatactcccagaagaagggtcagttctgcttgagagtatagaaaaatttgtaagtaattacgyaaattcctccaaatattttaatgaggtcactctgaaataaagacataattataagcccagggttcaaaatagtagttttgattatgttatacagccaaatgcttcctgtagaagctgctgttttgtctgagatcaataatgtcctaagaaacggctgaactagaccctctcggtcaatccatcatcaggacttgtgatggaggggacttagagttaacagtgattctgacagtatcatttcccaaagtacttgggaatcaggaatacatatagtttctcaagcatacttgatccataagcatctgaaatacatttaaacttggttccgcaaagcaagtcatggcataggaa

SEQ ID NO: 103194 - DNA, 633 bp, Homo sapiens
tttttgtatttttgtagagatggggtttcaccatgttgttggtcaagctggtcttgaactcctgacctcaaacgatccacccgcctcagcctcccaaagtgctaggattacaggtgtaagccactgtgcccagcctgtatgaatattttttctaagcaccagacaaaactgagatccattgagcaaagcagagaagttgtaggtggtatctgtaacacctatactcccagaagaagggtcagttctgcttgagagtatagaaaaatttgtaagtaattacgcaaattcctccaaatattttaatgargtcactctgaaataaagacataattataagcccagggttcaaaatagtagttttgattatgttatacagccaaatgcttcctgtagaagctgctgttttgtctgagatcaataatgtcctaagaaacggctgaactagaccctctcggtcaatccatcatcaggacttgtgatggaggggacttagagttaacagtgattctgacagtatcatttcccaaagtacttgggaatcaggaatacatatagtttctcaagcatacttgatccataagcatctgaaatacatttaaacttggttccgcaaagcaagtcatggcataggaa

SEQ ID NO: 103195 - DNA, 633 bp, Homo sapiens
tttttgtatttttgtagagatggggtttcaccatgttgttggtcaagctggtcttgaactcctgacctcaaacgatccacccgcctcagcctcccaaagtgctaggattacaggtgtaagccactgtgcccagcctgtatgaatattttttctaagcaccagacaaaactgagatccattgagcaaagcagagaagttgtaggtggtatctgtaacacctatactcccagaagaagggtcagttctgcttgagagtatagaaaaatttgtaagtaattacgcaaattcctccaaatattttaatgaggtcactctgaaataaagacataattataagcccagggttcaaaatagtagttttgattatgttatacagccaaatgcttcctgtagaagctgctgttttgtctgagatcaataatgtcctaagaaacggctgaactagaccctctcggtcaatccatcatcaggacttgtgatggaggggacttagagttaacagtgattctgacagtatcatttcccaaagtacttgggaatcaggaatacatatagtttctcaagcatacttgatycataagcatctgaaatacatttaaacttggttccgcaaagcaagtcatggcataggaa

SEQ ID NO: 103196 - DNA, 593 bp, Homo sapiens
tagatttaaagatctaaaattttttatttctgcccatcgtaaaacctcagaaacctaaatagtaaaaacaagctggataaaatatatacaagataattcaactaagagcatgaactgaacattcagaaaaataaaaatacayatggctaacacaaataatgttcacctttaataatcaaagatatagtaaaatttaaagaaaatggcatacttttagttctttaaaatagttaacattttaaatgataggcctagccaataatacattctttgttcttatgttttctcaggttgatttggaagttaaccattcagtaaaactgagctgccaagttgtaacgaaagcaagtctcgtacaaaattctcccacacttacagttatataaacattcattaacaagcaggcaaaaaacaacctgtactgtagtttcactgaaatgccagcattgtccttttaagtgatcagccgccccaccaacataaaaaaataactgaaaccaattatgacagccttccagaagcagggcctagtaccctgatagttagctccagacaacttgaaaaattcataaatcaatgggtggccacaggac

SEQ ID NO: 103197 - DNA, 548 bp, Homo sapiens
tgccttgattttgttggttagaagacttcttttctgcttttaggcagcatctttggtggattctctacatttctggttaattatcactactataactgagctcagttttcaatttccaagctcacaatttaatccaaagaaatccaaatttttctgcttcatcttttaggcgcaaatacctcctgtgtcttggaattgaaggagggagtagaggaggtgtctgtcttcatctggccctggtttagatctctttgttggtggttgatgcttctctgctgtccttccatgcctctatggggcagcatccaagtgtccacctttggggcacagagtggagtctgtccactgcccggttttcggagtggaaccttataycttatagcccagacaatccccaccaccagtagtctagccacagatttttgctgccacaacccagactttggctggcacctggtaaacagctttcttgggtaacctatgatgaaagacggctgcagcatagctgtctattccatgtcactctcttctgtgtaccataatgttgt

SEQ ID NO: 103198 - DNA, 548 bp, Homo sapiens
tgccttgattttgttggttagaagacttcttttctgcttttaggcagcatctttggtggattctctacatttctggttaattatcactactataactgagctcagttttcaatttccaagctcacaatttaatccaaagaaatccaaatttttctgcttcatcttttaggcgcaaatacctcctgtgtcttggaattgaaggagggagtagaggaggtgtctgtcttcatctggccctggtttagatctctttgttggtggttgatgcttctctgctgtccttccatgcctctatggggcagcatccaagtgtccacctttggggcacagagtggagtctgtccactgcccggttttcggagtggaaccttataccttatagcccagacaatccccaccaccagtagtctagccacagatttttgctgccacaacccagactttggctggcacctggtaaacagctttcttgggtaamctatgatgaaagacggctgcagcatagctgtctattccatgtcactctcttctgtgtaccataatgttgt

SEQ ID NO: 103199 - DNA, 548 bp, Homo sapiens
tgccttgattttgttggttagaagacttcttttctgcttttaggcagcatctttggtggattctctacatttctggttaattatcactactataactgagctcagttttcaatttccaagctcacaatttaatccaaagaaatccaaatttttctgcttcatcttttaggcgcaaatacctcctgtgtcttggaattgaaggagggagtagaggaggtgtctgtcttcatctggccctggtttagatctctttgttggtggttgatgcttctctgctgtccttccatgcctctatggggcagcatccaagtgtccacctttggggcacagagtggagtctgtccactgcccggttttcggagtggaaccttataccttatagcccagacaatccccaccaccagtagtctagccacagatttttgctgccacaacccagactttggctggcacctggtaaacagctttcttgggtaacctatgatgaaagayggctgcagcatagctgtctattccatgtcactctcttctgtgtaccataatgttgt

SEQ ID NO: 103200 - DNA, 624 bp, Homo sapiens
cttgcttcctgctcctctttatttattcgttttataactaagccagaagacttctcatattttctatcagtttttgaaactaccaaagatttaaaggagaactctaatctgtgtatatcaactatgctaaactttaaaataaaaaccgtcctctctggccgggcgcctgtaatcccagcactttgggaggccgtggcgggtggatcacgaggtcagcagttccagaccagcctgaccaatgtggtgaaaccccgtctctactaaaaatacaaaaactagctgggcatggtggcgcgtgcctgtggccccagctacttgggaagctgaagcaagagaatcatttgaacctgggaggcagaggttgcagtgagctgagctcactccactgtactccagcctgagggacagagagagactctgtctcaaaaacaacaacaacaacaacaacaaagtcctctccttagccaaaaattaaaacactttttactttctgaagacaagaattgtcatttcttttgattaaaatgctaatcaatctatgcaattatccagaagagatgcaagttcagtgagatgaccaataattctwttttataaaacactctatattaagacctattaggc

SEQ ID NO: 103201 - DNA, 576 bp, Homo sapiens
ctgcctctgtgtggtgtattcttgccttagaaagccttatgttcctttgagatgcatttttctttcttcttccacactgggcactactgcagcaggaagatccagtaggaggaggaggccaactcacccctgaaaggctgagcaagaaaaaaaaagcctgggatagtaggcagcccctcagctggcttatatgatctttggtgtcttctgtggtctaagaaagaaatagcccctttccttggggagctgggtttggtcacacgagttatagctatttcttctgatccaacccagcctcccagcactgggattccctayagagattacacaccaaagcgaaatagtcataaatggtgattttcttttcttcagaaagtcccctgcagttactttgcatatgatagtttacataaattggcagctgcatggagagaaggcagtttgacattgcttgaatatatttttctctcattccaaggaaactctacaaactcaatatttataaaggagcagtaatgtaattgtgtgtctaaagagctcctatcatctagatttctgtatcttcaaaatttatta

SEQ ID NO: 103202 - DNA, 290 bp, Homo sapiens
aaaaaatatttcagcatgccctttcaccctcattatctacctatcatctatctatctgtaaatctacctacaatcacttatggttatataaatatagacatcattaycatttcttaatatcccaaggcagaatgtatatttagacaaggtttatcattaatgattatgaatattaagtgcatgctttacttacatttactccacagtgtcacttacttaccctttcaggacattagggaactcctacatggctcggagtcaaactggattcaattactaacttagagatg

SEQ ID NO: 103203 - DNA, 649 bp, Homo sapiens
gcatattgatctgcataatgaaattatagggctttgcaaagatatgattatggcaagtggattamgaaagatttggaagacttaatcaatggtgatagtaacttagttgctaggataattctttgcttattggaaattaggagaagttattttgaacacaaaggaagaagtgggcactggatgatctttagcttccctcactttcttaccctgctgtgtgctctgggaagctgaccccaaaggatggcttcaacctcactcccttaccctcctgctgaggtcggatttagccaatgggagtaccagcaggagatggtaagggtgaggggatagaatctgaggtctttattcccctgggctgtagttggtagtggggtgttcttgcttaaggctaccactcctatgggtccttccctagagctataggtcagctatagctctctttctaagtccaataactattttttcactgcttcccttttaggcctaatgagataccactcctgtacctgttgtcactagtccagaatgtttcatcattctttgctggctttccttaaccctgactatacctttttagtagttgtggcattaagcatttctccatcccctctgttgagcacagcaactgcttcctgctaagaataag

SEQ ID NO: 103204 - DNA, 649 bp, Homo sapiens
gcatattgatctgcataatgaaattatagggctttgcaaagatatgattatggcaagtggattacgaaagatttggaagacttaatcaatggtgatagtaacttagttgctaggataattctttgcttattggaaattaggagaagttattttgaacacaaaggaagaagtgggcactggatgatctttagcttccctcactttcttaccctgctgtgtgctctgggaagctgaccccaaaggatggcttcaacctcactcccttaccctcctgctgaggtcggatttagccaatgggagtaccagcaggagatggtaarggtgaggggatagaatctgaggtctttattcccctgggctgtagttggtagtggggtgttcttgcttaaggctaccactcctatgggtccttccctagagctataggtcagctatagctctctttctaagtccaataactattttttcactgcttcccttttaggcctaatgagataccactcctgtacctgttgtcactagtccagaatgtttcatcattctttgctggctttccttaaccctgactatacctttttagtagttgtggcattaagcatttctccatcccctctgttgagcacagcaactgcttcctgctaagaataag

SEQ ID NO: 103205 - DNA, 431 bp, Homo sapiens
tgaccatattacaatggaaaccactcctcacacaatctgagaatcagtctcttggcagctctcctattcctttatggagagtagctgacgaaggccagagagagacttcagacccactagaacattccaacactcagttcctcaaatgcaagttatctgaggaatgaaatgactaaaggggaactctgaggggaagttggtycagtcaactgagactcactagcagatctcagtgtcaataccacttcctctgagaagctgtccctgatctaccaaatggtagatcttcgtcattgcactgctgcatcattgcatcattccacacctgcactgttctttgtagcattcattatatttgcagttatttggtcaacatctgtcctccttgaaggtctttgtattagtcagggttctctagagggacaggatta

SEQ ID NO: 103206 - DNA, 580 bp, Homo sapiens
gcaaccattttcaagagagaagaaaataaattggagtcaatccaaaaatgaaccagatgttggaattagcagagaaaggaatgaaagtaaatattattactacacctatgacaggaaggggacaggctcacaatggagggcagagactctcagcagagacataaagaagctaagaagaaccaagtggaaatgttagcgccgaaaaatgacatctgagattcaatattcagtggatggcattaagatcaaaatggagatgaccaaggaaggtattaataccagcaaacatgaagatagttcaatggagaggatctggtctgaagagaagagagaaatatatttgaaaaagtgttgraaagaggctgaaaccaatgaggcaataccaaaagtgccaacttgtgcatagttggattcccagatggagggagtggaaagcgagaataagacagacaaaacataaataaataacataaacataaatgtaaaaacagcatagccaggtattcctccaaattattaaaagttgtatatttatatttcaagaatcccagcaaaactcacacagtgtaaatgtgaagaa

SEQ ID NO: 103207 - DNA, 534 bp, Homo sapiens
atttgaataggtctgagttccaaggaaatattcagaatttatgtattgcatttatttaactttaagagatcccattgtgctttatgtacatcgttgtttttgaaggacacatataaaacggttttgaacaaagatgtgtgtgtgtgtggttgtatgtgtatgtgcgcgtgcactgtgcatatgtgtgtgtatgcttgtgagagaaatcttcactgggagccaagggctataattaaaaattgcaagcaactcttatatcgtgctygctacttgcgctgttctctctgtctctctcacacacacacagacacacacatgcatatacacactcatttatttagtctttagaatagccctactatttccctcattttacaggtgagaaaattaatactttttgttcattaagctatatgcctggcttatttcaagaatctaatgggtttgggctgctcttgggagtcacatttatttctgaaaatttgcagacttcaggtttctgagaaactgggacagtttagatcattgaaccag

SEQ ID NO: 103208 - DNA, 528 bp, Homo sapiens
tcttaatatgtaatatttagcaccataaggataaatggttatcaaaattattcaggtataatctgagttagaatcyaataccttttgcagaataagttgagaaatccacagctgacaattgtgatttttgttactattgttatgaaatgatatttgtgtctcctcaaaattcatacatcgaagccctaacttccaaattgatggtattaggagatgaggtctttgggaggtaattaggattaaatgaaatcataatggtgggactttcatgatgggattactgggtaaagtagataattcaggatttgtagtctttctctcttcctacctacagacactgaggtaagactgtgtgaagacacagcatgaattccaccacctgcaatgcaaaaagagagccctcaccaggaaccaaatcagctagcaccttgatcttagactggctagcctccagaactgtgagaaaataaatttctgttgtttaggccacctagtctgttattttattatggaagtccaagtagaata

SEQ ID NO: 103209 - DNA, 415 bp, Homo sapiens
ggtgatccattcaaagtgtgattatctaccccctattttggctctttttttgtataggagatgagtaccagatgcctccagtcaactatcttgaagcccctcaatcagctgtttagttttgacaagagcccagtggtatgctaatcgctgcttctgaaaagaatgtccgtattggagagatgatgagtctgaaacccaaaggggtgcctctgagtagaacctgcctrgtttcctccaaagctgaggcagaacaaatagttcaggtaccacacacagctgaggtttaggagtgtacatatgaggtgtctgatatagttctatgaaaatataaggcaatatttttctttttgttatctttattacatcttctccaggatggctggtggctgattttctacatagttggatcccaagt

SEQ ID NO: 103210 - DNA, 487 bp, Homo sapiens
tcctagtaatgtagtgtacattttctacaagtaagtcttcctcctacaaaatccagtatcacaaacaacatcatgaagttaacactgaactattaataacatctaatcctcgggtctccttcaggtttcagcaattatcttgctttttcttgtttttgaggactgaagaggtggtctcttgctgatatgtgaatggattcagttgctgttagtttgcttaaaattctcatgttaaattaggtaggcctataattttctggtcttctgagagcctgtggtttttatattattgtaatgcttacaaagtgtattttaaggtgttttctactagaagatattatatagcattgktataatttattatgaaagtattttgaaaaacacaaactggttcaggtttatggtttcttggtgggtaaatatttctattcaagtatattaaagtttctaatttatgaagtctaaatatcaaagtgtctcatttata

SEQ ID NO: 103211 - DNA, 626 bp, Homo sapiens
ttcaacatttttagaataaaagtcttgtatatcttttactgcatcattactatgtgaatttttatgaaattattaatcatattttaaatttttatttataattgtttattgttggcatatacaaacacaaataaattttctacattaaccttggatccacccaacttctttaatccatttttgaattataatggtctgtagattattttgaattttctacatgaaattatatcatcttagaataaaaatttactctttctgtattagtacgtattaccacaataatactatgtagaaagttgactttaaactcactgttctaataattattcakattgtgaatttgaaaatcagagatttaggtttggtgggatttttgtttgtttggtttgtgttttgtttgtttgtttgtttgtgtcttcctgagttacattttctgtctacagttggctggctatgcagtgaagctccatatgtcccacattcattcttcagaataacttgggcaagttctcatggtgaaagtagaggtgcaaaggtaaacaagtccaattatctaagtatgtgcgaagtctctatttgtgtcttgtttacaaacagcacgtggccaaagctatgaatcacaa

SEQ ID NO: 103212 - DNA, 626 bp, Homo sapiens
ttcaacatttttagaataaaagtcttgtatatcttttactgcatcattactatgtgaatttttatgaaattattaatcatattttaaatttttatttataattgtttattgttggcatatacaaacacaaataaattttctacattaaccttggatccacccaacttctttaatccatttttgaattataatggtctgtagattattttgaattttctacatgaaattatatcatcttagaataaaaatttactctttctgtattagtacgtattaccacaataatactatgtagaaagttgactttaaactcactgttctaataattattcatattgtgaatttgaaaatcagagatttaggtttggtgggatttttgtttgtttggtttgtgttttgtttgtttgtttgtttgtgtcttcctgagttacattttmtgtctacagttggctggctatgcagtgaagctccatatgtcccacattcattcttcagaataacttgggcaagttctcatggtgaaagtagaggtgcaaaggtaaacaagtccaattatctaagtatgtgcgaagtctctatttgtgtcttgtttacaaacagcacgtggccaaagctatgaatcacaa

SEQ ID NO: 103213 - DNA, 626 bp, Homo sapiens
ttcaacatttttagaataaaagtcttgtatatcttttactgcatcattactatgtgaatttttatgaaattattaatcatattttaaatttttatttataattgtttattgttggcatatacaaacacaaataaattttctacattaaccttggatccacccaacttctttaatccatttttgaattataatggtctgtagattattttgaattttctacatgaaattatatcatcttagaataaaaatttactctttctgtattagtacgtattaccacaataatactatgtagaaagttgactttaaactcactgttctaataattattcatattgtgaatttgaaaatcagagatttaggtttggtgggatttttgtttgtttggtttgtgttttgtttgtttgtttgtttgtgtcttcctgagttacattttctgtctacagttggctggctatgcagtgaagctccatatgtcccacattcattcttcagaataacttgggcargttctcatggtgaaagtagaggtgcaaaggtaaacaagtccaattatctaagtatgtgcgaagtctctatttgtgtcttgtttacaaacagcacgtggccaaagctatgaatcacaa

SEQ ID NO: 103214 - DNA, 573 bp, Homo sapiens
cctgtttttttggtggtaagttgtgaaggagaggaagcattctgtaatattaaaattaaattttgctattttattgggcctgtgctcctggctctgaccttcacaagtgtttcttaaattccttctttcactgtgcatgaaacaggaaggctcaagagggttgcagtgagagtaagcccattcctccaagtaggataaagctatggcaaagctttatcytgtggacagtaggcgtttgtaatagaaggatgctgttagcttatttctttttcccttcttctgctagagccacaaaaggatctttttcagatcttcactatgaggtcctggtagggttcctggaggtaagacacacaatgttccacctgcccttccactccccctgcctattgcagccccagcagtttctcattcttaaactcatctgcaatcagccatcaacatttcatcaaaatgaccaattaagtgtatttatcaatttatggctccagtggttttcactccaggtaagaagatttgtactgtgactcttgattcacatgtctctacattttgtggtgataaattttatcc

SEQ ID NO: 103215 - DNA, 588 bp, Homo sapiens
gagttaaattcttttttatgcactgtagaaaatcaagtatagaagggtcaacaaaacaagatacacaagatggatataataagctactgcttacaaaaggaaagaatacaaatatgtgtcttgcgtggggtaggcattgcttatttgtttttaaagtaggaaaaaytgaagtcaaaaatgtaaatggttttctattgaggacaaactagttccatacagaggagaacagatagctggattttgaaaagaagaatttagacttctctaaatttaattatttgtagatttgactctggaaccatataaacctttcaaataattttaaagccaagctaagtatataaaataatctataaaataatagcacagttaaataaataaacctatctttcaagctactggcatgactacatagaaagaagttatttcaaatgattttaagacatggtaatttgactgtacattctgagaatgaaaataatagaataaaaactattaaactctttttagtatttatattatagacggtagtgttagtactattattctgaaaaggttatgtgtgcaaagtgaaataaagtgaatgaa

SEQ ID NO: 103216 - DNA, 627 bp, Homo sapiens
ggagcccgcacgctcacagaaaggctatgctgttcttctgttgtacataaacaatttacagaattgtttatgtaaaacgactttagacaagtccactctgtgatcatggtggattaagctaaaaccattctataaatattacacagaagtgacaaaatattctttgttctagctaatatgaatgcctgctggatttttctttttttttttctttttttaaccaattatagctttagtcttacttcattcctccaatcttctcaataagaattattaaaatacccagtcatggaactgacaactgggtaaaagtaaggttaaaaaaattatgagcaatcatttgatatatgacccgagagattaaaataaagcaataatactatactattaccattattattattattacaaacaaaataataaaatcagagctagtattcattcattgagtgcttggtctggatgttggcagaccatgtgacagacaatttacctacrttactctttaatgtacacgatttataaaataagtatagttatctcattttacagattagaaaaagtgaggtttgtgaaatgaagtagctagctcaagatctctctgctaaaattaaattttgaaaccaa

SEQ ID NO: 103217 - DNA, 579 bp, Homo sapiens
gccccctttacttcagtaaagcccaagtttcatcctcatctgttacctatctcagcataattctcataaaaacacacgtgctctccctgctgatcgtgtccagctaatctcccaaacctcaatcccttacaaaacaacaactcttttctttcctaggcacggttagtgcagtcagaattcttacacaagagctgggaccgcaccctgtagcctttctgtccaaacaacttgaccttactgttttaggctggccatcttgtctccgtgcagcagctcctgcygccctagtacttttagaggcccttaaaatcacaaactatgctcaactcactctctacagctctcataatttccaaaatctattttcttcctcacacctgacgcatatactgtctgctccccggctccttcagctgtactcactctttgttgagtctcccacaattacaattgttcctggcccggacttcaatccggcctcccacattattccagataccacacctgaccctcatgactgcatctctctgatccacctgacgttcaccccatttccttcttccctgtttctcacgcaga

SEQ ID NO: 103218 - DNA, 522 bp, Homo sapiens
gaatgaattaatgctgccattgcaagagagggtttgttattgatagggtttattatttagccattattaaaagattttgacrttttcactctctccttttattctctctctccccttctctttgccctttcaccatgggatgatgcataaagaaggctcttgccgcatgtagctctttgatcttagacttccagcctccagaattgtgagataacaaatttctgttcttatgaattacgtaatctatggtattcatcataccatcacaaaatggactaagacacgattcaactgggaaataataacactttcaacaaatggtgctgggatatctggatattcacatacaaaagaataaatttggacatctttttcatgccgcttgtaaaaatcaattcaatataagagcttaaactataaaactcttcgaagaaaatgtgaggtaaatatttatgaccttgtatttggcaatggcttcctagagatgacccaaaaggacaagcaactaaagaagaaaaatat

SEQ ID NO: 103219 - DNA, 601 bp, Homo sapiens
tgaaatccaggccagggggtgagggtaaaagaaaggcgctttctttgagattccctgatttgggagagctagaactctctaataatttcgaaaatcttggattttccttcaaagttatgtttttagagcatgtttatatcaaaataccatgtcatagcaatatctatataataataaaaatgtgctgtctattcaaaaataaacactctgaaaaagttaagtagctatgatataattattgactagtcrgcaaaaacaaaggggttagatcgacatgtcacctttgcacaaaggaatcaacgcataaacataactcatataactgagtttatcagtaagatgataaccaagattttccctatgtttcaattcagtgtatgtgtccaccctcttggctctgatataatacaagcatttactaaccaaggaacttcatgtgccatggtaaaattggttcaaccaaatattcagatcctttgccaagcataggaaagctattgctgttccagccaaatctggcagccttccacttttacaatcatataatttgacgaatgacatacccctaacccgtcctaatttattcagctgggctggttct

SEQ ID NO: 103220 - DNA, 592 bp, Homo sapiens
aaatgtacctcaatacaataaaggtcatatatgacaagttcatagctaacatcatattcaatggagaaaagttgaaaactgtttctctaagacctggaacaagacaaagatgcccatttctaccacttctactcaatatagtactggagttcccagccagggcaataaggcagggaaataaaaacggaagagwtaaattgtccctattttcagaccatgttatcttatatattaaaaaaaaacctaaagattctataaaaaagaaaaaatacttagaactgataaattcagtaaagttgcaggatacaaaatcaagacacaaaaatcagtagtgtttctctacactaacaatgaagtttctgaaaaagaaatcaggagaaccgtcttatttacaatcgctacaaaaaaaaatgtacttaggaataaatttaacctaagaagtgaaagacctgtcactaaaaactataaaacattaatgaaagaaattcaagaaaacataaataaataaaaatatctctcatgttcatgaattggaaggattaatattgttaaaatgtccatactgcccaaagtgacctacaggttcaaagca

SEQ ID NO: 103221 - DNA, 592 bp, Homo sapiens
aaatgtacctcaatacaataaaggtcatatatgacaagttcatagctaacatcatattcaatggagaaaagttgaaaactgtttctctaagacctggaacaagacaaagatgcccatttctaccacttctactcaatatagtactggagttcccagccagggcaataaggcagggaaataaaaacggaagagataaattgtccctattttcagaccatgttatcttatatattaaaaaaaaacctaaagattctataaaaaagaaaaaatacttagaactgataaattcagtaaagttgcaggatacaaaatcaagacacaaaaatcagtagtgtttctctacactaacaatgaagtttctgaaaaagaaatcaggagaaccgtcttatttacaatcgctacaaaaaaaaatgtacttaggaataaatttaacctaagaagtgaaagacctgtcactaaaaactataaaacattaatgaaagaaattcaagaaaacataaataaataaaaatatctctcatgttcatgaattggaaggattaatattgttaaaatgtccatactrcccaaagtgacctacaggttcaaagca

SEQ ID NO: 103222 - DNA, 616 bp, Homo sapiens
actgttctaatagcaccccctagtgaccaaaagctcttttctgaccaaaggaactctcagttctcaaataactaaaaagcaaagaatttaaaataaaaaagcagtgaaaacaccaatgagctcacactctgtgaacgcctgtccctgtaacagccccagtgaaatcagtaactttaacctctctggcctactgttctctcagctctaaaataggaaaaataatatcctcaaccacccttgccctcctccctgtgagcatgtgagttcctcaatgagatttattcccaaggcacatggtcggttttaagcgagaggatgggaaaaggaaacacaaagtggagagaggacatgtgcactcaggccgatgtggatcactgggagtattttatattaaacccataatatgcacggtaactgcggaagtgggtccacttctccttcactgttmttattgtacatgttgactctcttctacccgtatttaccaagctctaaggagaactgcagaaaccaaagaattttctaaaaatagcttgagaccacaaaatactggaagctctccaatcccatcttcaaaattgagatgtttgtttctgacacgaattatgtaaaatgc

SEQ ID NO: 103223 - DNA, 548 bp, Homo sapiens
gaattctaagtttattagaactgtgtccaaaaagagaatatagaaactctgagtaagggtctcagaggttcccatgctttagtgcacagaattgatagcatcttatttttgttacatcatggacttttgggtcttctaagttctttgttatatttccaataaatgaggctcctcattggataaatcatgtccagatatatgagacaggattacattaagagcttttgaaaaaaagaaaattaaatatgattttttttttttgagccgtagtttcacttttgttgtgcaatggcgtgatctcggctcactgcaacctcagcctcccaggttcaagcgattctcctgcctcagcttctcgagtagttgagattacrggcgtacaccacccatgcctggttaattttgtatttttagtagaggcagggtttcaccaaataggccatgctggcctctaactcctgacctcaggtggtccacccaccttggcctcccaaagtgctgggattataggcatgagtcatggcgcccgtccaaatatgattcttaaa

SEQ ID NO: 103224 - DNA, 564 bp, Homo sapiens
ctggattgtctttgatgtgtgtgtgtgtgtgtgtgttttctttttaattttaattttaatttttgagacagactctcactttgtcacaggctggagtgcagtggcacaatcacggctcaccacagcctcgacctttcaggcccaggtgttcttcccatctcagcctcctgagtagctaggtctacaggcacccaccaccatgcccagctaatttttgtattttttgtagagatggagtttggtcatgttgccccagctgatcttgaactcctgggctcaagccatctgcccacctaggcctcccaaagtgctaggcatgagctactgtgcctggccccttggatgtgttttatctgggctatgacttyataccaaatccaatgccctggcaaagtgggctatagacagcttccactggctggtactgcagaggggcagggctttatgaactttgaagaagactacattcatagttattttgatcaccctgcaccttccttggaaggtctttggtgtctactgccaccctgtaatataaagaagtacagatatccaggaagtact

SEQ ID NO: 103225 - DNA, 636 bp, Homo sapiens
tttttgccacttatcttcctcaaacagtaacctgtattcyactcactcagctttacgcctgtgctgctctagattccacttccactgctcctgtaaactctctccactgtcactgatgactgcacaatgagactttattctctgcacttctctgaagtccttgaaatacagtaatccctccttacttataagggatatgttccaagacattcattatatgcctgaaaccacaaaaagaagtgaaccttatctatactattttttatacatcatacctatgataaagtttaacttataaattagacacaataagaggttaaccacaataactaataataaaatcaaaatattataacaatatactataataaaagttatgtgattatagtctctctctccccaaatatcttactgtgctatacacacttattgtactgaactgtggttggcagtgggtaactgaaaatgcagaaagcaaaactgcagataaaggggaaaatagtgtactaattacagtcaggactcctcccttgtcagccatgaccttctattacattgtttctcctttttatcatgttattctatgggtcatctctcttcttccctcccacaagtattgacaatttttattttcct

SEQ ID NO: 103226 - DNA, 636 bp, Homo sapiens
tttttgccacttatcttcctcaaacagtaacctgtattccactcactcagctttacgcctgtgctgctctagattccacttccactgctcctgtaaactctctccactgtcactgatgactgcacaatgagactttattctctgcacttctctraagtccttgaaatacagtaatccctccttacttataagggatatgttccaagacattcattatatgcctgaaaccacaaaaagaagtgaaccttatctatactattttttatacatcatacctatgataaagtttaacttataaattagacacaataagaggttaaccacaataactaataataaaatcaaaatattataacaatatactataataaaagttatgtgattatagtctctctctccccaaatatcttactgtgctatacacacttattgtactgaactgtggttggcagtgggtaactgaaaatgcagaaagcaaaactgcagataaaggggaaaatagtgtactaattacagtcaggactcctcccttgtcagccatgaccttctattacattgtttctcctttttatcatgttattctatgggtcatctctcttcttccctcccacaagtattgacaatttttattttcct

SEQ ID NO: 103227 - DNA, 473 bp, Homo sapiens
tgttatagataaattgtcacctcctaaattgtttccaatatgcctcacttctttctgaaatggccacagttcaggctttctttgcatagattattattgtatccttctgacaggttcacaaaygattccatcttttccttctgcaaattattccagagtcattttctaaaatacagatatgatctccatatatgtcagggtaaaactcaaaatcctcacttgatgtacaaggcctctaggagtcaagacttgcctgaggcttcggcctcatcggtctcactaaactactgcatatatcagagtgcaacattaaaccttttttgcagaaatcgttttctctatttatcatgtccttccccatcttgtctttaatctctacacgtcttttaaactgtcagctgaaaagtcaattatttaacattaagcaaattcttattaaaccccaacttaatgtgccaggcactgtgctagcc

SEQ ID NO: 103228 - DNA, 499 bp, Homo sapiens
tagttagctatttgttaagtagaaagccccattttaattttaaaccttgcgaaagttgcttttgaaatattttcttgacttacaaaatattggatgcataaagtaattgaatatttttttgcttgattgaaactgaagttccagactgggcgtggtgttartggctcatgctcccagcactttggggggccaaggcaggtggatcacttgagctcaggagttcgagaccagcctgggcaacatggtgaaaccctgtctctataaaaaatataaaaattagctgggcacagtggcacatgactttaatcccagctacttgggaggctgaggtgggaggatcacttgagcctgggaggcgtaggttgcagtgagctgatatcacgccactgcactccagcctgggctacaggatgagtccctgtctcaaaaaaaaacaaaaaacaaaaaacaaaaaaccccaaacaccaaaaaaacccgaaaaccaaaacaagaaaacaaa

SEQ ID NO: 103229 - DNA, 542 bp, Homo sapiens
tatgatttagataaacttaacagagtgtcagcagtacttagataaagcgatttttttattttttgagaaatggtctctctgtcacctaggctgaagtgcagtgaggcagttatgcctcactgcagcctcaacctcccaggctcaagtaatcttcccacctcagcctcctgagtagctgggattacaggtgtgcactaccaygcctggctaatttttgtattttttttttttgtagaaatggggtttcactgtgttgcccaggctggtctttctgggctcaagcaatccacccacctcagcctcccaaagtgctgggattacaggcatgagccactacgcgcagcctagataaagcaaatttttaaattgatttgatacttgattttactcattaaaaaaaaaaacctgaatgctaattgttaaccaactattgttaaattttaagggaaattgggtagcatggtcttaggtctgattataaatgtttgtcttttttgggagcctgtgattttttcaatacaaagcagcttttaaaacatctt

SEQ ID NO: 103230 - DNA, 476 bp, Homo sapiens
tacaagtggcccctattgacagccagtagcccacagcaaggaaattaycaaaaatttaactaattttgagttaagtgtttgaaagacaattcaggataaattaataaagtgatcaagtagcctagattttaaaataggataaacataaagcctaacatcaattttctctgcataaagattatctgtttccttctctcttctctcaataggaggtatgtgtcttgctgcttagcctaacctctccttccagccttctggaccctacctgatatggtctggctctgtgtccccacccaaatctcatcttgaattgtaatctgaattgtaatccccacatgttagggaagggacgtcgtgggaggtgattagatcacgggggcagtccccccatgctgttctcatgatagtgagtgagttctcatgagacctgatggttttataaggagcctttcccccgcttcactcagcacttctcc

SEQ ID NO: 103231 - DNA, 393 bp, Homo sapiens
atcttaattacttccttagaggtccatctccaaatgcagccactctaggggataggaattcaacataagaatttggaggtgggrggacacaaacattcagtccataacaaacattcaactgtttgagtaattcagagtggggctcaaaatgtaaaacattttgatgaatcacgttaattgtcatgttgataatgtgccacatcatacattttaatgtagcattatttgtgattaattctcttacctttgttttttttttaaatgtcagtacttcaccttatttcgcacatttttactgtacatagaattctatgttggtatatttttctttcagtactttaaagatcttgttgcactctcttgcccatagtttctaatataaagtcagcaata

SEQ ID NO: 103232 - DNA, 668 bp, Homo sapiens
agtgcatgttcctctccagcgcctggggaggaataagcatagcctggagccacagagaaagtaaagccctgttccctgaagggatggttctatgttgtgatttatgagggttccagctaagtttagtccaggccttataaggttgccttccctacatctaattcaagcatctttagaataaggatatccatacttagtatagtcatccacagtattgtttggaactttacatgctgggagggaagaatctktttggcaaatatagttttgaaagatcagagacgcaatatgttccagccagtatcttagacaaccctccttacagcggctattggcccagacatcccctgttcattcacaaatctgcagatcactgtcattatcaaatatcatacaagggtccaggattccatgtgtgggcatgtttgggaaggaccatgtgctatttattacctgataataaggttggcgaggggtggcatttctgcccggggtagacattcccattgggaactccacctgggaggtctggctagattgttaaaatttttccacagtctctcccaatgtttggtgtcacccttgttccttcttagtctccagatctctgtgctctcagcaattacaagcatactgttgcaattatttaaggtttcccgagtatggtc

SEQ ID NO: 103233 - DNA, 565 bp, Homo sapiens
agtccatttcaagcatccaatatcaaagaatgcacccaaaacaaagacgctgttaggaaacacagaactgggcactgcaaaggtctttgagcatgacacaaggatgttgcaagagcggcaggcccagaaggcaagtggggattgaagaaccttaacagcatattcacggggctcagtcctaggattcagcatcatgacatatcacctccaagcttccatgctttcatttgtatagctaagacttgacaagactagtgagggtgtccgatgatgaggacagtcaaggatgttaaattcctgactatacattaacaaggaggaaaaaaactaacaaacctgcatcagtgtgaagaccagaaaggcctgtccacagagccagatgacaaggtacaacaggatgcygttgaaaaaaatcagactagataagagcaggttgctgtgtgagcaaactcagaccatacaagagaactataggcccctctcctccagcccagaattcctgccctgagtgatgctaaatcagaaggaagaaaagcaggagatgatattggctaccctccgggga

SEQ ID NO: 103234 - DNA, 213 bp, Homo sapiens
gaattcgagcccctgctctgccacatacttgctgtgtcaccttgaacaaattacacagcctccstgggctttggggataaatgtgagacggcatagagaactcatctcctctgctgactgattctgatcctttggtttgactgcctgagcaccatgtgatgagctctgtgagggctccatggagggaaaatgcagtcatctattggtgatatc

SEQ ID NO: 103235 - DNA, 377 bp, Homo sapiens
gaattcaatggtatactggaatgtctctattcacttctctagtgtacaacacccactgcatagattttcatcactaaaacttatctttcccataactaactaatcatctaacctaaaaaaaatcattctgagggacaaaaacaatatttatkaattattcagggcccaattattactctacggattaagtgaagatttagttctcttagcaaaaaattttcaaggtctttagtttttaaaatcaatttgcttgtcaactgctgtgccagaaaaacagaaggaaggaggaaaacacacatattaacttgtaatgtttgaaagcgctctctctttttgtttgtttgtttctaagagacagggcctcagtctcactctgt

SEQ ID NO: 103236 - DNA, 586 bp, Homo sapiens
tttttggtgttttagcaaatgaaaagtaaacaaaagggatagaaaacctatttaacaaagtaatagatgaaaacttcccaagtctaagaaaagatttagacatccagatagaggaagcttacagatgccaaatagatataattaaaaagatcttcaccatggctcattatagtcacagtctcaaacgtcaaacaaaaaagaaaaagagaattctacaaaaagcaagagaacagcatatagctacttataagggaatctccattagactaatagcatattcctcaatagaaaccttacagggcaagaaagaatgggacaatatattcaaaatgctgaaagaaaaaaaaaactatcagtcaagaattctatgcccagcaaagttacccttcataaatgaaggattaaaaaagtctttcctagacaagcaaaactgaggaaattcatcacaattagatcggctgtaccagaaatgcttaagagagtcctacacctagaagtgaaaaaatggcatgtrcaatttgtgtattgtgtagcgaatacacaaatgagaaagataaagaactcaaatgttatcactataaaaacc

SEQ ID NO: 103237 - DNA, 602 bp, Homo sapiens
gctgctgactgatcagggttgtggttgctgaaggttagggtaactggagcaatttcttaaaataasacaacgatgaaatttgccatgctaattgattcttcctttcatgaaagatttctctgtggcatgtgattctgtttgatagcattttactcatagcagaacttctttcagacttggagtcagtcctctcaaaccctaccactgccttaccaactaagtttatggaatactctaagtcctgtgttgtcatttccacaatgttcacagcatcttcaccaggagtagattccatctcaggaaaccactttctttgttcatccagaagaaataactctacatctgttcaaattttattgaaattgcagcaattcagtctcatcttcgggctttacttctaattccagttctcttgctattcccaccacatctgtagttgcttcctccattgaagtctcaaacccctcaaagtcagtcatcagggttggaatcaacttcttccaaactcctattaatgttgatattttgacctattcccatgaattacaaatgttcttaatgtcatctagaatggtgaatcatttccacaagatttttaattt

SEQ ID NO: 103238 - DNA, 378 bp, Homo sapiens
atatgtttttttcttgaattctttgttcactattaacattgtcattcctacttcarttgttgctttgtcttattttcatttatgtcctatatttttgtacatccttttaaagaggagctttgtgggtcactttattttaggcctgccatttgtaaacactgtatatgactcagatttctgtggaggaaacagaaaaccccttatgtgttttaagtgaaaagggatttaatataaggaattaggtgcttacagaagcattaggctaggctgaaggaatgaagaggttggcagcccccactggactcacagcaccacatctgctgccgtgggtcgagaagttactgctgctgctgccagcacaactgcctcttagcccat

SEQ ID NO: 103239 - DNA, 571 bp, Homo sapiens
gtttctcagtcataatagccacatttcaaattctcagtggtttgtaattacaatattggaccatacatttatagaatgyttctatcattgtagaaaacactaatggaaagtgttattctttaacttttacaatgaaattattcaacaaaaatactttcaaaacattctcgaattattgtagaattgccttaaattcatatttacaagtaatttggacaaatacgatttctaaactgtgctgaccaattgtgtatttgctctgatatccaaaaaccgaatttcccccttttcacattttagtagagaattatagttagctgggttccttgctctttatcattaggttggttgtcacctgaacaggaagtttttttgcttcatggcatctcttaaagaggcagtatctcctctttcgtacacatcttaaaggatgtctcattccatctgtggagtgcagtctgcctgctgattgtagcttccttctaatggccctagattctccaccctagaaatggcacccgtacctctgtctcccagatccatgcaagttggcagctttccgcctttgcag

SEQ ID NO: 103240 - DNA, 587 bp, Homo sapiens
ctgcttctcactcatagtagagcatgtaagtggataattactacagagtgcagctccatggacttaagaaagaggtaaagaagtgaccccttcagaaagtattgtaggacactgatgtaaaggcatgattcattttcactgccttagggcgtgtgatacaagaaagagcactgttttcttctgctggctggtaaggttgggctctgcttgtgggaatgagacagggctgtgaaccatctgtgatgggcaggtaagatgaaggctgacatttcaagaatattcctaatgaaatcaaacctttaatttggaaaaataactgtataaagtgattttaagcattgaggcgatgttaggtgtgtcaggatgaatactcctctgttcaaacttcctgaccctcctcctcccataattttttttttaactttcctgttcctcctcctaaaatagtctccaggaaaaatgakggcattgatctattttagaaagcatggcattgttccatcatactcccataaacttatttttaattatgaaaatcttctagatcaatcttgctttccctgtggctttagtaagctttttcttcc

SEQ ID NO: 103241 - DNA, 552 bp, Homo sapiens
acaagattgtcttgtggtaggacatagaaatatgctccaaaactttaatatgaaagagccttatggcactaagcaacttggatggaaggtggtggttgagttgaggaaggaaggaaggagaaccatcttctaaccagaacagttccactttcatctcctttaaatatatgtttgtgttctgcacaatattacatatggaaaaaataagtttggagatcacagaaacccatcaaactacacaagcatctaggatatcttatgtgaaaaagtttatctaaatccaaaatctaactaaaatagcagcgcaagctctatgcaataaatattctccaggcctgaaacaagcagatggagtactcaytgccaatcagctttttatttttttcccagtttttgctaactataaatgtattctgatttgcaaccactgcttaagggagacattgcgtcttgccacatttcatttgtagaattactttaaccaacagtgcctgacatttactttaaacaaataaaacctatttttgtatcacatagaatttgaaatttggg

SEQ ID NO: 103242 - DNA, 585 bp, Homo sapiens
tatgatttatgcacatttctgtatgagtgttatatttcacattttaaaacatttaaaaagtatttaggggaatgttgggaatatggcaccctgaatgtgtccctgctgttctcaaatctcaattcctaacagcagtcttcctctcctgagtctatctggcaggcaggcagggcattgaagggtaagaatatgactttgggctctgtggatccagacacagaaagttgatgtcagactttttcttttggctttggacacagcctggagttgtagagaattttggagcaaaaatcagtgtaccatagtcttggagagaacgtaggttttggaactctgtggcattccaagaagaagagtggtgcccagaaaaatatttcaaggggatttccttttccccttcccttgagagcctcaatcaggtaattactaccacctatmagctggtactgaactcgccgcactggcagagatatatttgcgcctcaccaccctcaagagtgagtaccccataaactcagcctgagcctgcagagtaggcaaaggaaaactataatccacgtaagggatcctagcagccagagaaag

SEQ ID NO: 103243 - DNA, 591 bp, Homo sapiens
agaacgtaggttttggaactctgtggcattccaagaagaagagtggtgcccagaaaaatatttcaaggggatttccttttccccttcccttgagagcctcaatcaggtaattactaccacctataagctggtactgaactcgccgcactggcagagatatatttgcgcctcaccaccctcaagagtgagtaccccataaactcagcctgagcctgcagagtaggcaaaggaaaactataatccacgtaagggatcctagcagccagagaaagaacactcagaacatctggaaaaggtggttcttgattaaataaagctgttaaaagaggcaggtaattactaaaacaatacaaaaaaagtaatacaaatacctagaagattctatgtttgaaacagaagtttaatttgtaaattgaatgacagaattcattagtatccaagaatatcaaatggaatatgtatttcaaaaccttgcaaaaaatacaaaaagatgggaatcatgaaggacaakgtagaagacttggaagataactaaatgtgagtaatagaagatctagaaggagaaaaataaatagatggcaatatttaaat

SEQ ID NO: 103244 - DNA, 509 bp, Homo sapiens
ttggagtgtctaggattggcagaccagctgttcctgtgaaatgtaattggtgccacagatctggatgagcaatgaatgaagtccagggagttaagtaggcagggctggggaaggtgggcagcatcatgaggtgggcagcatccggttgctgaagtaaatcttccttccctaagccaagatgagcagacctaaggatgctgattccagggagcaaaatgtttgctctcatctctgttatttcctttgggttatatgcactcctagctccatatgtgaccacagtagccagaaactttgcatatttacaagcatacacaggtctgcagacaatctataytgctagttagatccaccagaagccccatagatgacttctcagtgtctgtggatactaggttaagaactccatctaactctcaagtagttactcatttactagtttttcatagacaggttaaaatatcccaaagactttctaatgtcctttcccattaatttataccaatcac

SEQ ID NO: 103245 - DNA, 532 bp, Homo sapiens
cctgaggcattcataattcagaagaatctgaaagttgtctggtatcttgcatgttcaataaaaggatcacttttatgctcaacaattttttatggctgcaatactgctatgagcaaagggacacatatattaataatgttcagttgcatcagtcagggtcccagcaggaagcacttggctctctcaaaaggtattaactagagaacatttaatgaagaaacaatttcaatagacatgggcaggcttcagggaacgaacaaagcatggtgaagcacccaggaattagcaacaattgggagctgttactgtcccarggcccggaaaaacaagagaagggaatggcgttagagaaatatgatgaaaatgggtgctctagagaggggctgcctatctggagctgttgccatcccaactgtagccatagaagaatgcagccactacccgatccctaaagggagcagcagagacaaggaggaataaattctggaacatctgtcttttccagccctacaatctactggcaaacccaact

SEQ ID NO: 103246 - DNA, 629 bp, Homo sapiens
actcttttgaagcaaagttacctgtctgaagtaacaaagaggccagagcctgggtctcctcaccttttgtcattcaagttccttggtcactaaaaaaaattgtttttagctaatttgagaagtctagattttcaatccagtttttatcatatttaggaatttcttaaatagcgagaagccttattccatgaaaaaatacggaactacaaggtaagcttcactggagagtcctgaagctcctcactgtttaagcactttagggaacatttgcatgcccttcttcccatctcttctatacgaatgtctaacaactatcagtgggcaaataatcaaactgggataatagttttctcagaagagttggttctttgatacatgatcatattgtgccattcygtattcaaatgtggctgtccctctgtgtctcagctgctgcaagactgctcctctcgtctcaaaatgacccacccagctagagcactgtacacccccagtggagagccaattcagtcctgggacgacatagagcgagatatggtcatctgtgtgtctatgggacatggtttcaaaaccccaaaaggtatgcatgatagtttcttttccatcaagtctttgaagaattaaagcat

SEQ ID NO: 103247 - DNA, 628 bp, Homo sapiens
tataatatcaaaaaacatttagtatgtgaaattcatcaaagaatcacttcgggttttttaaaaaatcaattggattttgcaaaacaaaccagaagctattagaatggcttctttcacacaaacccctgacaaaattaaaagagtgttttatgccatttgccataaaatctgaacactgttctcactgctgctttctgtcttttcagtgggtgcaatttttagaccagccctaggttagcttccaattcaggctttgtaataaacctggraagaagtcctctctagcaacttccattctctagcaatccaaagactattaacaatatatctcatgtgataagaagtcaaagttgtaatgagagagcccagggtgggagccaaggatttgtgaggggtcttcaagtttttcatcatcctggacttttaattattttctataacattgacttgtctctcaacttcttttttttttttttttaacagagttaaaacaactgatggagatcagagcaaattatgccagaatccgaaggcagcagggccctcaagccacagacattgtggtgtcaccatccacgaagctgctgtctctggcacatctccacaattaactcctatcagaaccatc

SEQ ID NO: 103248 - DNA, 599 bp, Homo sapiens
cacattggccaggctggtcttgaactcctgacctcaagtcatctgtcgacctcagccttctgaagtactgggatgataggtgtgatctaccacacccagccaacattatttctatgaggagtaaatgagccataaccactattcctctactcctggcacatagtgatatctcagtattaaactcaacgaatttcaaagtaattttttttaaatgcaagtattgatgttacaatatgacacactgcatgtatttaagtagatgcgatggcagaaagtatttaaatggttttgataattacgtattttctttggaagtgagatggtaaattatttctaatttgtgccaattatttataacatgattttcttgaaaaggtctagtgtatttcatgtcaatttatatarctgattttcaaaaatactctaattttatacagtatctatttcaatatgagttgtcatttctacatatataaaaagtataggattttcaaattttgtattcgtactgaaatgatatcgatacaatctattttcttgaccactttgtgggattcatgagagggatgccccatggtcaacctatggtacttgacccc

SEQ ID NO: 103249 - DNA, 661 bp, Homo sapiens
tttatatctagaaatgtatgttatagaaaccaaagggttactagtagagacctatgaataaataattttcttgcattagatattagaaaaatacccaaacatgataaagtagttattcaaattatggtacatctataccatggatgttcatgaatgcaaccattagatacaaccccgtcataaaaccatcagatctcatgagacttattcattatcaagagaacagcatgagaaaaacccatccccgtgattcagttacctcctaccaagtccctaccatgacacatggggattatgggagctacarttcaaaatgagattggactagggacacagccaaaccataacagacatcaaactatttatcttcacaaatgatataatttcacacctagaaaacctcatagtctctgcaaaaaggctcctaggcctaataacttcagcaaagtttcaaaatataaaatcaatgtacaaaaatcagtagcatttctatacaccaataacatccaagctgacagcaaaatcaaaaatgaaatcccattcactatagccacatacaaaaaatacctaggaatatggctcaccagggagatgaaacatctctagaataagaattataaaactctgctgaaagaaatcagagatggcataaagaaatgga

SEQ ID NO: 103250 - DNA, 622 bp, Homo sapiens
atcacccagatatgaagcctcatacctattggttatttttcctaatcgtctccctccacccaccttctaccgttctgtgcatgggtcagtactcttcactctccacattgttcaagggtcaactatatattaattctctctcttttctactcgttcccctttataaagtgctggaggcaagaaatcatcgatattaactgtcaaacaagttgtctggacattgttgatcctcattaaatgctggtttcaattcccataaatgaggggggatttaygatcccagagtgttctttaacagctactaagtctttactgaagagtattaaaggtaaattggcccaaacacttgtatcaaacttatctaaataaatgttgggcgacagattttacagctaaacctcagatgttctataaaactactcgtatgtgtgtgtgtgtatatacacatattttaataagaaagagagagcagctatttgctttttaacaaagctcatttaaacaactataagctttggccaatgtattttcattgcattgagaatatgcaaaatctgctttatgctatattctagctggtaaagtatgtattgaatataattacaatactaagcctgaacac

SEQ ID NO: 103251 - DNA, 599 bp, Homo sapiens
ctcactttcacagcttctcccacaggttttgacaacacaggaaatgggaacatacgacataaccgaagttactttttsactcaaaatatcaagggttggtggggtaatcctgatgaaatgtcttctttcaggccccatatccttcctggtcttcaaagtgccagtcatttttcagtgattcttgtcctctgccatcctttccctgccccactgtccccagaatcacaggaaactcagcacagcaaattccacttgtatcctcttttttcattcatcctcagctcaaatttcacccctattatctatacacaatctggacacaatctttgcttctagtctcaccacatatgaaatacagcaatgctttcatccctgcagaaatcttgccatctccttctcatacttccatgtcattgcccacccaggcatggctctcagcttggagttctattcacccttatctccatgttacaaatctggaccatccttcacacacatgtcaaatgccagcttctctaagatgacctctcagatcccccagataaaagtggtctttcctccttctgccctccaagactatagtgtctgtctccctcatg

SEQ ID NO: 103252 - DNA, 593 bp, Homo sapiens
tagacaaaacagtcttctattggaaaagggtgacatttaggacttctttaggtagagagaaaagtcagtgcctggtttccaaactttgaagaacagaatgactgtcttgctggggctaatgytgctggtgactttaggttgaaggcaacactcatttactattctgaatctcctatggccctgcataattatgctaaatctactgtgactttgctgtatatatggagcaacaaagcctagataacaacatatctgtttactgtatgatctaatgaatattttaagcccattgttaagacctactgcacagaaaaaagattctttttaaaatagtgctgcttgttgataatacacctgcttaccaaagatctctgatggagatgaatgaggagattaatgttttcatgcctgctaacacaacatccattttggaacccatggatcaagaagtaattccaactttcaagtcttattatttaagaaatacttttcataaggttatagctgaaatagatagtgtttcctttgatggatctagaaaaagtcaattgaaaaccttctgaaaaggattcaccattctagatgtcattaag

SEQ ID NO: 103253 - DNA, 635 bp, Homo sapiens
ccttattggttaggaaatactgttattcccattttaaagataatgtcactgagacacggagaggctaagttacctgcccaaggccgtaagcaaataggggaattaggattaaattaaaatccacagactggttcttgattacttctctactctatttcttgaattacccattccttcttgtgaaaatgcagcttaatttgatgaatacttcttatctagacttcagaggtatagtaagttaaatactatctaatgaatattgaacctggactcagtattattgtactattaccttattctattggctaaaataagtattccaaaagtacatcagctaagaagctgtgaaactcatttctcttatacataatttatctcttcatatgtttaacgattacaattatgtccaaatattatgtgatagastgaattatctctttttgcatctctgccctacccttgccaacatagcccatttttaaggtccagttattttattaatttagtaagaatgcatgctaattatgatttatacatatcaataataaaattatgaagatgatattaaggttagatttaatattttactattttcctatgtatattatattcatttggtcttcttacaaacctcc

SEQ ID NO: 103254 - DNA, 635 bp, Homo sapiens
ccttattggttaggaaatactgttattcccattttaaagataatgtcactgagacacggagaggctaagttacctgcccaaggccgtaagcaaataggggaattaggattaaattaaaatccacagactggttcttgattacttctctactctatttcttgaattacccattccttcttgtgaaaatgcagcttaatttgatgaatacttcttatctagacttcagaggtatagtaagttaaatactatctaatgaatattgaacctggactcagtattattgtactattaccttattctattggctaaaataagtattccaaaagtacatcagctaagaagctgtgaaactcatttctcttatacataatttatctcttcatatgtttaacgattacaattatgtccaaatattatgtgatagactgaattatctcttttygcatctctgccctacccttgccaacatagcccatttttaaggtccagttattttattaatttagtaagaatgcatgctaattatgatttatacatatcaataataaaattatgaagatgatattaaggttagatttaatattttactattttcctatgtatattatattcatttggtcttcttacaaacctcc

SEQ ID NO: 103255 - DNA, 481 bp, Homo sapiens
ccctcgtgtgcctacaccaccagggccctgggtttcaaccagaaaactggacagctgtttgggcagagaccaagctagctgcaggagtttttttttttttttttttttttttttttcttgtaccgcagtggtgcctggaacaccaatgagacagaaccgttcactcccctggaaagggggctgaagccagggagcctagtggtcttgctcagcgggtcccactcccacggagcccagcaagctaaraaccactggcttgaaattccattgtcaacttagtagtctgaagtcgacctaggatcattgagcttgttgcggggggggcgtccgctattactgagacttgattaggtgctcactagattcctcttaactgggcaggccatctcagaaaggcagcagccccagtcagggacttataaataaaactcccatctccttgggacagagcacctgtgggaaggggtggctgtgggcacag

SEQ ID NO: 103256 - DNA, 481 bp, Homo sapiens
ccctcgtgtgcctacaccaccagggccctgggtttcaaccagaaaactggacagctgtttgggcagagaccaagctagctgcaggagtttttttttttttttttttttttttttttcttgtaccgcagtggtgcctggaacaccaatgagacagaaccgttcactcccctggaaagggggctgaagccagggagcctagtggtcttgctcagcgggtcccactcccacggagcccagcaagctaagaaccactggcttgaaattccattgtcaacttagtagtctgaagtcgacctaggatcattgagcttgttgcggggggggcgtccgctattactgaracttgattaggtgctcactagattcctcttaactgggcaggccatctcagaaaggcagcagccccagtcagggacttataaataaaactcccatctccttgggacagagcacctgtgggaaggggtggctgtgggcacag

SEQ ID NO: 103257 - DNA, 481 bp, Homo sapiens
ccctcgtgtgcctacaccaccagggccctgggtttcaaccagaaaactggacagctgtttgggcagagaccaagctagctgcaggagtttttttttttttttttttttttttttttcttgtaccgcagtggtgcctggaacaccaatgagacagaaccgttcactcccctggaaagggggctgaagccagggagcctagtggtcttgctcagcgggtcccactcccacggagcccagcaagctaagaaccactggcttgaaattccattgtcaacttagtagtctgaagtcgacctaggatcattgagcttgttgcggggggggcgtccgctattactgagacttgattaggkgctcactagattcctcttaactgggcaggccatctcagaaaggcagcagccccagtcagggacttataaataaaactcccatctccttgggacagagcacctgtgggaaggggtggctgtgggcacag

SEQ ID NO: 103258 - DNA, 481 bp, Homo sapiens
ccctcgtgtgcctacaccaccagggccctgggtttcaaccagaaaactggacagctgtttgggcagagaccaagctagctgcaggagtttttttttttttttttttttttttttttcttgtaccgcagtggtgcctggaacaccaatgagacagaaccgttcactcccctggaaagggggctgaagccagggagcctagtggtcttgctcagcgggtcccactcccacggagcccagcaagctaagaaccactggcttgaaattccattgtcaacttagtagtctgaagtcgacctaggatcattgagcttgttgcggggggggcgtccgctattactgagacttgattaggtgctcactarattcctcttaactgggcaggccatctcagaaaggcagcagccccagtcagggacttataaataaaactcccatctccttgggacagagcacctgtgggaaggggtggctgtgggcacag

SEQ ID NO: 103259 - DNA, 602 bp, Homo sapiens
tcaggcaacagtttggaattcaagtgcagcactttgcagtgaatttgagattgtaggtgacttttttttttctgcatctaaccaccttttctatgtttggggtctccctttacattatgaggtagtttcttactctagaaacaaaaagatgccggggaaaattttcctagccctccttgcagctgtagtccagattcaccttcaaggctctaatgatatgatttatctatgcagattttaaaacaaaaagctagtacattaaaagcgagggtaatatatactctcttttttaagggggcagaaaagtgccacttacagcagttttcagagttaggaatagatgcacttagataatggtgcagcaacaagatctgttcctggtcctgttttcatgtgaccatttctatgacactttgtaagagttgtttctgactgtctatcctccaraccaagctccatagcccttcccccaaattctgtgtttagcaaaacatcctttaataaattggttttctgactgattcaggcagagttacaattgtttaggaatacaaaacaaagcaaaactactaactgacagtgggaccaaaggcatatatgaa

SEQ ID NO: 103260 - DNA, 579 bp, Homo sapiens
actcaggaggctgagacaggagaatcgcttgaacccgggagttggaagttgcagtgagccgaaatcatgcyactgcagtccaggctgggtgacagagcaaaactccatctcaaaaaaaaaaaaaaaaaaaggataaaaaagatctctacactaaaaatctgtgaaacagtgattaaaaaaaagttgaagaagacttaaataagtaaataagtgtaaagctatcccacattcatggtttggaagaattaacattgttaaaatgtccatcccacccagagtgatttgtgaattcaatacaatccctatcaaaatactaataactttcttcacagaagtagaacaaatagtcttaaaacttcagagtccacaaaagactctgaaaagtcaaagcaatcttaggcaaaaagaacaaagctagaggcatcacacgacctgactttataatataccataaagtgacagtaaccaaaatggcatggtactggcataaatacagacacatagaccaatagaacagagagccaaaaataaattcatgcatttacagccaactgtttttcaacaatggtgccaataaca

SEQ ID NO: 103261 - DNA, 529 bp, Homo sapiens
agcctggccaacatagcgaaacactgtctctactaaaaatacaaacaattagccgggccaacatagcgaaacactgtctctactaaaaatacaaacaattagccgggcatattggcaggtgcttgtaattccagctactcgggaggctgaggcatgagaattgcttgaacctgggaggcagacattgcagtgagccaagatcgcaccactgtactccagactagggatagagagagactctgtctccaaaaaaaaaaaaaaaaaaaacmaacaaacaaacaaacaaaacaaaacaaaacaaaaaaaaagttcagagatgagtatatacagcccccaatatccaaaatgagccctggaaaggccacagagattaagtcctcatttcctaactccaggcccctacacagcacctggggcatcctggaagtaaagaatgaacacaggtgtatttacagacagcatcagccacttcatgctgtccaaggcagagatccctgtattgccattcctaacactaatcccccaactt

SEQ ID NO: 103262 - DNA, 561 bp, Homo sapiens
gatggataggtatgattttggccatcatctgacagtggtgtcacgcmcgatacctgcatggcctccactgatgagtggaaagcacgtggctcttagtaggtgaccattaagccagaggagggtgatatagtttggatatttgtccctgcccagatttcttgttgaattgtaatctccagtggtagaggtggattctggtgggaggcgttggggtcatgggggtggatccctcatgaatggcttgggccatccctttggtgataagtgagctcttgctctgagttcagacaagatctggttgtttaagtctgtgtcaccttcccctgcactctgtcttgcttgctcctgcttttgccttgtgacatgcccggttccccctttgtcttccaccatgattgaaaactccatgacgcttcaccagaaactgaatagatgccagcaccatgcttcctgtacagcctgcagagccatgaaccaattaaacttcttttctttataaattacccagttgcaggtatagcaattgagaacaaaccaataccgtggggctgagcagattcc

SEQ ID NO: 103263 - DNA, 541 bp, Homo sapiens
gaatgggatcgaatataatggaatacactggaatgtaatgtaatgaactcgaatgtaattgactggaatggaatgtacatgaatgraatgtaatcgaatggaaagtaatccaatggaatagaatctaatgcaataaaatcgactcagatagagtagaatgtaatggaatggagtgcagtgcaatggaatggaatggaatggaatgcaatggaatggaatggaatggaatggaatggaatggaatggaatgggatggaatggtatggaatggatagtaatggactggagtgaaatggactggaaaggaatggactcaaattgaaagggctcgaaaggaatggagtcaaatggaatggtctggaatggaatgaacaagaatgtaatgcaatccaatagaatggaatcgaatggcatggaatataaagaaatggaatcgaagagaatggaaacaaatggaatggaattgaatggaatggaattgaatggaatgggaacgaatggagtgaaattgtatgcagtagaagagaatagaatggaatgc

SEQ ID NO: 103264 - DNA, 541 bp, Homo sapiens
gaatgggatcgaatataatggaatacactggaatgtaatgtaatgaactcgaatgtaattgactggaatggaatgtacatgaatgaaatgtaatcgaatggaaagtaatccaatggaatagaatctaatgcaataaaatcgactcagatagagtagaatgtaatggaatggagtgcagtgcaatggaatggaatggaatggaatgcaatggaatggaatggaatggaatggaatggaatggaatggaatgggatggaatggtatggaatggatagtaatggactggagtgaaatggactggaaaggaatggactcaaattgaaagggctcgaaaggaatggagtcaaatgsaatggtctggaatggaatgaacaagaatgtaatgcaatccaatagaatggaatcgaatggcatggaatataaagaaatggaatcgaagagaatggaaacaaatggaatggaattgaatggaatggaattgaatggaatgggaacgaatggagtgaaattgtatgcagtagaagagaatagaatggaatgc

SEQ ID NO: 103265 - DNA, 633 bp, Homo sapiens
tcctaattttaaatagagagacagagggatattgttctctgccttgcaccctttctcctgagctgcacctgcagcttctccattccatmgtgattctaagattttccaccaggggtattgtcccaaatgaggccagagacttttggaaagacccttaggggagccgtcttttagttcaggatcacagatgtgtggatggaatgcaacttgtaaagctcatgtctgagaaggaagcaagacagatctgagtgagggaaagagcctatgggaccttgaccatatggagtcaccatggcttaacctgtcctccaccccaggatatctcagttacttgagccaatacattttgtttttggctcctgatgactgtcctgaaaaagcctattttctatgtaaatgaaatctgaaaggaatgatccaaatattagtacagaggaaagtatttattttcatattctttttttctgtgtttttacaagtgttttataaagattgtttttacttttatgctaagaaaaaattaaagtgtaaatgttttaaagggttgtgttgtgatatctgccttggatacattcccttcctttgtatggttgggattgtaggctaagaatttaaggctttcccacctccatc

SEQ ID NO: 103266 - DNA, 633 bp, Homo sapiens
tcctaattttaaatagagagacagagggatattgttctctgccttgcaccctttctcctgagctgcacctgcagcttctccattccatagtgattctaagattttccaccaggggtattgtcccaaatgaggccagagacttttggaaagacccttaggggagccgtcttttagttcaggatcacagatgtgtggatggaatgcaacttgtaaagctcatgtctgagaaggaagcaagrcagatctgagtgagggaaagagcctatgggaccttgaccatatggagtcaccatggcttaacctgtcctccaccccaggatatctcagttacttgagccaatacattttgtttttggctcctgatgactgtcctgaaaaagcctattttctatgtaaatgaaatctgaaaggaatgatccaaatattagtacagaggaaagtatttattttcatattctttttttctgtgtttttacaagtgttttataaagattgtttttacttttatgctaagaaaaaattaaagtgtaaatgttttaaagggttgtgttgtgatatctgccttggatacattcccttcctttgtatggttgggattgtaggctaagaatttaaggctttcccacctccatc

SEQ ID NO: 103267 - DNA, 246 bp, Homo sapiens
gaattccattccattccaatccattcctttcctttcgcttgcattccattctattctcttctactgcatacaatttcactccattcgttcccattcyattcaattccattccattcaattccattccatttgtttccattctcttcgattccatttctttatattccatgccattcgattccattctattggattgcattacattcgtgttcattccattccagaccattccatttgactccattc

SEQ ID NO: 103268 - DNA, 460 bp, Homo sapiens
ggaagggaatgtagtgtaatggacaggcctggaataaagtggaatgctacggtctcgaatggaataaaaatgtatggaatggaatgcaatgaaacggaatcgaatgtcatagaatgtaatggaatgcaamaaaatggaatccaaaatcattgactggaaaggctgggtgtcgaaaggaattgactccaatggaatggaatcgaatggaatggaagtgaatagaatcgaactaaatcgaatggaatggaattgataggaacggaatggaaaggaatgcaatgatttggcatggaatggaatcgaatggcatcgaatggaatggtatggaatgcaatggaatggaatgtattagaatgtaatgaactttaatggaatgtactcgaatggattcgactggaatggaatgttctggaagtgaatggactccaatggaatggattcaaaaggaatggaatcgtac

SEQ ID NO: 103269 - DNA, 544 bp, Homo sapiens
ggatgtggaaaccttggcgggggcgagcacccaggtcattttcacaagcagcaaaacaaaaacaaaacttcagctggtttccaatcactcaccatgctgcttctttatraatcattttaaagtgatttcactaataaaattcagcatgtacagcgttttatttttaacgtgcacattttaaagcataatgttacatacattatggaaaggtgcataatgagagaaatcatttccataatatatcaacttcctggctaaaaattctttggataaaaatccaatatttatttgatatcaatggacacctatgtcaatttggttttcactgagggaccttagagggaaactttgaagtgggaagatggtctgtgttcttgaatagaaagacacatttttctaaagttctgagctctttctgtgtttataaattttacataatccaaataaagttatcaaagtgttaacatttttgaattactcatgctgtcttttactattgtgacgacattaagaaaacttttgaaatggagtcaaaaagacttgc

SEQ ID NO: 103270 - DNA, 441 bp, Homo sapiens
aggctttgttctctttattttggaaatgaaactgttttatatccctaaagcaagagagatggacaccagcttggggcgcactggagaacacagaacggcagggcaggggctccactgggttggggctctggtgtccccaggctactgcagacacagccctgagcccagggagcagcagctgttgtttctgcagcagagcggagcggccaggtcagctccagccctcctgtgagctgtgggaagttgccacaggcccaccrgccctcctcacttctcctgtagctcccagcaactgtcatcatgaaccatctgcaccctcaccaccccttaggggctgggcagtggtagggctcttattcccattgaccatgagaaaacagaggacgctggttggcctggccagggtccctcaggtgtaaagggaggattaacaggaagaag

SEQ ID NO: 103271 - DNA, 441 bp, Homo sapiens
aggctttgttctctttattttggaaatgaaactgttttatatccctaaagcaagagagatggacaccagcttggggcgcactggagaacacagaacggcagggcaggggctccactgggttggggctctggtgtccccaggctactgcagacacagccctgagcccagggagcagcagctgttgtttctgcagcagagcggagcggccaggtcagctccagccctcctgtgagctgtgggaagttgccacaggcccaccggccctcctcacttctcctgtagctcccagcaactgtcatcatgaaccrtctgcaccctcaccaccccttaggggctgggcagtggtagggctcttattcccattgaccatgagaaaacagaggacgctggttggcctggccagggtccctcaggtgtaaagggaggattaacaggaagaag

SEQ ID NO: 103272 - DNA, 441 bp, Homo sapiens
aggctttgttctctttattttggaaatgaaactgttttatatccctaaagcaagagagatggacaccagcttggggcgcactggagaacacagaacggcagggcaggggctccactgggttggggctctggtgtccccaggctactgcagacacagccctgagcccagggagcagcagctgttgtttctgcagcagagcggagcggccaggtcagctccagccctcctgtgagctgtgggaagttgccacaggcccaccggccctcctcacttctcctgtagctcccagcaactgtcatcatgaaccatctgcaccctcaccaccccttaggggctgggcagtggtagggctcttattcccattgaccatgagaaaacagaggacgctggttggcctggccagkgtccctcaggtgtaaagggaggattaacaggaagaag

SEQ ID NO: 103273 - DNA, 616 bp, Homo sapiens
ttcccaccaacagtgaatgagagttcctgttgctccacatcatcaccagcatttggggttgtaagggtttggatctgggccattttgataggtgtgtagtgctatctcattgttttaayttgcagttccctaatagcatatgatgttgagcatcttttcatatgcttctttgccatttgtatgtcttcattggtgagttgtctattctggtcttttgcccatttttaattgggttattcatttgcttattgttgagtttaaagagttctttatacattttagataacagtccttaaaagaattcattgttggctggacatggtggcttacccctgtaatttcagcactttgggaggctgaggcgggcagatcacctgaggtcaggagttcgagaacagcctggccaacatggcaaaaccctgtctctactaaaaatacaaaaaaaataaaaaatgagccgggtgtggtggcacatacctgtagtcccaactattcgggaggctgaggcaggagaatcccttaaacctgggaggcagaggttgcagtgagctgagattgtgccactgcactccatcctgggctacagagagagactccatctcaattttaaaaaaat

SEQ ID NO: 103274 - DNA, 616 bp, Homo sapiens
ttcccaccaacagtgaatgagagttcctgttgctccacatcatcaccagcatttggggttgtaagggtttggatctgggccattttgataggtgtgtagtgctatctcattgttttaacttgcagttccctaatagcatatgatgttgagcatcttttcatatgcttctttgccatttgtatgtcttcattggtgagttgtctattctggtcttttgcccatttttaattgggttattcatttgcttattgttgagtttaaagagttctttatacattttagataacagtccttaaaagaattcattgttggctggacatggtggcttacccctgtaatttcagcactttgggaggcygaggcgggcagatcacctgaggtcaggagttcgagaacagcctggccaacatggcaaaaccctgtctctactaaaaatacaaaaaaaataaaaaatgagccgggtgtggtggcacatacctgtagtcccaactattcgggaggctgaggcaggagaatcccttaaacctgggaggcagaggttgcagtgagctgagattgtgccactgcactccatcctgggctacagagagagactccatctcaattttaaaaaaat

SEQ ID NO: 103275 - DNA, 500 bp, Homo sapiens
ttgctaatgtatggaatgtacgttagtacaaccactatggagaacagtttggaggttcctcaaaaaactaaaaatagagctaccatacaatccagcaatcccactgctgtgtatatactcaaaagaagggaaatcagtgtataaaagagatatctgcactctcatgtttattgcagcactattcacaatagccaagatctggaaacaacctaacaacagtctatcaacagatgaatggatgaggaaatgtggtacatttacacaatggagtactattcagccattcaaaaaatggtcatttgcaccaacatagatggaactggaagtcattatgttgagtgaaataagccaggcacagaaagacaaactttgcttgcgctcatcatttytgagagctaagaattaaaacaattgaattcatggagatagagagtagaagggtggttaccagaggctgggaagagtagtgggggtgggggagatgtaaggatggttaatag

SEQ ID NO: 103276 - DNA, 390 bp, Homo sapiens
ccgttcactacttagagtttatttcagaaatcaatgattkgaatttaattcataaattttggcaacataccttcatctagctctcaaacacctgcagcatctgaaataaatcaaatattacttataatgtttcagtcaaacaagagacattatcatgtaaacccactgtaagtcaaggagcatctgtactgtagattgatcatccctaatctaaaaatctgaaatccaaaatgctctacaatctgaaactttttgagcacggacatgacaccacaactgcaacgttccacacctgacctcatgtgacaggctctggggaaaacagtaaaaactttcttacctgcaaaaaattactgtaaaacattgtagagaattaccttcaggctatgt

SEQ ID NO: 103277 - DNA, 390 bp, Homo sapiens
ccgttcactacttagagtttatttcagaaatcaatgatttgaatttaattcataaattttggcaacataccttcatctagctctcaaacacctgcagcatctgaaataaatcaaatattacttataatgtttcagtcaaacaagagacattatcatgtaaacccactgtaagtcaaggagcatctgtactgtagattgatcatccctaatctaaaaatctgaaatccaaaatgctctacaatctgaaactttttgagcacggacatgacaccacaactgcaacrttccacacctgacctcatgtgacaggctctggggaaaacagtaaaaactttcttacctgcaaaaaattactgtaaaacattgtagagaattaccttcaggctatgt

SEQ ID NO: 103278 - DNA, 442 bp, Homo sapiens
gaattcctggaatgagttcccacgcgcaagagcaaggagcyatctttgctgtttgtgcaacttagtcgttacagcccgcgggctctggagaatccatacctaccggggcagaagggatatatcatcagcacagcacagctactctacaaaatcttagaaggcagattcttttaccaggttcctgatccattcctccttactgggcaggacctcgacaactccttcccggggagaatgtaaatctctgtcagctcgagaacaccggtggggtggtggaggccccaggtgggaggtcccacccagagaggaggaaagaatcagggatctgtgtaaagaatctgcctggccactatttggtagagcagttgtgatgtgctgggggatcccttccacccccagtcatttgggactctccaaagctggccccatcctctcccccagg

SEQ ID NO: 103279 - DNA, 475 bp, Homo sapiens
caagagcaaggagccatctttgctgtttgtgcaacttagtcgttacagcccgcgggctctggagaatccatacctaccggggcagaagggatatatcatcagcacagcacagctactctacaaaatcttagaaggcagattcttttaccaggttcctgatccattcctccttactgggcaggacctcgacaactccttcccggggagaatgtaaatctctgtcagctygagaacaccggtggggtggtggaggccccaggtgggaggtcccacccagagaggaggaaagaatcagggatctgtgtaaagaatctgcctggccactatttggtagagcagttgtgatgtgctgggggatcccttccacccccagtcatttgggactctccaaagctggccccatcctctcccccaggccccagttggaaggactcccactgggcaggaactccagaactccctcccagggagaatt

SEQ ID NO: 103280 - DNA, 474 bp, Homo sapiens
caagagcaaggagccatctttgctgtttgtgcaacttagtcgttacagcccgcgggctctggagaatccatacctaccggggcagaagggatatatcatcagcacagcacagctactctacaaaatcttagaaggcagattcttttaccaggttcctgatccattcctccttactgggcaggacctcgacaactccttcccggggagaatgtaaatctctgtcagctcgagaacaccggtggggtggtggaggccccaggtgggaggtcccacccagagaggaggaaagaatcagggatctgtgtaaagaatctgcctggccactatttggtagagcagttgtgatgtgctgggggatcccttccacccccagtcatttgggactctccaaagctggccccaycctctcccccaggccccagttggaaggactcccactgggcaggaactccagaactccctcccagggagaat

SEQ ID NO: 103281 - DNA, 581 bp, Homo sapiens
aaagaggcagaaggacagtcccttttccttgacacggatggcatgaatgggcttttgcggagaaactctgcctgaccctggagtctgagtcaggcagagtctgagtcaggtggagtcccagttagaagtcctctgaggaagctgcactagagtcactgccctcagacatcaacttccatgtcttccccactgctgcagtctaaagagttactgctttcttcctcttcgccatctttcttcctgttstcttctggttccatagagacctgacagtttacccaaatagtctgtgatgcctctgttcctgcagcctggagcccctgcccctccccaaacccttcttgcagaccctttgctgatgaggactgcggatctgtttgtttcaagctgggggccgggcctcccatcatcgccatattcttacccttagcataggtcgattctttgtatgcagcataatcttcaggtgacaaagtcttgagccagagatccaattccactttgtattccttctgcagcaactcagcctggctcttgtaatgatccttctggctctgcgggatgcgctgccagcgtctgcc

SEQ ID NO: 103282 - DNA, 581 bp, Homo sapiens
aaagaggcagaaggacagtcccttttccttgacacggatggcatgaatgggcttttgcggagaaactctgcctgaccctggagtctgagtcaggcagagtctgagtcaggtggagtcccagttagaagtcctctgaggaagctgcactagagtcactgccctcagacatcaacttccatgtcttccccactgctgcagtctaaagagttactgctttcttcctcttcgccatctttcttcctgttgtcttctggttccatrgagacctgacagtttacccaaatagtctgtgatgcctctgttcctgcagcctggagcccctgcccctccccaaacccttcttgcagaccctttgctgatgaggactgcggatctgtttgtttcaagctgggggccgggcctcccatcatcgccatattcttacccttagcataggtcgattctttgtatgcagcataatcttcaggtgacaaagtcttgagccagagatccaattccactttgtattccttctgcagcaactcagcctggctcttgtaatgatccttctggctctgcgggatgcgctgccagcgtctgcc

SEQ ID NO: 103283 - DNA, 581 bp, Homo sapiens
aaagaggcagaaggacagtcccttttccttgacacggatggcatgaatgggcttttgcggagaaactctgcctgaccctggagtctgagtcaggcagagtctgagtcaggtggagtcccagttagaagtcctctgaggaagctgcactagagtcactgccctcagacatcaacttccatgtcttccccactgctgcagtctaaagagttactgctttcttcctcttcgccatctttcttcctgttgtcttctggttccatagagacctgacagtttacccaaatagtctgtgatgcctctgttcctgcagcctggagcccctgcccctccccaaacccttcttgcagaccctttgctgatgaggactgcggatctgtttgtttcaagctgggggccgggcctcccatcatcgccatattcttacccttagcataggtcgattctttgtaygcagcataatcttcaggtgacaaagtcttgagccagagatccaattccactttgtattccttctgcagcaactcagcctggctcttgtaatgatccttctggctctgcgggatgcgctgccagcgtctgcc

SEQ ID NO: 103284 - DNA, 585 bp, Homo sapiens
caattaggcaagaaaaagaaataaaaggaatccaagttggaaaaaaaagaagtaaaattatctctatttatagatgatacgatcacatatacagaaaatcctaaagactccaccaaaaaaacctgttaaaatagacaaatttagtatagttaaaggatacaaaatcaacatagaaaaatcagcagtattcctatatactaacaacagactatccaaaaaagagatcaagaaaacaatcccatttacagtatatccaaaaaaaaaaaatacttgggagtaaatttaaccaaggagatgaaagacctgtacrctgaaaactataaaacactgatgaaaggatgaagaagacacaaataaatggaaagatatccccatgtacatgaattggaagaattaatattgctaaaatgatcattggcaccaaaacaatctacagattcaatgcaatgcctatcaaaattccatgacatttttcccagaaatagaaagagaatcctatgaaaccacaaaagactccaaatagtcaaagaaatgttgagcaaaaggaagaaagctggaggtctcatactacctgatttcaaatta

SEQ ID NO: 103285 - DNA, 576 bp, Homo sapiens
agactacacattggtacagtgtacattgcttggatgttttggtttaccaaaatctcagaaatcatcactgaagaagttattcatataaccaaacaccacctgctctccaaaaacctattgaaataaaaaaattaataagtcaaaaaatatgatccaataatattctatgtacaaaatactcactttaggcttgaggacacatagaaagtacatgaatgaaaaaagatattctatgcaagttataaccaaagagagcaggggtgcctatacttataaaagaaaaaaacagactaagtcaaaaactgtaaagctgtaaaattctartgtagtagtaaatgcctgcattagacaaaagtgttaatatataataaagatgtcaatttatcaagaggttataacaattgtaaatatataggcacccaccatcagatcatctgaatataacaggcagatattaacacaaaggagaaatacacagcaatgtaacagtggcggactttaatattccactttcaacaatggatatattatccataccaaaaaggaaaaaagtcaataaggatgaagtggacttga

SEQ ID NO: 103286 - DNA, 605 bp, Homo sapiens
cagttgccgcctctgaagagttacatctaattgtcattaggataggaatgatgtccaagcttaactgcttcctgctgatgggggcattgttttggggaaaatggcagtcagatttccctccaagacctatataagtgtccccagtgaaacagagcttccttctgaggctccagttgcatgaccattggaagtctgatgacctctaagtgagaaaaaaacaaattttacaaggttaagtrtgaatggaccaaatatgtgtatctagaaagaggagttaaaagggaaagaatctagtgctgaagataacagaaataagaagttaagcatactaatacttctgaaaacagtattgtggccacagctgtttcaccctggtgaaataaattgaattatgtatgagtgcaattaaactttaggagagataattgtttaggggaacagatattcctatgggtattcaggattaagtgttccttggcaaagatgcctcatgatgaggaacagaatgaaggtaagaacagcaagcataggcaagactataaagaggatatccatggaagattaattattgatacttatcttttgtgatttttagcttgaggtcc

SEQ ID NO: 103287 - DNA, 605 bp, Homo sapiens
cagttgccgcctctgaagagttacatctaattgtcattaggataggaatgatgtccaagcttaactgcttcctgctgatgggggcattgttttggggaaaatggcagtcagatttccctccaagacctatataagtgtccccagtgaaacagagcttccttctgaggctccagttgcatgaccattggaagtctgatgacctctaagtgagaaaaaaacaaattttacaaggttaagtgtgaatggaccaaatatgtgtatctagaaagaggagttaaaagggaaagaatctagtgctgaagataacagaaataagaagttaagcatactaatmcttctgaaaacagtattgtggccacagctgtttcaccctggtgaaataaattgaattatgtatgagtgcaattaaactttaggagagataattgtttaggggaacagatattcctatgggtattcaggattaagtgttccttggcaaagatgcctcatgatgaggaacagaatgaaggtaagaacagcaagcataggcaagactataaagaggatatccatggaagattaattattgatacttatcttttgtgatttttagcttgaggtcc

SEQ ID NO: 103288 - DNA, 552 bp, Homo sapiens
tagtggagcacttgtgcccaaggagagagatgcactcacaaccatatcatttagggtaactattgcataccctgctttatggatcacttgttctacacagaaacttccatgtgtaaagagaatccttcctctgggaggaatgtggctggatttagagaaggacaggttcttaactgaacttaaaattcctctaatagcagagcttgatatttgagggggtggttgtccgttagccagaggtcctgttagaagacagcagtcctgccacattatctgggktataaacagttaagttatttcccacaattaacttagtagcctcttgccaccactacaacagtttggagacaagaccaccatcctttagctacccaattaagttccttgcttaggtagtctacaggtcacagggctggacctcaggcctgggttagaactcccagggccattcccttccttcctgacaaataaagatgaaacattttccctatgggaagactaagggctggtgactcaagcaaggcttgttttacttgatcaaaggcgttttta

SEQ ID NO: 103289 - DNA, 552 bp, Homo sapiens
tagtggagcacttgtgcccaaggagagagatgcactcacaaccatatcatttagggtaactattgcataccctgctttatggatcacttgttctacacagaaacttccatgtgtaaagagaatccttcctctgggaggaatgtggctggatttagagaaggacaggttcttaactgaacttaaaattcctctaatagcagagcttgatatttgagggggtggttgtccgttagccagaggtcctgttagaagacagcagtcctgccacattatctgggttataaacagttaagttatttcccacaattaacttagtagcctcttgccaccactacaacagtttggagacaagaccaccatcctttagctacccaattaagttccttgcttaggtagtctacaggtcacagggctggacctcrggcctgggttagaactcccagggccattcccttccttcctgacaaataaagatgaaacattttccctatgggaagactaagggctggtgactcaagcaaggcttgttttacttgatcaaaggcgttttta

SEQ ID NO: 103290 - DNA, 607 bp, Homo sapiens
atgaattcttaaaaagcgtagcccagttctttgctgggattactgtagtattttgtggaaatatcctggtattaattaatttcaccaacaccctctccccacactgattcatagccataattaatccttgcaatggtcacagcattcatttagtgattttagaaccaatgattatatttgccatattaattgtagttaatataacaatgtacatttttctagttgtttgagccctgaaaatcattttttggaacaacatcagttgcagagaggagaagaaattagcttgaagaaagttgtgtgcttgtctgactacgagagaggaaaagcagattagattcatatggactctattttttccattaaaactaatgccccttgacccttaattattttattcttctaaaaattaatgttgagataaactttttcatgtgcatattgactccaatcccmactgaaccatgaagttaaaaagtgttaagctttcagagaatacgagttgagatatttcaacgaacttgaggagtcacacactgtaaatttaccttagaagctgtattcaggtttgttctcaagccctgatctaatgcccacaagttatata

SEQ ID NO: 103291 - DNA, 468 bp, Homo sapiens
atagttcctttcttatagccaatttctcccttttggaacagaaatgtttacccaatgcctgaactcccactttatcttggaagtaaatattttgcttttgattttacaggtttataggtgagagagatgttctttgtctaagatgagactttgggttaatgctgaaacgatttaagactttggagaaatgttggaaagacatgattttattttgtaatgtgagaaggacatgagatttggggagggggacaaggtgaaataagaatatagtttggatttgtatactcacccaaatcccctgttgaaaagtaattctccatgttggaggtagggtctggtgggaggtgtttggatcatgggggcaggtccctcatgaatggcttggmcatccccttggtgataagtgagctcttgctctgagtttccatgaggtctggtcatttaaaattgtgtgggacctccccctac

SEQ ID NO: 103292 - DNA, 565 bp, Homo sapiens
gtaatgacaggcttgtcaggccagggcatttagaaaataaagacactcatttaagtgttacagaaaatcttccctgtcacaaccatgatctgtctttgcaaaatgctttttatatgccactgttttagtcctagactctaggcacactggcttccttgctgttsccagacaagaaaccctgtacgctcaaggcccttgcacgtgctgtcatttttgccttaaactttctttccctcaaggagctgcgtcattggctcccttgcttccttcaagtatttatttaaaaggcatctaaactgagcacagttgttcatgcctgtaatcccagtactttgggaagccgacgtgggcagattgctggagcccaggagttcaagaccagcgtgtgcaacatggtgaaaccccatttctacaaagtttaaaaaatttgctgggcatggtggtgcatgcctgtagtcctagctatttgagaggctgaggtgggaggattgctttaggctgggatattgaggctgcaatgagctgtgattgagccactgaactccagcctgagcaacagagtgag

SEQ ID NO: 103293 - DNA, 565 bp, Homo sapiens
gtaatgacaggcttgtcaggccagggcatttagaaaataaagacactcatttaagtgttacagaaaatcttccctgtcacaaccatgatctgtctttgcaaaatgctttttatatgccactgttttagtcctagactctaggcacactggcttccttgctgttcccagacaagaaaccctgtrcgctcaaggcccttgcacgtgctgtcatttttgccttaaactttctttccctcaaggagctgcgtcattggctcccttgcttccttcaagtatttatttaaaaggcatctaaactgagcacagttgttcatgcctgtaatcccagtactttgggaagccgacgtgggcagattgctggagcccaggagttcaagaccagcgtgtgcaacatggtgaaaccccatttctacaaagtttaaaaaatttgctgggcatggtggtgcatgcctgtagtcctagctatttgagaggctgaggtgggaggattgctttaggctgggatattgaggctgcaatgagctgtgattgagccactgaactccagcctgagcaacagagtgag

SEQ ID NO: 103294 - DNA, 594 bp, Homo sapiens
gaaaattcttttgcggccaagttcaaaytgctgtaacagagttaagttgcctattcttgtttcctccttcaattttctggttcctctttggttttctggacaagtctgaagaagaagaagcaaaaaaaataaacaaaaaaataaacaaaaaaacccacaccaccatttcttcaaagagaagaaagcacattctcctttttttatgattgacttacctcatcatttcacatttctgttttcgccagcggccatggattttcactggaggagtaagttgatagtataaacctgtggttctcataggtatccccagaccgcagttatcagcatcacatggaaacttcttaaaaagtcatatcagaaactctggggacagaacccagcagtctgctttacaaagcccttcaggtgattcaggtacattctaaagtttgagagctatggttataaactaaggctcctaaagtttttataatcatgggagttctcagtttattttctttttaaacaagctatgtcatattcattaaagtccatgatagttgatattaagaaactgaagctaagaggtgtttctttatgaagaagaatacg

SEQ ID NO: 103295 - DNA, 555 bp, Homo sapiens
agttagcagtcacatctctgtttacaggtcccatcatgaattcttacatgtcttctctttggagaagcattgtattgttgcaattaagtatttggtttctgaaggaaaaaatactaggttgcaacttaagtctactccatacaccgtataattttgagaaagttcatcatttgtagattatgaatgtgatgtgacctagataataataattagatgaatgtgattaacataatgtattcatgtagtaagaagtcaataaatactctctctgattattataaytagggctaccggattgagattataaataggtatctgagttttggcattgttcaggaaatgtattatacagaaatgaatcctaaattgcccagaaagaagagaggctgaaaaaccttcaagtactctgattagctttttaaaattcctccaaagagtatctgaagccgtgttgggcatgagtggagggagtggagatgagggtctgaaaagaagagagcctctggagaaaccccactctttcagttgcaactcctgaatgactatcctaagaca

SEQ ID NO: 103296 - DNA, 608 bp, Homo sapiens
tgtatgcagtacatctggtccagacacagcctcacatggagtcggcacctgtgctagtgcctggagctgcctgccctgccacagcaatcagcgtgcctggctgtgcacagtggctggaccccatgmtcactcacccacacacccctcgccactctgcacctggcttgcccttgacaggtgtggcatccagcctggtagcatgagctgagcacagccagccaggcgagtgggcagaatgagcccagcagacatgagcaatactcatgcggaaggtgctgccagtcacagaggtttctggctggcaaaacaacatcccaaggatcctgtgacaatacatatacaacaaacccacaaataacattatactaaataatgaaacattgtaagcctttcctctaagatgtggaacaagataagaatgccctctcttacccttactattcaacatagtattggaagccttggtagggcaatgaggcaagtgaaaaaagggcatccaaataagaaaagagtaagtgaaattgatactgtttgctaatgacatgatcttatatatagaaagccctaaattactcaccaaaaaaacctgttagaacgaataaatacag

SEQ ID NO: 103297 - DNA, 608 bp, Homo sapiens
tgtatgcagtacatctggtccagacacagcctcacatggagtcggcacctgtgctagtgcctggagctgcctgccctgccacagcaatcagcgtgcctggctgtgcacagtggctggaccccatgctcactcacccacacacccctcgccactctgcacctggcttgcccttgacaggtgtggcatccagcctggtagcatgagctgagcacagccagccaggcgagtgggcagaatgagcccagcagacatgagcaatactcatgcggaaggtgctgccagtcacagaggtttctggctggcaaaacaacatcccaaggatcctgtgacaatacatatacaacaaacccacaaataacattatactaaataatgaaacattgtaagcctttcctctaagatgtggaacaagataagaatgccctctcttacccttactattcaacatagtattggaagccttggtagggcaatsaggcaagtgaaaaaagggcatccaaataagaaaagagtaagtgaaattgatactgtttgctaatgacatgatcttatatatagaaagccctaaattactcaccaaaaaaacctgttagaacgaataaatacag

SEQ ID NO: 103298 - DNA, 302 bp, Homo sapiens
gaattctgccattcaaatgtatgctttatgagcagagagacttcacatgttttgttcatttctctatctcagggtctagagcaatgcctggcatgtagcaattactcaatayatatttgttaaataaatgaaaaattattgccatatgataggttatagtaatataatgttaatgtgagattttatatatatatgttgtaacataatatattaatatgattgctaatatatgtcatctcatcacaccaatcctataaaataagccttatgatctttgtctaagccatatggaaactgaaact

SEQ ID NO: 103299 - DNA, 633 bp, Homo sapiens
accaaaacatttatcttatagagatttgtatccaaaacatataaagaactcttaagtctaaaaaagactatatactatatgattctaattatataacattatatgaaaaagcagaaaatatagatacagtaaaaatataagtggcttccatgggctcaggaggaggcatagagggttgaatatatgaagcacaagattttgtctttagaaagagtaattaaattttatgatattgtaatggtggacttgtaacattatgtatttgtcaaaactcataaaactttatagtacaaagagtgaaccttagtgtatacaaattaaaaaatcagttaaaagttttggagatcacaaaggaattmataataacagaatctaaattaaatatgaaacaatctctttgaagtgggtgtgtgtaaaaggtgctgacctaagtaattttggataggatttagagtcttgaagtctaaagacaaaaagaactgcataaatacacttgttgttaaagttgtttcttgaaaatcatttagaaggttgggggatcccaaaaggaatgcataatatgacaacagaacctaactctaataacaatgtatgaaataatattgctctctgaagggggtgtgtgtaaaaggt

SEQ ID NO: 103300 - DNA, 561 bp, Homo sapiens
gctcttctctgactctgtagtaattattggtagaaatcaatattgtcagttaataaacttgaactggagcctggtacaagatgatgtggatagaaaaaaaattgtaacacaagagaccmtaaaaaatatgaagtattctaacagcaaagagcttggtacatcactggttgcttatggcataacagaaacctttgaaaaaacatatttactcaaaaattcacattgtatctttcatcattgtgctttaacagtcatataacaaagttcggagacatgtaatctaattaaatgggtacaaaaatggcttccaatggccttacaaatgatcccggtaaataataacaagagaaagagaccattttcatattagtgaagatgacaattttattcttttgtgctcagagagctacttgaaagaagggtttctttggtttaactctgtattacctttagattaaaatggacttcacgattttacctttgatagttgctaagcaagtcatcaccaggcctcctgatgtaatgacatgtagatattcttacctcttgatttttgtcagt

SEQ ID NO: 103301 - DNA, 620 bp, Homo sapiens
aaacattttattcaaacttataattttaaattacccagcatattttaagaggtgttttttaaataatgatattaatttaaacgtcacaattgtttcaccttttcttttaaattagaactcagtaaaagagaaagtcttgttttgaaagaaaaaagtgtttctagattttacattcacaacgtaaaatatgctaattgattttttaaagtaataattcatagagaatttaatgaagtacaatagaaatataccgttttgaacactgggggctttgattttttttaactaatgayagtatatttatgaagataaacaacggcgtttatatgactaccaaaggttttagggtataattacaatgttttaaatgttataatgcataaaataaacaatacttttattctgaccataagcaaaatatgtaatgtctttgatgcactgtaggtgatgtaggcaaattttatatttggacatgtgaaaagtgataaataatgcagattcacaatgggattggttttacagttttcatatgttcattgccttaacatttttagaagttagaaaaaatattctatgttttgcctttctcagtaccacatatagaacatgtgtatttatag

SEQ ID NO: 103302 - DNA, 563 bp, Homo sapiens
ttgggatttttttgttggtaatgttttaattacaatttcaatctcactgctttttattggtctgttcaaggtatctgattcttcctggtttaagctaggatttatccatctcttctaggttttctagtttatctacataaaggtgttcatagtagccttcttttgtatttccatggtgtcacatgtaatatctcctgtttygttgcttattgagcttatttcaattttctctcttcttttcatggttaatcttgctaatggtctaccaatgttatttatcttttcaaagaacgaggtttttgttttatttatcttttgtatttttttgtttcaattttatttactcctgctccgatcttggttatttcctttcttttgctggttttgggtttggtgtgttcttgtttctctagttccttgaggtgtgaacttagattatctgtttgtgctctttgagacttttggatgtaggtgttctgggctatgaacttttctcttagcactgcctttgctgtgccccagaagttttgataggttgtgtcactatggtcattcagttgaag

SEQ ID NO: 103303 - DNA, 563 bp, Homo sapiens
ttgggatttttttgttggtaatgttttaattacaatttcaatctcactgctttttattggtctgttcaaggtatctgattcttcctggtttaagctaggatttatccatctcttctaggttttctagtttatctacataaaggtgttcatagtagccttcttttgtatttccatggtgtcacatgtaatatctcctgtttcgttgcttattgagcttatttcaattttctctcttcttttcatggttaatcttgctaatggtctaccaatgttatttatcttttcaaagaacgaggtttttgttttatttatcttttgtatttttttgtttcaattttatttactcctgctcygatcttggttatttcctttcttttgctggttttgggtttggtgtgttcttgtttctctagttccttgaggtgtgaacttagattatctgtttgtgctctttgagacttttggatgtaggtgttctgggctatgaacttttctcttagcactgcctttgctgtgccccagaagttttgataggttgtgtcactatggtcattcagttgaag

SEQ ID NO: 103304 - DNA, 563 bp, Homo sapiens
ttgggatttttttgttggtaatgttttaattacaatttcaatctcactgctttttattggtctgttcaaggtatctgattcttcctggtttaagctaggatttatccatctcttctaggttttctagtttatctacataaaggtgttcatagtagccttcttttgtatttccatggtgtcacatgtaatatctcctgtttcgttgcttattgagcttatttcaattttctctcttcttttcatggttaatcttgctaatggtctaccaatgttatttatcttttcaaagaacgaggtttttgttttatttatcttttgtatttttttgtttcaattttatttactcctgctccgatcttggttatttcctttcttytgctggttttgggtttggtgtgttcttgtttctctagttccttgaggtgtgaacttagattatctgtttgtgctctttgagacttttggatgtaggtgttctgggctatgaacttttctcttagcactgcctttgctgtgccccagaagttttgataggttgtgtcactatggtcattcagttgaag

SEQ ID NO: 103305 - DNA, 351 bp, Homo sapiens
cattctggtatgaaactccaaggatcgggctgggcatggtggctcacacctgtaatcccagcactttgggaggccraagctggtggatcatcaagtcaggagttcgaaaccagcctggccaacatggtgaaacctctactaagaatacaaaatactaaaaatacaaaaattagccaggcatggtggcgtgcacctgtagtcccagctactcaggaggctgaggcaggagaatcgcttgaacccaggaggcagaggttgcagtgagccgagactgttgcaccattgtactccagcctggggcaatggcactccagcctggggcaacagagcaagacaccatctcaaaaaaaa

SEQ ID NO: 103306 - DNA, 652 bp, Homo sapiens
ctgagcaatgactgattagttgagacccgttactcttctaactatgatagatgataacaataaggaaatgttttcatgtgcctaagtgtagattgttacacatcaataaatatccaacacacttagtacattaaagtctatgcaataacacattcatgttttttaaataaagaatcacaatccatcttgtatttggtaaaatcttccttttttctgaaaatcatttagatacatatatatatatatatatatatatatatatacacacacacatgtataatattgtttatcttttaaattcacaaaaaaatttaccatartagaagaccaaaagagaatatgcatataattatatgaatagattttttaaaagcattttaaaaatgcaacatttattgctgataaaaactgtcagcaaacaagaaacaaaaggaaacgttctctaaatgataaacgtattctaagtaaaacctatagctatcactatttattaagctatcttaaaggtgatagaactaatattttccaacattttcctcttaatatcaggatcgaagcaaagatttccattctgaccacttctctctaaccttgtacttgggtttctatatgtgaaaatcatgcacacacacacacacacacacaaaatcca

SEQ ID NO: 103307 - DNA, 578 bp, Homo sapiens
gattaaattgtgcccacccagactaagggtgagtctgccttacccagtccactgactcaaatgttaatctcctttggcaacaccctcagagacacacccaggaacaatactttgcatccttcaattcaatcgagttgacactcaatattaactaccacatgggtcaatgaagaaattaagaagaaaattaaaaaattcgttgtaacaatgaagaaattaagaagaaaattaaaaaattcattgtaacaatgaagaaattaagaagaaaattaaaaaawtcattgtaacaatgaagaaattaagaagaaaattaaaaaatttgttgtaacacaatatatcaaaacctgtgggatacagcaaaagcagtactaagagaaacatttgtagcaataaatgcacatatagaaaaaaatagaaaaccttcaaatacacaattccataatgcatcttaaacaactagaacagcaagatcaagcaagtacaaaattaatagaataataaaattataaagattagagaaaatatagttgaagttgaaattttaaaagtacaaaattttgacaaaacaaaaaatgaca

SEQ ID NO: 103308 - DNA, 578 bp, Homo sapiens
gattaaattgtgcccacccagactaagggtgagtctgccttacccagtccactgactcaaatgttaatctcctttggcaacaccctcagagacacacccaggaacaatactttgcatccttcaattcaatcgagttgacactcaatattaactaccacatgggtcaatgaagaaattaagaagaaaattaaaaaattcgttgtaacaatgaagaaattaagaagaaaattaaaaaattcattgtaacaatgaagaaattaagaagaaaattaaaaaattcattgtaacartgaagaaattaagaagaaaattaaaaaatttgttgtaacacaatatatcaaaacctgtgggatacagcaaaagcagtactaagagaaacatttgtagcaataaatgcacatatagaaaaaaatagaaaaccttcaaatacacaattccataatgcatcttaaacaactagaacagcaagatcaagcaagtacaaaattaatagaataataaaattataaagattagagaaaatatagttgaagttgaaattttaaaagtacaaaattttgacaaaacaaaaaatgaca

SEQ ID NO: 103309 - DNA, 564 bp, Homo sapiens
caggcttacttgttttagaaatgtaagaaagaactctaaatacaaggggaagtgttattatggaggctgcagggaaaattagatttccatcaccattccttacggtctattaatttcttagtctttaatatgttcacttctctcttactgtcttctttagttgcttgtataaatcagctgtcagacatcaccttatgctagtcacccagaatcaaagtgatttytatcaagagtcgtaggtattgtcagcttgtcaagaatgccattgccttatgcttttcatcattgcaattgctccttaattgacactattgaaatcctgtcagcttttctttcctttgtttgctttacacagaataggaaagaggatgcagttcctatcattcctatccattagcctggtaaaactacagtttcagggagagaaagtttggtctaataaatcatatatttcataaagagaaaaataaggatgttcaaatggagactgcagatgcagttgcttaaatgatttcttgtctaatattaaatacttttagctttcaaatcttcatgtatagatta

SEQ ID NO: 103310 - DNA, 564 bp, Homo sapiens
caggcttacttgttttagaaatgtaagaaagaactctaaatacaaggggaagtgttattatggaggctgcagggaaaattagatttccatcaccattccttacggtctattaatttcttagtctttaatatgttcacttctctcttactgtcttctttagttgcttgtataaatcagctgtcagacatcaccttatgctagtcacccagaatcaaagtgatttttatcaagagtcgtaggtattgtcagcttgtcaagaatgccattgccttrtgcttttcatcattgcaattgctccttaattgacactattgaaatcctgtcagcttttctttcctttgtttgctttacacagaataggaaagaggatgcagttcctatcattcctatccattagcctggtaaaactacagtttcagggagagaaagtttggtctaataaatcatatatttcataaagagaaaaataaggatgttcaaatggagactgcagatgcagttgcttaaatgatttcttgtctaatattaaatacttttagctttcaaatcttcatgtatagatta

SEQ ID NO: 103311 - DNA, 553 bp, Homo sapiens
acatcttaccatggcagagcagaagagagagagcatgaaggaggaagtgctacatactttaaaacaactagatcctatgagaagtcactcattatcatgagaacagcatgggggcaatctgctctcatgatccaatcacctcccaccaggtcactctccccaacacatggggattacaattcgacatgagatttgggttgggacacagagccaaaccatatcattctgacccctagcccctctacggagacatttyccccattgtattggctaacaatatttggttcctctttacttatgaaaatttctgaagcaggtttgaatatctcaccagaaaatgagtttttcttttctaccacatgactgggcagcaaattttcctaacttttatgctctgcttcccttccagtttcagatatctctatgttcatgcatatgagtatacactttccaaaataaccaggtcacatgttgaatgctttgctgcttagaaatttcttctgccagatagcctaaatcatctatctcaaggtcaaagttccctggatcttta

SEQ ID NO: 103312 - DNA, 523 bp, Homo sapiens
tctcaacttatatatatatatgatgtatatatatcatatatatatctcaaatgatatatatacatcatatatatatgactattgtgactattaaattgtcacatattagaatcaatatcaattatattactgttgataattggaagcaagtatttctgtgtcragttatcattttggttgatcagcagattaaaacactaatggtatgcagctgtgcaaaaacaactgctaaggaaaagagtaaaatattacagggttttcttttttatttaaataattattcaaaaataaaatgctgttgtatgctgctacctacaatattaatttgacaattaagtctacgtttctaattcaatattatgtattcctttcaggattaattttccctctttttcttaaataggttctttttcaaatgagtgacataaacatatgcatatgtatgtgtgtataaatatatctcatatatttgtatccattaggagatttttctctcatgcaaataacaattttggggttaacc

SEQ ID NO: 103313 - DNA, 603 bp, Homo sapiens
aactatgtatttctttttagaattctgtcaattattgcttcatatactttggggttctattgtttgatgcatgtatgtttatacttgttatgtgatgtttatgaattgacagttgacacttttttcaatatatattgttctttttgccttttgtaacaatttttgctttaaagtgtattttgtccaatattaatatcttccccagctctttgcttagtattatgtaatatttatttcttctttaatttcaagcctatatttcattaagcctaaattrtgtcattctattctaccatataaagtaattagagaatgttaaaatattatttggttaaattgattagaaatttttcttaattagatttgtctttcttgtgcatgatggctaattttatgtgtcaacttggctaggatatgtataatgccaagcttttattcaaatgccaatctagacattgctgtgaaggtatttttaagatatgattaacatttaaattagcaaactttgtataaagcagatggtcctctatagtgtggataggtctcattcaatcaagtgaaggccttaagagaaaagatttaggcctcttgaggaaaaagaaa

SEQ ID NO: 103314 - DNA, 604 bp, Homo sapiens
aaacatgttttcactataaattattcaacctcaggtttttttttcttttatagaaacacaaaaactgactaacacagatgtggacaagtcaaccacctgattatgctgtgccagcaaaatgccaatctcagtgtttacaatcattctttgttgtttttcmtttacactgtatgtcttgggggtggtttgtggctcaggctgctatagtaccacagcagagtcccataacactaacctggaagtgatgcttctgcagggtgcctcccatttatgggatctcataaaaatgggggatgcaagtaaggaatagccaggtgctaggtttcctctagtgttgctgagggcatgtgatacctccagtcagtttaatgatgctatcagacatgtcaagtttgtacaagatgtgacctcccttccttcatggactagacaattgaggctgaaaggtctgaatcaagcaataagagaaagggtgccaccagagttagtagccttagagcagatacagacaaactggttttccacaccgacttggctcaactcctgtgaaatatgtagggaacaccagagacgccaagaggagtggaaggttgagcactaaact

SEQ ID NO: 103315 - DNA, 604 bp, Homo sapiens
aaacatgttttcactataaattattcaacctcaggtttttttttcttttatagaaacacaaaaactgactaacacagatgtggacaagtcaaccacctgattatgctgtgccagcaaaatgccaatctcagtgtttacaatcattctttgttgtttttcctttacactgtatgtcttgggggtggtttgtggctcaggctgctatagtaccacagcagagtcccataacactaacctggaagtgatgcttctgyagggtgcctcccatttatgggatctcataaaaatgggggatgcaagtaaggaatagccaggtgctaggtttcctctagtgttgctgagggcatgtgatacctccagtcagtttaatgatgctatcagacatgtcaagtttgtacaagatgtgacctcccttccttcatggactagacaattgaggctgaaaggtctgaatcaagcaataagagaaagggtgccaccagagttagtagccttagagcagatacagacaaactggttttccacaccgacttggctcaactcctgtgaaatatgtagggaacaccagagacgccaagaggagtggaaggttgagcactaaact

SEQ ID NO: 103316 - DNA, 568 bp, Homo sapiens
agtaaggaatagccaggtgctaggtttcctctagtgttgctgagggcatgtgatacctccagtcagtttaatgatgctatcagacatgtcaagtttgtacaagatgtgacctcccttccttcatggactagacaattgaggctgaaaggtctgaatcaagcaataagagaaagggtgccaccagagttagtagccttagagcagatacagacaaactggttttccacaccgacttggctcaactcctgtgaaatatgtagggaacaccagagaygccaagaggagtggaaggttgagcactaaactgtcaatatgcttatttcacaacaatgaggtaacaaaggcctaaaagcataacacctgttaggatctccaaagctgtggccaccatggttaatctgacaaaatgctggatctgtcatcttagacctcattttttttttatcaaccagaggaaacaacttttcctgatggtgataaactacaatagcattcctaatgctgtgttatacgcaaatcaacagaacctgaaccttgatttactgagtgaagacctggcacccgccac

SEQ ID NO: 103317 - DNA, 521 bp, Homo sapiens
acattttagcttcttattcaaaaatttatgtgacacatgaccatattcaatttgtagataagattttataataggaaaaggaacttcacatgcaacaattcggcctttggctttatgtatgagcatagtgtgcactggaattctaatatctttgggaaatatttgttacacataaattcaattccttgctttttttacttagtaaagtttctcatcatcattttaagccatgtgtcaagattattatgtcttatttttttagaatgcctccaaagaacaaaaaaatgctaataagcttctygttaacctgctaataaatgaaaattaattctagaaaagggctttggcctgcaaaaatgtgtgccttacagtaaagaacttcaacacatacaggcttttgagcagtggatttcaatatagtaaagttacaatgttctgtacatagttttaaaagtacttatactttttcctgttgttgttttgtttcatttttcccattctctctctgagttttagttttg

SEQ ID NO: 103318 - DNA, 632 bp, Homo sapiens
taaaaagccaaatgggaaaggctggtgatttgttcaggacctaagctataaataaaataattcctatacacctgttgttcctaacccccacatcttactaaccaatattcctatcactgccagccacttctctctttctgatttatgtagtgcatttttcagtattcctgtggagaaaaatagccagtatatttttgctttcacttgctaaaattgcaaatacacatggacagtcttaccactgggctactctgaaagtcctacttatttatctcaaatactaaaggcagacttagaatacattgaatttccaaaagaatctactctaattcagtatgtggatgatttaytgttgtgttcatcctctctaccaaaatgcagaggagatactgtccacctattaaaacagcttgcttttaagagacacaaagtattgaaagataaattataattttgtctcctccaagttaaatgtttaggacatatgatttcccaaagggggttactaataaaccctgagagaatctctgctgttaccatcttcccccacccccctccaaactaaaaagcaattaagaggattcttagagttaacaggctatttcaggagttggattccaaactactcctta

SEQ ID NO: 103319 - DNA, 499 bp, Homo sapiens
gagggtctaaccaggtagaayattgcatagcaatagatattggggatgattagttgagacaattgcctgattacaatgggaaaaatctagctgcctcctatgtaaactgccatagcttggcctgctaaataactaccagccctgtgcttgcgctggatgcccccatccatcaccaagcacactgacaccacccttaaagaattatttatgggagtcaattggtggacagaggtccctgatggcataaattccacactaagaccaggatgcctctaggaagccttatggaatgcccagacaagagtatacttagaggtaacatcccctcacctaacaattgtttgggatacccagcagctctggattgactctatttatcaaattgtgcaaatgccattagtgtacaacggcaacagtattcccaatggatatgccaaaattggccacacaaaaaactaaagcgtgacctcgctggaggagttggagctgggctaggcat

SEQ ID NO: 103320 - DNA, 578 bp, Homo sapiens
ttgtctcgggggctgggcatggtgacttacacttgtaatcccagcactttggaaggccgaggtgggcagatcaattgaggtcaggtgtgtgagaccagtctggccaacatggcgaaaccctgtatctattaaaaatacaaaaaattagccaagcatggtggcccrtgcctgtagtcacagctactcaggaggccgaggcatgagaatcacttgaacccagtgagtggaggttgcaatgagctgagatcacgtcattgcactccagcctgggtgccagagtgagactgtgtctcaaaaacaaacaaacaagcaaaaaacagtgtgtctctggtagattgcatatacttggatcacttttttttaatccatcctgccaacctcttcttgtagtgcttaacaaactctgtagtgtttaatatgtttacatttaatacactgatggggtaggatttacaattggtattgtggtatttgttttctatttgtgttgttattgttttattcctctattcttccattactactttctgttatattacatgaatattttctagagtaccatttttgttcctatattg

SEQ ID NO: 103321 - DNA, 671 bp, Homo sapiens
tccttggcttgtagactcaccactccaatctctgtctctgtcttcaagtcacctttcttcctttgtgtcataagtctttccctgcctttttcttgtaartatgcctgttattgaatttagacaccaccctaaatccaggccaatcttactgagagatccttaatgatatctgaaaagacctttttctcataaggtcatatattcactagttccaggggtcaggaaatgaatgtatctttgggggtgggggacaccattcaatccaccacattcatcaacatatatttattccatcacttctagactattttgcttaggctcgaggaaaatctctgtggatggaacaatattcctgctttcacagagtgtacagaccttgataggagccagtgtttctctggtaatcccaatgaaaaaggatgacagtgacacaaattgggaccttcatgagaactggacatttggtctccttgaatgtgctcctttgtgcagaaaaaaccgagattgtgtcacagcactccagcctggacaacagagtaagactccatctcaaaaaacaaactataaactaatttcctcccaaagttagttcagcctacacccaggagtgaacaaggacagcttggaagttagagtaaagatggagttggttaggtcagatctctttcact

SEQ ID NO: 103322 - DNA, 446 bp, Homo sapiens
atctcactatgtagcacacattttcagcctttaatttgcatggaaattgctagatcaaataatgttgtcctgcataaaaaccacaactgtgaaatcaaaccctgcaaaagtggtcaaaccaggggatctgccagatgccaccagtactaattacaagccacagtgatttgggacagtatctttaaaaaagaataagtccttctttcagaaagtaccattaaaactctccttttatagagagcacagggcaacscatttaacattattcttcccaaactttatttggtacaactgagtactttttgcccatgaggtgaggaactgctatgtttcattgatttctcatctttacttatgcatattccctgacttttaggaaacggtgctaagaaatccccctttctcttctttaccaagtataaaattgagaaccttcaagttccccc

SEQ ID NO: 103323 - DNA, 564 bp, Homo sapiens
aagtctataccttatcttttcattttcttaatagtgtcttttgaaaatctgaaacgaaatatatataaatttatattttttacatttatgggttgtgtttttgtcatatgttagaaatattttttaaccaaaaggggatttttggttttgtttgtttgtttttactttaagttctgggatacatgtgcagaacctgcagtcttgttacataggtaaacgagtgccatggtggtttgctgcacctattgacacattctttaaggtccctcccctcgcccaccacctcccaacagaccctagtgtgtgttgttgccctccctgtgtccatgcgttctcactgttcaactsccagttatgagtgagaacatatggtgtttggttttctgttcttgtgttattttcctgagaatgatgacttccagcttcatccatgtcactgcaaaggacatgatctcattcatttttatgactgcatagtattccatagtgtatatgcaccactttttctttatccagtctatcattgatgggtatttgtgtgggttccatgactttgttattgta

SEQ ID NO: 103324 - DNA, 623 bp, Homo sapiens
atattgatatgaatttatacatttcactttttgagctatttctttgtaaatatggtttatctgttcataactgttatgcccacatgattatcattggtataactgagtggttacacttgcaaaaatatttgctattattgcttaatttattggcctctgaagtggtctgtcatgttcttatatgattctcaaagaaatccccttttacagtgtaaataaatatttttttaaaaatttaaattattkttccagaattatatttttgggatttcgatcttttggaatttcaaaattcataattaagatgttcaggattgtgtctttcaggattgtgatcacctccagcctttattatttcattccttgtactaatttggtgtttgctttgttcttttctagttcctgaggtgcatcattatgttgtttatttgaaatctttctacttatttgatgtaggcatgtattgctataaacttccctcttagcattgcttttgctgtattccataggtttttgtatgttgtattttgattttcctttgtttcaagaattttttatgtcctttttaatttcttcattggcccagtgtttgttcaggagtatgttatttaatttccacgtat

SEQ ID NO: 103325 - DNA, 539 bp, Homo sapiens
tctagtatgcacaaggccctaaaattagtgttctaggaagtccctaccttcaaggatatgaacacttttgctatgcatcatgggcctagtagtgtctttcttctgctaagattttaaggaccaaggacagttacagcacatctctctggatccaaattacaaataagcttgatagtttttattaaaatacatgaatcattattgcctagttataacagcagaaatgtaattgaagagtaacagacactgcttggaaagaataatttcatgtttatagtattttctaagaaacaaaaccccaatcctaaaatgaaattatctttaaatatttttttcagaatcatttccataatccaggagagaattagaacataaggacattgcactatattcatctccttggtactctggggacattaaatgataagaagaagaaaggcaggaggattggaaactgtagcactcactacctttggaagggctgaargttgaggtttaccttgggagggtatccagtctttggtctgttttggggtatg

SEQ ID NO: 103326 - DNA, 620 bp, Homo sapiens
ttagatgcctttttattttccccttatctaaattctcttgagagtactctcagtactacgttgaattgaagtggtgggagtgggcatccttccttgtactggatcttcaagaactattggtaagataattgtacagtgtttggaattcaggctaaatgagtagattttagttcctcttgccatgataaacaaaacaaaacaaaaaaaactatgtgagttgatagatatgctaagttgcttcactatagtaacctctttactgtcccataacatcatgttgaataccttgaatatacacaatacattttttaagttagcatataatgtatgaatcaaagaaataaaaagtgtaaacaatctaatrgaagattgaaaaacacataaaaagtaatgtacagaatatctataagtgacaaataaacatataaaaatgctcaatattgccagcaacatttccagtaatcaaggaaatgaaaattgacaacctaataacatttcatactaaaatggcaaaaacttataaatctggcaatatcaagcactgacaagaatatggaacaaagtaaaacaccatccattagtattagagatctattaatagatctaatacattgatacaa

SEQ ID NO: 103327 - DNA, 522 bp, Homo sapiens
gggcactgttctaatgtgctttacacataacaactcaatcttcctgtaattctatgaggcataatgaataatactaatatcattattcccactttaaatatgaggaaacaggaacagggctggattatttgcccaagaccatacagctatgcatggacatcattcactagtggctgctgttattccttgattttttttgtttttgtttctgctttgagagcagcaccttgatgtccttttgagaaatcgctccttttctactcttagcctatgctgttcctgtggtgctgacttcactcacagctccaagggagggcatgtgactcaagcttagccaatcagcactgccttcttcttgatacagctaatcgttcaaagatgagtcaatcagaagcaatgcaattgctgactgcgaaattggaggtctggcgtctttgttgccaacattagatgggaagtgtctaagtatgatgtcagtataaaaagastgaaactaacagaaaagaattggaccccagagat

SEQ ID NO: 103328 - DNA, 574 bp, Homo sapiens
tagggcacttgactagacatcaattcatatgaacttttaagaaatatctgaatttaattgtggtttcagctgtaaaagcaattagcaatgagatcttagataagtcacttcacaaactttatactgcktaacataaaattaagggcttggattttatagaagagccatcagattttaaaatattttattatattaaaaatttaaaaattaacatacctatagatattgtttattctttcagcttacaatgatatatgcatttataactaagcattaaaaagttactaaaaggattaacaccaaatgttcccaaagctttcaatctactcttaaagaggagaatatgacttttcaagctgaacatattttccctaatatttgaaacaaaaataagatcatcacacacatatgagttaagataggaaactaaaaataagtatgaattggatagacctgtatcttagtttgggtttccccagaagcaaaccttgacatgataatttgagtgcaagtagtttatttgggaggtgaaagaaaacaccagtgcaggtgggtatggggggaataagacatg

SEQ ID NO: 103329 - DNA, 549 bp, Homo sapiens
ttgtgtaatgggccatggcctttcagctgagtaaggaggaaagtgataacatgatagactgaggactgtgaagaaatagtagttttttgttaattgaaagtctcagtggggtcaaaggactatttgagagtaagtggacttaaaggtgggtgcaaacggtaggatactggcccattgggagttcagtactggtgcaattactgtgatgaccaggtcaagtggctgtggaggggtgcagaaaaagacccttggatgtgagcaggtcatgaagtggtgggtcatccagatgctggctgctcattccactggggatccctgtagcaaagtgtaggcaggtggtgacctggtggaagtgcagcctaacctgaagcaccagaattgagatggcttcctccctccctctccttccagtggtgaagtgcacagaagcagaaaagtccagttcactaggggtgtggccaaaaagagcaagtgcctttccctgtgtccattccaagyacattcagctggaccatagcataatatctgagataattagatcctgatgtt

SEQ ID NO: 103330 - DNA, 665 bp, Homo sapiens
tcttgcccagttttttaagtaaattttctattttcattgagaaatctacttcagatgtggttttagaacatttgttttggatgtctttctcttgacctaaattgctttatctcctgtctgcaaagccccagtaacgttctgacattcaaggcttttcatcaggccacacctttcaggtgaaatctgagaacagtggagtcaaatgaagagtttcactccccacaaactccttttagccattgttttccctcacggtattcacttcaagtccatcacccataaaccaactaaaatttgatcaatatatgcttgtttaggacctttyttatgactaatgcttaagccaatttagcttgtaaacttagagtggacttcatctatattgtgtttgatatattgtggtttattcaataaacacttaacagcaaccaaagaattggaccaattgacgtggcagctttatggatttagtggatgactggcactttaaaaaatcctttaaaggtcgaataaaataaaatatgaatcactagaattaactgtctctgaatattctaggactacaaatgttactgtaatcaacaaacaatgaaagaatcaagctgttggtccacataaagacagacttcatgaaatcttacttcagttactgttgagggagctct

SEQ ID NO: 103331 - DNA, 568 bp, Homo sapiens
aacttattgtattggtatctttttataaaatgtagataaaagcaactgtwacccctcctgaactatgacctgttgctccagttaaggtatgagacaatctcaacccaagtaattcagagtcctcttattgtatcatcctttttcacatttatcacatttgacctcatcatttgaaaacacttgccttttcctttctaaaatttcatttctcctatccctctttatctacttgcctagaaatatacatcttcagtagctcaactgagcctcaaatctattccgtggtacgttttttggggtgggtcaggggaggcagggaagttagtttgtttttcatacgactccagcgaagcagaatccaacatgactgcttttgggttatgtctttgtttccgtgccagctttgccagtgatgtcagtgggaactcacacagttgtagcatggtggggatcatctgtgggccaggacgatagctctcatgatggtttggggtatgtcctgccaaagcacagccgatttcatgtttcttttattaaaacactcattcccaaactgatcatcacattc

SEQ ID NO: 103332 - DNA, 583 bp, Homo sapiens
tgcagtaagggctgagaatgtgcatttctgcaaagttcccagaggacccatactttgagaacagctggttcaggagaagagtattccagcgagaaaagctgagtcaaaaggcctcaagaatgtacctggttattttaaagaacaatggggaggcaaggatggctagaaatgtaagcaaagggaagaatggtggaasaagagattatatagaacctgtggctttttctctgagagaaagggggatctataacagcattttggcagagaagtcacatgatctaacatacgtatacaaaggaacactctagctgctgtgttgtgaatagagtaggagatcaagattcgacacatggagaagaggctactgtggcaacacaggtgagaggatggttccaacaaaagtggtggcagtggatatggtaagaagtagttgaagtcaatttgctgacatccaatttacaatttgctgagagactggatgtctggcatctgagaaagaggctctgtgatgactccagggtctttagcctgagccacttggaaatgtagttttcatcaattgagacaatattgcaggagaaca

SEQ ID NO: 103333 - DNA, 638 bp, Homo sapiens
aacaattctaataccaagaaaaacaaaaactgcatagattttctccacttgtttccgtgtaggtgggctatatgtggtgatgtgaactgctctctcatatcctgagatcatttctacttttaatttttgcagtgtctaaatcttattttatagatttctcatcgacatgtcttactttaggtttctcaattgaattctgttataaatcctcttaggttactttagtagtaaaatcttattagcttacccttttagataagsagaagtctgttttgttgagtaccctttgaaaatcacatttctgtctgcgtagtgcttgaacaggtgctttctaagagacactgtgttttatatgctacctgattttcatatacatttgccctgcagtaaccctgggggattgattccaggaccccacttggatacaaaaatccaaggatcctcaagtcccttatataaaattgtgccatatttgcacttaacctttgtaaatcctctcatatactttaaatcacctctaaattacttataacatgtaatacaatgtaaatgctatgtaaatacttgttatactgtattagttagggaataatgacaagaaaaaaaatctgtacatgttcagcactgatgcaaccatc

SEQ ID NO: 103334 - DNA, 493 bp, Homo sapiens
agaattcagataaaatgtgcctatgttctgctgttgtttgatctaatcttaatcacagtgagctcttcattagcacaatatgtggtttgccccaagtgtgcactatttaatactttgtaatatgccaccaagagtactgacatttagagttgtttaaaggccgagaactggaaacagcctttccctcattttctgtgtattggtgatgggagtaataacattttgggggagctttttaaatttcacagaagaggaaagttgcctgctctggcaggtatgtgcaagatagagtgtgtttcatttgttctgttgccaagaattagtgctgtactattgtagttcctttaggatttgtatgtgctctgggctcatgaagatattgcatcatgagctkcagcagttgtactcttttttgatgacctaaaaagggcttatttctgaggaatgaaaggttcccatcattgactacggatgtggaaaacctttcctagct

SEQ ID NO: 103335 - DNA, 626 bp, Homo sapiens
agaaaagtggactcattggctatattttcaaattacattcaacaggaaattaaaggtttgaattttttccaccttcatccttccaagttaatagamttaaaccagaatactccattcttccaaagcctgtagccaggcaaacttttactgtattacttcttgcttttcaatggatataaagcagagtcctggtaggcacattttgtatacctgcaaagatgcaaaactaaacagttccctcggttcaatattaaaacaaaagtcctgtaaacctcagatggtgagtgtaatacttcagcactagcacgaaagcctcaaatataaaaagataccaagaaccttgctagcaaaccaaagtaagctcttggccgggagcagtagttcacgcccgtactcccagcatattggcaagctaaggtggggtaagtcaggagttaaagaccagcctgggcagcatagcgaattcatatctctacaaagaaaatttaaaaattagctgggcttggcggcacacacctgtagtcctagagctacttgggaggctgaggtgggaaaatcacttgagcccagaagtttgaggctgcagtagctacgatcatgccactgcactccagttggggtgacag

SEQ ID NO: 103336 - DNA, 626 bp, Homo sapiens
agaaaagtggactcattggctatattttcaaattacattcaacaggaaattaaaggtttgaattttttccaccttcatccttccaagttaatagacttaaaccagaatactccattcttccaaagcctgtagccaggcaaacttttactgtattacttcttgcttttcaatggatataaagcagagtcctggtaggcacattttgtatacctgcaaagatgcaaaactaaacagttccctcggttcaatattaaaacaaaagtcctgtaaacctcagatggtgagtgtaatacttcagcactagcacgaaagcctcaaatataaaaagataccaagaaccttgctagcaaaccaaagtaagctcttggccgggagcagtagttcacgcccgtactcccagcatattggcaagctaaggtggggtaagtcaggagttaaagaccagcctgggcagcatagcgaattcatatctctacaaagaaaatttaaaaattagctgggcttggcggcacacacctgtagtcctagagctacttgggaggctgaggtgggaaaatcacttgagcccagaagtttgaggctgcagtagctaygatcatgccactgcactccagttggggtgacag

SEQ ID NO: 103337 - DNA, 657 bp, Homo sapiens
ctcctttctctaaatgccctgtaagcttcctatcttccatgaaagtttattcccataatcctggcacataaaattagtcatataactcttttccattctgagatttcaaggattaggactttcaacatagagaaaacgtgctgtgtagaagctgaatgtacaaaaggcaacacttggcaacggaatccagtatttcccaagtatttgaggaaacttacaaaacccaaatctctagtacttgctttcacatttgctrtcagaaccaggaagggaggcctagaaatggtttgaatggaaaatttgttgttgtagaaggggttcccattcactggtgaatagacacaacgtatttcccaaccttcttttaatccaagatagcaacatttttactggagccaaagataaaaccagtatttaatctcctagaaattaggagatgtatgactctggaaatggaaagaattttcatatccagccacataaccaagtcctgcaagaacataataaacaaaccaatcaaacaacaagaataacaaccacaacatggtccccattctgtctttaacctctgatagaaagagcagtaatggtaagacgagaaagctctcgtcaagtgttttcctcatctactgttaatgatttattcttacatcctgt

SEQ ID NO: 103338 - DNA, 657 bp, Homo sapiens
ctcctttctctaaatgccctgtaagcttcctatcttccatgaaagtttattcccataatcctggcacataaaattagtcatataactcttttccattctgagatttcaaggattaggactttcaacatagagaaaacgtgctgtgtagaagctgaatgtacaaaaggcaacacttggcaacggaatccagtatttcccaagtatttgaggaaacttacaaaacccaaatctctagtacttgctttcacatttgctatcagaaccaggaagggaggcctagaaatggtttgaatggaaaatttgttgttgtagaaggggttcccattcactggtgaatagacacaacgtatttcccaaccttcttttaatccaagatagcaacatttttactggagccaaagataaaaccagtatttaatctcctagaaattaggagatktatgactctggaaatggaaagaattttcatatccagccacataaccaagtcctgcaagaacataataaacaaaccaatcaaacaacaagaataacaaccacaacatggtccccattctgtctttaacctctgatagaaagagcagtaatggtaagacgagaaagctctcgtcaagtgttttcctcatctactgttaatgatttattcttacatcctgt

SEQ ID NO: 103339 - DNA, 657 bp, Homo sapiens
ctcctttctctaaatgccctgtaagcttcctatcttccatgaaagtttattcccataatcctggcacataaaattagtcatataactcttttccattctgagatttcaaggattaggactttcaacatagagaaaacgtgctgtgtagaagctgaatgtacaaaaggcaacacttggcaacggaatccagtatttcccaagtatttgaggaaacttacaaaacccaaatctctagtacttgctttcacatttgctatcagaaccaggaagggaggcctagaaatggtttgaatggaaaatttgttgttgtagaaggggttcccattcactggtgaatagacacaacgtatttcccaaccttcttttaatccaagatagcaacatttttactggagccaaagataaaaccagtatttaatctcctagaaattaggagatgtatgactctggaaatggaaagaattttcatatccagccacataaccaagtcmtgcaagaacataataaacaaaccaatcaaacaacaagaataacaaccacaacatggtccccattctgtctttaacctctgatagaaagagcagtaatggtaagacgagaaagctctcgtcaagtgttttcctcatctactgttaatgatttattcttacatcctgt

SEQ ID NO: 103340 - DNA, 507 bp, Homo sapiens
tctgtggatcccagtccgcctctttcccagccaccttgtcattgcccagtgggctcatgaacaaggtgaccrtaatggcagggatggaggttatgcataggctcagcaacataaacttccactcaccaagggcatcctagctatggccactgctgaatgcccactgtgccagcagcagagaccaatactgaatcctcaatatggcaccatttcctggagtgatcagccagctatctggtggcaggttgattacactggatcacttccatcatggaagtggcagcattttgttcttacaggaatagacactctggatatggatttgcctttcctgcatgcaatggtgtgatcttggttcatgcagcctccacctccagggctgaagtgatcctcccacctcagtgtccaaagtagctgggactgtaggtgaacaccaccacacctgactaatttgttaaattatctgtagagaaggggtctccctatgttgttcaggctggactcgaa

SEQ ID NO: 103341 - DNA, 580 bp, Homo sapiens
ttatacaaaaatcaactcaagatgcattaagcacttaaacctaagacctgaaattataaaaattctggaagaatattggaaaaacccttcgagacattggcttaggcaaggatttcatgaccaacaacccaaaagcaaatgcaataaaaacaaagataaagttttttgggcytaattaaactaagatgcttttgtacagaaaaaggaacagtcagcagagtaaacagaaaacccacagaacgggagaaaatcttcacaatctatacatctgacaaaggaccgatatccagaatctacagttaactcagacaaatcagtaagaaaaaaccaaacaatcccatcaaaaagtgggccaaggacgtgaatagacaattctcaaaagaagatatacaaatggccaacaaacatgtgaaaaaatgctcaaaatcactaatgatcagggaaatgcaaatcaaaaccacaatgcgataccaccttactcttgcaagaatggccataatcaaaaaataaaaaaaaccagtagctgttggtatgggtgcagtaatcagggaacacttctaaactgctggtgggaatgtaa

SEQ ID NO: 103342 - DNA, 580 bp, Homo sapiens
ttatacaaaaatcaactcaagatgcattaagcacttaaacctaagacctgaaattataaaaattctggaagaatattggaaaaacccttcgagacattggcttaggcaaggatttcatgaccaacaacccaaaagcaaatgcaataaaaacaaagataaagttttttgggcttaattaaactaagatgcttttgtacagaaaaaggaacagtcagcagagtaaacagaaaacccacagaacgggagaaaatcttcacaatctatacatctgacaaaggaccgatatccagaatstacagttaactcagacaaatcagtaagaaaaaaccaaacaatcccatcaaaaagtgggccaaggacgtgaatagacaattctcaaaagaagatatacaaatggccaacaaacatgtgaaaaaatgctcaaaatcactaatgatcagggaaatgcaaatcaaaaccacaatgcgataccaccttactcttgcaagaatggccataatcaaaaaataaaaaaaaccagtagctgttggtatgggtgcagtaatcagggaacacttctaaactgctggtgggaatgtaa

SEQ ID NO: 103343 - DNA, 603 bp, Homo sapiens
caaaacaattctaagcaaaatgaataaatctacggcatcacatgacttcaaattatactacaagactatagtaataaaaacagcatggtactggtataaaagtagatacatagaatacatgaacagaataggcaacccagaaataaagccaaatacttacatcaagctaatctttgacaaaacatacaaaaacataaactagggaaaagacatgctgttcaataaatggtgccaggaaaaatggatagccacatgaagaagaatgaaactggmtccctatctctcaccatatacaaaaattaactaaagatggacttaaatctaaaacttgacaacataaaaactctagaagaaaacctaggaaaatctcttctggacaagagggaggcaagtaatttatgactaagacctcaaaagcaaatgcaacaaagccaaaaataaacaaatgggacctaattaaactaaaaagctttgtgcaacaaaagaaataatcatcaaaggaaatagaaaactcaaagaataagtaggaaatatttgcaaactatgtatccaacaaaggactaatatccaaaatctacacggaactcaaatcagcaagaaaac

SEQ ID NO: 103344 - DNA, 497 bp, Homo sapiens
cttgaataaaagagtttcttgyaaatttctttaacagtattttaattttaacttttcttcctaagaacatatctacatttttatgtacatattttatatatatattatatatacaaaattatatatatataaccatatatagttatttataagaagtcagttgttatatgtggtgtgcctatttgcatacctagtcacatactttgttataaaaagtaagttattagaagatttttgcttagtttttaaaagcttggagactattaatggagcttttctcctccccaccactaaatgactgtagttttgtcaaattatttatttttgttagcctcagttttctcatttgtaaaatgggactaatgataactatctcatagtattttaggattaaatgagataagagacacaagtctggcacataacagattttcaataaatccttattgggtcatagaaaaggggatcaatgttgaaaaacatgcacaccgaataac

SEQ ID NO: 103345 - DNA, 497 bp, Homo sapiens
cttgaataaaagagtttcttgtaaatttctttaacagtattttaattttaacttttcttcctaagaacatatctacatttttatgtacatattttatatatatattatatatacaaaattatatatatataaccatatatagttatttataagaagtcagttgttatatgtggtgtgcctatttgcatacctagtcacatactttgttataaaaagtaagttattagaagatttttgcttagtttttaaaagcttggagactattaatggagcttttctcctccccaccactaaatgactrtagttttgtcaaattatttatttttgttagcctcagttttctcatttgtaaaatgggactaatgataactatctcatagtattttaggattaaatgagataagagacacaagtctggcacataacagattttcaataaatccttattgggtcatagaaaaggggatcaatgttgaaaaacatgcacaccgaataac

SEQ ID NO: 103346 - DNA, 649 bp, Homo sapiens
gaaaatagttgatgtctgagttcctccgaggtctcccaagccacctgctttcctcccacatctgatactcctcacccccaaccccttttgcttaatatcctccagaaataatctggaactcaataatactaataggtgaatgattgacactaaaagaaatccatctttgagaactcctcaagtgctttagggcttttctgaaaaatactttccctccaacagtgaagattcaaaactaaccaaagatctctgcatttcctttttctatgtgtccacaaattatttctaataaaaggtccaagataagaatcaaacaccaatgacagatattttggataaaatctgtaattcgattattggttgctgaaattttgattgactttttccctcagtcatgattttattacaaactttccccaaagagttaccagcccctacaattaagagttacataccaagtttactttaacaaaaaatcctgaaacaaaagtcactgcgatttctggctaattttatcacttaggtgtataatgcccaataacctgatcccctcactcaatacaatagcctaattracagtacaagctcagccgggcacggtaactcatgcgtgtaatcccggcactttgggaggccagagtaggaggat

SEQ ID NO: 103347 - DNA, 649 bp, Homo sapiens
gaaaatagttgatgtctgagttcctccgaggtctcccaagccacctgctttcctcccacatctgatactcctcacccccaaccccttttgcttaatatcctccagaaataatctggaactcaataatactaataggtgaatgattgacactaaaagaaatccatctttgagaactcctcaagtgctttagggcttttctgaaaaatactttccctccaacagtgaagattcaaaactaaccaaagatctctgcatttcctttttctatgtgtccacaaattatttctaataaaaggtccaagataagaatcaaacaccaatgacagatattttggataaaatctgtaattcgattattggttgctgaaattttgattgactttttccctcagtcatgattttattacaaactttccccaaagagttaccagcccctacaattaagagttacataccaagtttactttaacaaaaaatcctgaaacaaaagtcactgcgatttctggctaattttatcacttaggtgtataatgcccaataacctgatcccctcactcaatacaatagcctaattgacagtacaagctcagcygggcacggtaactcatgcgtgtaatcccggcactttgggaggccagagtaggaggat

SEQ ID NO: 103348 - DNA, 621 bp, Homo sapiens
ttacaggcaggatctaatggagtatggtaaaaaaaaaaaaaatgtggctggcatagtggaagccagactagaaaggaagaaacacaaacaagacacacagagcggaaaacaattaaaatgacttgataagcctcctgaaaattcttagatttaagacctttaataaaaatcttaaatgtagtgagctgatgcatgcatttgcctccattttctcctagatacatggaagcaaaggtatgaagtataaaaagaatgaacccataataataaaaaagtgggagaaaattaagtttcgtcaatgaataaggtatttcaaaaaacttgctaaccatatgatgagctggcagataaaacaggtggagagaggccccatagctgtcactgagttgtggaggacatggccatcaatgtgtccaataaaactaaagagagactctgagctgaggtcaacagataaagtggagggcatgagtgtgcaatggggctaaaaaccgagagatcyatataagtcttcatatgagacatctgcaccagtcagcgctctccacccacaactcacagcataggcatttaccacccagccaaaataatggatgcttcttttccagataaattgaaata

SEQ ID NO: 103349 - DNA, 635 bp, Homo sapiens
agctgggtccactgggttcacaaacacaatagaggtctagagtggtttaatcatggggtattggtgcccacagaggtggagacaataggacactaatgagaacatgaaggctgctgactcgtttttccacttgttagcacattgacacttttttgtaagggacacttacagatttgggccttctggcatccctcaccccacctctgtttcatcctccagtgttttgggtgaaaccaggtctctcctactttcgtttgggggaactgatgggaatataacccaggggaggaagaaacagagacagagtgagagtgcttgggtcctgacgacattgtttggattcctggatcaaacagggtctaaaacacagaactagaggagatggctcctcctgctgctcttgatccaggcctcagcagccagtactcacctacttactcccattagctctgagctgggcatakgtcttagctaatttttcaggccattcagaggcaatgagcctcagtttggagacctttatgttgagctgccagggaggcagattcttctttcccactgggcttggatctggaaggatgtgaggctggcactgcagcacctcagcttgcttgagaatggaccagcccaggaag

SEQ ID NO: 103350 - DNA, 565 bp, Homo sapiens
ggataggtgatgaattttcagtaactattcgtgtcaagctttaagcttgaagtttccccccaacagccctgagctgtaattaccctctgtttactccagattttgtaaaggtcttttatacacacaaccttggattggtggtgcttgggaaaggaaacgggggaggctttgctcatgcttaaggagaaagggctggagacgagctctgagcacaaactcaaagcaagagggaacaggagcttgcatctytacctcttgggaacaactgtgggacaatgaggtgagtcattttagttgggtattgaagcagagggtgactgtcccagaaggctgaggaatgcaaataaacaaattgaaataaaccctcaggatgatttgcttattaattaggtttctaggaaggtctctcggtatccaaactacttggaaacaaaacaaaacaaaatacaacatatgcatgagtgtctggagagttaagaatgccaattttttttttcagaagccgagactattggtgattctgccacagtagagagataagctctgacgactcaaaattatacgt

SEQ ID NO: 103351 - DNA, 565 bp, Homo sapiens
ggataggtgatgaattttcagtaactattcgtgtcaagctttaagcttgaagtttccccccaacagccctgagctgtaattaccctctgtttactccagattttgtaaaggtcttttatacacacaaccttggattggtggtgcttgggaaaggaaacgggggaggctttgctcatgcttaaggagaaagggctggagacgagctctgagcacaaactcaaagcaagagggaacaggagcttgcatctttacctcttgggaacaactgtgggacaatgaggtgagtcattttagttgggtattgaagcagagggtgactgtcccagaagsctgaggaatgcaaataaacaaattgaaataaaccctcaggatgatttgcttattaattaggtttctaggaaggtctctcggtatccaaactacttggaaacaaaacaaaacaaaatacaacatatgcatgagtgtctggagagttaagaatgccaattttttttttcagaagccgagactattggtgattctgccacagtagagagataagctctgacgactcaaaattatacgt

SEQ ID NO: 103352 - DNA, 602 bp, Homo sapiens
gggtctatgctgactcctagcaaacagcttagttaccttgacacatatttacatgtttcccattttgagttatgcctctagagtggcaaatcactttattctgtctcaacataggaaaaggtttattctcaaagcacaacatttatttttgaagtaaactttatttaactgagtcttctttagcatgccttaaatgaataccatatgaatttatttcggaagaagaggcctccttcttcaccttggaaacgctgttaacttatatgatccttccttcattcactcatcttctattcattcattcattcaataaatatttattgagcacctgctaagtgccaggcactgtgctgattcctaggacttagcagatgaggtctctggcctaaaagggctcacagactatatctggagttctacaggacaagtcattccagaacttgcaatctatttacatgtcaaaaacagattcacagcacaagaagataataaatagattctctagatctgagattttaataactgaatgtagctgytctaaatgaccaagcgattatcagacctccaaccaagttacccacactcaaaaaaattaaaaatta

SEQ ID NO: 103353 - DNA, 611 bp, Homo sapiens
atgagctgctaaaccttggcacctattgttgggaaggtgtaaatgcacacagtggtgactccccaaggagcaatcatcgctgttttgtgtcagaaaatgaggagactcagaacccctaactaggctggcttctgttcagcttctgctgtatttcctaaaggactcycttgtcaaggtacacaatggaaagaggatggcaacctaagaatgatgcttttcatatcatgatattgaacaggtttgtgaagctgctacctaaaaaagcaacagtcatttcaaatacaatgaacatgctgggaagggcacacaagtttgcactgctttttaaggtccttggcttagaactttgtcatcaacaactcttctgttgccacttaagcctgagctttgtcagcatatatgccattcagttactaattcatatgcagaagcaaaggtgggctaactgtgacgctaaagacactcacaattcagggatcctccctggtaggtgcccctccaaggggaactaacatgtgttcacaggcctatgtttttgaaaattaacaaaagtaggatattttaatctcaattggctaagactgctgtctcctttaccccaacttgcccgt

SEQ ID NO: 103354 - DNA, 611 bp, Homo sapiens
atgagctgctaaaccttggcacctattgttgggaaggtgtaaatgcacacagtggtgactccccaaggagcaatcatcgctgttttgtgtcagaaaatgaggagactcagaacccctaactaggctggcttctgttcagcttctgctgtatttcctaaaggactctcttgtcaaggtacacaatggaaagaggatggcaacctaagaatgatgcttttcatatcaygatattgaacaggtttgtgaagctgctacctaaaaaagcaacagtcatttcaaatacaatgaacatgctgggaagggcacacaagtttgcactgctttttaaggtccttggcttagaactttgtcatcaacaactcttctgttgccacttaagcctgagctttgtcagcatatatgccattcagttactaattcatatgcagaagcaaaggtgggctaactgtgacgctaaagacactcacaattcagggatcctccctggtaggtgcccctccaaggggaactaacatgtgttcacaggcctatgtttttgaaaattaacaaaagtaggatattttaatctcaattggctaagactgctgtctcctttaccccaacttgcccgt

SEQ ID NO: 103355 - DNA, 605 bp, Homo sapiens
taagctaaacctgggttttgaataattagaggaaaaaagttataggccaaaaatttataccacctagaaatatgtgtacatatttattatgcgtttccttttctccttggtgttggtcatctaagaatgaccttttactataaagtacgatttccttcttaacattataagcatttataaagtctgtgtattttcattttaactttcttaaattacagacaaatagcttgaggatttaaaaattacattatttartgcaacacaaaaaatgaggaatcaggtattgttgaaatttgaaatcaaagaaatacagatttcaaatgacttagtactttttatttaagtttaaaatatttttgagagcttatttatgatttacaagttgagagtaatggaaataagcaagtttaactttgcagaaatctaaaatctgtatcccctgaagaacaaacatctaaaatgttgaaacagtacctaggtacacagaataaagtgaatataatcataaattttaaagacttgtagactggagccaatttgtaaaacatttctgagtcatcagtgatctcattaaaatgcagactcacacacggtgttataataat

SEQ ID NO: 103356 - DNA, 592 bp, Homo sapiens
aaaggtacagtaaaaaagagggtattataatattatgagaccactgtggtatatgtaacccatcattgaccaaaatgtcattatgtggtatgactgtagttagaaccatatagaaggtacctttttggattggcttctttcacttagcaatatgcatttaaattttctgtatgtcttttcatgacttgatagcaatttctttttagcactaaatacgtactacatgtattagggagcgtactataattccaactacatgacattttgagaaaggcaaaactatgaggacagtaaacatattagtggtttccaaggattctgggtagtgagaaatgaataggcagagtacagaggatttttagggcagtgaaagtactctatgtaatactacaatggtagatacctgtcactattcacttgttcaacccactgaatgtacaacaccaagagtgaaaccttatgtaaactatagactttgggtgataatggtgtatcagtgtaggtgctttaattgtaaaaaatgtaccactctggtggaggatgtagataatggacaaagctatrcatgcatagtggcaggggatttaagata

SEQ ID NO: 103357 - DNA, 594 bp, Homo sapiens
gctctaatggcaaaggagaagacagcctaggccagacatttcaccaactggccaaaattaaatagtgctttgattctgtgagaatgggaaaaacatacacattgtctccagtttgcctcctagtctctataacactgccatgctacaggtagaatgactttgctaaatagacttaaaagttgtaaactgatgacgagaatactggattacagctcaacaaagtcaaactagaaagagccaaaaaattaaataaaaaagcacagatggtatacatatttatatatatatatgtagatatagatatagatatgtagatatagatatagatatataaatgtagatatagatatagatatatagatgtagatatagatayaaatatagcaacccaagtcaacaaagtaacctatttgtagtatctgcatagaaacaaatgggaatagtatatgtggcagagactactatttgaccctcaatatccattctccacttcttcctttagtactagaatctcttactcttagccaagcgcatgactgatggcgtggctaaagactgcacctctcagatgcgtgtgtacttaggcatggtcag

SEQ ID NO: 103358 - DNA, 584 bp, Homo sapiens
tggccactggattaaactacaatgagaaaaagagaccacaaacaagtaatttaggcccttggaaataaggtattaaaagaactagttcctttattcccccaagaaatgaggcaaggtagagctcattctaactgcctgctccctctcctcactatgctttaaaagcatagacttaaaaaagactgtaacttgagtctcagcccctttttaccaatgaactcttgcactgactgacacacccactagagattccaaacagcctgccgcctacacttagcaactgactcatctcattcaccaatttcaggataaaaagcatgactaaggggccagtggaatcaccctctctgtaaccgaggaggaggcaagctctgcccaaaggtgcattccagacagcagcaagcccaggtgagccacagcatcctcttccccttaaaaccagaagcgaactctccacgctggtggaaggctgtgctttgggatcctgtgcraatcccccatttgcctgcctgtggcaggcatggaaatcatagcaagagaacagaagaaacagagccaaagcccaggaaaaccaccgcacagtg

SEQ ID NO: 103359 - DNA, 549 bp, Homo sapiens
aagcaggaagaactcccatcatcaagctcctttataaagacccctaatcccattcatgagggaggggccttcatggcctaatcacctcttaaaggcactgcctcttaatactatcatgtcactggcaacacctgaattttggaggggacacattcaaaccatagcaccatttgttggcttgtctcctttacctgtcttactttccctttttccttacatctgtctcctgggatcacctcacaaataaacctcctcactcaaattcttgtttgagagtctgcttttggtaaaayctaaaccagacagaaaagctttcatctttctagtacagcatatggtatgtcatcttctgagaataagggagaaaggtcacagtaggatgactcaagggaggtgagaaacatcagtggggtggtcatgaaggggtcggttaagactggaattcatcctcttgaggagagtctagctacgactgtgtccacatggcccaggccaggagagagcaggaggtggttgaaggatgggaagacacgtgatgggaaggacctc

SEQ ID NO: 103360 - DNA, 566 bp, Homo sapiens
ggaattcatcctcttgaggagagtctagctacgactgtgtccacatggcccaggccaggagagagcaggaggtggttgaaggatgggaagacacgtgatgggaaggacctccagacactgcttcaggctgtgggttgagtttaattttctacatgtcacttattttgggacccaggctggatgggaggtagcttcctggggaatgctgttctgatgacagatggcagaagccgaagaaagcaaaccaaaccatgcaagtacatttaatgcctttggttgaatgggcatatggtacccctactcacattccaagtcacagatcaaacccaaaaccagtggagcaagggtgtatacatgtrtacatggccaacaagagagccttggcaaggacaacaaaggatgaggaacaagtaacaccatctttctgtccagcctacaaaaggcatgcagctggcttctccctttttccataaaggcacagggacaccaagtgttgctctctgatgactgaccgtatcagccacatcccagcccccaaaagtcacttaacacccagtttcccatga

SEQ ID NO: 103361 - DNA, 608 bp, Homo sapiens
agaggttcctaaaccttaattattgacttctgtgcacccacaggcctaacactacatggaagctaccaaggctcggacttgcatcttctgaaacaattgccatagctggagcatctgggatgcagggccccaagtcctgagactacacatagcagggtgggggctggacctrgcacatgaaaatatttgtcccttttaggcctcctggattatgatgggaacagttgctgtgaaggtctctgacatgccctggagatatttttctcattgtcttggtgattaactttcagctccttgttacttatgcaaatttctgcagccagcttgaatttatccccagaaaatgttttttatttcccagcacatcatcgagctgcaaaatttccaaacttttgtgctatgcttcctcttgaatgccttgctgcttgaccacatagctcaacaactttgtaggaagttccaaacttttccacccttgcctgtcctctactgagtcctctaaactgttccaacctctacctgttaaccagttccaaatttcttccacattttcagatatttttaaaacagcaacccactctttgtggtaccaatttactgtattagtc

SEQ ID NO: 103362 - DNA, 563 bp, Homo sapiens
atcttaacttccaatttaatggaatcattgttgtgtttcctggtagcagggttcctccctctggaactaataactctaggccagcagaacataatgttgagggagcaggaaacaaaaattttgctagtggatcactagggatattggtgagtggtgacacttccacttccaccccttgattcctggacccgtgaatcctggctatgggagaaacagtaccatatattggctgctgattcagcccatacatggccttctttgccctagtcctgcaaagtattgtcacctagttggcattgtagtcgtgacttcaaaaggcctttccaccattctatcaatccagctgcttcacgattatggcgaacatggtaagaccagtgaattctctgagtctgagcccactgccwcacttctttagccataaagtgagtgccttggtcagagacaatgttgtttggaataccatgagagtggataaggcattccatgagttgatggatggtagtcttagtagaagctttgcgtgcagaatagaaaaccccatatatggaataagtgtctat

SEQ ID NO: 103363 - DNA, 607 bp, Homo sapiens
cattatcagtgctatccttgagaaaccgtgcctttgatgtccctagaaggctttattaatgaagtaagactgggtctctcattccttctctctctctctctctgtctatctcttaatatttagatatgtcctcatctacctatttgaaaaattatagggatttttaaatataagatagaaaaatagaggtttaggtatgggtatacattttggtattatttatatgttagtgttaggagaatacatttgttaatttaaatcaaggcrtgaatgagaacaaaaggtagatctcaaagatgctattacttgggtataaagatgttttatgtactcttaagtttcattaaagaccactgctttatatggctttatatcaaagagatggtaccatagttgcttgccaggtatctattttacatccattcaaacacgcacagactgacaaataaatatagttgattaaatggcaattacttatttaaaaacaataaaaacatccttgagcaaatttataaagagtctcttccttctggctgctacattttagtggtaagaatcacatctaaaaaaattaacatagttttcagtaaactatgtactttgttag

SEQ ID NO: 103364 - DNA, 607 bp, Homo sapiens
cattatcagtgctatccttgagaaaccgtgcctttgatgtccctagaaggctttattaatgaagtaagactgggtctctcattccttctctctctctctctctgtctatctcttaatatttagatatgtcctcatctacctatttgaaaaattatagggatttttaaatataagatagaaaaatagaggtttaggtatgggtatacattttggtattatttatatgttagtgttaggagaatacatttgttaatttaaatcaaggcgtgaatgagaacaaaaggtagatctcaaagatgctattacttgggtataaagatgttttatgtactcttaagtttcattaaagaccactgctttatatggctttatatcaaagagatggtaccatagttgcttgccaggtatctattttacatccattcaaacacgcacagactgacaaataartatagttgattaaatggcaattacttatttaaaaacaataaaaacatccttgagcaaatttataaagagtctcttccttctggctgctacattttagtggtaagaatcacatctaaaaaaattaacatagttttcagtaaactatgtactttgttag

SEQ ID NO: 103365 - DNA, 544 bp, Homo sapiens
ttgggaaaagttgaaagcattccccctgagaactggaacaagacaagggtgcccactttcaccacttctattcaacattgtactggaattcctagccagaacaatcagacaagrgaaagaaatagagggcgcctaaattggtaaaaagggaataaaactgtgttgtgcactgattatataattgtatacctagaaaaccctaaggattcaccccaaaagctcctaaaacatataaacgaatttagcaaagtttcaggatacaaaatcatcatacacaagtcagtagcactgctatacaccaacactaaccaagctgagaatcaaatcaagaactcaacctcttttacaagagctgcaaaataaaataaaataaaccaagtaggaatatacctaaccaagggggtgaaagacctctataaggaaaactacaaaacactactgaaaaaaattataaaagacacaaacaaatgcaaacatatttcatgctcatggatatgtatactaaatattactgtgaaaatgaccatactgccaaaagcaattt

SEQ ID NO: 103366 - DNA, 502 bp, Homo sapiens
ccatgtatgagcaagtttattcagcttcagggattattgggcaagctctcaagtgttacagggttcaatttaaatgccctcttaaattaaaggtagtttaacaaaaacttgcttgtaattgtgctgcaaatacagaaaagaaaaaaatatacttttaaaatgactcgatagcttgaagcatgatttcttcctcatagatcattttattctcttgcttcatatgttctttttcaccctcaaagtcctttttttttttttcttgaaacaaccttgactttttcaggaagaatttkttctaattcttacgtgtttctgtttaacatatataacaagagagaatgactgtttttattcccgtaggtctcaatgtctagacattagcttcttcctcaaaatagatatcataaatatttatgcatagacctagtgtagtatataatatttctgttgtttgttgattggcttaatgaatgaaagagcacattgaaaagttttaaaagaa

SEQ ID NO: 103367 - DNA, 565 bp, Homo sapiens
ttaaactctcagctttctgtctccaatagaaaaacgttcatgctgtctggttctcctgagtcttcactatgtaaatagaagcatgatctctttcartatactccaaaagatgctgtgttggacctcactcttcatagaaaagcattctgaaagccttattgttatgttaccagtttcagttggattgtaagagctttaaagacaagtctaggattcctacattgccacattcctgagagcccaaaatgaaactcaggtgagggagtgagtctcatcacttatctgtgggtgtcactatccatttgcagccagggatcactgagtgtcctaatggagctcccatcttgggtgcacttaccttcacctttctgtcatcaaacaagacactgacaataaaaacctcatctaggctacctagataacacgttgtactgagatattggtagggatattcagcaaagccctgcaaggtgttcacagaaatgtcctcctttccagtttattttcaatgtccctgtcccatgagttctttgagatcagagtttgcatctcacttctctttgat

SEQ ID NO: 103368 - DNA, 569 bp, Homo sapiens
attgaaaacgtatggcaaaacatcaagaaaaaaaaaggagagaaggaaatacaagcacagtagtccccacttattcacagagaacatgttccgcgactcccagtggatgactgaaatctcagatagtagtctgaaactctacatacactacattttttcctctgcatacatgcctatggtaaagtttaatttataaattagacacagtaagagattaataacagtagctaataatacaatttaacattataataatgctagcatcgctactcctgtgccttgggaccattgttaagtgaaataagggttacttaaactgcaatactgtgacagttgatctgataaccaagatggctactatgtgactaataagcatgctgagtctgcagcatggagaccccagactaaggcatgaatcacatcccaggtgtgacacagccaggcagcatgagattccaccacaccactcagcgcattttattaaagtacctgtgcacaatttatarctgataactcataaattatctgtttcatcagaaagcaaaacagcggataaaggggaactacta

SEQ ID NO: 103369 - DNA, 589 bp, Homo sapiens
cttcctcatggttcattcacagaatcacaatgacttaacaaaaygtgaagtataacagccactatctaaaatttttctactctgcaataagttctttattcattacaatcacaaattattttacatttttttacatcagtgcaccttaagaccaaaggtttccaatgatgataaattaatgacttaccatcccaggtagctaacagcataattgtaaagtcactcacagcatacaatttgaagtctgccaggtgggtttctaatcccacctctgccacttgatatgagaataaccttaggacaagtcacttaacctctttacacttaagtgtaaagtataaaatggagggaaaagtagtatctatatcctcaagttataatttaaaaaaattaaaaataactcctggcacactgtaaacactgaacaaagttaaaaattaacatgaaagggactacagtaaagggagagacagaggaaaactcacttcaaagtttttacaaatgtgtatgttaaaaaattttatttttagccaaatacttgtacttttgaaactgaactttaagttacaataaaatttttctgactgaa

SEQ ID NO: 103370 - DNA, 589 bp, Homo sapiens
cttcctcatggttcattcacagaatcacaatgacttaacaaaatgtgaagtataacagccactatctaaaatttttctactctgcaataagttctttattcattacaatcacaaattattttacatttttttacatcagtgcaccttaagaccaaaggtttccaatgatgataaattaatgacttaccatcccaggtagctaacagcataattgtaaagtcactcacagcatacaatttgaagtctgccaggtgggtttctaatcccacctctgccacttgatatgagaataaccttaggacaagtcacttaacctctttacacttaagtgtaaagtataaaatggagggaaaagtagtatctatatcctcaagttataatttaaaaaaattaaaaataactcctggcacactgtaaacactgaacaaagttaaaaattaacatgaaagggactacagtraagggagagacagaggaaaactcacttcaaagtttttacaaatgtgtatgttaaaaaattttatttttagccaaatacttgtacttttgaaactgaactttaagttacaataaaatttttctgactgaa

SEQ ID NO: 103371 - DNA, 605 bp, Homo sapiens
ctgagttctaatcttatctgtgcttaagggcctccagtaggtcaagtaacaagttaacaccgatgcctgccttgctttgactttttctttcaaatctgttaacatctattttgagccaatggataaactgtgtattccacttactagaactggatttgttttgttccttttgttggaacactttcctagatatcttgattctcatagctgttaccataagactgaagtcctrttagggatttaaaaaggtcagtttttgctttatgaagatttccattagcctttgacacgcaaaagattacataacaaaccacctccaaacacagtgctttaacatgctgataattaatcttactgatctgtgggttagttaggtttagtttagcgagattttctccattacacatctctcatctccctcccagggcaagtgggctaaccccagcaatgttttcctcatgacaacctcagaggtaaaagggggcaaatagaaacatacaaggcctcttaaggtctaggcttgaaactggcacatgatcacttctactttattcttttgctaaaacaagttatatagctgaacccaaattgagtgatggagaaat

SEQ ID NO: 103372 - DNA, 635 bp, Homo sapiens
ttcactgatgaattattccaaacatctaagaattaaataatacaaattctacactcaatttctccagaagaatagaagagaatgcttcctatttcatgttatgacatcaayattaccttaatacaaaaaccacacaagatattatcagagaaaattacaaccaattttcttaataaatataaacattaaacatgttaacaaagttagagaaaatcaaatccatcaatacataaaagggataacaccttataaccaagtaaaattcatcccgggaatgcaagatttaacattaaaaaccaattgatgtaatcatcatgttaataaatgcaaaaagaacaaccacaagttcatctcaatagattcagaaagagaatttgacataagtcaacattcatttatgataaaagctctcagcaaactagaaatagaaggaaacttcctcaactggataaagagcagctacaaaaagcctacagcaaatactatccttaatggtgaaagactaagtactttcaccctaagatcgggaacaaggtggatttatttttctcacggactgggagaaaatgcttgtgaaatatatgtcaaaaacaaaactcaataattaaaagacaggccaacttaaaaacagaaca

SEQ ID NO: 103373 - DNA, 511 bp, Homo sapiens
tttcattctctctatgatactgaggactaattaataaagggccattaaacatagaagagaattctgcaaccattgggcctatacttattaataaagagatctcaacatcagattctactttctaaagagtggctttctcagtcagcttggacactgaaagaactcagtagaggggtgaggaaaaataaagctcatgagaatactctactagatctacacaatattttctttagagtaagagatgatgctctggaggtttgcattgctaattataatacacagtttgagaccttgaaattgatctaktatataagcaaacgaaagcctcctgctatctggggtgattcatcaaaaccagaaagtgtgccatgtcaccccatccccccgaaaaggaaactgctggaaagcatgttatctttatagagtcatttggttcagcaaatactttcccgtcagtcagcgtcagccacaggcaaaagtgtgaaataaaaaacgtcggatcttcactatg

SEQ ID NO: 103374 - DNA, 606 bp, Homo sapiens
actggtatgtttctaaatgttctgcaggtcaattgataacttcaaatggaccagagctggcaccataagtgccatggacctgtcatgcctgctaaactgaatggcaaagtcctttaaatacaataaatattacatgtcactttgggtttcttgagtctaatgctctcaagtttgggaaatcttatgaagcaatgattacrtaattaagataaatcacaaaggaaattgtctcattttttttacgatagcaacaagtctttttttttactttaagtttgtttcgtttttattagaattagtagtagtattgctctggaaagaatgttctattcagaagcagaaaatgggaagtaactgtgaatttacaattttcttaccctagctcatatttatttcttttaaacacaagtacttgtcatcaaaccaaagttaaatattatgatgtcacagatgctgaactaaatacattaagatacacaaaatacatgggtactatcatagtccatgacagaaaaaaactcattaattaatctttgagacaagagaaaaaggttggttggaaccctacctcagcttctttcatgacatgaatatgttcattaatct

SEQ ID NO: 103375 - DNA, 549 bp, Homo sapiens
tgtatgtgtgtgtgcatctgtgtgtgttccttcttctggcttggtttgatagtattagtgcatctttcagctacttgttcagtttagagttactgtggcttggcatgaacatataagccaggggtgtccaatctttgacttccctgggccacattggaagaataattgtcttgggccacatataaaatacactaacagtaatgatagctgatgagatttttaaaaattgcaaaaaaaactcataatgttttaagaaaatttatgaatttgtgttgggccacattcaaagctgtcctrggccgcatgtagcctgtgggccacagattggacaagcttaatataagccatgtgtgccttttggccaaggaactatctctcatttaatgaccactgttttatacttatagaaataagacaaacttttctctttataattattaattgatctgggacacaaagcaacattctttgctcaacaaagttgtggttggggtgatgagactggtgtcatgtggattcctttccatgcctgtctgtcctacagaagtc

SEQ ID NO: 103376 - DNA, 540 bp, Homo sapiens
tttgtttctcttaaattatgtactagagcccaattcattaaaaataaaataaaaattatcagtattatttattttcatttcagccaccaacacagcacaatgaaacacattgctggctgggtttcagccatggctatgccattcaaaaattgctgggactttggttaagtcacttatgctttgtgttttcatctgtaaaatgagtatctcaggttagaatacctctaagatcgcttacagattcctcattccagaatccaaccttttctaagcaatccttccccatctattagcagttcatttagaaatccttttatgaaaggacaatttttcagtatagattacattgtaatgattaggtgggaagtgtgtgccctaatagccggaatgmagttaagtgtatttttgtaaatatgcaaactcctcatttgtctttatgaggtcccatttgtcttttggcattttgatgagtaaaccaatgccaaaccaatttagagcaagtaaaatatgttatcatgagatatttgttttgtcaattgt

SEQ ID NO: 103377 - DNA, 615 bp, Homo sapiens
tctgaaaatcaaatataaatctctttaaaaattatatataatatatgagatgactcaaatataaaaatgaatttatagggaactctccataaataataaagcagacatgttctctgaaataaatctttcctatgattttagagctctaccgttatgctaaattatttttctcaaataagcttctatatgtttcaattccatgggaaatagcaatccaaaatttaaaattagcttaaaaaatctatakgatcagtcttttcgtgttatccactaagagtgtaatttgcaagtaattaatcaatagatgttcaataaaaaaaccactaaggcataggttgtcaatgttattgactactatcctctctcatgggaaaagaaaagtccgtcactgaatgacaaagaatttccatttttagagtctttgcctttttaataattatttcatggcactattgttctaatatcctatatttgctttcatgtgaaatataggcttcatgaaaatctgaagaactaaaggattaaatgattgaatactgacaaagctgactgaggaggcttggacattcaacagttttgctttcactaccaagtggatggaggatttttaaaatt

SEQ ID NO: 103378 - DNA, 615 bp, Homo sapiens
tctgaaaatcaaatataaatctctttaaaaattatatataatatatgagatgactcaaatataaaaatgaatttatagggaactctccataaataataaagcagacatgttctctgaaataaatctttcctatgattttagagctctaccgttatgctaaattatttttctcaaataagcttctatatgtttcaattccatgggaaatagcaatccaaaatttaaaattagcttaaaaaatctataggatcagtcttttcgtgttatccactaagagtgtaatttgcaagtaattaatcaatagatgttcaataaaaaaaccactaaggcataggttgtcaatgttattgactactatcctctctcatgggaaaagaaaagtccgtcactgaatgacaaagaatttccatttttagagtctttgccwttttaataattatttcatggcactattgttctaatatcctatatttgctttcatgtgaaatataggcttcatgaaaatctgaagaactaaaggattaaatgattgaatactgacaaagctgactgaggaggcttggacattcaacagttttgctttcactaccaagtggatggaggatttttaaaatt

SEQ ID NO: 103379 - DNA, 615 bp, Homo sapiens
tctgaaaatcaaatataaatctctttaaaaattatatataatatatgagatgactcaaatataaaaatgaatttatagggaactctccataaataataaagcagacatgttctctgaaataaatctttcctatgattttagagctctaccgttatgctaaattatttttctcaaataagcttctatatgtttcaattccatgggaaatagcaatccaaaatttaaaattagcttaaaaaatctataggatcagtcttttcgtgttatccactaagagtgtaatttgcaagtaattaatcaatagatgttcaataaaaaaaccactaaggcataggttgtcaatgttattgactactatcctctctcatgggaaaagaaaagtccgtcactgaatgacaaagaatttccatttttagagtctttgcctttttaataattatttcatggcactattgttctaatatcctatatttgctttcatgtgaaatataggcttcatgaaaatctgaagaactaaaggattaaatgattgaayactgacaaagctgactgaggaggcttggacattcaacagttttgctttcactaccaagtggatggaggatttttaaaatt

SEQ ID NO: 103380 - DNA, 533 bp, Homo sapiens
gaattctggatcatggacaggcaccatccttttcagtgataattactagagcctcttattgtgctaactcaaccagaaatggtaactaagcaggccagatactcaaacttctatacacagtcctccagctgtgatcactggaaacatcactaactgataacaatgccctttaccaatgaatccagactcagtataggatctctttctatagagcagtatgaacagccaccaccaattggtcatgactggtccgaaacattaaacccattcactatatctagcatctacttatctatgcactcccttctgcaagccaagatatagaatccttatagacccagtgtcttacctcccagttctgatcaaatcctttgctattgtcttttatatgacttgcttatgcttctttttaagtcaacatacctaacacagatttccctaaaaatgatcaatatgcagtagtctgttttataaaacrtatctatatttttcctcagaaactttgaaaacagtggatttcaaatgccttaagg

SEQ ID NO: 103381 - DNA, 624 bp, Homo sapiens
atgtgcaactctccctccctttccttcagcattttcctggttataggaattctgygtagtaaaaagtaccaatcaaacatactgatagatttctctatcttctgtggctgtctgtcaaaacaattcttgtacaaaggaaacacttgtcttcattctagatagatgcattcaaagaaagtagaattaatcctaaaagttaaacatgcctgtgccaacatgatatcattcgtcaaactaagttagtagtaagtggaacccaactatacaattgcccccaaccccgtttttaatctctctctgtgtgtgtttatgtgtgtctgtatatctgctttaaaatggctttccttggcacaaacgccattaaaaataccactctggcttgaaaattggtgatggtttttatgaatgaaacttttgcttttgaaaactccagataaacatgtctatttatctggacaaaaaaaaaagtgaaatgaaaaaaattttaagttattttttgactcatagcatataatattctaatacatttcgatataacaagtattttgttttaacagaatctgactgtgtggcagaaacacgtgtcaaaattatctgcttttgaaatgaatataattatggtat

SEQ ID NO: 103382 - DNA, 624 bp, Homo sapiens
atgtgcaactctccctccctttccttcagcattttcctggttataggaattctgtgtagtaaaaagtaccaatcaaacatactgatagatttctctatcttctgtggctgtctgtcaaaacaattcttgtacaaaggaaacacttgtcttcattytagatagatgcattcaaagaaagtagaattaatcctaaaagttaaacatgcctgtgccaacatgatatcattcgtcaaactaagttagtagtaagtggaacccaactatacaattgcccccaaccccgtttttaatctctctctgtgtgtgtttatgtgtgtctgtatatctgctttaaaatggctttccttggcacaaacgccattaaaaataccactctggcttgaaaattggtgatggtttttatgaatgaaacttttgcttttgaaaactccagataaacatgtctatttatctggacaaaaaaaaaagtgaaatgaaaaaaattttaagttattttttgactcatagcatataatattctaatacatttcgatataacaagtattttgttttaacagaatctgactgtgtggcagaaacacgtgtcaaaattatctgcttttgaaatgaatataattatggtat

SEQ ID NO: 103383 - DNA, 441 bp, Homo sapiens
taccatgagaagatatgaaaaataacccattcctggtcccaacagcactggaagttacatacttgaaaacaaaaatatgtttatatttttatgtaattggccaaagtataggttttaatctcccctataataccattatttaagataagtctgggcaatacacattcatagatarcgaagttcccccagttcccaccaaaacatcatctttactgcctcacagactttttatttgtttggccgtagcataaatgccaactggcatcactgtctagaaaaagattttaagttagcctttcagtaaacttacctaattggatatggtttatttattaaatttagtcactagaggtttgttgagatagaaaaaaagtatacctatatctcaaatatatttcataagaaatgacgatttggaaaagctctaaggtgttatttatc

SEQ ID NO: 103384 - DNA, 567 bp, Homo sapiens
gagacagtatgagtgtccttttccccagcttttaacccagtagatttaggatacatggataatcctttcctaaatcagtaattgcattgggagtttacaaatggggttttctaactttgtcattctgtccatactagccagcatttttaggtaaaggagctcctctgactttgtctcttttaatggactcacagattttttttaatccagtagtcataattcattaccattttcattcttcttgattccacattgtcccatatttggccagtgggaattctttcaagctggcttctgtgttttttgaaattaccctattagtctttgagcatttccttgcattctggcacagttagatgttccaggctcgcttcatacattctcagcctcagacctggaaccagccatttccccagggaaatctagttctttttattggtgatagatatttacagaccaaaagctgggtgctgastatgctcattgccactgaaggtcattgtttctaagacttttcagtggaaaaaaggtagtacatgtattcaaagaattacgaatttgtaatga

SEQ ID NO: 103385 - DNA, 628 bp, Homo sapiens
tacactctctcaaaaggtatctctgccttcgtccctggaacttgtggatgctgccttattatcatgggctatttgggttgcccctaagtgacatcacgggtgttctttyaagtataggcagagggagatttcagacagggaggaggagaaagtgatgtgaagatggagcagaaaaagatttgaagatgctacactgccaatcatgaacatggatgaagaggcatgaaaaaagacaagcaaaacatgcagctctagacactggtaagggccctgccaacacctcagtttcagcccagtgaaactgactgtggacatctgactttccaaactgaaagagaataaatgggtcttgtctttatctagaactagaaaccacactaagtctgtggtacaacatccacaggaaattaatacacatataaaaacaaaagtttcaaataacctttttatgaaagcattctttcaccacaacttacagcacgttactcttcaggaccccatcaaatgacttgtaccttaccaaaaagaggtcactaaccccatgattggacaaagacacaaatcactcattcacaacaaatttggacttggtaatttttcttgtttcaaaattagaatattagtgagt

SEQ ID NO: 103386 - DNA, 628 bp, Homo sapiens
tacactctctcaaaaggtatctctgccttcgtccctggaacttgtggatgctgccttattatcatgggctatttgggttgcccctaagtgacatcacgggtgttcttttaagtataggcagagggagatttcagacagrgaggaggagaaagtgatgtgaagatggagcagaaaaagatttgaagatgctacactgccaatcatgaacatggatgaagaggcatgaaaaaagacaagcaaaacatgcagctctagacactggtaagggccctgccaacacctcagtttcagcccagtgaaactgactgtggacatctgactttccaaactgaaagagaataaatgggtcttgtctttatctagaactagaaaccacactaagtctgtggtacaacatccacaggaaattaatacacatataaaaacaaaagtttcaaataacctttttatgaaagcattctttcaccacaacttacagcacgttactcttcaggaccccatcaaatgacttgtaccttaccaaaaagaggtcactaaccccatgattggacaaagacacaaatcactcattcacaacaaatttggacttggtaatttttcttgtttcaaaattagaatattagtgagt

SEQ ID NO: 103387 - DNA, 628 bp, Homo sapiens
tacactctctcaaaaggtatctctgccttcgtccctggaacttgtggatgctgccttattatcatgggctatttgggttgcccctaagtgacatcacgggtgttcttttaagtataggcagagggagatttcagacagggaggaggagaaagtgatgtgaagatggagcagaaaaagatttgaagatgctacactgccaatcatgaacatggatgaagaggcatgaaaaaagacaagcaaaacatgcagctctagacactggtaagggccctgccaacacctcagtttcagcccagtgaaactgactgtggacatctgactttccaaactgaaagagaataaatgggtcttgtctttatctagaactagaaaccacactaagtctgtggtacaacatccacaggaaattaatacacatataaaaacaaaagtttcaaataacctttttatgaaagcattctttcaccacaacttacagcacgttactcttcaggaccccatcaaaygacttgtaccttaccaaaaagaggtcactaaccccatgattggacaaagacacaaatcactcattcacaacaaatttggacttggtaatttttcttgtttcaaaattagaatattagtgagt

SEQ ID NO: 103388 - DNA, 549 bp, Homo sapiens
ttgcccatgattggcacatgataaagaaaatctagctgcttagttaaactaatttagcctattttccatttttctcatgttggttcatttctgtttaatattctcaaccaagctataattttcatgaggacagaagcactgacaaatcgtgttttaataagggtacagaagtgtattcattacatggaagactactgagagctggttaactgctctgactgtaaattgattttaattattccagagagaagttaggaamtactacggtgtatggacagtgtatgccctttgtttatcttattctttcctgaatcatttaactagtagctttttcacgccagtcagagactagaataacaaaatagggtaaaaacgattctcagttaattttgtaacatttcctattataggagtatttggttttctttgtaatcaaattttaaaaatctcctgctacaaaatgagataatctacatctctttaatcctttatggctcaaattttacttaatttttaaatatgattcaaattagccatgcatcagaatgt

SEQ ID NO: 103389 - DNA, 552 bp, Homo sapiens
aactgctatgcccgactcagtgcgttctgtcagcaggtacatgttttcaacacatctaattactgaagatgttaaccttcagcacttgagtgaggtggttcctgtcgggttttttccatgtaaggttactatttcttccttcataattaatatatttgcaggaaatagtctgtttttcttccatctttcacctactaattttaacattaatggtagatcttgtctgtaacaattattaatcttgtgtttgctttatgtgattttgttatgttcttcattccttctacatttattaattgggattcttttaaaggaggtggttcttctcccccatttgtttggttatttaattatataatttacatcagtgtggacacatagctgtttatttattttaggggttataatccctaaatagtatcattatgtattttgttgtcaaattatttcagcttctgccattgagaatgcttttcaggccggtttcaatatccattyaacatgtcccccattttttctagcactttcttactccttgccatcacaagatat

SEQ ID NO: 103390 - DNA, 581 bp, Homo sapiens
tcattctagtgggatgaacagcatatacartaaacagacacgtgagcagggcagtacagtcagcaggggccaggtcatgggggccttgtcaaggacaaggcagattttaccctggtagcaatgaaggtatatcaaggggttttgtttattttttatgacataacatatttgagaaatattatagtggttgctgtgaggaagttggagagcagggaagaggtgctggagactatccaatcagtgtcaggctaaataatgatgaaaatgagtgcttatgttaattgttagtactgtttatcaatgtccagactcctctccttcaggacatacagcaggattgcacttctagtcttccttatggtgtagtggtgccatgtgattagttctaggaagtgagttgtaatcagaaatgatgtctgtcatctccaggttgagaaattcactgccagaatgatctcctccataatgttcttgccttctgccttggcaaccgccaatgttcctgacagtggatgctccatctacccgggtcccagaattaagatgacacagatcagagctcctagctaacacaaagcaga

SEQ ID NO: 103391 - DNA, 444 bp, Homo sapiens
ccccacttcacatgtactatttaaaactctgcccccaggaagatttaccttcataactatctttcagggttaccctggggtggagctattgggcaacatggagaatagacatcagattctgactagtgccaatgttycatgcagacacatctgtaaaccaggccttcaaatgttccttttttgctaccttgtcataaaaattgtccaaatgtcaaaaaagaagtcagacaatgaagtaatgaagcaataagggaaagtatcatgaatgtctgagtcaactgcttgtgtaacttacatgtgtcttctggagagatgtggaccccgtccctcacatgccattccaatttagtagtgctgcatgccaacttaataattcattggaatagaaaacatcaagattttgataggcaacttagattttatattcatttgccctatggtcat

SEQ ID NO: 103392 - DNA, 476 bp, Homo sapiens
tggtgagactctgctctgacctgtgtaactgttaaattactcagctcatattacatgtctcccaatagttcttattgatacaaacacaaacaaaagaataacccatcagcttttgcccaaaatatgtgattcagtggctttgtttagacacctcatagaacgaacatttgtcttctgagataccagcctttccacttctgccctaaatcctataattttcacttaccttctatttcatttcccctccattcatccatctcctcattcctgccttcgagcatagccaggacatttactattaaaagaaaaaaatatcaaaaattcaacactgcagcttccaagtagtatgtattttatttttcctcccattacattttttaaatttgaatttttcacaatctgtctttagataaactttaagtaatgtatgctctaagtayttgattatatataaaatttgaagtgcattaaatggt

SEQ ID NO: 103393 - DNA, 530 bp, Homo sapiens
aaaattaacagttaaagcatttattcaaaatatttttaaaataatgaaatagaagaaagtataaaaagaaataagacaaaatataaaatgaagaagcaaaaagattatccaaatctaaagctagttctttattattaawctttaattaaacagacaaaagactgaagcatttatgcaaataaaattaaaaacattaaaaatataaaaagtaacataacagtaaaagtaaaatatttttgagaaggcatcaaactgtattatgttagtcaatgttaattagacaattagttatgaaagtataactttcaaaaactgatctaataagatacagtaatcctaaatagacatctaaccattaagttaactgcatcagtagtcaaatattttttctgaagtctccaaataaattcatttaaagattaagagtaagcaattatgaagatacgtgttaagcagatgttttataaataccaacagagttaaagcatttgagatatggtgcggccaaaggtctgaaagtgggagtagag

SEQ ID NO: 103394 - DNA, 628 bp, Homo sapiens
acaaagtaaaagagagaattaaagccaggtcctggatagtgcggagtaaagggagtttatggagtagaagtgatctccaaatagaaaacttgatttctcaaattcagctttctaacaaacattttcatccataacccctattaagcagttagattccactggtaaaatcctgccatgtagttaatctttgaactttgtaccagtgttttcaataaatctgttcctttgagtatgtagagtagaaaaatatgcaaaaatcacctgcatattaatcacactttcaaaatcactgtgtgatataamcttgcctatttttgtgtatcaaaaataaaccatggctgtgttacaactttgtgagattcctcatcattgtaatgacatacctatcttattattgtcttcctattcattacttcaactatgttttaattttgcatgcttgaagcaggagtagaagttaataagccttaccagcttgaaaccaagcagataaagaaatatagttttatattgtaatataaatttgaaaacttaaaatggtctcaaagttcatgaaaaataaaacttttcatatacaattcatttgaaaaaaatcactataataaattactgtaaaaatgttaccaca

SEQ ID NO: 103395 - DNA, 621 bp, Homo sapiens
tattttcatacctactgtgtgaaataattcttgaaaacataatattctggcaactatgtatataaacttagtcaatcacagaaagcttgattagctttctctgatagaattttggtgtgaatatacacgcacatacatgcattaatttagatccattttactctgctatgagaaggaggaatttttatcttccaggaagcttttttgcctccacagagtagaagcactcatggacgtccttgaggcagtcattcayacacccactgctgtgtgaatgatgaaaacacacacagagacaggcaatggagtacagagcatgctgtagccatcactgcctcatgctgcctagcagcttgaagaagccaaaagcctcacatcaaattatcccagccagagtttcatacttatctatatcctgatggggaatactcataaaaagcacactttccccatcctaagcagtgtacagctaagtgattcattaatgagcataaaatcaaaacatcatctacctccactaaaataactgctcttacatttgctaaaattttgcatgatttgatcacacataatcctgctaaaatctctacctctgaggatctcataaagtactaaagatgg

SEQ ID NO: 103396 - DNA, 575 bp, Homo sapiens
cactcagcaaaagcacaaatccatgatcaaggggaactgaactccataatctggaatttatgcttctgactttcttcatgtrtaaaaaggaaagagaaaaaattgtgtttctcttcattattacagattcctaattaaggtcaattggaaatgatcctttaacagaaaaaatatttttgtaaatcccagaccacctcaacagcactcctaattagcgatatctttggggagtcagcaaactggctgtcaggccaaatgctcctgagtggtggctgaggtcactgtgaagtgaagccaaactttcagccaaactgtgtttactgtaatccccctacagggggtcatgccctgcacgaacaggggttaagcctcagaccctgtcctcagaaagctcacggtctacttgaagcttcacaagggagctctggaggagatgctaagagccacaacgatgcacgtggccaatttcacaggcaacggaggtcagaaaagacttccccacggagaagaaaggagaaaacacagccaaattttaaagaaccaatactcattcagcacaggggcaagagggctcc

SEQ ID NO: 103397 - DNA, 585 bp, Homo sapiens
atgtgaatatgagctagaactcatatcccatatctgcaataaacatgagaggccagatagttcttcaatakgcaaattttaatatccctttatttgggatattgtgtgattatattttaatcttgctaaccacttttataattataccagtcaagaataatgaggtaatacaattttaagttttaaagcataagcctgagatcagggagatattaatcccatgtgattttactcaaagccagaacaaatagccaatactaaaatctaaatgtgaaaacagtacaaaaactatcagaaaaatatcattattgaatacattttatagtaaaatcccttcagtgtccgttttttagcttgtgtttcattttaacttaaatgcctatattttcctatgtaatattttaaatgtttcttgtctttaaattcaacctttagaatagaaaagttacttaatagaagcttatctttgatacatttagaaagaagctttaaaattaacttctgctcaatatagtgttcacctctaggagcaacttcataaagcaacagcctgagcattgccaaatcacaggagcaatgaataga

SEQ ID NO: 103398 - DNA, 594 bp, Homo sapiens
ttcccttctgcaggtcaggccactgggtggcatattgtggtcaactgaatgactgttccccaaatctgttttcttttcctgcaggacacacagctagaactcacatccyagcctcttttgaatataggtatgactacaaacaaatagaatatgtcacattttgtgtgatatcagacctgcccagtatgattcttcatgcttttttctatgatgcacagacagggctccaatctatagggcagcagggtcatgaaagacaaaggaactaaaacaataacatggaaagataaccacaagtagaaacacaggcttataaaatagtaattttgaggaacacaggcttacaaaacagtagttttgtaggctttcaaataaacaaggaacaaacacctattacacctattttgttggaatactgagatttctgggttagtctgtgaaagaggtgaccattgaggacacagtcttatttattactgtactttaggttttttaatattctatgcttcagatattctcatttgttaaattgtatgtctgtaatgagtacataaacagtctgtgttaaaatgtcaccaaaggcaaaatttctat

SEQ ID NO: 103399 - DNA, 611 bp, Homo sapiens
cacacattgcaaagcggtttctgagaatgattccgtctaattattatacgaaggtatttccttttctatcattggcctcaaagcgcttgatacctccacctgaaaattccacaaaaagagtgtttccaatctactctgtctaaaggaacgttcaactctgtgagttgaatacacacacacagaaagaattcactgagaattcttctgtctggcattacatgaagaaatcccgtttccaacgaaggcctcaaagaggtccaaatatccacttgcagattctgcaaaaagagtgtttcaaaaccgctccattaaaaggaatgttgaactctgtgagttgaatgsaaacatcacaactcagtttctgagaatgcttctgactagattttatggtaagatatttccttttctaccgtaggcttcaatgccctctaaatacacccttgcaaattctacaaagagactgtttcataactgctctataggaagaaaggttcaactctgtgagttgaatgcagagatcacaacgtggtttctgcgaatgattctttgtagtttttacatgaagatatttcgttgtcaaccgtaggcttcaaagcactcaaagtattcac

SEQ ID NO: 103400 - DNA, 611 bp, Homo sapiens
cacacattgcaaagcggtttctgagaatgattccgtctaattattatacgaaggtatttccttttctatcattggcctcaaagcgcttgatacctccacctgaaaattccacaaaaagagtgtttccaatctactctgtctaaaggaacgttcaactctgtgagttgaatacacacacacagaaagaattcactgagaattcttctgtctggcattacatgaagaaatcccgtttccaacgaaggcctcaaagaggtccaaatatccacttgcagattctgcaaaaagagtgtttcaaaaccgctccattaaaaggaatgttgaactctgtgagttgaatgcaaacatcacaactcagttkctgagaatgcttctgactagattttatggtaagatatttccttttctaccgtaggcttcaatgccctctaaatacacccttgcaaattctacaaagagactgtttcataactgctctataggaagaaaggttcaactctgtgagttgaatgcagagatcacaacgtggtttctgcgaatgattctttgtagtttttacatgaagatatttcgttgtcaaccgtaggcttcaaagcactcaaagtattcac

SEQ ID NO: 103401 - DNA, 496 bp, Homo sapiens
gaagaaatcccgtttccaacgaaggcctcaaagaggtccaaatatccacttgcagattctgcaaaaagagtgtttcaaaaccgctccattaaaaggaatgttgaactctgtgagttgaatgcaaacatcacaactcagtttctgagaatgcttctgactagattttatggtaagatatttccttttctaccgtaggcttcaatgccctctaaatacacccttgcaaattctacaaagagactgtttcataactgctctataggaagaaargttcaactctgtgagttgaatgcagagatcacaacgtggtttctgcgaatgattctttgtagtttttacatgaagatatttcgttgtcaaccgtaggcttcaaagcactcaaagtattcacttggaacttttacaaaaagagtgttagaaaactgctctttccaaagtaaggttcaactctgtgagttgaatgcacacataacaatcaagaagtttctgagaattc

SEQ ID NO: 103402 - DNA, 493 bp, Homo sapiens
gaattcttctgtctggcattacatgaagaaatcccgtttccaacgaaggcctcaaagaggtccaaatatccacttgcagattctgcaaaaagagtgtttcaaaaccgctccattaaaaggaatgttgaactctgtgagttgaatgcaaacatcacaactcagtttctgagaatgcttctgactagattttatggtaagatatttccttttctaccgtaggcttcaatgccctctaaatacacccttgcaaattctacaaagagactgtttcataactgctctataggaagaaaggttcaacwctgtgagttgaatgcagagatcacaacgtggtttctgcgaatgattctttgtagtttttacatgaagatatttcgttgtcaaccgtaggcttcaaagcactcaaagtattcacttggaacttttacaaaaagagtgttagaaaactgctctttccaaagtaaggttcaactctgtgagttgaatgcacaca

SEQ ID NO: 103403 - DNA, 496 bp, Homo sapiens
gaagaaatcccgtttccaacgaaggcctcaaagaggtccaaatatccacttgcagattctgcaaaaagagtgtttcaaaaccgctccattaaaaggaatgttgaactctgtgagttgaatgcaaacatcacaactcagtttctgagaatgcttctgactagattttatggtaagatatttccttttctaccgtaggcttcaatgccctctaaatacacccttgcaaattctacaaagagactgtttcataactgctctataggaagaaaggttcaactctgtgagttgaatgcagagatcacaacgtggtttctgcgaatgattctttgtagtttttacakgaagatatttcgttgtcaaccgtaggcttcaaagcactcaaagtattcacttggaacttttacaaaaagagtgttagaaaactgctctttccaaagtaaggttcaactctgtgagttgaatgcacacataacaatcaagaagtttctgagaattc

SEQ ID NO: 103404 - DNA, 566 bp, Homo sapiens
cttggaacttttacaaaaagagtgttagaaaactgctctttccaaagtaaggttcaactctgtgagttgaatgcacacataacaatcaagaagtttctgagaattcttctgtcctggtttatatgaaaaaatcccgtttccaacgaaggcctcaaagacgtttaaatatccacttgcagacttcacaaacagagkgtttccaaactgctctatgaaaagaaaggttaaactctgtgagttgaacgcacacatcacaaagtagcttctgagaatgatactgtctagtttttatacgaagatatttcctttctaccattggcgtcaaagcgctagaattctccacttgcaaattccacaaaaagagtgtttccaatctgctctgtctaaaggaaggttcaactctgtgagttgaatacacacacacaaagaagctactgagaattcttttttcaagaaattataagaagaaatcccgtttccaacgaaggcctcaaagagttccaaatatccacttgcacactgcacaaactaagtctttccaaactgctctatgcaaagaaatgttc

SEQ ID NO: 103405 - DNA, 585 bp, Homo sapiens
ttcgttgtcaaccgtaggcttcaaagcactcaaagtattcacttggaacttttacaaaaagagtgttagaaaactgctctttccaaagtaaggttcaactctgtgagttgaatgcacacataacaatcaagaagtttctgagaattcttctgtcctggtttatatgaaaaaatcccgtttccaacgaaggcctcaaagacgtttaaatatccacttgcagacttcacaaacagagggtttccaaactgctctatgaaaagaaaggttaaactctgtgagttgaacgcacacatcacaaagtagyttctgagaatgatactgtctagtttttatacgaagatatttcctttctaccattggcgtcaaagcgctagaattctccacttgcaaattccacaaaaagagtgtttccaatctgctctgtctaaaggaaggttcaactctgtgagttgaatacacacacacaaagaagctactgagaattcttttttcaagaaattataagaagaaatcccgtttccaacgaaggcctcaaagagttccaaatatccacttgcacactgcacaaactaagtctttccaaac

SEQ ID NO: 103406 - DNA, 519 bp, Homo sapiens
cttcaatgccctctaaatacacccttgcaaattctacaaagagactgtttcataactgctctataggaagaaaggttcaactctgtgagttgaatgcagagatcacaacgtggtttctgcgaatgattctttgtagtttttacatgaagatatttcgttgtcaaccgtaggcttcaaagcactcaaagtattcacttggaacttttacaaaaagagtgttagaaaactgctctttccaaagtaaggttcaactctgtgagttgaatgcacacataacaatcaagaagtttctgagaattcttctgtcctggtttatatgaaaaaatcccgtttccaacgaaggcctcaaagacgtttaaatatccacttgcagacttcacaaacagagggtttccaaactgctctatgaaaagaaaggttaaactctgtgagttgaacgcacacatcacaaagtagcttctgagaatgatactgtctagttttyatacgaagatatttcctttctaccattggcgtcaa

SEQ ID NO: 103407 - DNA, 401 bp, Homo sapiens
tttccaatctgctctgtctaaaggaaggttcaactctgtgagttgaatacacacacacaaagaagctactgagaattcttttktcaagaaattataagaagaaatcccgtttccaacgaaggcctcaaagagttccaaatatccacttgcacactgcacaaactaagtctttccaaactgctctatgcaaagaaatgttcaactctgtgagtttaatacacacatcacaaagcagtttctgagaatgatactgtctagtttttatacgaagatatttccttttgtaccattggcctcatactgctagaattttccacttgcaaattccacaaaaagagtgtttccaatccgctctgtctaaaggaaggttcaactctctgatttgaatacatacatcccaa

SEQ ID NO: 103408 - DNA, 529 bp, Homo sapiens
  misc_feature (1)...(529): n = A,T,C or G
tatttcctttctaccattggcgtcaaagcgctagaattctccacttgcaaattccacaaaaagagtgtttccaatctgctctgtctaaaggaaggttcaactctgtgagttgaatacacacacacaaagaagctactgagaattcttttttcaagaaattataagaagaaatcccgtttccaacgaaggcctcaaagagttccaaatatccacttgcacactgcacaaactaagtctttccaaactgctctatgcaaagaaatgttcaactctgtgagtttaatacacacatcacaaagcagtttctgagaatgatactgtctagtttttatacgaagatatttccttttgtaccattggcctcatactgctagaattttccacttgcaaattccacaaaragagtgtttccaatccgctctgtctaaaggaaggttcaactctctgatttgaatacatacatcccaaaagaagttactgagaattcnnnnnnnnnnnnnnnnnnnnnnnnnnnnnnnnnnnnnnnnnn

SEQ ID NO: 103409 - DNA, 529 bp, Homo sapiens
  misc_feature (1)...(529): n = A,T,C or G
tatttcctttctaccattggcgtcaaagcgctagaattctccacttgcaaattccacaaaaagagtgtttccaatctgctctgtctaaaggaaggttcaactctgtgagttgaatacacacacacaaagaagctactgagaattcttttttcaagaaattataagaagaaatcccgtttccaacgaaggcctcaaagagttccaaatatccacttgcacactgcacaaactaagtctttccaaactgctctatgcaaagaaatgttcaactctgtgagtttaatacacacatcacaaagcagtttctgagaatgatactgtctagtttttatacgaagatatttccttttgtaccattggcctcatactgctagaattttccacttgcaaattccacaaaaagagtgtttccaatccgctctgtctaarggaaggttcaactctctgatttgaatacatacatcccaaaagaagttactgagaattcnnnnnnnnnnnnnnnnnnnnnnnnnnnnnnnnnnnnnnnnnn

SEQ ID NO: 103410 - DNA, 597 bp, Homo sapiens
tgaaaaaaaaaaaattggccattatttctttaaatatttttttctactcattctttctcttctctctttccatgttaccagttacacagatatattatagcatttaatattatcccataattcatggatgctctcttctttctttttttttcttctctctttacactccccacatttatttctttttccatttcagttgaggtgatttgttctgacctatcttcaagttcccattttccttgaaagtttcaagtctttttctattgtccatttttattttatttttcttttaaactttatctccaagttgaaataacctgtctgatcatgcatgatgtttacctttttattrgatcctctaacatattcattataattattttaaattcaaattctgattgttttactatttgtgtcacacgttactctgattctaatgaaagttttgtcttatcagattgagttttccttcccatgttgtatgatttaaaattttgtttgaaattcgtaagtgttgtaactgacagcagataatgtaaatattttttctgtctgtcaatatatatgacttttttctgctaggactttagtgtggga

SEQ ID NO: 103411 - DNA, 671 bp, Homo sapiens
tcctaaatcaatcaatgaggccaaggaaaatgatacagtctgattgaccgaggctggattacatgctctcatctgcagtatttggggaaaggccacataaaagtctcaattaataatggattctgtcaataaatacataaacgcaagagaagggaaaaaagagccattgtatctacccgtgtcttctatatggactataaaaagctgcttattgctaatgtgaaaatttccactctaaggaaagtgtgtgctaaaatgaaatataactaaaaatttagcactgtccctcttcactagaagggcttgctccatttcaggtgaaagaataatgaataagtgaatgaatgcatgggtaaatgtttaagcatrgacttgtcttctacgtccagggcaatgcctgcattcaaaacttcaaggtcaaactgaccatttgtcaatccttaaaacaggcataatcaaccaggggttgatgtagccatctggccagtatatatccacacccctggagtaggcccagagccagaaaaaccaaaagagacagcttaggtctggggaaatggccaggtttttactcaacagcaacgttctgaagaatgcgtactttaaagtctttcttcaaagagccctctaaaaataaggaagtcatcatctcatggcttgagacttttgaa

SEQ ID NO: 103412 - DNA, 607 bp, Homo sapiens
tcaccacaacaaaatggactttattcctgggatgcaaggatggttcaacatatggaaaccaataaatatgatccaccacctaaacagaattgacaaccaagaacaaattatcatctcaatagacacagaaaaggcacttgataaaatcaaacatcccttcatgataaaaatcctcaacaaatgaggcattgaagaaacttacttcaaaatagtaagagccatctatgacaaactattacccaacatcatactgaaagggcaaaagttggaaacattttccccaagaactagtacaaaacaagaatgtctattctcaccactcctattcaacataatactggaagttgtagacagagcarttaggcaagagaaagaaataaaaggcatctaaatgggaaaagaggaagtcaaattatctctgttcactgaccatatgatttcatatctagaaaaccctaaagattcctccaaaagactcctagacctgataaatggcttcagtaaagtttcaggatacaaaactaacatacaaaaatcagtagcacttcttaatactaataatgttcgagctgagaatcaaatcaagaatgcaatcccacttacaaga

SEQ ID NO: 103413 - DNA, 614 bp, Homo sapiens
tgaaaacaggtctatgtagttttaacagctcttttgtgaacttcggatgtaactgaatcattttctagatttatctgttaaataaatggtccatgaaagtatgtatgggtagataattgatggaagcaaataatcctattgaaacatttgctatttatttttgatacagttcttttaaacagactgattagttccctttatgatttcaccctcgaaagcacacacgattttgttctttatcattgttgcatgacattccatttggcagttgggcttatttttagccagactatcaaagtatttttcaactggactgtcactgcacttgaacttggaatcttataacttgaagaactgccctggagaaaggaagaaacttataataaatgggaaattataaatctagaccaacccaaacttgtactggtaattattctaattattcttatttccttaagtgtaatatggttcaattatagttactgataactaacaactcattggaatatgtgttaatttgtatacggaagataaggcagcatgttwtgtgaaagtctttgaaaaactatctgaactcaaattatttttttctgaagatctttataggaaacaag

SEQ ID NO: 103414 - DNA, 535 bp, Homo sapiens
gaaagcctactttttataaatactttatacagaatagctttttttttttgtcattgggtagtaacagccaaatgtttrgtggatgtagtttttcttattaattaatcacttgagatttttatttgtctttcataaagtcttttaaaaaaataaagaataaaaatattaaaatctttttagaagcttttctacatcaataggcattccttcatgggcctaattcaggagccctcatttaaaaatgtacttttacaagtacagtgttcatttggaatgttctactgtaattttaaattactttagtaagctttttcaatttctataagcatttgctgcttttgaggcctaatatgcatgtaaacataggtgtagctggtaggtagagtgggtagagttctttagaaataaggttatttgctttggttctcagatctccttgatctacttagtcaatgattttttccccacctaaacatgcaaggaaaagaaacaaaggggatagaacacgaaaaacatgaatttctgaaagccagag

SEQ ID NO: 103415 - DNA, 577 bp, Homo sapiens
gttatggataatgatgagttcagtagagaagcctactgattataacttatttgtgtttgctttttgaatttttgttttgttttgttttgttttttttttgggccgtaatttcacttgttgcctaggctggagtgcaatggctcactgcaacctccgcttcctggtttcaagtgattctcctttctcagcctcccgagtagctggaattacagatgcctgccaccatgmcaggctaatttttgtgtttttcatagagatggggtttcaccatattagccaggctggcctcgaatccctgacctcagctgatccacccaccttgggctcccaaagggcaggggttacaggggtgagccaccacactgggccttgaattttttattctgttttttttttattttgtgtgttggcttttaactgctttcatggaaatgattagaaattttatatttcttctatgaattgtacaggacctatcagaaaggctgtgtctagaattacacttctgataaatggtagaattgggggcaatttgaggcttgagtaccctatccaagaatttcccccatgacaagtg

SEQ ID NO: 103416 - DNA, 561 bp, Homo sapiens
gaattcattcttgtatcatccactcaatctttattgaccaattactgtgttttgggcattgggctactaagatgaataaaaatcagtctctgtcttcaaggacagtttagtcaaggcatttaaacctgggcttcatgagggaacatcaggagggttcctaaaattataagcataactttgcatttatgttaatttttctggggagagaatctgtaacttttgttagaatcctagaatttttgttatctgcaaacagaatctaatgagagttcaagcagaaataaaattttaagaagagggctcaaactgataaaatacgcatcgttagcaccagaggccagcaaagtgggcacatgaatctctgtggagtaggagtcgtgccgatttaagaagctctctcatggagagtccagtgagcctcctggtgttgagcacgtcgttgagaaccctggcgacctggctgagcaatcatcacagtctccctgctccttcttcctgaaaaagtgtttctccctyctctctgctttcccaaggccccattcatcctgcagggccccaatc

SEQ ID NO: 103417 - DNA, 586 bp, Homo sapiens
aatacacatgtctaagatagacagaattttgcataagtgaggaccaaatactctgagcaagggaggaaactggcccgattctcatccctggaagaatatgggaagaaaaaatagcaagggattggaaaatgaaatagtcatgcttatgtgtctgacttacaccttcagccaagaaaaggggctgtgccttatgtaaatagggtataactaagaccacaagactctactttcctgtttaatattctgtaaagacatcacagtttagcttctttctgcactggcctaggacaggaccacattaagttgatgcaacaataaatctaggaaggggaaggctttgaaattaaacattcctcaggtgtgctcatttagccaggaggtataagccttgatctgagagccagaaagcctgccatagaatctgccaaggcacagcaagtggacctcacagaagacgccgggatggacagccaggacagacagctacatgaaggatgacagagactcaaatgcctacaaccagctagagtggagatgaggwtggaacaaataaaggtaattcctggtttcttatcaagccaagaga

SEQ ID NO: 103418 - DNA, 583 bp, Homo sapiens
ttacttctgcttccaagatgggaaaaatacaatgaaatcaatttgtttcaaagtgggtgctcttctctgaaagaaaaatggtgctatagtggggctcagcactggcctctattaacagcaagttgtatattcagcattagtagtagctatatcagacatggtgagtagraggcctggcctccaagattcatggaccattgtaccagccctgtgatggctgatgatagagtctggatgacatcaaatgctctctactgggttgtttagtgcctcttatgtggtaaagtctctgatgggtataaatgtgattttaaaatatttcttccactcctatgggtggatccacatgatctttccccaaactactttctcatcatttttccagtctttatctaacaagaccctggccaataagccaaatcatttaccactccacaagacgcagttacctctggaagctacttctatgaatgcctactatcagcccttgtctaaagaatacagtcattctgagtttcttattgaggctggtgcccctttcaccagtgcattccttagtgatttggtacattgagtaactcct

SEQ ID NO: 103419 - DNA, 583 bp, Homo sapiens
ttacttctgcttccaagatgggaaaaatacaatgaaatcaatttgtttcaaagtgggtgctcttctctgaaagaaaaatggtgctatagtggggctcagcactggcctctattaacagcaagttgtatattcagcattagtagtagctatatcagacatggtgagtagaaggcctggcctccaagattcatggaccattgtaccagccctgtgayggctgatgatagagtctggatgacatcaaatgctctctactgggttgtttagtgcctcttatgtggtaaagtctctgatgggtataaatgtgattttaaaatatttcttccactcctatgggtggatccacatgatctttccccaaactactttctcatcatttttccagtctttatctaacaagaccctggccaataagccaaatcatttaccactccacaagacgcagttacctctggaagctacttctatgaatgcctactatcagcccttgtctaaagaatacagtcattctgagtttcttattgaggctggtgcccctttcaccagtgcattccttagtgatttggtacattgagtaactcct

SEQ ID NO: 103420 - DNA, 565 bp, Homo sapiens
tgaattctcaaacatactggatgaaaatgttaaatgatacaactgtttggggaaaatgtctcacaatttgatatgataccagataaacacctaaactatggcataataattctaatcctagttcaaaagaaatgaaatcatatgtccaaaaaaggatttgtatcagagtattggcagcagttttattcataatagctaaaaactggaaatagcacaaatgttcaattggaaaatgggaaaataaattgtggtgtattcataaaacagtttactattgatatatgctctaacatgggtgaatcttaaaaatatcaattcatctctactaaaaaatacaaaaattagccgggcatggtggtgtgcgcctgtagtcccagctactcgggaggctgaggcagaggaatcacttgaacccgggaggcggaggttgcagttaaccgagattgcgccmctgcactccagtctgggcaacagagtgagactcttatctcaaaaaaaaaaaaaaaaaaaaaaaaaccattcaggcaaaagaaggcagacaaaaaacagttcaaactgtatcatt

SEQ ID NO: 103421 - DNA, 614 bp, Homo sapiens
cagaacctcaccaggttctcacagtgaagatctaaaaaagacatgctgatggctctgtcagggggagggaaataataaccaatgtgaaaaaggcccagagtcttctccttaacgaaggcctactcaatgagggaaaagactaccagagccttatcccagctgggggaaggatgggaagggcattccttacctttctgcacactctagcctttctttctcatctaaggggaaaataaaggctatacaatggcaacataattgttaaaatcacagataagagacataaggccactaattatattacagaattcttttctctcccctataccttagcaccacaccagcacggctccagrataacaatagtggattatagctaaagagctgtggagaccaaactctctctgatgaggtgtgcacgggaaagctcaaagtcaagagaggagacaaaacaaggacactagaggaatttgaaggccctgaaacccgtagtgatggcaaacagcaagcacagcccaattcctagctagattatcataagtcctcacactaaaggcctgtttacctcagttcctattcctgatacaaacatgtcaggctttcaaagaaaagtc

SEQ ID NO: 103422 - DNA, 614 bp, Homo sapiens
cagaacctcaccaggttctcacagtgaagatctaaaaaagacatgctgatggctctgtcagggggagggaaataataaccaatgtgaaaaaggcccagagtcttctccttaacgaaggcctactcaatgagggaaaagactaccagagccttatcccagctgggggaaggatgggaagggcattccttacctttctgcacactctagcctttctttctcatctaaggggaaaataaaggctatacaatggcaacataattgttaaaatcacagataagagacataaggccactaattatattacagaattcttttctctcccctataccttagcaccacaccagcacggctccagaataacaatagtggattatagctaaagagctgtggagaccaaactctctctgatgaggtgtgcacgggaaagctcaaagtcaagagaggagacaaaacaaggacactagaggaatttgaaggccctgaaacccgtagtgatggcaaacagcaagcacagcccaattcctagctagattatcrtaagtcctcacactaaaggcctgtttacctcagttcctattcctgatacaaacatgtcaggctttcaaagaaaagtc

SEQ ID NO: 103423 - DNA, 519 bp, Homo sapiens
tgctctgcttctctttgttttcaggtggcaggaaagtttcccatgrgtgtacaagctttctgaggtgcaggaaattttgtggggtgatatttctaccaaaagaacactgacacccctttcttctctttccctctggggtggaccatggaacataaggtggatggaggaaatctccaccaacctcaataagtaactcatgcttctagaactggggacaattggttggattttgaggaagctatgccttacttagatttccctcttcaaagaacagttaagagtgaatgtatatttatatatctgtgtagttaggattattgggatctaagtcaaacaaaattaggttttgttttattttttcaagggcagaacacacatacggtaaaacaaaacaagacaaaaagaaggacaaatgaagtaaaaaatatgtccctttccagagcccaatttctgttatcagttctctgcctcagagataatcagtatcagtttttgtaataactggcaatttttgcacat

SEQ ID NO: 103424 - DNA, 519 bp, Homo sapiens
tgctctgcttctctttgttttcaggtggcaggaaagtttcccatgggtgtacaagctttctgaggtgcaggaaattttgtggggtgatatttctaccaaaagaacactgacacccctttcttctctttccctctggggtggaccatggaacataaggtggatggaggaaatctccaccaacctcaataagtaactcatgcttctagaactggggacaattggttggattttgaggaagctatgccttacttagatttccctcttcaaagaacagttaagagtgaatgtatatttatatatctgtgtagttaggattattgggatctaagtcaaacaaaattaggttttgttttattttttcargggcagaacacacatacggtaaaacaaaacaagacaaaaagaaggacaaatgaagtaaaaaatatgtccctttccagagcccaatttctgttatcagttctctgcctcagagataatcagtatcagtttttgtaataactggcaatttttgcacat

SEQ ID NO: 103425 - DNA, 581 bp, Homo sapiens
ttgactgccctactggattttagacttccatggagcctgtagctccttcattttgaacaatttctcccatttgaaatgggtgtatttacctgtacccctgttgtatctagaaggtaactaacttgcttttgatttcagagactcctaggtggaagggacttgccttgcatcagatgagactttggactgtggatttctgagttaatgctgaaatgagttaagaatttgggggactgttgggaaggcatggttggtttttaaatgtgagaacatatgatttgggaggggtcaggagtggaattatatggtttggctctgtccccacccaaatctcatcttgaattatgctcccataattcccacgtgttgtgggagggacccagtggaaggtaactgaattcacggagggcaggtctttcccatgctgttcttgtgttagtgaataagcttcatgagatctgacggttttattgataaaaccatcagaggagaaccaagggagttcccttgtacatgctstcttgcctaccgccatgtaagatgtgactttgctcctcattcaccttcagctatgattgtga

SEQ ID NO: 103426 - DNA, 599 bp, Homo sapiens
agtagtctctgatgatcttttgtatttctgtgttatcagttgtaatgtgtactttttcatttctgatttcatttatttgggtcttctctctcctttttttgattagtctaacaatgtttattaattttgtttctcgtttgtatttttctagtctctattttgttccaatcttatctttggttatttttttcttcaaattttgggtttagtttgttcttgcttttttagttacttgaggtacattgttatattgttaatttgtaatctttctacttttttgatgtaggcatttaatactgtaaacaaccttttagcactgcttttgctgtatmttgcaggtttggggatgtatttctattttcacttgtttcaagaaaatttttcattttatcttaatttcttcattgacccaatcattattcaggagcatgttgtttaatttctatgcatttgtatagtgtccaaagtttctcttggtattgatttccagttttattccattgtggtctgagaagatacttaatatgactttaattttttaaagatttgttgagacttgctttgtggcttgatatatggtctatcataaagaaggttcc

SEQ ID NO: 103427 - DNA, 599 bp, Homo sapiens
agtagtctctgatgatcttttgtatttctgtgttatcagttgtaatgtgtactttttcatttctgatttcatttatttgggtcttctctctcctttttttgattagtctaacaatgtttattaattttgtttctcgtttgtatttttctagtctctattttgttccaatcttatctttggttatttttttcttcaaattttgggtttagtttgttcttgcttttttagttacttgaggtacattgttatattgttaatttgtaatctttctacttttttgatgtaggcatttaatactgtaaacaaccttttagcactgcttttgctgtatattgcaggtttggggatgtatttctattttcacttgtttcaagaaaatttttcrttttatcttaatttcttcattgacccaatcattattcaggagcatgttgtttaatttctatgcatttgtatagtgtccaaagtttctcttggtattgatttccagttttattccattgtggtctgagaagatacttaatatgactttaattttttaaagatttgttgagacttgctttgtggcttgatatatggtctatcataaagaaggttcc

SEQ ID NO: 103428 - DNA, 545 bp, Homo sapiens
catatttcaaacattttcattattattactattttatctgttgtgatctgtgatcagtaatctttgatgttactattgtaattgttttggggcactgtgaattaacacatgagtgataagaacgtgatatagccttattgctgatacggggaaagttttagggatcaggacagrtcaaaccagccacaacattcccttaagccaaagcctaatccagagcaaggctctaaatctcttcaattctatgaaggctgagatcagtgagtaacctgcagaagaaaagtctgaagctagcagaggttggttcatgagatttaaggaaagaagctaactccataacataaaagtacaaggtgaagcactacatgctgatgtggaagctgtagcaagttatctagaaaatctagctaagataattgatgaaaatggctacactaaacaaccaaattttaatgtagatgaaacagccttatattggaagagaatgccatttaggacttgcatagctagggagaagtcaatgtctagcttcaaaagacaagctg

SEQ ID NO: 103429 - DNA, 564 bp, Homo sapiens
atgtaagtaatgaatattcatttcccattagtaatatacaaggtaagtattacttagacataaattagagattactgtgcaatcatccacttaatatggcaattgattgttttggttatggaaattctgacagtacaaacattaactgccattaaaatgttgctgtctcctaccatatagatattatttatgctaatataaaatgtgcaggaacyaaaattcaatcaacagtgcctttaaaataattaaatgaagtgagaaattctttgacaaaacatgaagcaatgctgtttgataaaattatattattgatgttaaaccaattgtagtttcttgactctgaaatcaacttccccaacattaaattaccataaaaaggggaaagaagatttaatttacctataaatctcacagcagtccggctatgatccaaaacaaaatttcaaaatcaatttttttcttatcttggatgtaacattctccttaaaagaaaggcttacgataatgaaagaatatcatgccttttccagtggattagatgtttgctattcaaagtgtagtcca

SEQ ID NO: 103430 - DNA, 502 bp, Homo sapiens
atctaggatacagcaaaagtggtgctaagaggaaagttcatagcattaaatgcctacatcaaaaagtttgaaagagtacaagtagacattctaatgtcacagtccatggaactggagaaacaacacaatccaaacccaatcccagcagaagagaagaaataacaaagatcagagtagacctaaatgaaattgaaacaacaagaaactacaaaggataaatgaaacaaaaagctgattatttaaaaagataaataaaattgatagacmtttagtgagataaaccaagaaaagaaaagttccaaataagctcagttagaaacaaaatgggatatattgcaactgataccacagaaatataagctatgaacacctttatgtgcattaactagaaaacctagcagagatgaataaattcctggagatatacaaccctcctaggaagatatagaatgtctgaactgaccaataacaagcagcaagattgaaatggtaattaaaaaaa

SEQ ID NO: 103431 - DNA, 502 bp, Homo sapiens
atctaggatacagcaaaagtggtgctaagaggaaagttcatagcattaaatgcctacatcaaaaagtttgaaagagtacaagtagacattctaatgtcacagtccatggaactggagaaacaacacaatccaaacccaatcccagcagaagagaagaaataacaaagatcagagtagacctaaatgaaattgaaacaacaagaaactacaaaggataaatgaaacaaaaagctgattatttaaaaagataaataaaattgatagacatttagtgagataaaccaagaaaagaaaagttccaaataagctcagttagaaacaaaatgggatatattrcaactgataccacagaaatataagctatgaacacctttatgtgcattaactagaaaacctagcagagatgaataaattcctggagatatacaaccctcctaggaagatatagaatgtctgaactgaccaataacaagcagcaagattgaaatggtaattaaaaaaa

SEQ ID NO: 103432 - DNA, 540 bp, Homo sapiens
tcaacatacaaaaatcagtagcatttctacataccaacaggtaactatatgaaaaaaaaaatcaagaaagtagtcccatttttaatcactacacataaaataagatacctaggactaaaattaaagaagtcaaagatctctacaataaaaactataaaactctgatgcaagaaattgaagaggacaccaaagaaaggaaatatattccatgttcatggatttgaagaatcaatattgttaaaatgtccatactgtgasatgcatccatgtgaagagaccaccaaacaggctttgtgtgagcaatgaggctgtttattcacttgggtgcaagtgggctgagtccaagaaaggagtcagcaaagggaaatagggatggggcagttttataggatttgggtgggtagtggaaaattagttataggtggttatctcttgtgggcaggggcgggggtcataaggtgcagggtgggagatgatgagactcattgtccaggggagggatgtcacaaggtcaattgattagttagggtggggcaggaa

SEQ ID NO: 103433 - DNA, 561 bp, Homo sapiens
aactgggggggagttatgaatattcataaagcaagagcacacacatacacaatgcagyttcatgccttttcgtgggacccatgtccaaaaaatggtggcattagcataattctagggtggagttttcagccctcagatgtcaaaaagtgaagcagaggacataaaagccctgtctttgcatcctccctagattggccagaaccactccatggtcggtggtctcttaccaggaaggcatgctggtcagatgttgtacagaaaccacaaaagggaagagcagcagtcaggcctttggttgaaatcagcggtggagccagtctttccaaagggctggcttctctttagactttggggtagtaagcctaatggtggttagagagggtgagggtatagtgagatgtgtctatcatggccagaaactcagttttcaaggtttttctggagtccccttggccaggaggagcttctttccattggtttgggggtgtaggattgcatttttatttctcgttacttaaccccattgctttattatcttgcctccttagaagtttggaattc

SEQ ID NO: 103434 - DNA, 560 bp, Homo sapiens
aactgggggggagttatgaatattcataaagcaagagcacacacatacacaatgcagcttcatgccttttcgtgggacccatgtccaaaaaatggtggcattagcataattctagggtggagttttcagccctcagatgtcaaaaagtgaagcagaggacataaaagccctgtctttgcatcctccctagattggccagaaccactccatggtcggtggtctcttaccaggaaggcatgctggtcagatgttgtacagaaaccacaaaagggaagagcagcagtcaggcctttggttgaaatcagcggtggagccagtctttccaaagggctggcttctctttagactttggggtagtaagcctaatggtggttagagagggtgagggtatagtgagatgtgtctatcatggccrgaaactcagttttcaaggtttttctggagtccccttggccaggaggagcttctttccattggtttgggggtgtaggattgcatttttatttctcgttacttaaccccattgctttattatcttgcctccttagaagtttggaatt

SEQ ID NO: 103435 - DNA, 521 bp, Homo sapiens
agaattcctgaatgaagataagagaaatactaaaattaaaatgagatgtctatttcacagggaagaaagagtagttgtttgaaataaaagcaaagaaaaacaacaaaacaatacacacacacatacacacaccccaaaacataaaacaaatttttttttcctgtggggcccaagatcttgaacactaaaaagtggttagaattaaaatatttgtaaagtactagtgaaacaatgatagtgtcattgattactgtttaaaaagttgagcgcagattgaatttattatcaaagaaactgttyggactgctccaaaataaatcaatgtgcttccaactttaccttaggtagaacatggtctgataaaaaaatttttcccatattgtgtggagtgaaatccttgatctaaagcatgttagggttgctacattagtttctttattctagtttcagtaagtattttaaggtgattgagaaaagaagatctctgtgagattaaaaacctgctgtgtagcccaaggaat

SEQ ID NO: 103436 - DNA, 593 bp, Homo sapiens
ggaccaagtatacacccacccagtcatgctggcagcagacagcgtttacctataagcgccatctactggcttgtagtttaaactgcacaactcaatatgaaaccagctgacatgcgtgcttatggctgtacaagcaaagccaaaagatcctatccaacattctatatacacatacaccctaaggcgatgggaaagggaaagggaaggagcaaatgatgatactataggacaagaaagaaaaagaaaaaaaatcctacctgcataaaaataattacaaaaattagaagtgccaacatttccagttgagaagcaaccagagcaaaaattctgcaccatgaaaaatctgaatgtagtgccaccaccaaagaatcacactagctttccagcaatggtccctaaccaaaatataaactcagaaatgaaagataaggaattcaatacgtggattrcaaggaaactcaatgaaattcaaggttgaaaattaacacaaacaaacttctaaagcaatccaggacaatgaaggaagagataaacatcttaaaaagaaatcaatcagatattctgaaatagaaaaacttacttaaggaatttca

SEQ ID NO: 103437 - DNA, 598 bp, Homo sapiens
tataatatgatattaaggaattattgttaattttttgttggctctgataatatggataaaatgatatagctgagacttcttttaaaatattccagaaaaacaataacaacatcaacaaaaagtggagaayagatgtaactaggacaagatactgataattactaaagatgggttagactcagagtttattacactaattacactaatctctctacttctatatagagtagtccttccttatccatgagggatacattccaagacccccagtggatgactcaaactgcagatagtattgaactctctctgtatatatacacactatatatgttcttttctatacatgcatacctatgataaagtttaatttataaattatgctcagcaaaagattaatatacactgtaataaaagttatgttaatatggtctctctctctcaaaatatcttattgtactgtactcacctatgggtaaatgaaactgtggaaagtgaaaccacagaaagtgaaaccatggataaagggagattatttatttgaaatttttcataatagaaaaatttttttagggaaatcatcagaatttttttcaactaa

SEQ ID NO: 103438 - DNA, 598 bp, Homo sapiens
tataatatgatattaaggaattattgttaattttttgttggctctgataatatggataaaatgatatagctgagacttcttttaaaatattccagaaaaacaataacaacatcaacaaaaagtggagaacagatgtaactaggacaagatactgataattactaaagatgggttagactcagagtttattacactaattacactaatctctctacttctatatagagtagtccttccttatccatgagggatacattccaagacccccagtggatgactcaaactgcagatagtattgaactctctctgtatatatacacactatatatgttcttttctatacatgcatacctatgataaagtttaatttataaattatgctcagcaaaagattaatatacactgtaataaaagwtatgttaatatggtctctctctctcaaaatatcttattgtactgtactcacctatgggtaaatgaaactgtggaaagtgaaaccacagaaagtgaaaccatggataaagggagattatttatttgaaatttttcataatagaaaaatttttttagggaaatcatcagaatttttttcaactaa

SEQ ID NO: 103439 - DNA, 613 bp, Homo sapiens
ctgcagcatctagggcaaaggtagtagagtgagattgtgaagttactgcatgctttctcttctcacatttaattcactttacttattactttctcatttactttgattaaggcacttcatgaaggggataaatagtctcttatttcatgctcaagtgtgttcattgttgacattctccaggcaatagagttttaaaatgaatcaattaagtgacatatccataaatattaacctgaaaataaaccttctatcatcaccacgactttactgagaggggaagttcaatggggaagtccccacagaaataattcaatgtgaaaattgttcccaattcatgaagtataatagggaataaagcacttcactttcaaggatgacactttccttttttgctcaccsttacacgtatatccacatctagtagagatcgggtagaggttggaggttttgaattcacatgtatcattttcatttagtagtaggcaagcatcaactgcaaataattaaaagggtcagaatctgtttaaagagagtttatttaagggcaaagtttgagaataacagccctggaaacatagattcaaaagaatggaagtcagtattccaaagtatt

SEQ ID NO: 103440 - DNA, 613 bp, Homo sapiens
ctgcagcatctagggcaaaggtagtagagtgagattgtgaagttactgcatgctttctcttctcacatttaattcactttacttattactttctcatttactttgattaaggcacttcatgaaggggataaatagtctcttatttcatgctcaagtgtgttcattgttgacattctccaggcaatagagttttaaaatgaatcaattaagtgacatatccataaatattaacctgaaaataaaccttctatcatcaccacgactttactgagaggggaagttcaatggggaagtccccacagaaataattcaatgtgaaaattgttcccaattcatgaagtataatagggaataaagcacttcactttcaaggatgacactttccttttttgctcacccttacacgtatatccacatctagtagagatcgggtagaggttggaggttttgaattcacatgtatcattttcatttagtagtwggcaagcatcaactgcaaataattaaaagggtcagaatctgtttaaagagagtttatttaagggcaaagtttgagaataacagccctggaaacatagattcaaaagaatggaagtcagtattccaaagtatt

SEQ ID NO: 103441 - DNA, 618 bp, Homo sapiens
ataatgaagataaacatatatttacaagaaaaaaaaatgaagtaactaactctggatgcaaatccaattgtattgaagagtaaatgacagtttattgccctggccaatttgcttamtgtgtctgcttaaatgtataccatacatacagatttagatatgttctgaacctataaataacccaatggtaactaaaaattttatggggtactgtgctaaagatttactgtccttctcagctagtatagaaataacccaaggcagattaattgtagagagatgcttaggttacatttacctgcattattagcatgaataatacaggtatgtttttatgtacagagatgtagacatatttttaatgcagtaaaaccttagatctgtatcatgtattgttaacatggattctggatctagacccggtcagtgtgtgtgaatctcagcatgctacttaattcagctacatattcatggacaagatacctaacctgtctttttaaacttttattttaggttcaagggtacataggcagctttgtcatttaggtaaactgcatgttacagggattgttgattattccatcacccggctaataagcatagtgcttcataggtagtttg

SEQ ID NO: 103442 - DNA, 618 bp, Homo sapiens
ataatgaagataaacatatatttacaagaaaaaaaaatgaagtaactaactctggatgcaaatccaattgtattgaagagtaaatgacagtttattgccctggccaatttgcttactgtgtctgcttaaatgtataccatacatacagatttagatatgttctgaacctataaataacccaatggtaactaaaaattttatggggtactgtgctaaagatttactgtccttctcagctagtatagaaataacccaaggcagattaattgtagagagatgcttaggttacatttacctgcattattagcatgaataatacaggtatgtttttatgtacagagatgtagacatatttttaatgcagtaaaaccttagatctgtatcatgtattgttaacatggattctggatctagaccyggtcagtgtgtgtgaatctcagcatgctacttaattcagctacatattcatggacaagatacctaacctgtctttttaaacttttattttaggttcaagggtacataggcagctttgtcatttaggtaaactgcatgttacagggattgttgattattccatcacccggctaataagcatagtgcttcataggtagtttg

SEQ ID NO: 103443 - DNA, 515 bp, Homo sapiens
cttccttttttaagaactttattcatgtattctaacttctcagatcactggcaacgtactttataatattgtatttccttttttttttattgtttacagaatgtgtagtgatgtcactttgctcattctaaatactggtcatgtgttttctctcttttctataatgtctacctatagatttattactttcatttaatatttacattaatatatttataatgttatataaatgtattttatttatattaatattatatttggatattttcaaattatgtacttcaggttttatttttcttccctttaatgctcatctattttcttttttcattactttcaactctggtactcttcctactcttctgccttatttgggtttaatttgttcttcttttatttctataatttcttataatggaggcttagttcattttatttcttccatgctttacattttcctcaaatcaccgttttctttcagcttcakcccacaagttttgtgtatgttatgtttt

SEQ ID NO: 103444 - DNA, 652 bp, Homo sapiens
gactttataggctccctgaaaatatcctgaggatctctaagtatttaacatcaaaatactgaaaattgccatttttcaccattaattgtaattcaaatggcatttgattaatggatgttcacctttttctaaaaattaaaaaataagattgtgtgtttttggcatcacttwtaaattttcccaagtttagcattttttttaaagtctttcactcctcaggttgcagtgagccaagatcgtgccactgcactccagcctgggcgacagagcgagactctgtcttggaaaaaacaaacaaaaaaagcatttcactcctcatatttattaaggaaggcatagtctatccaatgttagaaatagacatttgaatcttaagcatgtacggtactgcttgtgaaatttgttataactctttctattgaactttactcaagtaataggctaatgtaatatttccacattcatagattctaaaatttaaaatgtttaatatgtataaaaattatagaaacactgtatgacaggcttaaaatggaattatcattttaaagtaagtgatgatattcctagcaatctactgagacaacgtcaagagtgatgcttttaggaaaataaaaatatattaaataataagttactttattgtcatttt

SEQ ID NO: 103445 - DNA, 626 bp, Homo sapiens
gactttataggctccctgaaaatatcctgaggatctctaagtatttaacatcaaaatactgaaaattgccatttttcaccattaattgtaattcaaatggcatttgattaatggatgttcacctttttctaaaaattaaaaaataagattgtgtgtttttggcatcacttttaaattttcccaagtttagcattttttttaaagtctttcactcctcaggttgcagtgagccaagatcgtgccactgcactccagcctgggcgacagagcgagactctgtcttggaaaaaacaaacaaaaaaagcatttcactcctcatatttattaaggaaggcatagtctatccaatgttagaaatagacatttgaatcttaagcatgtacggtactgcttgtgaaatttgttataactctttctattgaactttactcaagtaataggctaatgtaatatttccacattcatagattctaaaatttaaaatgtttaatatgtataaaaattatasaaacactgtatgacaggcttaaaatggaattatcattttaaagtaagtgatgatattcctagcaatctactgagacaacgtcaagagtgatgcttttaggaaaataaaaatatattaa

SEQ ID NO: 103446 - DNA, 624 bp, Homo sapiens
cagaaatagagaagtgtaacagggtcacattattttccatagaaggacagtacatacatcacagtgatttgattgaatacagctcactacattccaaagaagattgtttcaacatttagcgaagagggtaatgatttcaaaaaagtcttatctctggagctacttgatcttttcatatcattcacaaggaaaagcagaagttgcagctgcatgctatatgattcaggccacatagccatattcctctcaaggctcaaaataatataaagttccaacagcttttagcttaaattatttaattctatagaagtgaagtttcacagaacatttataacaataaatggtattttatttttaattaaagaaggaaatttattcttaatttggcaggcaacgtttttagcataaaaatgttagataaatgactgaagattaaactcaaggtaagttgaagcaaatctttagaaaatgtaaagcagaaatcaatgaaatagaaaaataggaaatagaagagataaygaattacactaaagatttgttctttggaaatcattaaaatagtcttcatctatggtttagtaattacactattattataaagccagaaggcaaatgaacaaaaaa

SEQ ID NO: 103447 - DNA, 429 bp, Homo sapiens
ctcctgatgacttgaaagattaaatgagttttcttgtttattagggtctgagaaacctgtatccaactaagaacacgagaaaaagttaataaaagcttttttcctatgggaaacagagtggatacagactcttcctcttcgtatacagaacctgacctgctcataatagcttcccctgatcttttaccttctcaggctatggtatgtgcatgcctttgttctgcgcccttattaacaagcgcttgtttatctccacatagcccattgtgttgtaacgatctgctgttcctgcttcatattcctctgtctatttcttcagtgctcaggagagttcrtggcactcggaaaactttccttgaatgaggagagagagactaaaagcaatgatttctaccaaacatattaagtaacagcactggccataccatg

SEQ ID NO: 103448 - DNA, 536 bp, Homo sapiens
acatggaggacattatgctaagtgaaataagccaggctggcccacaaaggcaaatttttcttaatggatcttttattctactccccagtcacagatataaataataaactttactaaacttcaagccaaactttaaccaacaactctagtattccccttttccaagtcaagttattcatagaactcattgggagtcatttcccaaataatactctatataacgagaagtcaaatctttttttgagtcaaaatttattcagtgatgccaggaccaayaagctaaggacacctatttgacagtattcctcctatcaaagccaccttgcaccttactcataatctatatggttgcaaactgagtatatatacgtaatttcttaaatatatatgtaattatatatatttatatataatttatatatttgtaaattatataaatgtaaaataatatatgacatatattattttatatatattatatttatatatatgtttatttgtttgagtgggaaggggtcttggtccatttaggctgt

SEQ ID NO: 103449 - DNA, 536 bp, Homo sapiens
acatggaggacattatgctaagtgaaataagccaggctggcccacaaaggcaaatttttcttaatggatcttttattctactccccagtcacagatataaataataaactttactaaacttcaagccaaactttaaccaacaactctagtattccccttttccaagtcaagttattcatagaactcattgggagtcatttcccaaataatactctatataacgagaagtcaaatctttttttgagtcaaaatttattcagtgatgccaggaccaataagctaaggacacctatttgacagtattcctcctatcaaagccaccttgcaccttactcatartctatatggttgcaaactgagtatatatacgtaatttcttaaatatatatgtaattatatatatttatatataatttatatatttgtaaattatataaatgtaaaataatatatgacatatattattttatatatattatatttatatatatgtttatttgtttgagtgggaaggggtcttggtccatttaggctgt

SEQ ID NO: 103450 - DNA, 601 bp, Homo sapiens
ttctttcaaaagtgaaagagatgtaaataatcaagaatagtgtcttgtaccctgtgggcacagcaccttccaaaatatatatagatttrtaatatcataacaaatcgcacacataaaaatacaatacctatctctgaaatatatttgcattacgtagctgaagcaagatgagtaagaaaaaaattgctgcataaaagtctaaaacgtgaaaactaggggaataattcagaaaaactattaaaagatatactctgtaagaatatattcttcaaggtccttgtaaaaagaaagttatttttaaatgtagcaacttttatcattttatttaagtttagagaaaactttgcctttgattggaaaattatttttccccatgccttaggctgtatagaatattaacaatagtcactgtaatgcaaagggaagcatgaaaaggatttgcctttttgtcctgctttataatcttccacattatttgaataaaataaaatgacaatgagtttgagaggttttcaaactgactacagattacagacaaacacaagactggcgtgtgtgtacctctctgcctgctggtgttgaattctgtcaaacaaactcc

SEQ ID NO: 103451 - DNA, 626 bp, Homo sapiens
gtccaaaacaatggccttccgtaattttgttaaaaaaaaaaaatccccccttttgttcagcttctcacttaggtgagcatctgaccaaaactagggccttagctccactctctgtcaccatcgttttgggtttcctgtctcagcacatcattcataggttacagtatcttcatagtcacacatttctttcatctcttgttattccagttgaacagagaccatttgttgttctagagatgcctgcatgcaaacatttaaaacttttgagagaatacagtgcaccagsaagactattattatgactattgggaggataataccaagagtttggagtatgctccttacccagtgtccccataaaccaaaccaccgaaaattaaataaagaatgagctaaagaatctactcacttgactaagtggtctttttattaatgccctacaactgaatttctataatctacatttgataaatttcttcataggccataagtaccagaagctacacaagtacttttctgtttagccaattatgttatttagaataactttcacaaaagaacttaaagcctgttgtttaatgatagcctttacagtagaatctgctatacagcctatcaaaagggat

SEQ ID NO: 103452 - DNA, 555 bp, Homo sapiens
tcaattgaaacagtaaaatcctacagcctggaaaaccccagaaataacatcataccattagtttcctaaaactaattaacagcaatttattaatatagaactacatagtagttaarttttccatacaaatatcatgtgttttaggtgtgaaaactttacaaaggatatgtattataaatatctctgaaatactgaataagttccccaaaaataggtatgttgtctttatgcttctaatggctctgataataaacaaaatcaaatatgtgtaaactaacaatatcagaccatttggtgaggttatataaggggagaacatatgataagacacaaaagtagaaattccctattattgctgcatatttttacaactgcttcaaaataattctctgatttttttgtgtataaaacatgtttcctttgttcttctttgtactttacttggaatttcatggtacaaataattaacgcaatcacaaagagtaatttaataaaagtcataactgtccatttgtattcccaatttttaaaaagacatttaactactaagcgact

SEQ ID NO: 103453 - DNA, 600 bp, Homo sapiens
attatattatactaaggtttagtcagttgtcctaatcaataaattaacttcaatgtgggccagttataattaaattttataaatctaaactccggagtaactattaaaagcacttctactattcatatcttaayacaaaggctttctccaatagtataataaaatgtttcaaatggcaaaattatggcttgttaattattataatatatattagcaatagaatctcagtaaaattaatagtatttaagatatataaattgaaatatttaagaataattcctcatctttgcataatcagagcacagaattctcaaaaagcttgatctttaaatggtcttgtatccagtcattgggttcagggatttctaattgtctgatatcagctaaacaggaaatagaggcctattttcagaatattagcatgactcacttatatcagtctctcattcaagctgtggtcaaagcatcaaaagttgagagaactggggtttcatggtgcttacaaaataagtggcctgaactattttatgtccacttgttaatatttgcttaatacatttctgtatatataacaaggtttggtctaaatgttggttttct

SEQ ID NO: 103454 - DNA, 548 bp, Homo sapiens
ttgcgtgctggcatgggagctgggtgtccctcccttcacaagatcagtatgggaaggggatgcatagatagccagctgaagcttcctcccaaagaagccccatagcttgaaacatctggaayggctgagtgatctggttgcagaatgcttgggaaaagcctggctcattgggactgctcctgaggaagacgctggagtaagactcatttggttggaggaatgtgagcccacagccatctgccaagctgaaaactcaagaccatggacaccacactgattacacacctgtggtgctactgccctgcccaaggatcctccacccttgacctactgcatcaccagaccaccacagacatactccacaacttgctctgactctggtaatcccatgaagctgcaggtcccctgctggcctaactcatggcttgggccacccagaagtggaggagcacaggctgccaaagtccctcttggggcaaataaaaagaaggtatggtgccagtagttgaagaggacatcatcaaggcccaggaatgaacaaggaaagt

SEQ ID NO: 103455 - DNA, 586 bp, Homo sapiens
tctcttctgtgtagagctgcctgaattgactgatgctaaagtcaagctctgttaaayagagcacttcctttctgtgaaaagatttctctttcagatctcctgcttcctcttctggggaggctcattctctgatctgcacttgaatatgtgttgacctacaggtctcttaggtggatcaacctccattctctgttagttttcttccagtgtgatgttgcttttatcacattttcaggaaaaggccagtttttcatcttccttttctctgctgaatgtgtcagatcctaaaaatatttccctgaagcgttgttactgagacctctggtgttaccatctcatcctgaatgaccacagaaagaaaatgtttctttttgtctacaagagttgaattaagttattttaaaagcaacacatgaacttgctggaaaatattatgtcaactgaggtagaagtaaaacagagagcatgtcataaatttctatgatcaaggagagtagcatatggtcctataattgtagagaaacagccagaaataacatcctcagggcatttagaaatatagcagcaagagggtgtagagcaatgt

SEQ ID NO: 103456 - DNA, 560 bp, Homo sapiens
cacagaatagcatgtacagtaatattacatcatttatgtcaatagttatgcatgtttttatacacacagaaagggtctagatggctgaacattaaacatttaaccatattacttaagactttttaaatgagctctattcatgatttaaaatatgtaaatattttaaattgctattataattttttcaaggcttaagcagtttttctaaactggttttggccttagcttttagccacaattcgaggttcaaatcttatcacagcttcttcctcttctttttttaaaaagacatgcaaattcaagattctaaatccatacagtattcaatacaaatgaaactgctttttgtaacttttctccaaaacatgcyttaaaaatcacatttctgccacgaatcacaatattgccacaaaatataataattactagttacaaaatcagccttaagtaaaaagacatttaggattcagccactagagagtagtagtgaggcatgagaacatttcaaggatcacaagctgcacaaaagctttttttccttgctttgtactttgttattt

SEQ ID NO: 103457 - DNA, 528 bp, Homo sapiens
atcagctgatcccaggagtttgagaccagcctgggcaacatggcaagaccccatctctacaaaaaatacaaaaattagctaggtgtggtggtgagttcctgtagtcccagctactcgggaggctgagatgggggaatcacacgagcctggaaggtggaggttgcagtgagctgagatcattccaccgcactccagcctgggccacagagtgagaccctgtctcaaaaagaaagctcccagagggattctaatatgcagccaagttgagcaggacaaacttaggtcttctttcaaagagagggatcaaatttctggtcacctggctgtcattttggaaactgaagttgttctagaagcaattgtccgaatctctaggagttttgagggaggtttttgctaatctgactaaatttgctgagattttattaatttggtctcagcttactaaaaaggagaagaaagaatgcttaatacatcttccttggaaatgcagcaygaaaaagacaaagaacttcagtcaaggttaaa

SEQ ID NO: 103458 - DNA, 603 bp, Homo sapiens
ttttctgcagaaaattcctaaaatttggtattaattcccttgaccccacagaaattaagaaaaacagccaaactgggtagtcattactccctagggaaacaatgcttggctgagagatgctaacaggggctccactccaagaggacattgccccttaaagygcagcctattaaagcttgcttaccatgtcccttgggccagcaagaaggggtttttttctaagcaaggaaggctacacttggggtgaggtaagggataggattgctttcattttccaaagaaaagcagctgagatggtttgggaaaagggcttcattcatgggaggcaattacaagctcataattactgtctgtaattacattcgtaataatgatattcagttgcttaactggcaggtttattggttggggcactgctgggaaacctggagactgagaagtcccggttgggtcatgagaaaactcaacaggaatttatttaaggaggattcttgattctgatcctcgcaagaacagaggggcaacatgcaattcctatgccattcccaaggaaggatgagactcccatgacactggggtccttgaattctacctactggatat

SEQ ID NO: 103459 - DNA, 592 bp, Homo sapiens
aatgctctttgtaacatgccatggtgactttgtctgggagagaggtggaaaaggagaggggaagaggaaggggaagagagagaagaggacaatgatttggcctggatattgactaacataaagagtagggggaactctagaatgagattgttgaactggagttgagagagtgggtggagtggaagtaaaagtgaattattttactaagaataaaaagaaatatcagcaacagcaaattaagctcagtttcaaccatagaccctggttgaattatttcccttcctgamggcaaaacacttacagagactgcctgaaaatctgaaatgaaaagtatagctttgccattcaacagtcatttgctaaagtctgttatgtggggcatgagtctcctgccatacccagtggagaaattctgactgccttcccctccaagaggtgacccactcagattaatacctgggatacggtacagacagagctttcactagttttccacatttttactaactcagagttttatgttcctctttaggctcatgcccagtctaactacgctagcttttcatattttttctcttactgattttttgat

SEQ ID NO: 103460 - DNA, 510 bp, Homo sapiens
gaaccacggatgtaaggacatttatttcataaataaacatctactagaataagcaaatttacttgagaagaaactatggagggagagaagaaactaagtaaaatgctgatggggggttacctctttggaaggggccacaaagatgaagggaggagagaggtgaagttttgcagctcaaggacaacattcatcttctcatctcaaattattcaggaatattactaayggaattatgttaacatcagctgccaacatatatctcaatctctgttgccctgaacacatgttaattgagattctttctatgacaagtaacaaaaagctaactcaaactggcttaagcagaaagctaattattgactttaatatctgggatctagggtattgcataccaaagcttcaggcatggctggatctgggtgcacttactcagtattctcaggaagctcctttttttgtcattcatgtagacttaacattcacatggcctttcaccttacggtggcctcc

SEQ ID NO: 103461 - DNA, 584 bp, Homo sapiens
tctttgtgcaatttatagagcgatggttgtacactcagtggtgccagggaataggcygataacaccagtgatgacaaaggttaggtaaaaggaaaaacaagtaaacaaagctggagaactctggttctctctaaaaggaagccatctcccactctaagcaatcactgacaagaaggaatgaagccccatgtgtccagagatttcaaatttgcaagagaagttggaaattcggattttaaatgaaatatcccaaattttagatgttagcaaataacttataaaaattttatagacttatggctcagtcgaaatatgtctgctaactagaatcaacccatgagctgtgagtttatgacctcagctatataccttccagcctagcagcaagtccaccactgtcctttttgttaccatggcaacagggcaggtcctcatagacctctgtgtgtcgaggatgcagcctgacctttgattatctattcatgtcaccttccccccctatgataagctaaacatgtaggacaaattgctccaagaacttattctccagtagacctgagaaactgaagcaactgaaagttgcc

SEQ ID NO: 103462 - DNA, 606 bp, Homo sapiens
tagattatttgagtgtattaatttgcttcaaaattattaaaatatcatttcaaggaatatgtaaggctacgttacatactcatagggtactgttagaggaaagacaagcaacaaaataaaaatgatatatgaagtttgaacccaatttttaagaactatgcacagataagcaaattagtataagaatatcaaaaataatatgagaatgaatgtctgtattttctttataatacttttttgtattaaaatttctgcaaagaatgcatctatttcacagtcataataatgaaattaaatatctggcattgaaattttaatcttccctaaactttcaaaatctgtttagtactgcattttgtatagaaattgatakggtttttgagatgacagggagaaaagataattttgtagagtgaagttagatcatagagtctctgccctcttttaacacttaatgaatgaacaaaaacatatattaaaataaaacaagtcaaaacaaagtgttgccaggagccacaaaaccaagaaaggagtgtaacgccatatcctcatcttaaaatgttttggctaaagagtaggaatagctgggctgtggcggtgtggctc

SEQ ID NO: 103463 - DNA, 606 bp, Homo sapiens
tagattatttgagtgtattaatttgcttcaaaattattaaaatatcatttcaaggaatatgtaaggctacgttacatactcatagggtactgttagaggaaagacaagcaacaaaataaaaatgatatatgaagtttgaacccaatttttaagaactatgcacagataagcaaattagtataagaatatcaaaaataatatgagaatgaatgtctgtattttctttataatacttttttgtattaaaatttctgcaaagaatgcatctatttcacagtcataataatgaaattaaatatctggcattgaaattttaatcttccctaaactttcaaaatctgtttagtactgcattttgtatagaaattgatagggtttttgagatgacagggagaaaagataattttgtagagtgaagttagatcatagagtctctgccctcttttaacacttaatgaaygaacaaaaacatatattaaaataaaacaagtcaaaacaaagtgttgccaggagccacaaaaccaagaaaggagtgtaacgccatatcctcatcttaaaatgttttggctaaagagtaggaatagctgggctgtggcggtgtggctc

SEQ ID NO: 103464 - DNA, 607 bp, Homo sapiens
cagtatatgacatcatcacctggagctcccttacccaaattctgtttacaatggaagaatccgtgtgaagcattcaaatgtacacgtgctttttctaatagaaagaatgtaacaggttgctmtgaattaaacacacacacacacacacccacacacaccacaactccactctttctatccaggacctgccaacaataattttagtatttgcaggaggctgttaacttgcaaatctttcatttatttaagaaatactgagtagctacaatgtgtcaggcactctggcacacctttaagtgcttggggtaattcagtggacaatatagatttccctgcttcatagagcttacattctaacaggtgtccatttggaaatctctccaataagattaaagtggaatatgacattaattaatatctcttatcatctaccacagggttatggttataactgaataattagaataaattgtgcctgtcagaaagagtggtccctgctccacaacaaaatgagaagaaaaagggcaatgatatatatgcacataattccttagctttaatctcaaaatcctaaagcttgtgaagacagaaagttttttcataactt

SEQ ID NO: 103465 - DNA, 598 bp, Homo sapiens
atctctccaataagattaaagtggaatatgacattaattaatatctcttatcatctaccacagggttatggttataactgaataattagaataaattgtgcctgtcagaaagagtggtccctgctccacaacaaaatgagaagaaaaagggcaatgatatatatgcacataattccttagctttaatctcaaaatcctaaagcttgtgaagacagaaagttttttcataacttagttggtggcagaagctgacctgatttcatatgagtgtttcatagtctttattgatccaacttagtgtaaatatttgtatgcttcactgcagaaatattcatgtgtttgcaatggggcrttcccccagatgtcactggggtagagttctacccattgcggtagagcacaatactatcttcccgaacccccccacccctcaaaaacccaagcaaacaaaactgaattatttctggcaaggattttggataaggaactatgggcctgtatgtatgtatctttttgaatctaccaaccatattttctcagaaaggcctatcctttatttttcttgctttgggggtaggaaaatattatttctttatgt

SEQ ID NO: 103466 - DNA, 447 bp, Homo sapiens
ctacttttttttttttttaataacctcctttccatgctcttgtagacagccttctgagttaaaccattatcatacttggagactcaaggacaagtttaaacatctattgtgtatggctatgctaagtagtattgtttttagcagttgytaaatcatttccccaaaatattgccagttagtgtataataattggtattcacattgtacaattggttgacgtatgaacttttaggtaactcatctgaaagcattcaccattagctcttaatagtcaattattcagtcattcatttattaacttaatcgtgaatgcattcaccaaacatttattaagcacttttcaatagtgcagtgattattagcagcctgagctcagggatcaaaattccagggttcaaacccaggttgcatcatttctcaacatttttaccttgaaaagagtaccta

SEQ ID NO: 103467 - DNA, 573 bp, Homo sapiens
tttagaccaaatgagcttacaagacatttacagaacattctatccaatgactgcagagtatatattctttttattggcacrtcgaacattctcttagataggccacatgttatgggccacaaaacaagtctcaacaaatttttaaaaaccaatattatatcaagtattttctcagaacacaatggaataaagctgtaaatcaataccaagaggaattttagaaactgtacaaatatatgggaattaagcaacatgctcctcaataaccatttgagtcaacaaagaaaattaaaacaaaaagtttattaaaacaaatgaaaaaaaaacataacatgtcaaaacctgtgagatacaacaaaagtagtactgagggaaatttatagcaaaaaatgcctacatcaaaaaattagaaagattacaaattaatagtctaaacaatgtacttcaaggaattagaaaaacaagatcaaaccatacccaaaattagcagaagaaaagaaataataaatataagagcagaactaaatgaaatagagaccaaaaaatacaaagaataaataaaacaaaaaatta

SEQ ID NO: 103468 - DNA, 573 bp, Homo sapiens
tttagaccaaatgagcttacaagacatttacagaacattctatccaatgactgcagagtatatattctttttattggcacgtcgaacattctcttagataggccacatgttatrggccacaaaacaagtctcaacaaatttttaaaaaccaatattatatcaagtattttctcagaacacaatggaataaagctgtaaatcaataccaagaggaattttagaaactgtacaaatatatgggaattaagcaacatgctcctcaataaccatttgagtcaacaaagaaaattaaaacaaaaagtttattaaaacaaatgaaaaaaaaacataacatgtcaaaacctgtgagatacaacaaaagtagtactgagggaaatttatagcaaaaaatgcctacatcaaaaaattagaaagattacaaattaatagtctaaacaatgtacttcaaggaattagaaaaacaagatcaaaccatacccaaaattagcagaagaaaagaaataataaatataagagcagaactaaatgaaatagagaccaaaaaatacaaagaataaataaaacaaaaaatta

SEQ ID NO: 103469 - DNA, 573 bp, Homo sapiens
tttagaccaaatgagcttacaagacatttacagaacattctatccaatgactgcagagtatatattctttttattggcacgtcgaacattctcttagataggccacatgttatgggccacaaaacaagtctcaacaaatttttaaaaaccaatattatatcaagtattttctcagaacacaatggaataaagctgtaaatyaataccaagaggaattttagaaactgtacaaatatatgggaattaagcaacatgctcctcaataaccatttgagtcaacaaagaaaattaaaacaaaaagtttattaaaacaaatgaaaaaaaaacataacatgtcaaaacctgtgagatacaacaaaagtagtactgagggaaatttatagcaaaaaatgcctacatcaaaaaattagaaagattacaaattaatagtctaaacaatgtacttcaaggaattagaaaaacaagatcaaaccatacccaaaattagcagaagaaaagaaataataaatataagagcagaactaaatgaaatagagaccaaaaaatacaaagaataaataaaacaaaaaatta

SEQ ID NO: 103470 - DNA, 604 bp, Homo sapiens
gcaatttcttacaaaactaaatatagtcttaccatatgatctaggaatagtgctcctaggtatttgcacaactaacttgaaaatgaatgtccacacagatgtctgcatgcaaatatttatagtagctttaataaaaatcaccaaaaactggaagcaaccaaaatgtccttaaacaaatggatgcacaaactgtggtatacccatacaccagaatrttatttagcaataagaggaaatgagttatcaagttatgcaaagatgtgtgtgagtcttaagtccatattgctaggttccagaagccagtctagaaggctacctactgtattattcaatttatatgatattctggaaaaggaaaagctataaggataacagaaaggtcagaaagagattgagtacagaagactttttcagccagagaaactattctgtatagtcctgtagtagtagatatatgatgttatgcaattgttaaaacccataggactttacagcaagcaaaagtcctgatgtatgcacattaaaaaaaatcatttaggagattaggggagcccaggatagaatgcaaactgtgacaaaggaatctaactgtattacaaatgta

SEQ ID NO: 103471 - DNA, 604 bp, Homo sapiens
gcaatttcttacaaaactaaatatagtcttaccatatgatctaggaatagtgctcctaggtatttgcacaactaacttgaaaatgaatgtccacacagatgtctgcatgcaaatatttatagtagctttaataaaaatcaccaaaaactggaagcaaccaaaatgtccttaaacaaatggatgcacaaactgtggtatacccatacaccagaatgttatttagcaataagaggaaatgagttatcaagttatgcaaagatgtgtgtgagtcttaagtccatattgctaggttccagaagccagtctagaaggctacctactgtattattcaatttatatgatattctggaaaaggaaaagctataaggataacagaaaggtcagaaagagattgagtacagaagactttttcagmcagagaaactattctgtatagtcctgtagtagtagatatatgatgttatgcaattgttaaaacccataggactttacagcaagcaaaagtcctgatgtatgcacattaaaaaaaatcatttaggagattaggggagcccaggatagaatgcaaactgtgacaaaggaatctaactgtattacaaatgta

SEQ ID NO: 103472 - DNA, 531 bp, Homo sapiens
ccagcattttgggaggccgaggtgagtggattacttgaggccaggagtttgagaccagcctggccaacatagccagtttctactaaaaacacacacacacamaaaaaatcagctgggtgtggtagggcacacctgtagtctcagatacttaggaggctgaggcaggagaatcgcttgaacccaggagccagaggttgcagtgagccaagattgtgccactgcactacagcttgggtgacatagctagaatccatctcaaaaaaaaaagaaaagaaaagaaaagaaatacctgagaccgggtaatttgtaaaggaaacaggcttaattgactcacagttctgcatggctgaggaggcctcagggaacttacaatcatggtggaaggggaagcaaacacttccttcatcacatgatgttagtaaggagaagtatcaagccaaagaggaaaagcaccttataaaaccatcagatctcatgagaactcactcattatcacaagaacagcatggaggtaactgcctccatgattca

SEQ ID NO: 103473 - DNA, 580 bp, Homo sapiens
taaggttctagcatagtctgtggattctggtattgggtgaagccacatttttatttccatttttgctttaacctggtaaatacctctcacctccctgtgcttccaggtggaattttatctggaagacagaatgcagaacctcttttataaaaatttattttaattattgtggatacattataggtatatatctttatggggtacatgaggtattttcgtacaggcatgcaatgcattataactacctcatgtaaaatgaggcatccttcccttcaagcatttrtcttgtgttacagacaatccaattatattcttgtagtaatttcaaaatgtacaattagatgattattgactataacacctgtgtgcttcaaatccaggtctattcatttttctaagtagttttttgtcccattagcttctacatcccccccaccaccaacccctcactacccctccaagcctctggcaaccatctttttactctccatctccatgagttcaatagttttaaatacaaaatccccccaatagttgagaacatgcgatgtttgtttttctgtgcctggcttatttcact

SEQ ID NO: 103474 - DNA, 580 bp, Homo sapiens
taaggttctagcatagtctgtggattctggtattgggtgaagccacatttttatttccatttttgctttaacctggtaaatacctctcacctccctgtgcttccaggtggaattttatctggaagacagaatgcagaacctcttttataaaaatttattttaattattgtggatacattataggtatatatctttatggggtacatgaggtattttcgtacaggcatgcaatgcattataactacctcatgtaaaatgaggcatccttcccttcaagcatttatcttgtgttacaracaatccaattatattcttgtagtaatttcaaaatgtacaattagatgattattgactataacacctgtgtgcttcaaatccaggtctattcatttttctaagtagttttttgtcccattagcttctacatcccccccaccaccaacccctcactacccctccaagcctctggcaaccatctttttactctccatctccatgagttcaatagttttaaatacaaaatccccccaatagttgagaacatgcgatgtttgtttttctgtgcctggcttatttcact

SEQ ID NO: 103475 - DNA, 429 bp, Homo sapiens
ttattgtctgtctttcgatataagctattctaattggggtgagacgacatctcattgtagctttgatttccatttatctaatgatcartgatgttgagcaccttttcatatgcctgtttgccatttgtatgtctagcctggccaacatggtgaaaccctgtctctaccaaaaatacaaaaattttccaggaggggggtggcaggcacctgtaatcccagctacctgggaggttgaggcaggagaattgcttgaacccagaaggtggaggttgcagtgagctgaaattatgccactgcactctagcctgggcaatagagtgagactcagtctcaaaagaaaaaaaaaatgaagaaatgtctattcaaatcttttgcctcctttaaacacttttcttcatttcactagttttggggggtacgggggtggtt

SEQ ID NO: 103476 - DNA, 525 bp, Homo sapiens
gctactgaaatacttcaaggaaaggcaatatgggcatctacttagtagagtctagaggtaatatctctataaacgtccaagttttaccattatgtgtggtcctagcmccagacagactataatgtgctattcaagtaataagcacccttgacagacaagtaaagggaaaaatagccctctctaggaacctaaaatatatttacagaagtgagacaaggcaaagaagcacaatttaaacaccctgatacaaaatcctgtaaaataataaaagagaaaatgagcaaataaaatagagctgaatgtgtaaggaaccaataaagctatctctagtgactaagttattaaattaacacacacacacacacacacaaacacacaaagaaaatgaaatttttgtgagaaaaatttcttggtgcatttttttttgttttttgtttttacaaaaaaaggaaaggtctaaaatataattaatagcagattaacaagtcagaaaagcacagggctttgcacggaattttaggaata

SEQ ID NO: 103477 - DNA, 636 bp, Homo sapiens
tatacattatctaacctacctttgcatatgaacacataagcactgctcctctatatagatttttcgtggcacatttgctgatttttcttaatctttaatgaattcagattcaggatttgtgcagtatgtgacattcactaactccttccggagcacattggttccaaggttataagtttcaactctttgctaaatcttcctctccccaccttttgagtgtttatttgactgatggctttcacagctcccactaggcttttagagtgtagaagctgcatatatttgacacttcgttttgtgtctagacaattcactcatatctcaggctcttgctttatcatttaaaaagccacttgaaaacttttttcataaaattatagcaggttttgtgtgattatggttacattctggctgcttccagctttggggrttactctttcgccctttttctgattcctgtgaaagaatatctttctcttgacatcagtgttttctaactatagaagtggatgctttttatggctatgtctcaaacatttcagtgggagaaaggtgtttttggtggtgtcattattttaggatagttcacactttgcaggattctgttttgtcagctgctgtgtggattttcacaga

SEQ ID NO: 103478 - DNA, 616 bp, Homo sapiens
aaatctcattgcaatctatatattattttgttaagaaattactttccacagagtatatataacttgtagcagaggcagacagcactaagctttggtaagacaccattcttgtaagaggtgctgcttgcttatctaattagtctgtcatttgaaactgtcaatttaagtccaaattatccatctatctagctagctctcattaacacaagactttataatgaattactaaacctccacaaataatggaggactatagaagcttcccatacaataaatrtaagcacgcacagagatgcatttatcagtacccgaagagcacccatctctgaaaagtccaatattaaatatgtaatcctcatcaactacatttatcatgaagatgtgtatttgtagaatttaaggtgattcagcatcaatatgcttaaagagcctgctgcagttgctaatgtctttataaagagcatcattctttgtgtggcttctcagttctctcacttcctctaatcttgacaatacctctctgatttgagatgaagaatagttttagaaggcttgaatttaacctaagaagagaccccaggttgaacaaacataaacaaactatatctcctgtcta

SEQ ID NO: 103479 - DNA, 615 bp, Homo sapiens
aggacaatgaaaaaagaaagggaaaaggagtgggggatgaatgtcctccagtttggagaaactgagaagcagaggtaggagtgtcatctgacttaacaaggtaaacaatgtacacaccaaagaactatgggacatagacacaagtcagagcttcagaaagtctctgttagttgaaccactaaaaagagtaaaaaacaagaatgggtgattgggttgaaaataagaactcttattaaaaatcttcataaggaacagtgagactcctttaggtctcctcctttcttccaactaattcaagcaacaaaatgaatagaggttaggtagtcaaaaaccatagagatccactataggatctgcactgtaaaaataamtatgtacaattggcaactttaaatatattagtctattagagcacaacaacatcttcattagcttctactccaacaccgggtataaggatgaagagatgttggcctatccacgaaagtgccttgctcaagttcactgtctagtcgaggacaatactagtatttacacataggcctcttgactcctgatccagtgctctaaagtggctttgcagctataagccttaagattataggatgagaaaat

SEQ ID NO: 103480 - DNA, 647 bp, Homo sapiens
agcattgttcttggtcatttttttgtagctccttagctgcttatcgttggcttcagccttttcccagctgcttatcacagacaaactttaattacctcctaacacatagccaatgctacttgaaaggctaggctgggcagggtactcgctttctccgtgttctcagacatcgtgggctctcatcctcagagaatctctgattctgaatcagtmccgttaaaatacaaccatttatttttctaaaaccatttatctcggatataatttaaactttttttttcaaaaataaaaaccaaaacgcaaagaaggctttaaataaaagccacaggttcttttcaaatgtgaccaaaatgctagtgcaaggtatgatctacatgaatttaagccatattgtgggagaaggcatggcatacatggggaatgtaagattttggagttaagaaggtattaactcaatctcagcactcagatcaaccactgagtgctgggctacagttgtgtcagtaacctggaaaacattgttccttacagtaagacaatctgatggaggtattaactatgtgttatttttctgagttcaaaaagttagaatgagagaagaaagaaggaaagagtgttgagcagaaaaaaaaaaaaacacagccttt

SEQ ID NO: 103481 - DNA, 647 bp, Homo sapiens
agcattgttcttggtcatttttttgtagctccttagctgcttatcgttggcttcagccttttcccagctgcttatcacagacaaactttaattacctcctaacacatagccaatgctacttgaaaggctaggctgggcagggtactcgctttctccgtgttctcagacatcgtgggctctcatcctcagagaatctctgattctgaatcagtcccgttaaaatacaaccatttatttttctaraaccatttatctcggatataatttaaactttttttttcaaaaataaaaaccaaaacgcaaagaaggctttaaataaaagccacaggttcttttcaaatgtgaccaaaatgctagtgcaaggtatgatctacatgaatttaagccatattgtgggagaaggcatggcatacatggggaatgtaagattttggagttaagaaggtattaactcaatctcagcactcagatcaaccactgagtgctgggctacagttgtgtcagtaacctggaaaacattgttccttacagtaagacaatctgatggaggtattaactatgtgttatttttctgagttcaaaaagttagaatgagagaagaaagaaggaaagagtgttgagcagaaaaaaaaaaaaacacagccttt

SEQ ID NO: 103482 - DNA, 647 bp, Homo sapiens
agcattgttcttggtcatttttttgtagctccttagctgcttatcgttggcttcagccttttcccagctgcttatcacagacaaactttaattacctcctaacacatagccaatgctacttgaaaggctaggctgggcagggtactcgctttctccgtgttctcagacatcgtgggctctcatcctcagagaatctctgattctgaatcagtcccgttaaaatacaaccatttatttttctaaaaccatttatctcggatataatttaaactttttttttcaaaaataaaaaccaaaacgcaaagaaggctttaaataaaagccacargttcttttcaaatgtgaccaaaatgctagtgcaaggtatgatctacatgaatttaagccatattgtgggagaaggcatggcatacatggggaatgtaagattttggagttaagaaggtattaactcaatctcagcactcagatcaaccactgagtgctgggctacagttgtgtcagtaacctggaaaacattgttccttacagtaagacaatctgatggaggtattaactatgtgttatttttctgagttcaaaaagttagaatgagagaagaaagaaggaaagagtgttgagcagaaaaaaaaaaaaacacagccttt

SEQ ID NO: 103483 - DNA, 567 bp, Homo sapiens
attttcagtatttgatttgggtttttgagcatgaatttttcctgtattccaaatcaaattttgttgataagctattcacagaaatacagactcaatgatagatcccttgggttaaaattctggcttactagctgcatatcttaggcaaattacttaagttagctgagcctcagtttcttcctctataaaacaaaggctatgatgccatctacctcatagkgtggtttttgatgacgaaataacttagaacgcatgtaaattacttaaacagtgcctaaaacagaaatattggtaaataataacagcggtgacctggagagccattttatcacatgggacagagaatttacagtttttattccttgatagtttccactatttttagtagtctttctattttcagaagttatttatttatttatgaaagattttgttgttgctgctattttttgagagctggaaacatccctctggataaaaataaaatagcatagtgaaagtatttttgaaagcattaagtgttatgtaagtgtaagggaagggagcagtgacaaaggaaagcaggtg

SEQ ID NO: 103484 - DNA, 481 bp, Homo sapiens
gttcaatataacactgggtagacatctaagaatttcgactctaatctctggttcctgcatggcacctctggacctacctggggcctgggggaactcatcaaactgaaagcaagaacacagtcttagctgcctttggcccatgatgattgtaaatcccccgggccttgagcaaacrtaggccataggccatagccagagagtggttacagcaggctttggacaagaccaagtgctgtactggcttcaggtttgacccagcgcagtcctagtggtggtgtccacaggagtgcttgcgtcactccaccccagttccaggtggctcagaacagagaaagagactccatttgcttgacagaaagtaaccgaagagaataagactctctgcctggtaatctagagagttctcctggatcttgtaaaagaccatcagggtggtacctcaatgagtctacaagaaccacagtgttactaggcttggggt

SEQ ID NO: 103485 - DNA, 587 bp, Homo sapiens
taaaaatgttagtatcatcctcaaaatgcctaagttctctgattagaaacatataggatgagctgaacctattaaatcgattaggtagaacatatatgcttttataggcaaatattcaataaacagataacatgagcccttcaaagtttattctcctctattgttttaacaaagaacaatgggcttttctgcattcatggaagcactagtttggaaataattctgtgttatgggctaggcctatctgcttgatcaagttggaargattgcctgctgactagtaaaattaatgaagtgaattcacacttgggactttagagaagaagaaaatattctgatctatagttttctcaccaataatgaaaaaggggttgaagtgctctataaagaccatttagctctaaaatttctatacttctaagctacttgccagcatttccagtgcatataaaatgagattctttacataattggctggttatgtcttgtaccttcagtacttacccacttaacattattctttactgtgatatttaaaaagttccataagtaatttccactaaaagccaattattacacacccgcac

SEQ ID NO: 103486 - DNA, 587 bp, Homo sapiens
taaaaatgttagtatcatcctcaaaatgcctaagttctctgattagaaacatataggatgagctgaacctattaaatcgattaggtagaacatatatgcttttataggcaaatattcaataaacagataacatgagcccttcaaagtttattctcctctattgttttaacaaagaacaatgggcttttctgcattcatggaagcactagtttggaaataattctgtgttatgggctaggcctatctgcttgatcaagttggaaagattgcckgctgactagtaaaattaatgaagtgaattcacacttgggactttagagaagaagaaaatattctgatctatagttttctcaccaataatgaaaaaggggttgaagtgctctataaagaccatttagctctaaaatttctatacttctaagctacttgccagcatttccagtgcatataaaatgagattctttacataattggctggttatgtcttgtaccttcagtacttacccacttaacattattctttactgtgatatttaaaaagttccataagtaatttccactaaaagccaattattacacacccgcac

SEQ ID NO: 103487 - DNA, 541 bp, Homo sapiens
  misc_feature (1)...(541): n = A,T,C or G
agtggttgctttggggaaggactgggtagtaggaacgaatatatgtacaagaaggccttttgattaccggtagtgtcaatttcttgagcttggtggtggtaccatgagtatgttcattntatgctgtgtcatccaactatgtgttttgattaatgctttcctttttctatgttatgcttcaattaaaaattattttaaaaaatggttaattgatgttaacatttgtcaaatatgtggcctgatagataggtatatcttttattaggatctgcacctttctcaatttctgaaataattcaaaataataagtaaaactattaatcatcaatcattctcttgaaaggattgagctttaaagtgcagataatgttacctttgaaggtgtcagtgatcaattratttattatatcaattaatttaatagaatttaacctaatccttaattgtccttccctgcccattgtttcactctgttaaaaatatccatcacatcattgtttgagtacatatctatatgcatatttatgcctacctatatgta

SEQ ID NO: 103488 - DNA, 541 bp, Homo sapiens
  misc_feature (1)...(541): n = A,T,C or G
agtggttgctttggggaaggactgggtagtaggaacgaatatatgtacaagaaggccttttgattaccggtagtgtcaatttcttgagcttggtggtggtaccatgagtatgttcattntatgctgtgtcatccaactatgtgttttgattaatgctttcctttttctatgttatgcttcaattaaaaattattttaaaaaatggttaattgatgttaacatttgtcaaatatgtggcctgatagataggtatatcttttattaggatctgcacctttctcaatttctgaaataattcaaaataataagtaaaactattaatcatcaatcattctcttgaaaggattgagctttaaagtgcagataatgttacctttgaaggtgtcagtgatcaattaatttattatatcaattaatttaatagaatttaacctaatccttaattgtccttccctgcccattgtttcactctgttaaaaatatccatcacatcattrtttgagtacatatctatatgcatatttatgcctacctatatgta

SEQ ID NO: 103489 - DNA, 588 bp, Homo sapiens
cctcataatctaatcatctcccaaaggccattatgccatccaattggaggttaaggtttgaacatacgaattttgagagagacaaacattcagcctgctgcaataatcattcatattcttatatagtctaccaatctttttttcttaggtacgtgctgattttttttagaaatataastatctaaatgtaaaacacaggctatatgtaaattgttttatagttttcttttttcacccaataaagcatgaacttttttatgtaattaaggtatgcatgataatattccttaatccaatgtttcacaatcttcagaagtatgacaaccatatagagtataactgggatataatctttatgttgaggctatttatctagcactcatgagtgtttggctgccttaggggcaatatgaagtattcgttattaagttctgtatttttacttttcttataaaatgggtccaactctacagtaaaccttggatctcttctccattttaaagaaatgccctgtaacctctaaagacagaaaccgaacttaatccaggagggagtagaactttcactgagaaagttgcatgatgggtg

SEQ ID NO: 103490 - DNA, 588 bp, Homo sapiens
cctcataatctaatcatctcccaaaggccattatgccatccaattggaggttaaggtttgaacatacgaattttgagagagacaaacattcagcctgctgcaataatcattcatattcttatatagtctaccaatctttttttcttaggtacgtgctgattttttttagaaatataactatctaaatgtaaaacayaggctatatgtaaattgttttatagttttcttttttcacccaataaagcatgaacttttttatgtaattaaggtatgcatgataatattccttaatccaatgtttcacaatcttcagaagtatgacaaccatatagagtataactgggatataatctttatgttgaggctatttatctagcactcatgagtgtttggctgccttaggggcaatatgaagtattcgttattaagttctgtatttttacttttcttataaaatgggtccaactctacagtaaaccttggatctcttctccattttaaagaaatgccctgtaacctctaaagacagaaaccgaacttaatccaggagggagtagaactttcactgagaaagttgcatgatgggtg

SEQ ID NO: 103491 - DNA, 572 bp, Homo sapiens
aactggtttactaataccacattattttactattataataaatgcatttaaattgtaattttaaggcagtttgtgagccaacccaaaggtcttcatgtgctctttcaaagtgtatcatctgcttcaaattaaactataatttggcaatcctctctggtaaacgtacaaaaagctagttagaagaatataacctgaaaagtttaktgcattttggcaacaaagaaaaattatctgtgggtttacattctcaacttacttgattctttttgacagatttagtacatgggttatataagtgaaaataatgaaaaactaaatgcatataaagaaacttctgacccaatatgtagaatataatagtattatagtttataatattttttgtaagaaattacatattttttaggaaatgagaaatacaaaataatctaaaatggcactgttcttttttggcaatgatgaaatgtctaagtgaattctgaaaatttgctttaggaacttcaaaactttgtgttatctatgatgtgtttcattattaatgccctgatgtagctggcaatgtttagtctaac

SEQ ID NO: 103492 - DNA, 572 bp, Homo sapiens
aactggtttactaataccacattattttactattataataaatgcatttaaattgtaattttaaggcagtttgtgagccaacccaaaggtcttcatgtgctctttcaaagtgtatcatctgcttcaaattaaactataatttggcaatcctctctggtaaacgtacaaaaagctagttagaagaatataacctgaaaagtttagtgcattttggcaacaaagaaaaattatctgtgggtttacattctcaacttacttgattctttttgacagatttagtacatgggttatataagtgaaaataatgaaaaactaaatgcatataaagaaacttctgacccaatatgtagaatataatagtattatagtttataatattttttgtaagaaattacatattttttrggaaatgagaaatacaaaataatctaaaatggcactgttcttttttggcaatgatgaaatgtctaagtgaattctgaaaatttgctttaggaacttcaaaactttgtgttatctatgatgtgtttcattattaatgccctgatgtagctggcaatgtttagtctaac

SEQ ID NO: 103493 - DNA, 544 bp, Homo sapiens
ataacacaaagatgaaaacaatagtccaggaactgaaagtctcctggaagcctactgagaggctgagtgaaatgctactgccctttctctcacaataacaaacgtaaaagacccaagatgttcctttttatcccttcaattattttccttctatttcaaaatagtctgcaaaacctgttttgtttttcaaaatactgaytaacatatgctattaactacaattgtactctgatctttacctgtgtttctttagttgacatttaagcctttactttaaacctaaaggttcaatttgttagctcatttatcatctgtttttttttttcttactagatgaaaaacaattctactaagtgcccacagatacctttggaagggccaaccctgtatatctccaactctgccgtcaaactttcccaaagatatggaaatggatgccacaatcaatcacagggttgaaaccagtgcttcagaagtaaatctagttttcaaactgttacttctgaaactatggactcttgctggaagttaggtcagtgtcaat

SEQ ID NO: 103494 - DNA, 631 bp, Homo sapiens
gttgaaatagaaaaaaaaaacctggaggactgcaaaacttactataaaggtacagtaatcaagattctgtagtactggcataagaatagacacacacatcagtggaatagaattgagagtacagatgtagacagacccttacatcatatatgaccaactggttattgacaagagtttggtgacaaacagggaaaaaaatagccttctcaataaatggtactagaaaaatttgatattcatatgaaaagaaaatctaaagttggatgctctcactctgtataataaaaattaactcaaaatgaatcacraacctaaattaagagctaaaattataaaattcttacaacataacaataaatgtttatgacctcgggttaggtattggttggttagctacaacagcaaaagtacaagcaacaaaagaaaaaagtagattaaatctccttggccaaaactaaaaacttttgtgcttcaaaagacaccaccaggaaagtgaaaaggcaatccacaaggttatggactgaatatttgtgtttccccaaaatccatatattgaaacctaattccccaatgtcataatatttgagggtgaggctttggggaggtaattaggtcttgaagtaagtaatga

SEQ ID NO: 103495 - DNA, 489 bp, Homo sapiens
atttaaccagcttgaattgctctgaaataaatttctcagggtagagaccaattgcttaagcattgtcaatagctgaatataaygttggtgcttcataaacacagaatgaacataaataacagaaaatctaaaatagagtattaacttctgtattttgtacaattaaaatttgatgttggggattgaactatggaacccccccaaaatttatcagtaagtgggtgctgtcttctgttatataggagacagatttttacaaatggaaaggcggggatcctttcagcattatatgaatgcacaggaatactgactttttattccactgcgcctagactctccatagaagagaatattagctgttcacaattattctttcccctgtggcctccctctgggtagaaaagacttctcaattctattgactttgaacttgcccatgtgatttcatttggctaacgaactgtaagtggatgtggcttgaacagaggt

SEQ ID NO: 103496 - DNA, 620 bp, Homo sapiens
tgcagcatcttcaaaagcttatctcctctccacagctgtctgttcaaagttgagagtctgacactgatttaaccagcttgaattgctctgaaataaatttctcagggtagagaccaattgcttaagcattgtcaatagctgaatataacgttggtgcttcataaacacagaatgaacataaataacagaaaatctaaaatagagtattaacttctgtattttgtacaattaaaatttgatgttggggattgaactatggaacccccccaaaatttatcagtaagtgggtgctgtcttctgttatataggagacagatttttacaaatggaaaggcggggatcctttcagcattatatgaatgcacaggaatactgactttttattccactgcgcctagactctccatagaagagaatattagctgttcacaattattctttcccctgtggcctccctctgggtagaaaagacttctcaattctattgactttgaacttgcccatgtgatttcatttggctaacgaactgtaagtggatrtggcttgaacagaggtcttaaatgtgcttgcatgtattgctttggcctctagaggtacggaattttatgagttcagaatga

SEQ ID NO: 103497 - DNA, 621 bp, Homo sapiens
gcagcatcttcaaaagcttatctcctctccacagctgtctgttcaaagttgagagtctgacactgatttaaccagcttgaattgctctgaaataaatttctcagggtagagaccaattgcttaagcattgtcaatagctgaatataacgttggtgcttcataaacacagaatgaacataaataacagaaaatctaaaatagagtattaacttctgtattttgtacaattaaaatttgatgttggggattgaactatggaacccccccaaaatttatcagtaagtgggtgctgtcttctgttatataggagacagatttttacaaatggaaaggcggggatcctttcagcattatatgaatgcacaggaatactgactttttattccactgcgcctagactctccatagaagagaatattagctgttcacaattattctttcccctgtggcctccctctgggtagaaaagacttctcaattctattgactttgaacttgcccatgtgatttcatttggctaacgaactgtaagtggatgtggcttgaacagaggtcttaaatgtgctygcatgtattgctttggcctctagaggtacggaattttatgagttcagaatgaaa

SEQ ID NO: 103498 - DNA, 495 bp, Homo sapiens
  misc_feature (1)...(495): n = A,T,C or G
accctgcccaaattcttgatttatggctcatgggcataataaaatgggctttgttttaagccactggatttaggatagtttgtaacacaacaatagagacctggaagcttcatttacatgatttaccaaagtgacataactagttataacaacaggcaacatttattaatattgtcaaatgtatgctatgcaccatgtatcattatttaatttcttcctcacattgaaaatagtactaatgaaatgcagatgatacaatttttcagccttatgaaggtgtgaaattgatatgcatttggyagaacccatacttagaatttttcaatttcgatcttttcctggactagcattatgaggtacagnactctctctctctctctttctctctctctctctcaaaatgctggacagtgacagcaagccattctgcctttcgctttcaatacagtgatatgcccagtgagggcccggaagctccacacccatttccccata

SEQ ID NO: 103499 - DNA, 643 bp, Homo sapiens
atatgcccatcatcatagtatcatgcagaatagtttcactgctctaaaaatcctctagggctctatggtctgcctatttatatcttcctccccaccagcccctggaaaccaccaaacttcttactatttccatagttttggctttttaaaaatgtcgtatatctgaaatcatatggtgggtaacaatttcatattgaattctttcacttagtaatatgcatgtaaggttcctccatgtcttttcatggcttgatagctcatttctttttagtgctaaataatattcctttgtcaataygcataacagtttatccattagcctactgaagaacatcttagattcttctaaattttggaaatgatagataaaactgctataaacacctgtatgcaggtttctatatggacgtaagttttcaacttctttgtggaaataccagggggtgtgatggctggatcatcgggtacgagtataagtacttctgtaagaaattacaaaactgacttgcaaagatgctataccatttgtattttcactagcagtgaatgagagttccttttgttccacctccttgccagcatttagtgttgtcagcattctggattttgccctttctaatagccgtgtagaagtacctcgtta

SEQ ID NO: 103500 - DNA, 564 bp, Homo sapiens
aagtgagtttaagagcaaatgtttaataggcagaagaaagagaaaggagactagatctctctcttgcagagagagaggtggtctggagtggatctttcagttctgtggtgaaatgatcggggttttatagatgaacttgaggaggtggtgtctgatttacatagagcatgagaggttggttggagtaggtgtgacgtttgtatagcaggcaaagaagctggctatccaaccttaatattttattatgcagataagttttctacttgcctggtgccatgttgcctgttccttactatacacgtggttgacaaagaaaagggaagatggagccgccatgttgaacatgcctggccttcaagtagccttttctattggcacagctgtcagcatttacctaygaaagcatttagcttgcttatctatgcttgcagcttgattttttcaggctactttatattagaaatgatgttgtagctgttttttataaacagccctcagtaagggaaccttactgaggactctctcaccctcactatctgcctaaataatttctttctagctcct

SEQ ID NO: 103501 - DNA, 536 bp, Homo sapiens
  misc_feature (1)...(536): n = A,T,C or G
aaatagaagaaaagcaaaaaaatgtatttaatatgttatttaatatgtatttaatatgttaaatgtagttaacatgaagttggtggttacacttatctgcagagggtcattccccttattctctgaatactttggttttttacttactgttcccatctccagacctactcctattattattactgccatttcaatttctatttaggtgctctttctcataacctaagcttttctcctcagatgactttgtccttcaccttgacttggtcactagttctcatgggtatactactgatctgcttattaccacctgaaacccctttgtaaactcaagtgtgaawctcattctttgctcatcacctgttgtttttccatctccgtgcctgtaaaaaccatcgtcttataaccattaagccgcgcaagtattttagttctactcatctcacctacccactntagtgtaccattgctcacaccctcatttctctccttaccctactngnagtcagatcttatcatttatatcatttactcat

SEQ ID NO: 103502 - DNA, 579 bp, Homo sapiens
atctgctagaaataaatcaatttctcctgttttcatgaacgagtactggaaggttttgttacaaaaggatgccagaaaaattctgtacttccctgtgattttatcttccaataagtataacagagttcctaatatcaggaaatctaaatcagttacttttttgtaatcacccacttgacatctatgagcacaaatatagagttgatttcaaaagtgctgattttcattgacctctttctatagttacttaatatatgtattacatgtaaggaaagtgtttcaccaatgctcttcagttataaccttattactttctgtctaaggaaaatraaggatatgtaataaatttctgtgctttttaactacagcttcagaactaaataaacctgatatccaaacctagaattacttcttccatttctgtgaccttaggtataattagctattctcatatcactggtcctccagagttagaataattgtgccaccatttatggctcttaggtgaaaggataataaatgcaaagcctcttcactgtaagcactcaaatggtaggtattattttgcttttgattcaa

SEQ ID NO: 103503 - DNA, 609 bp, Homo sapiens
cttcacataccacggaccatgcaaacctccaactcccaccgcccctggccaggcaagacttgccagcttggacttctagaacagcaaccccacccctacctgaatgctgtggatgggcaaagctctgtgttgccctgggaaccaccctgatgacagactgtgtaactccttttacacccactgttcagagccaggtatgcctcattgttttgagcttccagcaccttggcacagctttgtgttctcacaggaaatgtccagacagtggacrtggaactcccccagccttgactgcttccattcaagcaagacatgcagtttggcagtacctgaatgagagaggtgtcttctttatcagaactgagtaggatgtgatgctgggttcataagctgtcatgggagcagggcatacttcactttgcagggctgatccaagaagggggtggtttgtctgccagctgtggcctctgcttgaggaagccctgtggcctggaacacctaagaaaggacatagaggcatggacccagtgatcagaagggcctccttcaaggcccaagagtggaactggtgagaggtcatctttctttcccactccaccgcagagcact

SEQ ID NO: 103504 - DNA, 508 bp, Homo sapiens
tgtcagagggtgggggtaggggagggagagcattaggacagatacctaatgtagaygatggattgataggtgcagcataccaccatgggacgtgtatacctatgtaacaaacccacacattctgcacaagtatcccataactaaaagtataataaatttttttaaagatataccaatctattttcttactatgggacttttcttatgcaactttcaagtttaagcttttgttatctgacctaattcatttctttaaggaactattatatttacaacaaagaaaacgcactgatcctttgtcttatgaaggtcttatgaatgctactttcccagcttctgtagatacagatcttgaattgcctcagctcacatactaagcctttctactcacctcattctatcaaattccactggtttttgccctcactgttctttccatctaaggcaatacttcactatcacaacataaatataatctccactctttcacttgttttgctcacaaact

SEQ ID NO: 103505 - DNA, 508 bp, Homo sapiens
tgtcagagggtgggggtaggggagggagagcattaggacagatacctaatgtagacgatggattgataggtgcagcataccaccatgggacgtgtatacctatgtaacaaacccacacattctgcacawgtatcccataactaaaagtataataaatttttttaaagatataccaatctattttcttactatgggacttttcttatgcaactttcaagtttaagcttttgttatctgacctaattcatttctttaaggaactattatatttacaacaaagaaaacgcactgatcctttgtcttatgaaggtcttatgaatgctactttcccagcttctgtagatacagatcttgaattgcctcagctcacatactaagcctttctactcacctcattctatcaaattccactggtttttgccctcactgttctttccatctaaggcaatacttcactatcacaacataaatataatctccactctttcacttgttttgctcacaaact

SEQ ID NO: 103506 - DNA, 552 bp, Homo sapiens
  misc_feature (1)...(552): n = A,T,C or G
atctcccaaactggaaatacgggcagatagagagactctccatataccagagaacaaatctccccaggaatcattgctgaagtagaaaaacctgagctataattgacaaattcctggaggctaactgtggacaagtctgagagttaaaaacttcaggcggacctagtcataggagggtactgacatgtttgtgagttttatcaccaggttctcacagaaaacatcagaaagaaatacttccatgcttccagcaagggagaagggaaaggatccattctgaattaagcgcaccctgttcttaataaggtctgtcctcaaaagaaaccagttaaccacagagcctaatttcctagggaaaacccagctgacttgggagaagaaaaatacccaactsaagcctactttagccattttgttccacttaaggtttggggaaaggatggagaagcatgtgtaaagttcacagtccagagagacaaactcactanaagactgaaacctacttgtagaactatataaatccttcccttcccacacacctcaccaccacat

SEQ ID NO: 103507 - DNA, 504 bp, Homo sapiens
agaattcactaaaaccagtaaaggatgagggatgggggtggcaaaactaccaaggaattgaaagatgcaagagttgtcctctataacatctgcattactacctgatgctatttcaatcttttcaacttaaaaattttkgtgtttggttcaaggacggaatctctgagcagcaaattagaagcagtcaaaattgcatttagcaaataatcactcccatctaagataacacctatgtttcctcctacacagccctgcctttgtaaaaactggccacctcctgcatctgcatttgagggattctgggaattgtccacaccccagaaaaatggtgcatccttaacttatcccagaggatagcccgctggtggggcagccagtcattttcagaagaaacagcctgggaagagaaaccactccaccttttgagatcagggccaatgtgacaggtagggagatgagggataagcctcacaggaagactccatagaaacctcagtgagaata

SEQ ID NO: 103508 - DNA, 636 bp, Homo sapiens
ttggctctgacctttggagggcagaagggtttatgttaaatatttggttgcattgggttggtggacagtctatctttattttgacctttctgtctctagctctctatttttcaagcagaagacataatccttcccctcagctagaaaagtggcccagaacattccatagcaattagtggcccctattgatagttagacttttgcaacaaaagcatgtgccttccttggttgtacaatttcttatttgttctttaaaagtaaatttccaggaataaatccaggaactacctgtgactctctcttccctctctccagttccttttcatagctagaatggtccttgcaaagagtaataattacctrtgcttcccacctctaggtcacttcaaatgtatactttatcatgtctgtttcatatctcctaaagaatctagccacagtgaaattccacctcaatctgtagtatcaagaaagttcaaacatatactctttcctagtttactacctaacaaattcgtatcacacaaggaagaaaaaaattctttataacacataaacataagttattcgactcttctatttgctgggtcttttcctagtaaataaaaagtggggactactttccatattctcaga

SEQ ID NO: 103509 - DNA, 583 bp, Homo sapiens
ccagacaacattcttttttataatataagatttctagcagctttgttttggaagaaatttctagagatttaaatttattaattcctacatgggtgagtccatcctcatgtgtaggggctgcaggcagttgctcctggtatgatccaagtttcaccatgaaatttccatcaatattcagtttctctctaagtggcttgctagagtactagccttctttctaggttttgcttgatattcttatgctaattgagtcaatattgcagtatggtgatgtsggtaggctctggaatcaagctgccagggttcaaatctcagctctgctacttattcacttcatgaccttgagcaacacttaatccttctaaacctgcatattccatttgtaaaatggaggctcacaggagctaggcctgaattgaagggcaggtcagcaaactgggataaagccattctgcagccaggtcaatctgtaaagtttaaaagaggaagaaccccttctggagcacaacaagagttttgtttggctctgaaagtgacaggggaactgttcaattatagaccaagttagaatcagctaaagttt

SEQ ID NO: 103510 - DNA, 661 bp, Homo sapiens
attttctcttgaaagagaatatagaaaaagtaattgaaatgctattgaaagttaaaagtgatattattaatttttaattttctaaggacaaatcagttgtccttgtataatcaatgtaatatttacatttttccactttctttttctggtatgcttttgaccatttcaaagcaaattataagaaagcacagaagaaaaaggaaatgacacagactataaacatttaactggaaatttattaagcattctggaaaaagctagcagataagttgctaaaatgacaaagctgtagaatcatacaatagtcttattccttactgcaaagcagcagttctcaactgggagtgattttgtccctccaggcacatttggcaatgtttggaaaaattttgactctccagacctgagtgcttggggtattgctactggcatctagtggatacaggtcatggatgctgctaaacatcytatagtgcacaggacagctctcaataacaaaaaattatccagtccaaaatgtcaacaatgtgaggttaaaaaaccctgccatagaaagtgatgtacatctctcattttgaaaataacagaaatacagagatatgcttgaggccatacaactactgagtgaagtggccaacacttgaacctggatgttctgaca

SEQ ID NO: 103511 - DNA, 582 bp, Homo sapiens
ccctcattctggagaagcatatccttcagtaacttcccgagaaagtacgttaaggcaggtgaatattttgtgattttgcagacctcaaaatgagtttagtttaccctcacacttgaatgacagtttgggcataaaattgtgggttggaaatcacttctcctcaaaattctgaagctattacccattatcttctagctttattgtggcaaaaagtcctctgctactcaaatccctatactttgtatgtttagactccaccatccatgccccaccccattcaagaagcttttaggaatttttatccccattgttctgaaattttataacaatttgccatcatgtgaatctttttattacactgaaatgggccttttcattatgaaaacacgtatctttcagcactggaaaattttcttgtgatatttawtaatttcttcctttcttttcctctattctgtttctgaagattctgttagtcagctattgggttccctgattaaacctccgactgttttgctttttcatctattttctgtctctctgcctttttgtttcactatctgacctacttcattttctagc

SEQ ID NO: 103512 - DNA, 524 bp, Homo sapiens
gcttgatgacatattcccaaatcaatccaggacaatgtgtctttactaagtccccatcatgcattcaaacgctcctactgtagggaagaaaatgggagaatctggaggctctgcccacaaagactcatagtccacttaaagaggcaaggctcacacacaaaactgagtccaagtttacctgggtctccctcactcaattgtagatkgtttttgtttcatattttttaaaatgttatttcattttaagttctggatacatgtgcaggacgtgcaggtttgttacaaaggtaaatgtatgctctggtggtttgctgctcctatcaacccatcacctaggtattaacccccaaatgcattagttatttatcctgatgctctctgtcccccctgccccccaattgtagattgttaaaaagggggatctccttcatctctgcaaagttagcatcctgccttggaaaaaatcagcaactggtgaatttttggtcatagtgaattattgctacttcattttatcagccaga

SEQ ID NO: 103513 - DNA, 541 bp, Homo sapiens
cctagccatataattttttaaatacaaatataatgtcctaactataagttaaaggagagatgaaaggaaataatwtgtaatattaaaaaaatctcaatatgtaaatgagaatgattacactagcaaacaataaaatcatcagatgtttacacctgtatttggaagaatcaccatgaatgaggcatctaaaactgcaagctgactcaagtgtcttatatttatgattcaattatcacgagcactgtttccatcagaaagctgattttacaaaatggtgaacaacacttggtaaagttctgggcaaaacatagtacaagtttacctcatttaacaacataattgcattcttaggcaaaagaagcatcaaaaatgtgcaaaaatgaacatgaatataatgccctaaatataatatcatggagaaatacacagaaaagaataaaataacacacttttcaatctgtaaatggtcaagaggatgactaacctagaagacacaatgaagtggccagatgctctgtgtgtctttacacagactcactag

SEQ ID NO: 103514 - DNA, 578 bp, Homo sapiens
tgaacaagttcccttgggccttttttataagggcactatttttatgcatgagacttcttccctcatgmtcaaatcatctcccaaatatactacctcttaataccatcaccttgaggattagaatttcaacatatgaatttggggagacacaaacatttagaccttagcagctgtgaatattttcattacagccctttcaaagagtttttaaatctatacagtgatgtgcctgtcttccacattggaatgctgatttcacacatatattggaccaaatggcatcagaacattataaaatcattctttataattataacagtggttttaaaaggtgtattaaccctttactcatttagcactgtgcttacattttctcatctataaaatagaaataataatagttattttattctgagacttaaataatgtaatgtatataaagctgttagcaacatgcctgagagtataaggctttgatcaagtagtagtattattacattattcacagtacaagctggctccctatggtaaagcaaaggcaatgttgtaaaagtccaacccaagagtggtattagtgt

SEQ ID NO: 103515 - DNA, 578 bp, Homo sapiens
tgaacaagttcccttgggccttttttataagggcactatttttatgcatgagacttcttccctcatgatcaaatcatctcccaaakatactacctcttaataccatcaccttgaggattagaatttcaacatatgaatttggggagacacaaacatttagaccttagcagctgtgaatattttcattacagccctttcaaagagtttttaaatctatacagtgatgtgcctgtcttccacattggaatgctgatttcacacatatattggaccaaatggcatcagaacattataaaatcattctttataattataacagtggttttaaaaggtgtattaaccctttactcatttagcactgtgcttacattttctcatctataaaatagaaataataatagttattttattctgagacttaaataatgtaatgtatataaagctgttagcaacatgcctgagagtataaggctttgatcaagtagtagtattattacattattcacagtacaagctggctccctatggtaaagcaaaggcaatgttgtaaaagtccaacccaagagtggtattagtgt

SEQ ID NO: 103516 - DNA, 578 bp, Homo sapiens
tgaacaagttcccttgggccttttttataagggcactatttttatgcatgagacttcttccctcatgatcaaatcatctcccaaatatactacctcttaataccatcaccttgaggattagaatttcaacatatgaatttggggagacacaaacatktagaccttagcagctgtgaatattttcattacagccctttcaaagagtttttaaatctatacagtgatgtgcctgtcttccacattggaatgctgatttcacacatatattggaccaaatggcatcagaacattataaaatcattctttataattataacagtggttttaaaaggtgtattaaccctttactcatttagcactgtgcttacattttctcatctataaaatagaaataataatagttattttattctgagacttaaataatgtaatgtatataaagctgttagcaacatgcctgagagtataaggctttgatcaagtagtagtattattacattattcacagtacaagctggctccctatggtaaagcaaaggcaatgttgtaaaagtccaacccaagagtggtattagtgt

SEQ ID NO: 103517 - DNA, 400 bp, Homo sapiens
tgaaagggctatgcaatcatgcatagtaaaatsgctctgccatccataacatgggtgcaggggaagccagtccctggtgcatagctattctctatgaggggactgacacctgctagagttcataaccctggctttatgaccttggacaatcctttaacatcagtaagcctcaatatcatactctggaaaataagagtgattaggaaaatcaaagaatatattataaaatacacagtacataattagttacattccttttctctagttaggtagggatcattactatttaaataaatcacatgtaaagttttttaaaagcccacaagcctctccctagttgttttataaatagtcatgatgctttacccttaaaatccatctttgtgtatatttgcagttc

SEQ ID NO: 103518 - DNA, 579 bp, Homo sapiens
tatgacccaacaattccacttctagatatatatgctagatatatatgctaggaactatttttcctgggtgccatgaagcatgtaaaggatgtcaaagcaacattgcttgtcacagcaaaaaaaaaaaaaaaaagagaaaaaaagtaaattactcagatccgccaatcaaatccatcaataataggaaagataataataaaaaagatacattacatgtgctgtgttcttaaaatggaataatatctacccaatgaaaagaaatattgtatttattttatcaatatgtgaacaaagaaktctctctggggcataaaatcaagtcaaggaaaaaattacagaaagataaatacagtacatttcattatataaagttcaaaacattcagaactaaacagaataattttagagatacaaacatctagtaaatcaagaaagaaaagtaagcacataattaatacaaaatttaggaacgtatttacagctaaatagagaaggttacacagagactttaaaagtcagcatccatgcatcactatttttttattccctaaatatactctttaaatatttgcatatact

SEQ ID NO: 103519 - DNA, 574 bp, Homo sapiens
aattaatttattttctgttcttttatttttcccctttatataataatcaaatcaatgytgtgttgattcttcccttaaaatatctctttaacctctttcctcatttactatcttccaccatctctaaacccttattatctcatgcatggatgattataaaagcctcttgtctacctgcctctagtctctttaactgccaaatttgcacctatattcagacttttaactcaaaaaattaagtttatactcactacttatcataatatatctaaactatagatttggttatattcctgcccatatgagaaaactttgatgagctttcatttcctccaggctacaatccctacatgcacagtatcatcttatattttatctcccatacactttgcttctcaactccattttttgctttcctaagagtacttgaaatttcgtatccatgttttttatcatgatatatctgggatgactcttctgtcacttttccaccaccactccagtgtactatgctacataaactgctcaaccaggatactttaaattatcttttatgatttagtttatacgtaat

SEQ ID NO: 103520 - DNA, 546 bp, Homo sapiens
cagtgagccaagatcacgccactgcactccagcctgggtgacagagcaagactccatctcaaaacaaaacaaaacaaaaaacagtccagctgtattaacagttctagaagtcagaagtttgacatgggctaaagtcaagatgtcaatagaattgtgtttcttctagaggctcaaggggaaaatatgtttgcttgcctgttccagcttctagatgctgcctgcatttcttggctcctggccccccctcctctgttttcaaagctaagagagaggagtcaagtccttctcaaatctaatcattctgacactttgmcattctgcatccctcttccaattttaaggaccttgtgattacatcaggcccacctgaagaatcatgcaataatctcccaattttaatatcaatgttaattctatctgcaactttaattccccttttctttgtaatgtaacatattcacaggttccaggggttaggatgtgtacatctatgagggactattattctgccttccacaattggcccttctattactggcatacaac

SEQ ID NO: 103521 - DNA, 610 bp, Homo sapiens
  misc_feature (1)...(610): n = A,T,C or G
nnnnnnntgcgtcaagtctgatactctagttgtggaacttaagcctcttcattgaagctgatgtgataggaggaagagacagtaatgggacagccccactgtgtttcagagggtgaaaagaaactgaggaaataaataaakacggaaaactattaggctgcatcagtgcagtaaagggcagagaatgttagcccttaaacttatttcggtcacactgtggttaattatagaaaagtttgaagggtttgaggggaaaaacgagagtagggaacactctgagcatgacagatgtaaaccgatgttttactgctcctccttccctccaccttccagtagtctccagtgtctattgttgccatctttatgtccatgagtacccaatgcttagctcccacttataagtgagaacatgtgccattaggttttctgtttctgcattaattcacttagtataatagcctgtagctccatccatgttgctgcagaggacatggttttattcttttttatggctgtatagtattccatggtgtacatgtaccacgttttccttatccagtccactgttgataggtacctcagttgattccacgtctttgttatggtgaat

SEQ ID NO: 103522 - DNA, 610 bp, Homo sapiens
  misc_feature (1)...(610): n = A,T,C or G
nnnnnnntgcgtcaagtctgatactctagttgtggaacttaagcctcttcattgaagctgatgtgataggaggaagagacagtaatgggacagccccactgtgtttcagagggtgaaaagaaactgaggaaataaataaagacggaaaactattaggctgcatcagtgcagtaaagggcagagaatgttagcccttaaacttatttcggtcacactgtggttaattatagaaaagtttgaagggtttgaggggaaaaacgagagtagggaacactctgagcatgacagatgtaaaccgatgttttactgctcctccttccctccaccttccagtagtctccagtgtctattgttgccatctttatgtccatgagtacccaatgcttagctcccacttataagtgagaacatgtgccattaggttttctgtttctgcattaattcacttagtataatagcctgtagctccatccatgttgctgcagaggacatggttttattmttttttatggctgtatagtattccatggtgtacatgtaccacgttttccttatccagtccactgttgataggtacctcagttgattccacgtctttgttatggtgaat

SEQ ID NO: 103523 - DNA, 483 bp, Homo sapiens
tttttgactttttaataatagccgttttgactggtgtgcgatggtatctcccacaaagatctgaggaagtcagcttaaggcttctgggaaagttttcattcctgatttaaaaagataggtaaatgagaaagctttattgctttttttttcacttcatttcaaaggtaaatgctgatgtctgaggatatgaaacttggagctgggacagatatatttgtgccatgaggggagatattgctgaccrtggtaaatgacagattggtagaatcagaggagtccaggacaaacctctgtctagatttcttgttatgtaatgataaatgtccttttggtttaattctatttttgctttactttatttgcaaccagaaatattgcttacttcttttttttttttttaatcttctgtaactcttcctcctattgctgtcttcccttcttactcactttactggaacttctggaatgtggcttccattgtaa

SEQ ID NO: 103524 - DNA, 461 bp, Homo sapiens
accatggtgtgtataaggaagaggcgagaaatgaaatcataatgaaaggaggaagtaaagctgtagaaccttaaatattgascaaaggagtttaaaatgtggggaaactataagttgtgttttaaaaaaatttcaaataaataggttcttgtttatcgatttaatcttctaattatgtgtgagagtggcattagccttctaaaattatgtttcagacacactatgatatttattaacttcatttataaatatttagtttaggaatatttccagtataaagcaaagtacagaaaaaataatatatttgacactgggaaccattcccccttccccatgctaatatttataaccaccttgatgttttagaagatgaactcgagagagtggtgcagaatgaaatgtagaatcccagaacagggagggcagttggggtattttaatcctagaattactgggaggta

SEQ ID NO: 103525 - DNA, 461 bp, Homo sapiens
accatggtgtgtataaggaagaggcgagaaatgaaatcataatgaaaggaggaagtaaagctgtagaaccttaaatattgagcaaaggagtttaaaatgtggggaaactataagttgtkttttaaaaaaatttcaaataaataggttcttgtttatcgatttaatcttctaattatgtgtgagagtggcattagccttctaaaattatgtttcagacacactatgatatttattaacttcatttataaatatttagtttaggaatatttccagtataaagcaaagtacagaaaaaataatatatttgacactgggaaccattcccccttccccatgctaatatttataaccaccttgatgttttagaagatgaactcgagagagtggtgcagaatgaaatgtagaatcccagaacagggagggcagttggggtattttaatcctagaattactgggaggta

SEQ ID NO: 103526 - DNA, 539 bp, Homo sapiens
tgctaccaacccatctggacctttaaatgaggaatcacaaaggcctccaaaggtaaggcaggtgacataaatgagccaatgcagtggggatgggtggggactgcagggtcctgggaagcagcccctgccctgcaaaaagagcagctgctcatccagatgccatgatggtcatcagcaggaacaccattctaaacttacttgagtcctgaaatgtatcaagaaaagccagaagtcaggattcttaygggaagtctcccaaatttaaaatgttgacaactatttccagtgttttaaaaaacactgattgggtaaaatatttgtttgccaaagaaaacaaagtcttttcaaagaaatgttaaagtaacatattggacattttatcttaaaataacctgtgaaggtaatatgttgatgacagataagacagtaataagacaatgcttgagaaaacagtgtgaaagcaagaccatgacatgcataaagaaggtagtcaaagggtggaaccttgttttatgagttgcctccttcaccagacagag

SEQ ID NO: 103527 - DNA, 638 bp, Homo sapiens
cagcagaaaactgccgccccaccctactcatcccatttgcccagaatgccaccattgtcaatttcatcatctgccccagkgacccagattccagaacactctttcctcctagagagctcagccatctcagcttgggcagctgaccaaaggacgtgaagtgactcactggatcactgattccagggatgagatttcatagcttcatgcccagcagttgacagaagaggaagttctgatgggcaggtgatgaccagcatgagtcttggggagtggtgaattatggccaccagccaggaggctggcactaagagtggaagtgggcatgggattgggagatgcactggcttgtctctgcttcacaatgctaggcagctttagcagggccaggagccatgtaaaaccagtcagtgggccagtttgggctgtggtttgacatcccttgatgtaaattatcatctcagtatctccatctcttaatctgtaacctcttttcttccaatgatcttgtgctcacccaacctcagatactcattaccatgattatgtgttagccctaccaaaaactgcaaccgctccccataaatccaattgtaagtttcctctatcttacaccatctcccatctttccagagcattcc

SEQ ID NO: 103528 - DNA, 548 bp, Homo sapiens
ccatgtcctggggaaatgaggtgacagctcagctgtacctgagaatagattcattactaccaatcttgggcatgcgatctggctcagacagggttccatgtcaaagtttacttctgtgttgaaaagagaaaatgttgggttgctaaaggataataaagaaagaatagaactgaaaactgtctatacgaatcttattgagcaactttaaaaattaacaatgaatttcaaattattttacaatatccctttaggagttatttgttaaatatsacacatgtacacactcagagaatacatttaaagagataacttattcaaggcattgacaaaaatattaaatgtatgaaataaagacatttcaaagtgatgttgtcaaaatggtgattccttactaaatgcattattgccacaaacataacgtaaatataggaactgaaaaatttgaaaaatcccttataacatcttaaaatacttatattcacaccacttcaaaaagacctgatttcaacaacacatttgaatcaaattcaactatttttcctaaacta

SEQ ID NO: 103529 - DNA, 587 bp, Homo sapiens
aaattatctttcagtgcatctttcttcctatgatttttttttaaatacagtgactgaatgtcagtttctcaggagtgagaaagaaaaagaaggcttcaactaaaatgtccagtgcctctaccatgttaagttacttctgacaggttgacatcactgattgagcatggcttcagaaccacctactttcttgcctggaaacttaaccttcagattttggtagcaatgaagattgactttgtgcttttcatagcacagctggagtaactcaaagaggagaattgcagatcttaccttattgtgctagtacagaaactgatttagagacctgtttgcagaatgctattttaaccatattrtggtccaaaattggatgctctttttgagacaggatgaaatttgatccctttgtcaatgacaatgtgtgttcattggtcgcacaatagaagcttgtgtgtggtaggtgattcctcaaaattcctcagcagctttaaagcaaacaaaatcaactctaaggtaatgtgattatgaggagactcaagaccatctgctctgcactcctctgccttcagtaaagagcctgacttgac

SEQ ID NO: 103530 - DNA, 587 bp, Homo sapiens
aaattatctttcagtgcatctttcttcctatgatttttttttaaatacagtgactgaatgtcagtttctcaggagtgagaaagaaaaagaaggcttcaactaaaatgtccagtgcctctaccatgttaagttacttctgacaggttgacatcactgattgagcatggcttcagaaccacctactttcttgcctggaaacttaaccttcagattttggtagcaatgaagattgactttgtgcttttcatagcacagctggagtaactcaaagaggagaattgcagatcttaccttattgtgctagtacagaaactgatttagagacctgtttgcagaatgctattttaaccatattatggtccaaaattggatgctctttttgagacaggatgaaatttgatccctttgtcaatgacaatgtgtgttcattggtcrcacaatagaagcttgtgtgtggtaggtgattcctcaaaattcctcagcagctttaaagcaaacaaaatcaactctaaggtaatgtgattatgaggagactcaagaccatctgctctgcactcctctgccttcagtaaagagcctgacttgac

SEQ ID NO: 103531 - DNA, 610 bp, Homo sapiens
ggcaagttgaataaaaacaagacctaaccttctgcggtcttcaagagacccgtctcatatttaatgacacccataggctcaaagtaaagggatggagaaagacctataacacacaaggaaaacaaaaaagagcaagggtcactatttttataayagataaaacagactttaaaccaacaacagtaaaaaagggaaaataaggtcattacataataataaaggatgcaatttaacaagaagaattaactgtcttaaattatgcatctgacattggagcacccaggttcatgaaacaagttcttctagacctatgaaaaagacttagatagccacatcataatagtgggagacttcaacacttcactgacagtattagacagaccatcaaggcagaaaaccagctctacaaagaagacctggtaccaatcttaggaaaatgtttccaaaaaattgacaacacattctatgaaaccaacatcagtcagataccaaaatcaagcaaagacacaatgaaaaaggaaaactataggccaatatctctgaagaacatagacacaaaaatcctcaacaaaatactttcaaactgaattcagcagcacattaaaaggtt

SEQ ID NO: 103532 - DNA, 610 bp, Homo sapiens
ggcaagttgaataaaaacaagacctaaccttctgcggtcttcaagagacccgtctcatatttaatgacacccataggctcaaagtaaagggatggagaaagacctataacacacaaggaaaacaaaaaagagcaagggtcactatttttataatagataaaacagactttaaaccaacaacagtaaaaaagggaaaataaggtcattacataataataaaggatgcaatttaacaagaagaattaactgtcttaaattatgcatctgacattggagcacccaggttcatgaaacaagttcttctagacctatgaaaaagacttagatagccacatcataatagtgggagacttcaacacttcactgacagtattagayagaccatcaaggcagaaaaccagctctacaaagaagacctggtaccaatcttaggaaaatgtttccaaaaaattgacaacacattctatgaaaccaacatcagtcagataccaaaatcaagcaaagacacaatgaaaaaggaaaactataggccaatatctctgaagaacatagacacaaaaatcctcaacaaaatactttcaaactgaattcagcagcacattaaaaggtt

SEQ ID NO: 103533 - DNA, 598 bp, Homo sapiens
actttttgtatgtttattaccaatagaatattttcttttgtgatgcatctgtgtattttgttgtttaaaacacacatgtgcacacgcayatgcacacacaatcttttcctttatgggtaataatctttttgtgtcctgtttaaaaatcttttccctacccgaaggcttatgaagatattctcatagttaccttccagagtatctattacttttgtatttcacatttagatctacaatccaactggaatttatttttgtgtatggtataaggtacgggggagatgaagatgaactttttccccatatagacaggttgacaagactctcttttccccacttttctgaaatgccacctttatcataaatcaagtgtccatatctgtctggatctttttccacactctattctgattcattagtttgttgtctaattttgcactaacaccacattgtcttaattattgtggctttataagtcttaatgtccatcagagtcggtcagtcctctcactttcttgttcctaaagattgacttggctgtgcctggtctttttcatctttatatcaatttaccatttttcacacatgcatacacaaa

SEQ ID NO: 103534 - DNA, 599 bp, Homo sapiens
cttaaggtgtaaaagactaaattgaggagaaatctgtagggtctaacagtgtgtcatccattactcagggcaccctttatcttcctccagagaagttaaaagtcctaaattactgtagttaattacttttttttttttttttgagacacagtcttgcttttgtcgcccaggctgggagtacagtggcgcaatcttggctcacggcaactccacctccyaggttcaagcagttctcctgcctcagcctcctgaatagctgggattacaggcactcgccaccactcccagctaatttttgtatttttagtagagacggggtttcaccatgttggccaggctggtctcgaactcttaacctcaagtgatccgcccaccttggccttccaaagtactgggattatagggatgagccaccacgcctgacctcaaagagcatttattaacatttgccattcagtagtttcatggaaacagtttggaaatactatgataattttttttttaagtaactttactctcagaagggctccatactgacagttgtttcaggaggcagattaaaaattcaggtgttcttatttctgccctattacttcccc

SEQ ID NO: 103535 - DNA, 583 bp, Homo sapiens
tcaacaaattaataaacctttaaatataagctctttaaagtaaaagcaaaatattcgattttcaaaagcatatttgtgggttgtgatgttcctaaaacttttctcttgacaatgaaatttagaacacttgatcaaaaccaraaagtaaatgaatattcaaaaaacaatcaacaattaaccccgttatacattttaggtattctacgatcttttgagaggttaaagttttaaagaactattcaaggactattaaatcagtgattttagtttttacaattaagtatggaaaacaagctaagttcaagagatttcttaaaggcttaaaattttcttgtgtgtgtgtggtttttaattttatttattgtctttcactaactgttgtcctaaatttgcccaaagtgaactccctgttttcatagtaacaatgggaaaaaagtacaagagttgataaataagaaatgagagtgaagaaaacataacacaaatttttaatgcttgatattttaaagactttggcttcaccgatttaaggcatttgcagatatggaaaaatgttatggaaaaggggaggcggttggagatt

SEQ ID NO: 103536 - DNA, 591 bp, Homo sapiens
tttcccaggctggtctcgaactcctggtctcaagcaacctgcctaccttggcctcccgaagttctgggactacagacgtgagccaccacgcctggcctcagtcatgtcttaaacagaattaccatctttcccctctcttttggcctccatcaaattaattgccataactcttcattccatgttaccaaatatctcccaattattcatgctcaaacacttgaaatctgtcttcatgcactgtgctaggagttctgtcctcactgasccgggagcacagcttctgcccagaagcagcgacaagtctactttggagaccattttgactttgatttctttcctgccctgttgtctaatctgctaccagacagccgacctgccactccttcctccacagggtctcaaatctgttccttcctttacattcttaatgcccccccatttgagagaggctgtggtcacagtgtaaactgacttgcattggatcctttgtgttaaggcaggctcccctaaacttctgcaggagccacttggtttcctcttcagacttccacagcttgtagattcccagtcaggagggtagaaggaggtaga

SEQ ID NO: 103537 - DNA, 591 bp, Homo sapiens
tttcccaggctggtctcgaactcctggtctcaagcaacctgcctaccttggcctcccgaagttctgggactacagacgtgagccaccacgcctggcctcagtcatgtcttaaacagaattaccatctttcccctctcttttggcctccatcaaattaattgccataactcttcattccatgttaccaaatatctcccaattattcatgctcaaacacttgaaatctgtcttcatgcactgtgctaggagttctgtcctcactgacccgggagcacagcttctgccyagaagcagcgacaagtctactttggagaccattttgactttgatttctttcctgccctgttgtctaatctgctaccagacagccgacctgccactccttcctccacagggtctcaaatctgttccttcctttacattcttaatgcccccccatttgagagaggctgtggtcacagtgtaaactgacttgcattggatcctttgtgttaaggcaggctcccctaaacttctgcaggagccacttggtttcctcttcagacttccacagcttgtagattcccagtcaggagggtagaaggaggtaga

SEQ ID NO: 103538 - DNA, 591 bp, Homo sapiens
tttcccaggctggtctcgaactcctggtctcaagcaacctgcctaccttggcctcccgaagttctgggactacagacgtgagccaccacgcctggcctcagtcatgtcttaaacagaattaccatctttcccctctcttttggcctccatcaaattaattgccataactcttcattccatgttaccaaatatctcccaattattcatgctcaaacacttgaaatctgtcttcatgcactgtgctaggagttctgtcctcactgacccgggagcacagcttctgcccagaagcagcgacaagtctaytttggagaccattttgactttgatttctttcctgccctgttgtctaatctgctaccagacagccgacctgccactccttcctccacagggtctcaaatctgttccttcctttacattcttaatgcccccccatttgagagaggctgtggtcacagtgtaaactgacttgcattggatcctttgtgttaaggcaggctcccctaaacttctgcaggagccacttggtttcctcttcagacttccacagcttgtagattcccagtcaggagggtagaaggaggtaga

SEQ ID NO: 103539 - DNA, 591 bp, Homo sapiens
tttcccaggctggtctcgaactcctggtctcaagcaacctgcctaccttggcctcccgaagttctgggactacagacgtgagccaccacgcctggcctcagtcatgtcttaaacagaattaccatctttcccctctcttttggcctccatcaaattaattgccataactcttcattccatgttaccaaatatctcccaattattcatgctcaaacacttgaaatctgtcttcatgcactgtgctaggagttctgtcctcactgacccgggagcacagcttctgcccagaagcagcgacaagtctactttggagaccattttgactttgatttctttcctgccctgttgtctaatctgctaccagacagccgacctgccactccttcctccayagggtctcaaatctgttccttcctttacattcttaatgcccccccatttgagagaggctgtggtcacagtgtaaactgacttgcattggatcctttgtgttaaggcaggctcccctaaacttctgcaggagccacttggtttcctcttcagacttccacagcttgtagattcccagtcaggagggtagaaggaggtaga

SEQ ID NO: 103540 - DNA, 558 bp, Homo sapiens
tgacagctgtgagccattcttctgtactgagagtccaaatcgaccctcctttaacttcccttcttctgcaaagaactctttcaatatagattgcagaactagtgcgagaacagcttttcaactacaatgtggtgctcccattcaaaccttagttctgagatcaaatacacrggaaaagaacgggcttaactatcatcagttattctaacgtgaacaatgatttagatgttggaaaattatcaaatgaaaattacagccaggaaaaaaaaatctctaaattgctatccacactgaaattcatgactttgggatagatattgagctcaaatagtccccagtaggaatattttctgctgcttccattttccaaagtttcttttcttcttttgcagcaacatgacacagctcatccttggcttcctccagggaatgtggcaagcagtgttcatgtggatgtgtctgtccttgacaccaggcttccagaaagtgtgaatgcagccattgttctgaacaacacagaattccttggagtgtctgggaggggcaggtagagaattg

SEQ ID NO: 103541 - DNA, 645 bp, Homo sapiens
aatggttttgttggttatgattcccttccacagaattcttgttcagcagaaatatcctggtagctaaccatgcagtcatctcttgggccacagaggagacagagtgtagtgagggtacatgagacattttaccgcagacagcacactgctaagcacttaaattccagaaattgcacagggaacagcagagcagtctgatctacagagctgggattctaaaaacctaaaactctgatttcttggctcagaaattcatttgmaattactgaccacagagaaagccgccctcgaaaatttcatttgcttgagatgatgtaactgagaattgaaaaagtacccatgaatctttgtgaggagacatacactttttacttgaaatactttattttgttccattgactagaggaaagcaaacctacaaaaccgtttgcccaaattccactctcacagaacatttaatagaataattacagcaaaaggaacttcaagggcaggatgatgttggagagaaaccaatcattggatagggcaactgggctgtggctctgggaacccaggtgagaggggtagggtgcctctgggtactctacttaacttttattttcttttttaatccccctgaacacaattcaaattaaatctcac

SEQ ID NO: 103542 - DNA, 594 bp, Homo sapiens
cagcaagcacaaagggtgaggtggttgtatcacttgtgtttccaggtgatgaatagactgatttgactacaatgggtgtttgatgtacagaacatctttatrgaaaggtataatggagccagattgtagagggtctgccgtataaagagtcaggatgttatctcacaggcattgtgaagtcattgagggttggttcttagaatgcatactgtgataatagctgcatttgaggaagaatatactagcagaatggggaggaagattcctatttgttgagtgacattgctatagaagtattcatgtatgaagcttttcataatccttacaacacttggaaatgtaaaactaccatgtccatgcttagatgaatgaactgaggttctgccagggaagatgcctgtctcaggttcaccagatgggaaagatggacacaatattttgtcctagtctgtttacttcaaagcctatattcttaacaattcaatgtgaaaaacaaaagtagtaaagagatgttgcaaatattgagccttaacgatttctaggttctaagtaaccttcatgtaataacttatgtaaaccttctaatacctctga

SEQ ID NO: 103543 - DNA, 545 bp, Homo sapiens
ctgatttcattaacctatatttagaggtattacatgaaatttattttccatttactgctaaccttcttactaatttctatttgagcagctayggttttaaatttgtctggcttcttaagagtatgatcagctggtgcttggctgttagccaaaacataagctacagggaacaagagctggcagctctggtattatatttttgatgtttgaaaaacccagccagtttagagggttttttaaaaaagcattttaatatcagtgaattaacagcttaatgtcaggagcaaggtaaaatctgagagagaaaccttgatatgaaaccttttcctaggaagagaggaaagatcacagtaactgaaacctttttatactcttgtttaaaacctatcatacctgaattaaataaggtgtcatggcagacagaatgagaaagcttattgtgtgatgctttctaatgcactttacataagaaccttcaaatggcattaacttgcagctgccttcaccctgggcttaattttgcagaacttccattatcatagtta

SEQ ID NO: 103544 - DNA, 516 bp, Homo sapiens
agaattcatggaacataatgggtgggcttatactccatgagagaagtatatgtggtttccaaaaccccatgggaaacgttgccacttttagtcatggcctaatgtgacagcttggctgtgatgtggtcacctctaaaacatctcactgcttatttattgagatgacataaattgtaggtttacacatgactgaaagtagctcatatccctatccagggctctcagacttccaaagcctggccctaatcatgatggccacttcatgaccaagagagccacttcatgaccatgctagacatggccacaagttctaaakaacctgatggccttctctagtggctggtaaatcttaagtggacaaagcaagggccagaattcctattcctagatttttctatagtatctatgagaatagatgtattagtattaaccctatttttattctttaatttttatttttcgatattttaaaacttacataaaagttgcaaaaataatacagaaaacttcatatat

SEQ ID NO: 103545 - DNA, 543 bp, Homo sapiens
agctggtcagtacttgtgtgagatttaaattagtattcagagctacacttgtaaaatggaaataacaatgtgtatcccaaggatactgtggatactaaattagatgatgtaaactggtttcaacatatggtgatatcagtggagggggaggaaacggaaggagaagaaagggataacattttctagttcataaaaaawtttttaaaatgaaaaagaagagaaaatacttttcttctgatgtgtgtatttgggtcatgttgtaaaatatatttcttatggtgaaccacagtcaaatacgtttttaaaaatatgtatccatagaggcactttaatactctgaggagggtagatgtatctccctcacagagtggttattaaatgaatttaaccagttgaagtattcaaagcaacacctgcacagggcagataaccaaaaagagttaagtaagaattactacttgttgtggacggtgttggtattagtgacatctatcaccctgtcaccatctatgtaaaaagtgtcatttgatacacagtctatgt

SEQ ID NO: 103546 - DNA, 602 bp, Homo sapiens
ttttcttctgatgtgtgtatttgggtcatgttgtaaaatatatttcttatggtgaaccacagtcaaatacgtttttaaaaatatgtatccatagaggcactttaatactctgaggagggtagatgtatctccctcacagagtggttattaaatgaatttaaccagttgaagtattcaaagcaacacctgcacagggcagataaccaaaaagagttaagtaagaattactacttgttgtggacggtgttggtattagtgacatctatcaccctgtcaccatctatgtaaaaagtgtcatttgatacacagtctatgtagtagtgtcttcttccaaaaataaataaataaataaataaataaataagaccttactagatcagtggtttccagaatgtggaacaaaaaatagtgaggaggagcatctgaaatagacaaccaactttttatatgacccataacactgwgttagtcagcttaatgttgtaataacagaacatccgaggctgggtaattcataaagaaaagagataatttctgtcatgattctggggagtgggaagtctaagaagtaacacaccagcatctgcttgcctgttggcggg

SEQ ID NO: 103547 - DNA, 592 bp, Homo sapiens
attcatttctgttttttgtttttgttttcrtttttgtttgagatggagtctcactctgtcacccaggctggagtgcagtggtgccatctcggctcactgcaacctccgcctcctgggttcacgccattctcctgcctcagcctcccaggtagctgggactacaggtgtccacaaccacacctggctaattttttgtatttttagtagagacagggtttcaccatgttagccaggatggtctcgatctcctgactttgtgatccactcgcctcagcctcccaaagtgctggggattacaggcgtgagtcactgcacccggctgaaatactcatttctaattagcaaaatgctttgacctctgaggtacattcacaccttctatgctttctgcagtgcacagcaggacagtttgcatcgttgaggacagatgcccagctacattgagaatatctctatgttcgctaagaactttacataggcattgtgtacatttaatatccacattaataggcaagagttcttttactttcctgagagaggattcttcccccaaattatcataaaatgtactgagggcttggccacacatagc

SEQ ID NO: 103548 - DNA, 592 bp, Homo sapiens
attcatttctgttttttgtttttgttttcgtttttgtttgagatggagtctcactctgtcacccaggctggagtgcagtggtgccatctcggctcactgcaacctccgcctcctgggttcacgccattctcctgcctcagcctcccaggtagctgggactacaggtgtccacaaccacacctggctaattttttgtatttttagtagagacagggtttcaccatgttagccaggatggtctcgatctcctgactttgtgatccactcgcctcagcctcccaaagtgctggggattacaggcgtgagtcactgcacccggctgaaayactcatttctaattagcaaaatgctttgacctctgaggtacattcacaccttctatgctttctgcagtgcacagcaggacagtttgcatcgttgaggacagatgcccagctacattgagaatatctctatgttcgctaagaactttacataggcattgtgtacatttaatatccacattaataggcaagagttcttttactttcctgagagaggattcttcccccaaattatcataaaatgtactgagggcttggccacacatagc

SEQ ID NO: 103549 - DNA, 592 bp, Homo sapiens
attcatttctgttttttgtttttgttttcgtttttgtttgagatggagtctcactctgtcacccaggctggagtgcagtggtgccatctcggctcactgcaacctccgcctcctgggttcacgccattctcctgcctcagcctcccaggtagctgggactacaggtgtccacaaccacacctggctaattttttgtatttttagtagagacagggtttcaccatgttagccaggatggtctcgatctcctgactttgtgatccactcgcctcagcctcccaaagtgctggggattacaggcgtgagtcactgcacccggctgaaatactcatttctaattagcaaaatgctttgacctctgaggtacattcacaccttctatgctttctgcagtgcacagcaggacagtttgcatygttgaggacagatgcccagctacattgagaatatctctatgttcgctaagaactttacataggcattgtgtacatttaatatccacattaataggcaagagttcttttactttcctgagagaggattcttcccccaaattatcataaaatgtactgagggcttggccacacatagc

SEQ ID NO: 103550 - DNA, 592 bp, Homo sapiens
acatgtataactggtaaaatcggaataaatcctatggattgtaccaaaccatatggatcatcaatttcctggttttgctatcatgctatatagttaagcaggcatgcttaaccactggagaaattaagggcatatggaaattccctgtacttcttttctttgcaaacttctgtaaatttataattatttcaaaaacaattttaatggtagttaactttaaaaatggggaaaaagttggccgggcacggtggctcacgcctgtaattccagcactttgggaggccgaggtgggcggatcacgaggtcaggagattgagatcatcctggctaacacggtgaaaccccrtctctactaaaaatataaaacattagccaggcatggtggtgggcacctgtagtcccagctactcgggaggctgaggcaggagaatggcatgaacccaggaggcggaccttgcagtgagctgagacggcgccactgccctccagcctgcgctacagagcgagactccatctcaaaaaaaaaaaaaaaggtggggggggggggagttgaagtttttagtggaatttaaagattgttttcaatgaaatg

SEQ ID NO: 103551 - DNA, 565 bp, Homo sapiens
ccttgttttggacttagctcatgcattaggccccaacagacaaaaccaaacaaaaatgaagtcacttgtggtaaatgtgacattatcaaactgagactttaaggaaacacatagctcctagaccagaacagaaccaggtttgttctcctaaaaacaagatgttccaacataaggggataccctctactcaagtccttgttcctacctttgcaaaactcacagttctgtttccagggggtttcaagaccaaattagtaatttaygatggtgatagtgatagtaatgactaaagttttggtcaatctctcaaaattgagaaaatgaccaaaagaggggaattgttaaatcaagtttagtctaaagctaccttcttacatatttaagttcagcctacaggtttttctatacatcgtgaactataacaagtggagatgtaaactgacctcagccaacacctgtgccaatcactgagttttagccaataaaatgtagccaactgtccaaatcgtgttcaaataaggcaaacactaagctctaattaatcccgttgcttctgtacttcact

SEQ ID NO: 103552 - DNA, 550 bp, Homo sapiens
gctacccgccattactattaaaaagtaggattsctacccgccattattattaaaaagtaggattggtacccgccattattattaaaaagtaggattgctacccaacattattattaaaaagtaggattgctaccctccattattattaaaaagtaggattgctaccctccattattattaaaaagtaggattgctacctgccattattattaaaaagtaggattgctacctgccattattattaaaaagtaggattgctacctgccattattattaaaaagtaggattgctacccgccattattattaaaaagtaggattgctacccgccattattattaaaaagtaggactgctacccgccgttatttgcacagctaccttatgaaagtagtttcacgtgtgtcttagatcactttagaggaaagatatcagacaaagagacctgaaataaatgggaaaaacttttgacttaaatgtaatattcctctgacagtgtacaacgtaagtggagttggaaattatgccagagagtgagtttgccatcgccag

SEQ ID NO: 103553 - DNA, 550 bp, Homo sapiens
gctacccgccattactattaaaaagtaggattcctacccgccattattattaaaaagtaggattggtacccgccattattattaaaaagtaggattgctacccaacattattattaaaaagtaggattgctaccctccattattattaaaaagtaggattgctaccctccattattattaaaaagtaggattgctacctgccattattattaaaaagtaggattgctacctgccattattattaaaaagtaggattgctacctgccattattattaaaaagtaggattgctacccgccattattattaaaaagtaggattgctacccgccattattattaaaaagtaggactgctacccgccgttatttgcacagctaccttatgaaagtagtttcacgtgtgtcttagatcactttagaggaaagatrtcagacaaagagacctgaaataaatgggaaaaacttttgacttaaatgtaatattcctctgacagtgtacaacgtaagtggagttggaaattatgccagagagtgagtttgccatcgccag

SEQ ID NO: 103554 - DNA, 250 bp, Homo sapiens
aaggacaagctgctgagtctcttgygcaagacttctgctgctggaggcttgataatctcttttattgccacttttttttttttttttttttttgctccaaacatttttatcaccttctggtaatttttcttcacttcacttcaatctgaattgtagccttctgaaagtattaatcactgtgattttgtttgctgtagcttattaaatgcccttttggtcctttttaattgacctttttaaatatgagctc

SEQ ID NO: 103555 - DNA, 250 bp, Homo sapiens
aaggacaagctgctgagtctcttgtgcaagacttctgctgctggaggcttgataatctcttttattgccacttttttttttttttttttttttgctccaaacatttttatcaccttctggtaatttttcttcacttcacttcaatctgaattgtagccttctgaaagtattaatcactgtgattttgtttgctgtagcttattaaatgcccttttgrtcctttttaattgacctttttaaatatgagctc

SEQ ID NO: 103556 - DNA, 206 bp, Homo sapiens
gaaccttctctgcgcagtttmctatcaatctacggggccacggactcacagcagtgcccccacatttggacctggaatcgcagcatgctgcgtgatgccagaagagactgtaggacgaagtgaagggtgaggaagagatcggccgtcagagccctgaacagtgtaaggcaggagagctgagatgaggccctgctcttctttatcaa

SEQ ID NO: 103557 - DNA, 584 bp, Homo sapiens
gaagctaaatgccggcagctgcatgccatgttctctgaaaacagcaaatgtcctttagtttagtttatctgtggtctgccttggtgttatccactgttaattcttagtagtacagaacaatccttagaggagcaaagaaacatttattcaatgcaatcagtgaacagagaatggagggaggtgggtgggggataacaggagctggggaggaagaataggaattcttacaaaagtttggagtwaggggtcctagtgggattcctcccccttttaacaacaaagtgcagagtgaaagaatatgttcagcttactttgtcttcctgcttcgtttgatctgaaagaacaatcagatacggctgatttctgaagactgttcagaatagagagatctcgaatgccccagtgatagccatcgttgtcaacaggaggcattgcaggcactgacaccagcacctgaaaacgctcagatgctcaacacttcatctttcatttcaaaatctactgctgggaattctctttatacaatgcattggatgataagtatttagagggggactggatcctggaggagaataaagcatgga

SEQ ID NO: 103558 - DNA, 584 bp, Homo sapiens
tggtcaggtgtcaagggagaggaagcattccgtagtcccatgacagggtctcagtctttcagtaagtctgtgcctttggactggaactgttgtcaccattgcttctcagccctccctcccttgggtgggagagaatggctggaaggggctagagatgagtatttccctccccccaggtagattaggctctgacaaaattccagcaagttaggatctggtaaaagtttctcctgagggcggaacttgttaagaaaaacaaaatgctccgatgtatttcgaaatggctccttttcctctctccctgccgaagcacaaagaaatatttctcctatmtacaccaggaagaactggtagagctcttaaaactcacaaaagtgtgaaggccccccgactgagtctccgtggagtttttatctctcagacttggccacacggagccttcagcaattcatcaattacggttccggtttacctccctggcactggttccagcagaggtttctgcaggtgggtttctgctccacggatacagagaattgtgattctatgtatctgcccatttatctctccaaatttgggggcag

SEQ ID NO: 103559 - DNA, 606 bp, Homo sapiens
agatattctgatggacgttagtgggaaggtaaatggaagacatgaacaattctaactgaagatggctggttatcaaaaggtgttttggaggcctgccttttgatatcagtttgttgatactatacacactatttccatattgagttataaaactaggagcctttagttttctcaaattagtaaaatgctgaaataaaataaaatattacaaaataaatttcttaataataggatcacaaaagccttagtagaatgaacaatttagagaatggtcagttctagtatgggtgttagaatatttataaaataaatgaagatttgtsacctttatttcatacagtagaatatatttacgactaacagtattctacatgaggtcaggtgcgcattgccatgatttgtaattggagtcttccttaccctcccctaatgatgttggctttttcttcccttgtaattgattatgtgtttgtaaattaatttctcttaagtgctttagaatttattctattaagtagtctcatttcaaatcttgtttatattattctcttgcttctacctcctgttttaaacttcagctctggccctgccaccttgataataatt

SEQ ID NO: 103560 - DNA, 606 bp, Homo sapiens
agatattctgatggacgttagtgggaaggtaaatggaagacatgaacaattctaactgaagatggctggttatcaaaaggtgttttggaggcctgccttttgatatcagtttgttgatactatacacactatttccatattgagttataaaactaggagcctttagttttctcaaattagtaaaatgctgaaataaaataaaatattacaaaataaatttcttaataataggatcacaaaagccttagtagaatgaacaatttagagaatggtcagttctagtatgggtgttagaatatttataaaataaatgaagatttgtcacctttatttcatacagtagaatatatttacgactaacagtattctacatgaggtcaggtgcgcattgccatgatttgtaattggagtcttccttaccctcccctaatgatgttggctttttcttcccttgtaattgattrtgtgtttgtaaattaatttctcttaagtgctttagaatttattctattaagtagtctcatttcaaatcttgtttatattattctcttgcttctacctcctgttttaaacttcagctctggccctgccaccttgataataatt

SEQ ID NO: 103561 - DNA, 645 bp, Homo sapiens
tgacatgactggttttttagtgtgtaaaaaagcaaattatttgggtatatttttatgtagaaaagaagattttttaacttgtatttagctgagagattgaaatgtattttattttaaatggtaaattgtaaataaactgttttaaatgtaagtaagtatggttgaaaaaaatactgagaactcctagccaatagaaattaaacagtttattttcaaataagaaaattatcctaaatatttcaataaagaaagtgaatatgcatatattgagtcgtgttgtcccactgattcctctctgacatcagagtagattgttatctttgtgctctgtctctgagggtgtttctataaagggtctgtcattccaatgcattaatcaaaaagattgcacaaagatgaaaaacattttyagaggaaaatctcataaatggatttgttattctgtatacagaaaacaaattattgtctttccatagtttctggacactggataagcatcaggatctagtacttaggcattaatatgttatttactatacgtattctatttatatctttcagacattcggacttattgaatctttctgggctcattttcctcactgctgatcatcattagctgttgatataccagaatttaaaaag

SEQ ID NO: 103562 - DNA, 474 bp, Homo sapiens
aaaattacatgggtttggaatacagatgtaggtgtgaatcctgactcttgaccaccattacttcagttctctgagccttcgattttcagctgtaaaatgaaagaaattgtatctactctgcaaggttagctgctgtgagaattaaaagatgtaatttaaggagcaaacttggtataatcaaagtgcacacacagtagatcgtctataaatggttactagtactactagtagtaatagtattaatagcactttgttactgtaaaaagaccagcaataggaagtttaagaactgcaactttgagtcacattgatttaggtctagagaaacacacacagcacataggggaatgtgtcagtcatttagtttatttcttcattcattcactrcatagatacaaactcaaaataatgtttgtcttaggacatttttaacttacatgggaaaatagctcccaaagcagcatattaaaacat

SEQ ID NO: 103563 - DNA, 631 bp, Homo sapiens
ttataaatgtgcacttactgtgtttcaggtataagtctaagtgatttataagcgttatttaatatttgcaacaggttcatatggtataacaataataataataataataaggtaaccaacggacagagaagttgtcctacttgatcaagatccacaccatagkttgggtgcggtgactcatgcctgtaatcccagcactttgggaggcccaggcgggtggatcacctaggaccaggagtttgagactggcctggccaacatggtgaaatcccatctctactaaaaatacaaaaattagccgggtgtggtggtgcacatctgtaatccctgctactcatgagactgagacatgagaatcacttgaacctgggaggtggaggtggtagtgagcaagatcatgcccctgcactccagcctgggggactactgagcaagactctgtctcgaaaaaaaaaaaaaaaaaaaaaaaaaaaaaaaaaaaaaaaagatccacaccataaatgggtagcaaatgttggatttaaactcaagcaatgtggctctagaacttagccactgtgttttctgcgtcgtttcctcatcatgttcatcacattctggaagcattttgtgagtatgccataaacaatac

SEQ ID NO: 103564 - DNA, 414 bp, Homo sapiens
tctctcattacaattatgttcacaaagtgttagagagaattgtatgagtaccagaaagtggtgtcttgttcargctctttgatttgttaatagagaggtgaaacttaattgcagagttctttctatgtttctgcatttataagcctcataaaaagcaggatccaaatacagtaacagagtcactattctgtccaataggaaaattatttcaatctggtcattcaatgccaggcaacagaaaggagtagtattaactaagactgtattcctttaagttaccattgagaaagaacttgaaaaaaaaaacattttgtgtcctagaattgagaatttgaagtcaaaaagcaggatatggtcacaatgctatgctcataggatttgcctggaaaatgcataatagcctcccaggaattc

SEQ ID NO: 103565 - DNA, 405 bp, Homo sapiens
ctaatgttttaaaacaaacaagcaaggcttggcaaaatacaatttgcaataacatctgatattataagagttaactttagaaaaggattatttaggaaaagaaataggtcaattttcaaaaaatataataaacgtatttcatagtgttttaattaaccayaaaacaaactcttgcttatttttcaaaacatgaaatgacttgatgaatgctaattttggtgtaacaacacaacccaataattacactagtaggggaaaacaagggggcacatacacacacagaatgaatatgtttctaaaattgtttgtttgtggtatagcaaagacctgtatgatgacattttatatttctatagcaagagcacgtgcctacaactaggaatattttttgtaatgtctgtcttc

SEQ ID NO: 103566 - DNA, 344 bp, Homo sapiens
ccctatctcaaagtccttaacagaatcacgtcttcaaagaccatttttccatataagtaacatttataggtggcagagattagggtgtgatatctttggggccattactcagcctactacggwcatatttaattttaagtggctgctggaaattcaagaggatgtatttggtaaacaaatagatattggggtctggaggtatgaaacaggaagcaagatcacctgctgaaagaaaacagtgctggggaaatggaattcttggcatcataaatttctgaattagctgttggggagaatagagcagagagctgactagctggtaagcagtgtattaaatggtgtag

SEQ ID NO: 103567 - DNA, 561 bp, Homo sapiens
ttataaatatatgtgcactcaatattagagcatcatgatatataaagtaaatattatcagaactgaagaaggaaatagcaataaaataatcgtagggaatttcaataccccacttttaacaaggacagattatctagaaacaaaatcaataaggaaacagacttaaacactaaaaatcaaatggaactaatagacatatataaaagttttttatcaaacagcagtaggaaacacattaatcacatggaatgttcacacagaattctccagagtagatcagatgataggtcacaaaagaagtcttaactgatattgaaagattaaaatatcaagcatcttttctaccataacggtatgaaactagaaatcaatactaggaagaaaatyagataattcacaaatatgtgaaaattaagcaatatacttctgaacaaccaatgggttaaagaagaaatcaaaagggaaatggatgaattcctaaaaacttacaatctaccaagacttaatcatgataatataaaaaatctgaacagaccaataacatacaagtagactgaatcc

SEQ ID NO: 103568 - DNA, 617 bp, Homo sapiens
agaaagtgcaagttgcctgaggcaggactgaacttggcaagttcacataggagattgaaggccaaagtgctagagcccagtgaatcaggaaatagcgtcagaacagcagggcagagccagcccagatagcattttagaggaatctggttattattctaaattcaacttggatccttgggagtgtctggggtatgggtgagtgtgatgcaactattcataggctgccaccrtgacattgacccatctgcctacatcggagcccacacagtcccccttctttcctattattagagataaactgtgcctggtcctatttaaaccaatttccccatatatcccagatgccattcccttatggtcactaatgtcatttttccagccatattccctctgtgcttctacgtaattaaatttctcatcccaatggagtcattccaactatcatacagacaagttgttttattctaaaacttaaactaaaacaaaaccaaaacaatttgtgtctaggcacaactcgtgttattgcacttcactttattacacttcatagatttttgcatcttttacaaatggaaggtttgtggcaatcctgcatcgagcaggtctgtcagcaccat

SEQ ID NO: 103569 - DNA, 603 bp, Homo sapiens
tgatcagtgatctttgatataactattgttactgttttgggatgccacaaaccatgctcatgtacaacagcaaactaagttgataaatggtatatgtgttctgactgctcctcctaccagcggtttccttatgtctctccctctcctcaagccttcctattgtctgagatacaataaaaataaaatgaggacaattaggaaaccctacaaaggcctctaagggtttaagtgaaaggaagagtcacatgtctctcactttaaatcagatgctagaaatgattaagcatagtgaggaaggcatgttgaaagccaaggtaagccaaaagctaggcctcttacaccaaacagcaaatgtatgaatgtaaagaagaagtttgggaagaaaattaaaagtgctactccagtgaacacataaatgataagaaagagaaacagccttattgctgctacagagaaagcttaagtggtcagtgtagatcaaatcagccacaacattcccgtaagtcaaagcctgatctggagcaaggacctaactctcttcaattttatgaaggctgagagaggtgaggaagctgcagaaraaaagcgtgaagccagtagagt

SEQ ID NO: 103570 - DNA, 347 bp, Homo sapiens
tgagaaaggcaagtaaacagaaaatagaataggctgggattcacacaatgatgtgggtattcctggggtacctggcccacctagctctgtggtgcagggtgagggggttttccagcagaaggggttgtgagaaatcaatgaagggcatgtcttcaggagctggtacccagtgggagagtaggctttgctgtttttggagacctgagagtagttcattccagtcttggactatagtagrgaaggtgtggtgagcaaaggccagatagtgagtgaacttacatacatttgaataaactttagaccctattatgagggcaacagagagcatcttggtgctgtttttaaaa

SEQ ID NO: 103571 - DNA, 563 bp, Homo sapiens
tgtgcctggccttgttgttggcttcagaagagcaaatatagaatcagaatgcctcacatttgagcctattttctggatgtcttactctgggtaaattacttaacttcactgtgttttgattgccttgtacaaaaartgagaatagtatttaccttttaatatttcatggtgattaaataagataatattcataaagtgcctgatacagcaccaataagagatagcaactatcatgattatgtatagctaagcaatctttgcttttctccaactcacctcctgaaaactttctttgtggccatgtgcccagattcattaggtgtgttgttacacatacagaatattttattggtgagaagcaagaaactatttcaataatagttttatatgtattgagtccttgctatgtgccaggcactgtgctgagctctttagataaacacacttaatcctcaccacatcctatgaaattggcacagccattattattcttcattttacaagtgaggaaacaaaggattagacaggctaggcaacttgcccaaggtcatgcagttagtaag

SEQ ID NO: 103572 - DNA, 641 bp, Homo sapiens
ttttctttctgaacaaagtactagttttactttttttttttttttttttttttgagacagagtctcgctttgttgccaggctggagtgcagtggcacaatctctgctcactgcaacctctgcctcccgagttcaagcgattctcctgccttagtttcccyagaagttggtactacaggcatgcgccaccgcacccagctaatttttgtatttttagtagagatgggtttcagcatgttggccaggatggtcttgatatcttgactttatgatccgccagcctcggcctcccaaagtgctgggattacaggtgtgagccaacgtgcccagcccagttttactttgaagatgagtcaatggccaatgagagaagactaagtggaggagtcttcacccagcccatcagttcagcaacacacaataagggcactttctctccaggggtgcaacaccagccattgctgtcttgaatcattttcccttagctctcacaatttatattctctgtctctctttggctacaaagaaaatcccccctgcacttcaaacagcagaggtctgccagatactccaccctcatcaatcttcatttaaatgccagcaacatgaccctatgaataaaggtggtgagttaataaatca

SEQ ID NO: 103573 - DNA, 641 bp, Homo sapiens
ttttctttctgaacaaagtactagttttactttttttttttttttttttttttgagacagagtctcgctttgttgccaggctggagtgcagtggcacaatctctgctcactgcaacctctgcctcccgagttcaagcgattctcctgccttagtttccccagaagttggtactacaggcatgcgccaccgcacccagctaatttttrtatttttagtagagatgggtttcagcatgttggccaggatggtcttgatatcttgactttatgatccgccagcctcggcctcccaaagtgctgggattacaggtgtgagccaacgtgcccagcccagttttactttgaagatgagtcaatggccaatgagagaagactaagtggaggagtcttcacccagcccatcagttcagcaacacacaataagggcactttctctccaggggtgcaacaccagccattgctgtcttgaatcattttcccttagctctcacaatttatattctctgtctctctttggctacaaagaaaatcccccctgcacttcaaacagcagaggtctgccagatactccaccctcatcaatcttcatttaaatgccagcaacatgaccctatgaataaaggtggtgagttaataaatca

SEQ ID NO: 103574 - DNA, 604 bp, Homo sapiens
aacatgccaggttcaatcccatctcaggccttcatacttgctatttttgctactggaaacacagctaattccagatcttcacgtggctggctccttttgtcattcagatcttggacaaatgtcatctcctgaaagaggctctcctcagccattctactcagtgcttctcccctggcttcacatattactctgtattatattttcttattttctttacatgttttttcatgatctaaaattaccttatttatttctttgtttactgttaagttcctgtttttcagcaaagacagattgccttactccccatggattgtccaggtttagaaaaccatgtatactaggtattcaataacaaataagaaattgtttagagtgtawtttttagaaaattaagctaaattcttgagagaaaaagttatactttactgttttacaatgtctgaatttatttttactatactatgtattgtttatataataattaaatgttaataaataaataaaatcacatacaccaaatgcaatagtacttgcttgttttctattctttagatcaaaaaaggagtaaaataagaccctaccttattttagatagggtcaa

SEQ ID NO: 103575 - DNA, 559 bp, Homo sapiens
tacctagcccacctttataagaagtagagaacattttctgatagggactgttgagctacaaatctgtaaagtcgagttgggaaaggtaaccagctacagttaagcagtttaactttagactctgtcaatgtcataattttacatgtttccaaaagaatacgaccagaagtacaacatgtaggcagtttgggttaggttgaagacagtccctttagtctgcaagactctgcataactgcagaggaaaatgtgagtttgaagttctggatgtgaggccaaaattagagagataaagcaaagataaagtccatgaaaagaggcaacatgtggataataaaagtggactctgcagaggacacagayttctgtgtccccatatgcaagcaatatgaggatctaagatgatccttgggcctcaacaggacagctgagtaatataatcaagatggggagaccctacacagctatcttcatgacagtaaaacatagtccagcccttttgttctaataaaatggctgcatctttcgggtgcactgatatgttatgttctatgctaagc

SEQ ID NO: 103576 - DNA, 584 bp, Homo sapiens
agtgaaagtacattgaagccttcatcagaagcaggtgctggcaccatgcttcttatagagtctgcagaatcataagccaaataaacctcttttctttatatattccccagcctcaggtatttcctttatagcaacgcaaatggacaaagacactctaggtagtgtcagaactgggttacastccatactattgaggtagagatgaagcagcttggaatttgtatccagccgggcagaaatccaagtggcttgaggacaaacacccaaaacttatgtctggcatctgaagtggggacactcttgtgaaggactttgcttttatctgtggggtgtgtgctaacttcaggtagttagtttcagaactactcaatagttctgaattgtggaatatccagttcatatggaatgactgatgtcagaacctaaaaccaaataatcaatcacttattgaatatccgactatctcttcctgtatcagaaaaataattccaacaagttatattaaatatatatgcacttagagtagctttctttaaattcccaacattaattgcctaaattatttccctccattataaagttga

SEQ ID NO: 103577 - DNA, 582 bp, Homo sapiens
cgtgatgtttggttttttgttcctgtgttaattctctgaggataatggactccagctccatttatgttgctgcaaaggacctgattttattctttttttatggctgcatagtctcccatggagaaaagggaatacttatacactattgatgtgaatgtaaactagtttagctgtatggagggagctacctatccggaaaacaggagatttctaaaagaacttaaaacagaactaccattcgacccagcaatcccattactgggtatatatacaaaagaaaataaattgttctaccagaaagatacacgcgctcatatgtttattacagcactatttacaatagcaaagacatggaatcaacctaggtgcccataaacagtggattagataaaatgtgtttcaccagtgcaaccctcctccacaccaaaccccrgcaaccatgtatatttttactctctctgtagctgtgttatcctagaatgttatataatcatataattggaatcatacagtgtgtagcttttcagactgtcttctctacttagcaatgtgtattaaaattcttcctctttttgtggtttg

SEQ ID NO: 103578 - DNA, 585 bp, Homo sapiens
tgcacttcaactgttcctgccagccgtgtgctcctccatgcttactctgattccttcatttgctcactgtcttcaactctaacttgtttccttactaggcccaacatgctcttactttacagttcaccacgaagtagtatgacataatagaatgaacacaagtttgcaaatacagtttaagagtcattgcatgacaagttcaggaaagatgagtcttccctttccttgggcaagaattccaaatgtcaaaaaaaatggggcccctccagattagtagatgtmattgccttattcagagttgcttaggaagaacttgcacaatacagcaaaatatataaaacacatttagtggaaaacaagtgcagctagaagatgggaaggaattggattcatcctagtttagtgcttctttttattcttaccaacaatcattttccccggagaatttggtgaatcttttttactgagtcttgtttcctaagtgcactttacatgaaaactctttcctagcagatacatctcactcatttcaataacgtcttttattacattccaagttattaatgttaatttttagacagaaag

SEQ ID NO: 103579 - DNA, 592 bp, Homo sapiens
ggcataatgataggtccttgaattctgagatttgtagtgttgttgccagggtgacgtcttatccccctggttgtttagcatggccagacagcactcttacatattgaatctttttggtgctgcagtttcaggcaaagcacaatttaataggtgygggcaatatatatatatatatatatatatatatatatgaatacacatacactatatataatacatatatatgcacatatgtgtgtgtacacacatagatactatttaaactgtgacataaaaacaacagacatattgagttgaattctgtacgttaacacattggagatgatcaatgctataatttgtgctgccagcttaattcatttttgcacagctatcggaaaatcctgccatctttgtttagttggaattttcctgaaattacaaggcaagcttataaaaaccagttatttataatgtgtatctgtttgaatcagactttctatatactgtgcaatcaaaggagaataaagaaagaatctggatcctaagctgatgaaatatggtgaaatgtgtatgctaagcaagtgaagttgttgtagttgcctgcagtaag

SEQ ID NO: 103580 - DNA, 611 bp, Homo sapiens
cacatagtagtgctataattagttttttgatgaacctctatactgtttttcatgatggtgtaccattttacatttccaacaaaagtgtgtaagaattccaaaaactacatatcgtcaccaacagttattggtgcttttcttgttgtcgtttctttaaataatactaatcttaatattgttaggttatatttcattgtagctttgatctgcatttccctgatgagtagtgatattgagcatccattaatatacctggtttccattcatatgtcttctttggagaaatgtctattcaagtttcttgcccatttttaattgggttatttggttttgtttttttcrtcttgacttgtaggagattcttatatattttggaatattgaccccttatcagatacgtggtttgcaaatattttatgtcattctgtaggttgtttttactctgatgatttcctttgctgtaaaggagcttttgatttttatgtagtctcacatgtctatttttggttttgttgcctgtacttcttttgtccttttattcttagttgacacacaataattgtatgtatttatgagatacatagagatattttgatatatgcctaaaatga

SEQ ID NO: 103581 - DNA, 462 bp, Homo sapiens
tctgggggctcagcaacatggactttgaatcaccgctgctgagtgtccaacctgccaacagcagacatcaacacagcatttatttggcaccattccctgggagtaccagtttagccacctggtgamaagttgattataaaggatcactttcatcatggaagggacagaactttgttctcactggaatgaatagacacttactctggataaagatttgtttttcctgctcacaatgcttcttccaaaaccaccatccagggatttacagaatgtgttattcacatggtgtttcacagagcattgcttttgaccagggaactcacagcaaatgaagtgtggcaatgggctcacgctcatggaattcactagtcttgcaaaattccccattacctcgaagcagctgtcctgataaagtggtagaatgaccttttgaaggcatagttacagggccagctgggtgga

SEQ ID NO: 103582 - DNA, 462 bp, Homo sapiens
tctgggggctcagcaacatggactttgaatcaccgctgctgagtgtccaacctgccaacagcagacatcaacacagcatttatttggcaccattccctgggagtaccagtttagccacctggtgacaagttgattataaaggatcactttcatcatggaagggacagaactttgttctcactggaatgaatagacacttactctggataaagatttgtttttcctgctcacaatgcttcttccaaaaccaccatccagggatttacagaatgtgttattcacatggtgtttcacagagcattgcttttgaccagggaactcacagcaaatgaagtgtggyaatgggctcacgctcatggaattcactagtcttgcaaaattccccattacctcgaagcagctgtcctgataaagtggtagaatgaccttttgaaggcatagttacagggccagctgggtgga

SEQ ID NO: 103583 - DNA, 462 bp, Homo sapiens
tctgggggctcagcaacatggactttgaatcaccgctgctgagtgtccaacctgccaacagcagacatcaacacagcatttatttggcaccattccctgggagtaccagtttagccacctggtgacaagttgattataaaggatcactttcatcatggaagggacagaactttgttctcactggaatgaatagacacttactctggataaagatttgtttttcctgctcacaatgcttcttccaaaaccaccatccagggatttacagaatgtgttattcacatggtgtttcacagagcattgcttttgaccagggaactcacagcaaatgaagtgtggcaatgggctcacgctcatggaattcactagtcttgcaaaatwccccattacctcgaagcagctgtcctgataaagtggtagaatgaccttttgaaggcatagttacagggccagctgggtgga

SEQ ID NO: 103584 - DNA, 581 bp, Homo sapiens
gtggggaggcaggctggcccttcctccatggcagcagtagagagcaatgtagaagtcaaacccagagactggggaatctgggcaaaggtactgagtttcaagtttctctctgttgtaattctcttttctctccaagcctttggtaatgtcttgttaaaagtttcagcctagtctgctttatcacaacagggaaatggtggaggagtctgtacagcccatgctggggcacaacagtggagttaggaaagttgtaccctgaaggaagcaggtgttcagacataggagtcccccatgtggggccaggcagctggcagagatgaaaagtacagaggaaatgggtggaccacgtaagtgttccccagcrgaattggataaaatcctgatttcacgaagtcaagtaggatgaggctcaagctacaatgatggtgcattaaatagaagcatgagtttacaaactggtgaagtctgacatacttgagttctattagacactaatgtctacttcattcagctataaaggacatactattatagtcagatctcactaaataaataaattcaattcatagctatgatcgtag

SEQ ID NO: 103585 - DNA, 602 bp, Homo sapiens
aattatgatgtgagctcagtaagacacaacctcacgattggacatgcggaggtgactcaggcccaagtcagggttacagctagcctcccggtaaacaactgacccatccttcctgrgctcttctccccaggatttcaacagcaccacagaaatagccattttgctcatggttatttcccaggaccacaggatttgcctaagtcactgggaggctatgtgtctgttctgagccttcccactctcctaaagggcagatgaagatcagagctttgcaccctgtgatgccattttaatcaaccctgcttggttttagaggattgctcctgtgggtcacttgaggcaggctccaccttccccaggaggagtggcagagtccagccagcgctcggagctggaggcccacgtgggagcagtgagcggctgtaagcaggggagggtttggggtgggctccggtgggtcagttggggtgtactccttttctgtgtgtgtggatgggggtgggggttctggtaaagcttatcaggcttcgcagtcacctgtgatgtgggcttccttctgggaagaaaggaaggagtgggatggggctgtcagcttttcatcc

SEQ ID NO: 103586 - DNA, 602 bp, Homo sapiens
aattatgatgtgagctcagtaagacacaacctcacgattggacatgcggaggtgactcaggcccaagtcagggttacagctagcctcccggtaaacaactgacccatccttcctgagctcttctccccaggatttcaacagcaccacagaaatagccattttgctcatggttatttcccaggaccacasgatttgcctaagtcactgggaggctatgtgtctgttctgagccttcccactctcctaaagggcagatgaagatcagagctttgcaccctgtgatgccattttaatcaaccctgcttggttttagaggattgctcctgtgggtcacttgaggcaggctccaccttccccaggaggagtggcagagtccagccagcgctcggagctggaggcccacgtgggagcagtgagcggctgtaagcaggggagggtttggggtgggctccggtgggtcagttggggtgtactccttttctgtgtgtgtggatgggggtgggggttctggtaaagcttatcaggcttcgcagtcacctgtgatgtgggcttccttctgggaagaaaggaaggagtgggatggggctgtcagcttttcatcc

SEQ ID NO: 103587 - DNA, 602 bp, Homo sapiens
aattatgatgtgagctcagtaagacacaacctcacgattggacatgcggaggtgactcaggcccaagtcagggttacagctagcctcccggtaaacaactgacccatccttcctgagctcttctccccaggatttcaacagcaccacagaaatagccattttgctcatggttatttcccaggaccacaggatttgcctaagtcactgggaggctatgtgtctgttctgagccttcccactctcctaaagggcagatgaagatcagagctttgcaccctgtgatgccattttaatcaaccctgcttggttttagaggattgctccygtgggtcacttgaggcaggctccaccttccccaggaggagtggcagagtccagccagcgctcggagctggaggcccacgtgggagcagtgagcggctgtaagcaggggagggtttggggtgggctccggtgggtcagttggggtgtactccttttctgtgtgtgtggatgggggtgggggttctggtaaagcttatcaggcttcgcagtcacctgtgatgtgggcttccttctgggaagaaaggaaggagtgggatggggctgtcagcttttcatcc

SEQ ID NO: 103588 - DNA, 602 bp, Homo sapiens
aattatgatgtgagctcagtaagacacaacctcacgattggacatgcggaggtgactcaggcccaagtcagggttacagctagcctcccggtaaacaactgacccatccttcctgagctcttctccccaggatttcaacagcaccacagaaatagccattttgctcatggttatttcccaggaccacaggatttgcctaagtcactgggaggctatgtgtctgttctgagccttcccactctcctaaagggcagatgaagatcagagctttgcaccctgtgatgccattttaatcaaccctgcttggttttagaggattgctcctgtgggtcacttgaggcaggctccaccttccccaggaggagtggcagagtccagccagcgctcggagctggaggcccacgtgggagcagtgagcggctgtaagcaggggagggtttggggtgggctccggtgggtcagttggggtgtactccttttctgtgtgtgtggatgggggtgggggttctggtaaagcttatcaggcttcgcagtcacctgtgatgtgggcttcyttctgggaagaaaggaaggagtgggatggggctgtcagcttttcatcc

SEQ ID NO: 103589 - DNA, 645 bp, Homo sapiens
gttcccagggctcaaataatatgtaattttgaagaatggttaggacagtttggttagagtagagtgaaaaggggagaaattgataggagataaactcaaagacagaggcagcagttcytgcagagccttgtagaggtaaagaggtcatattttattctgaatgtgataagaatctactgcaggaacaggggaggacacggtccaattgatgtttgaaaagattattctggctattgtatggaaagaaactgagggggcaagggtaggagcaggaagatcccctaggaggataatgcctgttgccgaggaaacacagcctcatttgggtttcagataatgccaaaaatgaaacaaaaaaaattcacagaaaatacagaatgagttcagcatgtggactacattgatgttgccttatactctgtgtcttcatcttccttctccttttctgtttcttcacttttgatactaatagcccagagctgacctcactgtataaaggacacagtgatcaccactagggcaggaaaataaaattaacacccaactcttagaagaccccccacaggaaacaaaagtagctgatgctgtggtttacaacacacaatcgcaaacaaatggataagaaacaaaaaaaaagaaatagaa

SEQ ID NO: 103590 - DNA, 645 bp, Homo sapiens
gttcccagggctcaaataatatgtaattttgaagaatggttaggacagtttggttagagtagagtgaaaaggggagaaattgataggagataaactcaaagacagaggcagcagttcctgcagagccttgtagaggtaaagaggtcatattttattctgaatgtgataagaatctactgcaggaacaggggaggacacggtccaattgatgtttgaaaagattattctggctattgtatggaaagaaactgagggggcaagggtaggagcaggaagatcccctaggaggataatgcctgttgccgaggaaacacagcytcatttgggtttcagataatgccaaaaatgaaacaaaaaaaattcacagaaaatacagaatgagttcagcatgtggactacattgatgttgccttatactctgtgtcttcatcttccttctccttttctgtttcttcacttttgatactaatagcccagagctgacctcactgtataaaggacacagtgatcaccactagggcaggaaaataaaattaacacccaactcttagaagaccccccacaggaaacaaaagtagctgatgctgtggtttacaacacacaatcgcaaacaaatggataagaaacaaaaaaaaagaaatagaa

SEQ ID NO: 103591 - DNA, 618 bp, Homo sapiens
gtttaattcacaaacaaggttttatagccattaaactggaaccagtccattacttatacacctttgtggttttttcaaaacactttacctttaaacactttgaacctaatggatcctggatgaaggtgcaggtagagtcatttcccgtgatgaaatacctgcattagtcacgagtcattatttagtaaagacaggaaataaacaaagatgcatatgaaacaaaatyattctgtgacctccacctgaggctttttgctttgtgacaaaatcaaataatcgacttatttaaaaattatgtattattaactttctaattgaggcatctggtagacatttcgtgaagattttttgctatttaattaattaagggtggatgtggtcctgtggtttgtaactattcttaaagatctctgtcatcttcttttaaagctgagatgcccaccttaagttgggttccctcagaagcaaacaggcctgaggcaagaatttgaatgcaaatagttttttcaatggctaccccaagaagaaccagaaggaaagccaggaagcaagatgggaaaaggaaaaaaaaagaaattcaccaaattttgatgagcaagttacaactttaggaaagta

SEQ ID NO: 103592 - DNA, 609 bp, Homo sapiens
agcactttcgcctgtaattttcaaacaagcactgtaattgcgaagtaagcagaagccagcattgctaagcctggctttgtactcattaccagtcaccattatccgctcattaatgctggtcctagagctggcaaaagcccactcagcctcatcctagttactgtgctcaaatgcaatggagcaaaaaccattaygattatctactgcactaattcaaagctatgggatacggcagtaggtaaaaccactgcctctagtgtctacctgcatggattcaagtccaatttgagtccactttgtcctgtacaatattggtcaccttatttaacttatgtgaacctagatgggactcttccactgtaccatgtggataatgacagtacctatctagtagaattatcatctggtttaaagagataatccatgtaaatcatttagcacagggttggcccatagtaagcacttaacaaaacctagctgctactattttatataatgatcatcactattctgaccatcaaatggaatcagcaagactacaatgggtaaggaaagagccttattttgagaagaaaaaaaggtctccaaattttcagaacgagaaaaata

SEQ ID NO: 103593 - DNA, 573 bp, Homo sapiens
agcaatgattttcctttaaaccatcaaagcagagacttatgctaactgtggagacaatgagaaaatggtcccttctactctgcaatttaaatttttattctagataaactgttaatttttttaacttctcatctttataagtagcttaaaacaaaagaaggttagtacaaataaatatatagaaacataaactgagaaaatgaatgctgggcaatacatgatttcattcacctgctgctttttttttttttttttttgagatggagtcactctgtcgcccaggctggagtgcagtagtgtgagatctcagctaactgcagcctccatctcccaggctcaaaagattctcctgcctcagcctcctgggtagctgggatgagagttacccaccatcatatccagctaatttttgtatttttgtaaagacagggtttcaccatgttggccaggctggtcttgaactcctgacctcaggtgatccacctgccttggcctcccaaagtgctgggattataggcatragccactgcacctggcctgctgcttttttaaaaaaatccatttaaggaaatt

SEQ ID NO: 103594 - DNA, 584 bp, Homo sapiens
ccaggcaggagctctgggaggggtccgcagacaggaagccctcttcctgcactactctctccagttctgtcagataaagatgattaaagctacctacaaaagtatggagaacatttaggaatgggcatctatggctgtgttccactgcagctgtttccatgctaaactgcttgggctccacagattcaagctctgccactgcctacttcttgggcagttccccctgtgaactcaaatctcaatgggggttgtgtgcattcctgcagttagaaccctggtgacccatgttgagagtgggctgctgtgcatttattycacacaccccttccttaggagtcattcaggaacgggaacaagtcctggtactcagcaaacccatgtggggtttccggcttccttccccttcggcctcaatgcccgtgttgtctgtctatctgctcagtaaattctctctgaagatctatccagagtatgccagtctactcaatattctggtctctcttggtgggagaagttcttcatgcctgcttgacaatttctttaacagatatgggatatgataattttttcttatttgtgttcat

SEQ ID NO: 103595 - DNA, 602 bp, Homo sapiens
acagccgttcacatcacccctccagggcaggaattgttatctaggcatcacaaataagaagaatgacataaactctaagtagcatttccagtgtcacccagcatggaggtggtgaggctgaacaacaaactcaggtaataggctcccaaacccttgttcttgccccacccactgcctaataccaagaccaacttaaagatcacaataaagacttaaggagctcctttcastctctgacaatgtcctcacttaaaaggaagtgaaatgggtttttgtcagagtctgtgatctaattggaacagcccaaagggattgctattaatgaagacatattcttctcttgaaatacctttgtcgtagtggtctagtagtcacagttctcaggatggcctttgaccataccattgcagcatttccatacaaacatatttgtagcagttccatacaaacagatgctgcctggaactcccagggcaggacagttgcagttgtgtgctaaacaactatggttttctgaatgaaatgtagcaaaagaaatagaggagcttctgctttgtatacctgcatggcagatttatatacacattatattacacatgcat

SEQ ID NO: 103596 - DNA, 600 bp, Homo sapiens
ataaacacatgtgtgcaagtatctttttcatataatgacttattttcctctgagtagatacccaggagtggacttgctggatcaaatgttagagcaacttttagttctttaaggaatctttatactgttttccatagtggttgtatgagtttacattcccactaacagtgtaaaagtgttctcttttcaccacatctccaccaacatctrttatttttggattttttgattatgaccactcttgtaggagtaaggtggtatcacatggtggttttgatttgcatttccctgatcattagtgatgttgagcattttttcacatgtttgttggtcatttgtatatcttctttgagaattgtctattcatgtccttagcccttttttttttttgctttttgtctttctctttatttttaatcttttccattttacaagagatgctcatttaaacaacccagagggtggatttgaaggggaaatttttaaggattatccccctcctcatttcttgtaagaacagatttcccctacacagctaagtagcagtagcttccccaacatcccctggaaagaaaaaaaaatgttaaaataggccaggag

SEQ ID NO: 103597 - DNA, 592 bp, Homo sapiens
attgcagccctctctgttctgatttccaggtcgggacactgtaagggtttgttcctatgtcatcttgctggaycttcgtctttcctttcttgcatctctgtgggagatcttacctgcagttctctattggctacactcctgcctccttactgcttatgcttttgccttttctgtcttctctgttgtctgtttcactctgctcagtgccttagaaatgtcaggactgccttcctcctgccactctttgggggatgcccacgtggtggtgccgacctacccttgaatccaaagtacccttgggggtgagtctccccatttggagtcacattgccctctttctttccattctggccaatatttcttgttcttctggcctgcttttggaggaggaggacccacaggagtgtggctggttccctagtgatatagtctcttcagctttgtgatacttatggcacctgcccaagccttgggcttcatatacctcagcaggtctgacatatttctcaaatgtagccattccctcaggaattcttttttctctagtttatgcctcacggtcaatccaatatgtctgtacaaaattgaacct

SEQ ID NO: 103598 - DNA, 541 bp, Homo sapiens
tccctattttccaatgaataactcatgattttcaaaagtcaatttgatttaaatgctgcactcactttgctaatgctgataacagtgctgacaacataggagttgtgtgccggggatagttgtctgtagttcattttgcaccctttgaacattctgctcacttagatgactgcagctcaacacaactgatgaaagatgagatgatgagtgagcactgtgacatagcacaaaggatgaaagataattattcattatgacttatgtcaacatgtggccaatatatcacctcagcattatgcctaaatatgagtggccatatatcataatctcaatatattataatcttagggactgagatctcatggtctcagtttccacccttatttgtatattaggctcatatgattgttataagttcagmctgcagtttaaaaaatcaaacagtataaatttctctgggctttaagattcctaagatgaatctcagattcctgagcaccatgtccttgaacaggacacaccctagaatataatctatatg

SEQ ID NO: 103599 - DNA, 610 bp, Homo sapiens
ccaattgactttgtgtttccaatattgatgcatgattcatttggtcatctttcagggctggttgctatgtgactaaaacagtttgtttaattaattaatgtattttagactttgaaattcatttgaaattttctttattgaagtatagatgacaagtaaaaatcattcatatttaaggtgtaatatatacttaaggtgtacaatgtgatattttcatatatgtttacatcctgatatgattatcccaatcaaactaatgaacatatccaacacatgaaatagttaccattttgtgtgtatatggtgagcacatttaagatctactctcttagtacatttcaagtatataataattattaactgtagttaccatgctgtacaatagatttccaaaacttactcataactgaagttttgtcacctttgactcaaatcccattcccctggcaaccaccattttatcctctmtgtgttagatttctttagattctacatataagtgagatcatgtgatagaagaaaaacaatcctacaatctgtatgaaaccacaaaagaccccaaatagccaaagcaatcttgagaaagaaaacaaagctgaaggcatcacac

SEQ ID NO: 103600 - DNA, 580 bp, Homo sapiens
gaacctgtcccaggtgaatgaagagcttttgtaaaggttctgtggtaggaaccattacaatcaatttcaggaattttagtatgcaaagaaatctgagcatgatgagaaagaggaaggaaatagagctaaacctgggaccagtttcaacacttacaattttttcctctaccagaattcccaagttgatactaattttcaacctatggttgaattcatttggcctcagtgcccatcatacttcctttagctaaagtttcttcactcattttttggttgggtaaagtttatcatctggtagtttatttgagaatattttgtatgaccaaaactatctgttgcctttctacttaaatgtctattggttaattataaactcaagggtatgttttatttctctaackatttgaaggcatcttaccattgtcttcttgtgtggagaatccaaaggccagacaggtttgttttgcctgatatagtaactttatgaaattttgtaacaaacatcagaggaaattcttgtcatgctatcatgctcaaatgttgtaaataatatttttaacaggacagtgagtaaaaggtt

SEQ ID NO: 103601 - DNA, 565 bp, Homo sapiens
atgtatgcattctgaaaacttgcaaagaaaagaaatccatcagctttattacttgtagttggattatcagattatattctggcaaggctaatgaaaacttatctgctctatacatgttttttccctctgagaataatgacagaatcaaacattaagaataatgcactcatgtttaaacatgactcttccatttgacaggagtagccttggcaaactgccactcatcaacactttytaaactgataggggtattccacatctttccagcaacattaaaagataatttgcaaaattatcatctcacagcgaacttgaagggaattttctcattctaataaaaatagtatctcttgaagttcatggaagctcagtgttcacaaacagttaaacgtgctttcttttcttttttttctttctttttttttttaagatggagtcttgctcttgtcacccaggctggagtgcaatggcatgatctcggctcactgcaacctccgcctcccgggttcaagcgattctcctgcctcagcctcctgagtagctgggattacaggatcccgccacc

SEQ ID NO: 103602 - DNA, 540 bp, Homo sapiens
cagcttcttattgggtcatttggctctatagcagacacatctggggccagcatcactctgatttcagcctccatgtcatggagcctcccactgccagaaagccagtctttccacattctacccagggactcatccaaccatgtgggaaagcctggaatgrtggagaaatgccccagcctcctgaccttcatggaaacaaccctggaactctcaggggtcttggaggtcccaaaggaacccagtcttcagtacctacagcagtgaccttgacaatgcccgtgaactgggtttctacctccctcccccaccaactctgctgctggcatgaccttctagatatactgcctgtacccaagtccttgtctcaggctcactcttcatttcttccttgtcgatttgtaggagctatttatgtattctgaatagtattcctttgtcagttatattattgtcaatatattctcccattctatgagttttctttttcacttttttttccctgccgtcttttgacaaacagacattctttagtttaatata

SEQ ID NO: 103603 - DNA, 540 bp, Homo sapiens
cagcttcttattgggtcatttggctctatagcagacacatctggggccagcatcactctgatttcagcctccatgtcatggagcctcccactgccagaaagccagtctttccacattctacccagggactcatccaaccatgtgggaaagcctggaatggtggagaaatgccccagcctcctgaccttcatggaaacaaccctggaactctcaggggtcttggaggtcccaaaggaacccagtcttcagtacctacagcagtgaccttgacaatgcccrtgaactgggtttctacctccctcccccaccaactctgctgctggcatgaccttctagatatactgcctgtacccaagtccttgtctcaggctcactcttcatttcttccttgtcgatttgtaggagctatttatgtattctgaatagtattcctttgtcagttatattattgtcaatatattctcccattctatgagttttctttttcacttttttttccctgccgtcttttgacaaacagacattctttagtttaatata

SEQ ID NO: 103604 - DNA, 540 bp, Homo sapiens
cagcttcttattgggtcatttggctctatagcagacacatctggggccagcatcactctgatttcagcctccatgtcatggagcctcccactgccagaaagccagtctttccacattctacccagggactcatccaaccatgtgggaaagcctggaatggtggagaaatgccccagcctcctgaccttcatggaaacaaccctggaactctcaggggtcttggaggtcccaaaggaacccagtcttcagtacctacagcagtgaccttgacaatgcccgtgaactgggtttctacstccctcccccaccaactctgctgctggcatgaccttctagatatactgcctgtacccaagtccttgtctcaggctcactcttcatttcttccttgtcgatttgtaggagctatttatgtattctgaatagtattcctttgtcagttatattattgtcaatatattctcccattctatgagttttctttttcacttttttttccctgccgtcttttgacaaacagacattctttagtttaatata

SEQ ID NO: 103605 - DNA, 611 bp, Homo sapiens
acttttccttaaagggccacatagtaaatattttagtcctgtggacatatagtcttttgctgcaactactcaatagctactactgttgaagtatgaaagcagccataacaataggcacattagtgaacattaccgtgttccagtaaaactttatttacagaaacaagtggaatatattttgccaacccttggctttgaacagcaaacatttattacttcacagtttctgtagtcaggaatccaggtgcagcttatctgwgtgcctttggctcagcttctcctcaggttcagtcacatggtcagccagggctacagtcacctgaagacacaggactagagaattcacttcaagctaacccacatggttgctggcaagttgcaattcattgccatgtgggcctgtccgtgtgctatctgagtattctcgtggcatcacagctgtggatgttagagagagagtaagagagggacaagacagaagccatagtcttttttataacctaatctcagaagtggcatcctattgctaaattagaggcaaacaataagtttagcccgtactcaaagagagtaggcgctacaaggacatgagagtcaggagctcaggatca

SEQ ID NO: 103606 - DNA, 581 bp, Homo sapiens
ttcagtttgtttattacagttcttggaattgaaccattcaataaaataatgatgatactaagaatgttgataatacagctacactgatggatgtagtgcttctatgtgtcaagcactcttccaatcacgkttcaggcactaaaaatcttaatcctcacagaaaacctatgaattattttaatctttgcatgaaacttaaggttatccccattgtgcaaatgtatgtaagttaaataacttgtccatatcatatagcttttaagggataaacttgaatttgaattcaagttcaaactcaaacttgaatttaaactcaaggttatatggctctttagagattggacagttaatcctcctcttaatgccagcttaaagttttttttttattttttggagcaatttaaaagttactaagaagttgtaacatcaatacaatttttaaaaaactgtttgagaggaagtggttaatgtgattgtactacaacccctgaaacttctgtgtgtaatacctaccaccaagattttctcttatattacctcaacacaaccatcaaaatcagaaaattgaaattaatgccttt

SEQ ID NO: 103607 - DNA, 520 bp, Homo sapiens
ccactttcttaatattaatttactcttatagtttgtttaatataatattgattaaattagtatttggattaatgatcttttaaatgcaaaggaactaaaacagtattctcttaatacagaatgataactgaaagactaaaatgtttggaaatcagtttttaaagtattttattctattgttctatttcatatatcattacatatcaaagtatatattatactaatttrtactatattaaagtataatcataaatatgtagaattcaggtgttacccacctacatattgtacacacacacacacacacacacacaaacacacagatgtatatataacataaatcaaatatatgtaaatgatctcaaaaaaagcatttattgaatatttgataaatgccagatattatgctaggtacagaaaagcaagttaaaaaagcatgtactccaattttcagggactcagttttaattaggtacagagcttgctacttggtttgtaggtcctggtgaaaaaatataat

SEQ ID NO: 103608 - DNA, 468 bp, Homo sapiens
tgaatattaagcaagatcatatatgcaaaacagtgagccaagaggctgccccacattacattctctgaaatggtagttattattaataaaccactgtacattttagaacaaaggactggtaaagccatttctaaggatgattaatttagagttctagactggagggagttggccaacaggctaagggatgagacaggaggtgttgacgattctacagcttaacatgcagagtttgygccagagtggtgacgatgtaggttcttaaaaagaaggaaaagagaccttacatcgattaattgatttttaggagcaagcactgtgctctgtgctcacatttattaattcacgtatccaggtttgaaacttagaattaaccacaaagcaacagtaagaaaagatggaataaagcactttactttataggctgtcatggattacacaggtagtagaaatagaaggcctggagtc

SEQ ID NO: 103609 - DNA, 566 bp, Homo sapiens
gacaaacataatttggtcattgtgagcatgccagctcrgtcaactattcaccatacatgatgccctaaatataactctaggttttcttatgcccaagagagggacatactcttgggtgtctggactagggaaacatgcatgaaaaaccatttggccactctacatcttgttactggagaattgaaaccatctatattcaaagatattattaaaaggcaagaagttaaaaaaaaaaagaacattgatctcatgattctttcattatatccattttacattatcctgccttatacccacaattgaagagttgccactttatacctaggatagaggagttgccacatcatgagcatgctggcaccaagtggaggcacatccaggtttttcagcattctcctggtaaggttgattagctctcggaagctgagcatatgtttaaaatccttaaccaacatcacttagatttccttatagttgcatctcagtctatagctaaatggacatgaaatcaatatgcactcatggaaagctagcccccgtgagatacattctaaataatgcagcat

SEQ ID NO: 103610 - DNA, 648 bp, Homo sapiens
taaacaatgtggtagagccttcagccacttggattcttttgagaaacataaaataactcacactgggacaaaactctgtaaatggaaggtatgtggtaaggccttcagatatttcagttatctttgtaaccatgaaaycactcatactggagagaaacactatgaatgtagacaatttggtgaagcctttagttattccagtaactgctctaaacatggaagaactcatactagaggaaaacatgaatgtaatgaatgtgaaatcacattttattccctcagttcctttcaagcacataaaaaactcacattgttaaaaaatgctatgcatgtacaaaatgtgaaaaagccttcacttattccaactcccttcagacacacgaaaatctcatactggagagaaaccctttagatgtaagaagtgtggtcatggtttcagttattcctcttacttttgatatcatgagagaactcacactggagaaaaaccctatgaatgtaaaaaatgtggtaaagctttcggatatagtagttccctatgaaaacatgacagaactcatactggagagaaaccctatgagtgtaaggattataggaaaatgtttagttatgccaatcatcttcgtagccatcaaagaactcacacca

SEQ ID NO: 103611 - DNA, 639 bp, Homo sapiens
taaacaactttcaaaaagatgatgctcctgcatctgtttcttctgaaactactgacagcaacaaaggtcagaagatgttggagaagatggattagaaaaaaagagagggtctgggaaaggatggcggggaatgaaaactccaattcagcttcaacttcagcctcagtgaacacattaggcgtggggacatgcaatccatactcaattgaagatgttcacattttccaaaacaaaagcaaacaaactgtgacaaagcatgagataggtttgctgaaaacttcccagaaatgaaaccttaaagagaagacctagggaccacaccttgggtaaaagggactgtagagtgaggttaatcatagaagaaamctcaagctttaaaaaaatagagtttggaaactcttatttattttattttaacaaaaaccatatggttgttccaatgaagattaactgacagaatctgtggggagagcacaggtgatggtatttttttaaagtagtcatgtgattatggttggacgcctaggctgagagacacttagctaagccttgcctcttaagtttcaatgtacatataaatcatttctgattcctctctgattacattactctcttagtaatgtaattctgcaggtttgg

SEQ ID NO: 103612 - DNA, 589 bp, Homo sapiens
atgggagtgctgccttccacatagactcctgaattggacctctctttccttgataatgccattgaggcaaaggtgggctaaagcccgttccatgccaagcaagttgcatggcagattgggattgaatcccagtgtgttgaagtgaagagatgttaaagtttcgccaccagtgccagtgaagtttatgccatgtggtctgattctcatctctcccatcttaatgaccacagggaccccagtcaataatgtctcccattaacatggactattgtctagctaaggggccaagacagtgggcccaaggaggggggtgagaattatcaaagggagcccattctgtataatcagtacaatttgggtgatggggccaggagtgattagtaactacacaagtaatattaataaagctaaggtctaataggtacataattttttwatggtaactcaaccatgcttgggatcaaactgcaaggcaactgcagttgagcaatgtatcctgggtgacacataaaggaagtccctccaatggagtggtataattgataccattgttatgagagtctaattgctctgtgtcagggggagttag

SEQ ID NO: 103613 - DNA, 402 bp, Homo sapiens
aatgtgtgcattaatagctctcaaatcatgtagcagtcatcattttcctgactttttaggaattacaaatactgatgaattccaggtgctaactgactcttcaatatgtcctgcatccatttgctcttttactagckgatggaattgtgttagtttctcctgtgataggggccactgatccacccatacaggttttttagtcagccactccagcggtaaaacagtagatgggggagaaatatcagtgactcccatcagaaattctgatgacctagcccttttctatctgtttgcccagctattgatataggatcagtgtttccctgtagggacttttctaagccttttctgcctgacatcccattttctttaacattttgaaccctggattgtcaatagttt

SEQ ID NO: 103614 - DNA, 555 bp, Homo sapiens
caggattatattacgtaaataytcatgtaaaaactcataaggaaaagaatagtgtattgtatgtatccatatttctgctctttcaattgttcattctttcttcctgatgctccaagatttattcttttatcattttatttctgtttgaagaacttcctttggtcagtttttaagagtagtttcattcattaaaaaattatcttaattttcctttgtgtgtgaatgttctttacttttcattccttaaggataatgtcacccaccaggtataaaattcatggttgacaagtcttttattttggcacttaaaaaatgtatcataccactttcttctgacctccatagttttagatgagaaatcagatttcatttggattggtgtctccctgaaggtaatttgtcatttctcctcaaatgcttgcaagattttattttttgtctttagttttcaaaaatgtaattatgatgtattttggcatggactttgggggcttatcctgtttgttgcataagtgatgaagatgttattgtctagggaactactaatttataata

SEQ ID NO: 103615 - DNA, 555 bp, Homo sapiens
caggattatattacgtaaatactcatgtaaaaactcataaggaaaagaatagtgtattgtatgtatccatatttctgctctttcaattgttcattctttcttcctgatgctccaagatttattcttttatcattttatttctgtttgaagaacttcctttggtcartttttaagagtagtttcattcattaaaaaattatcttaattttcctttgtgtgtgaatgttctttacttttcattccttaaggataatgtcacccaccaggtataaaattcatggttgacaagtcttttattttggcacttaaaaaatgtatcataccactttcttctgacctccatagttttagatgagaaatcagatttcatttggattggtgtctccctgaaggtaatttgtcatttctcctcaaatgcttgcaagattttattttttgtctttagttttcaaaaatgtaattatgatgtattttggcatggactttgggggcttatcctgtttgttgcataagtgatgaagatgttattgtctagggaactactaatttataata

SEQ ID NO: 103616 - DNA, 540 bp, Homo sapiens
acaagaactccataaacacattattactttaatgatgtaatagttttgtataaatttaatatttctgaaaggactcatctcaaagacagtaggtttagaaattttatatttttgtaccctacagtaataaactctttaacacatttctcaccaatgcccttgtttgtgaactcatttctagaggagaaaggaccttcacctttcccgtaggactgttaataccatcaagaagaacaaataacttttaccctttcagatctcaggggaccactgctctctctttgtttcatcaaaggtgaraactgtcagtaggcacatttaatcacaggccatatctggaatatcttctgggaccaaagtgaacctaaagccttactccaagctctgaagtaggttactggactttactggttggtaaagaattgtgacatcggttcttatcagttcttattgtgggagtattgagacataatacaatatagttttaaaatagaatagtatagtttttaaaaagctacatcttcaaagctgaatataacc

SEQ ID NO: 103617 - DNA, 568 bp, Homo sapiens
ccttttgatatgtattttatctcaggtcaaaattctgccctcatggcctcatctcagtcagatcaaaagttttcccatgccaaacataagcttatatattcccattttctgttatcatcagaacatcataccctttttttttttcttctcctccacctcaccctgcaccacgcgttctttttatggatctaggtctctcacctcagattttttgtacttgttgcttctttctctggagctctcatccatcagataaccacatggcttagaccaaattttaactatcagcaagatcttccyacgaaactgtttaaaatatcaatatttcctttcagctgcccgggagtaatttctcataattttatgttgcctcgtcttccactttcaatgcaagtttaatttttccataccagaagcaggactcagtcacccatgacagagtaaccatcgccacaacatacataaatggctcaagcctgtggccagatatcagaatttagaggcgtctctcggcctaggagacggggttcccactttgtcaaggcttcctttaaatgaaccatttagg

SEQ ID NO: 103618 - DNA, 460 bp, Homo sapiens
agtgtaaaagaggatatggggaagaaaatgacatttttcaaatttggattatttatttatgttcctctttgttgtataaatggatttgggggtgccttgccggggtagaaacattacaaaatgtttgtttaaaaaatgaaataaatgaggaaatgaaggtgaagagaartaagttgaagtcaagattaaaattagcactcaaaatgcatgctgtatgatgtatatgattacttgaagaaagactgatttggcttgacgtttctgaagggcgagagcaaagagagaagttgtctcagtgcaagatccacattgtcctgaggataaaaataaagacccagctttctctggcactgagagtggagaaaatttctcctgtaagacaagggccaatgtttactacccatcaaggtgaaagagctaccaagacaagcagacagatgaaaatatgaatccagaattc

SEQ ID NO: 103619 - DNA, 428 bp, Homo sapiens
aaatgacatttttcaaatttggattatttatttatgttcctctttgttgtataaatggatttgggggtgccttgccggggtagaaacattacaaaatgtttgtttaaaaaatgaaataaatgaggaaatgaaggtgaagagaagtaagttgaagtcaagattaaaattagcactcaaaatgcatgstgtatgatgtatatgattacttgaagaaagactgatttggcttgacgtttctgaagggcgagagcaaagagagaagttgtctcagtgcaagatccacattgtcctgaggataaaaataaagacccagctttctctggcactgagagtggagaaaatttctcctgtaagacaagggccaatgtttactacccatcaaggtgaaagagctaccaagacaagcagacagatgaaaatatgaatcc

SEQ ID NO: 103620 - DNA, 596 bp, Homo sapiens
agggaaccataagtgagaaatctcctaggtgttaaactttagagtggcttcaacccaaaatatgaaaaaatgagattaaaacacagaaagtcaagtaatattaagaaaaagatccaacaaacaaaatatcataaatatgcataygtatattctttctgtttaaaccaaatgctatttaaccagtttatactggcatctagtaaaggtgccaatggggaaaaaaaaatcaaagatctaaacaattttaaaactcactttaaataaattatagttctaacagctacgcatctaacaatagctttaaaaattattatgaaaacatattatattatgtcagaaagcaaaaaaaaaatctattcatgaatacatgacttaatatcctcacatttatgatgttcacatatcaaagaccaaattccaaataaaatttcctgactgccttttcttaatgacaaattaaacatcttttactttgatttgacagccgggtggcattctgtatcttctccagagatgttatacgcagtctttccaatgtgacggtattattacccccaaaattttcggcatcatcccgtaatcataaaagacataaa

SEQ ID NO: 103621 - DNA, 585 bp, Homo sapiens
tttaagctcctgatgcttaagggtggtttgtttctgcagcataaccttactgatatcagcctggctgatacactttccatttccctgatcatagggatggtttagagatatcatgtgactcaagagtccttacattacttttacattttgagtggaagaggaaggactttatcttctgagttatcaagttttagagaagccatatttcccaccacaaacagaaagcctgtctgaggtatgaaatagtaaaacgaagggagaaaaagaaaaracatgatggaaaagagggaattctggtgatgtcaagatagggctgccatgagcatctgcacaggttgtgcactgcacaactctcgaggctgctgttacacggtaatcacagtagatttgtgtattgattaaaataattttctagtaggcactagtaaagtattttgaagaagtggagcctttttctaatttgcaaacaattgctgcaaaggctagtgaccatgccataatcaagaccctgattttaatccttgagtccccagagcttctctagctcgataagtacttggtgtaatttattattttggtgaattc

SEQ ID NO: 103622 - DNA, 535 bp, Homo sapiens
gactaattgaattatctcacctgatctataatgtgggtgctattactctccccattttactgatggggtaaatgaggtacaatagattatgtaattggctcaagttatgcaaccaagggacagaaccaggatttcaaacccaggcagttgggtggcagagtccattcccttcaccttttggtttagttcattctcactctgctatgaagaaatacccaagaatgggtaacttaaaaaaaaggaggtttaattgactcacagttccacatagttggagagcctcaggaaacctacagccatggtggaaagcacctcttcacagggcagcaggagagagaatgagtgccaagmgaatggggaggtcccttgtaaaaccatcagatcttatgagagctcactcactatcataagaaaagcatgtgggaaactgcccccacatgattcaattatctccacctggtcctgcccttaacatgtggggattattcagttcaaggtgagatttgggtggggatacagagccaaaccatatcac

SEQ ID NO: 103623 - DNA, 576 bp, Homo sapiens
agtataatttttaaaaaaatgtaatcagtgactgttacaccagatgtgtatatattgacatgaaaacacaagaaacatgaaaaagtaaggaaacacaacaccccaatgggacacaataattcttcagtaaaagatcctaaataacaggaaatctatgcaatgcctaaaaagaattcaaaataataatcttaggaaatctcaacgagatacaagataatacagatacataataygaagaaattagaaaaacaaatcatgatctgaatgagaaatttaacaacaagataaatatcataaaaaagaaccaaacacaaattctggaactgaagaaaacaatgaatgacataaaaatataattgcaagcttcaacaatataatagatcaagcagaacaaataatttctgaacttgaagacaagtcttttgaaataactcagtcagacaaagaaaaaaataacttaaaagaatgaaaattcagtgtgacatatggggcaccatcaggaaaacaaatatttgaattttgggaatccagcagaagagatgagaaaagacatggaaaacctatttagtaaaataa

SEQ ID NO: 103624 - DNA, 545 bp, Homo sapiens
ttcatttcaaatgacaaatgatgatttgttgaaacyaaatagcactttttaggtttaatgaaaaagatatatttcagatctagtttcctatttgttttatccacaaattagctttaatgacaataatgcaaaggatgacttttacataaatgtgtttttcagaaaagctaatacactaaaatctttgtgctctatttcaggataatcagatctcacatttatccaaatcagcaaataagaaaataaagtttctcttgataattctctacaactatcttgtttccttgaatatattattacacttgtggcattattaaaaccttaattaaaattggtatctgatcaattataaaaggaacttggaaaagaaaatgtcttatatatatttatacattatatattatataaaattaagtatatatatatatatatatatatatatatacttaattgctaatcaattgttgcagaatggtgtgaacaaaggtgggatcctcacaatacattcacaccaaatcataatatatcattaagttctatggccc

SEQ ID NO: 103625 - DNA, 545 bp, Homo sapiens
ttcatttcaaatgacaaatgatgatttgttgaaactaaatagcactttttaggtttaatgaaaaagatatatttcagrtctagtttcctatttgttttatccacaaattagctttaatgacaataatgcaaaggatgacttttacataaatgtgtttttcagaaaagctaatacactaaaatctttgtgctctatttcaggataatcagatctcacatttatccaaatcagcaaataagaaaataaagtttctcttgataattctctacaactatcttgtttccttgaatatattattacacttgtggcattattaaaaccttaattaaaattggtatctgatcaattataaaaggaacttggaaaagaaaatgtcttatatatatttatacattatatattatataaaattaagtatatatatatatatatatatatatatatacttaattgctaatcaattgttgcagaatggtgtgaacaaaggtgggatcctcacaatacattcacaccaaatcataatatatcattaagttctatggccc

SEQ ID NO: 103626 - DNA, 545 bp, Homo sapiens
ttcatttcaaatgacaaatgatgatttgttgaaactaaatagcactttttaggtttaatgaaaaagatatatttcagatctagtttcctatttgttttatcyacaaattagctttaatgacaataatgcaaaggatgacttttacataaatgtgtttttcagaaaagctaatacactaaaatctttgtgctctatttcaggataatcagatctcacatttatccaaatcagcaaataagaaaataaagtttctcttgataattctctacaactatcttgtttccttgaatatattattacacttgtggcattattaaaaccttaattaaaattggtatctgatcaattataaaaggaacttggaaaagaaaatgtcttatatatatttatacattatatattatataaaattaagtatatatatatatatatatatatatatatacttaattgctaatcaattgttgcagaatggtgtgaacaaaggtgggatcctcacaatacattcacaccaaatcataatatatcattaagttctatggccc

SEQ ID NO: 103627 - DNA, 583 bp, Homo sapiens
gcatcatgatacgtaatcacactaaggaagggttcttaaatcaaataaaatttgtgacattgcaatctgtaacagtaacaattgagggccaataattattagcacattaagatttagtgttagctattttaaaactccctcctttctaagatcagaaccagtacaattattcacactttatgaatgagactgcagtcatgcatcatttagtggtggcaatatgttctgggaaatgcactgttagttgatttaatcatcatgctaatatcagattatactsacacaaacctacgcggtgtagcttactatacacctaggctatgtggtgtagcttattactcctagactatgaacctgtacagcatgtttctgcactgaatactatgtgcaactgtaaaacaatgttaagtgtttgtgtatctaaacatatctaaacatagaaaaggtaaggtataaaaggttaaaaaaaggtacacctgtgtagggcacttatgaatggagcttgcagggctggaatttgctgggtgagtcaatgagcgagtgaatgtgaaggcctaggacattactgtacactactatagac

SEQ ID NO: 103628 - DNA, 376 bp, Homo sapiens
aatgtagagtttgctggtaaaagtcagtatacagtcaaatttagaataatctaatacagtaattgttgtgtgtaatccactcacatctctagtatgaaaactaaaagacaaatctaccaaaaataataamaactacaccaatttgttaagagatagccaatataaacagataattgagacaacaaaaagtcaaaatgtgaagagaaaggaattaaattacagagtttttttagtttttccttcatttgttcatcttatttttttgtgtgtatggtccaagttatcatctgtttaaaataacttgttatatctataaaatgtttttaagtcttatgataaccacaaagcaaaaacctataataaataaactaaaaat

SEQ ID NO: 103629 - DNA, 597 bp, Homo sapiens
tccttgtaatgttttaagaacttgttgatatttggctaaggaagtgatgtctgcaactaagttggctgtctctcagtcaagcacaaggtcattggttaggaagggccatccatacagcatttcgtatgagctaagtcctgctttttggggacagtttcagattcttagtaaggctataggcaacasagcaggccacgtgaggtgggtttcctgggttagcttttttggatgtcatttgagtttttcattcattttctcaactttccctaaggattgtggcctccaggcgcggtgtaagtgatattgtatgcctaatgcctgggatactccctgggttactgtcgccttgaaagcggggccattgtcactctgtaagcctcgggaagtctgaatctgggaattatttcatgaactagtatctttattatctctcgggccttttctttcctgcagtggaaggcctctccccaaccagtaaaagtatctagccgaactagtagatactgaaatcctgagatttgggcatgtgggtaaaatccagttgccagtcttctcctgggtaatggcctgttcttttttctcctgaaggagcttggt

SEQ ID NO: 103630 - DNA, 615 bp, Homo sapiens
agcagcctgccaacaagtaaacaaaaactgagttmagcgacatacagatacagctgaaataccaaattacccgtggcctctcctggagttatatttatttgcacacagtggggactagtatttccttgtgaaacaagagacttttactgttttgaaatagcagaactgaacctcagatgcatgagttcattaggatagatttatcctagtgaggcatggcacttgagaagagacaaagagcaaattatcagagaaagttgaggtgtacacataatgccggatgtggaagggtcatagagaatttgaaaattagatttattgcctagatatctaggagtaaatgtttctgtgtagtgatagaagcagaaataattagactggaaggcatcttgagttcatttggtcctaaccattaccacagtacagaagtagtcacattgataaaatcttatcaaagcatggcttatgttacgctatgtaattttggagaatgggcctctcaaccttacaaggttgtatattccagcttttcataggaatcctagttaagtatttctcttaattccataccatgctttgttttagtagggtgaggtctgagagggaaagcagtaa

SEQ ID NO: 103631 - DNA, 558 bp, Homo sapiens
atgaaataaccatgtctttgggattcagcaatggtggtgcctatagagtcaacagaaaaagcctcagcattcacactgtaattgagctcattcaaacaaagckaccttcactaggtactttcctgtttagagagcatgtggactttgattttacctgccctcaaactgactctttgctcattataatggtataaaaacacacccctgggtggagattttagatgctaatgagacatgaaacatatgaacaagcttgtatagttactgcgcatgtgcacccagaggaccacccagaacatgcttactggtaacacctcttcccacttccttatgaataatcatgtaagagtcccataaagagagtctccctagtgccagtctttgctgtctcatcctgatgagtagtctgccctgaactctctctctttcagggtgtatgcctattctgcacttaacttccaaaatattatttttcttttgcaataaattacttatatttcatctcctttgctgtgtgtatgttggttaaattcttttaaactaaggaaacaagaacca

SEQ ID NO: 103632 - DNA, 558 bp, Homo sapiens
atgaaataaccatgtctttgggattcagcaatggtggtgcctatagagtcaacagaaaaagcctcagcattcacactgtaattgagctcattcaaacaaagcgaccttcactagrtactttcctgtttagagagcatgtggactttgattttacctgccctcaaactgactctttgctcattataatggtataaaaacacacccctgggtggagattttagatgctaatgagacatgaaacatatgaacaagcttgtatagttactgcgcatgtgcacccagaggaccacccagaacatgcttactggtaacacctcttcccacttccttatgaataatcatgtaagagtcccataaagagagtctccctagtgccagtctttgctgtctcatcctgatgagtagtctgccctgaactctctctctttcagggtgtatgcctattctgcacttaacttccaaaatattatttttcttttgcaataaattacttatatttcatctcctttgctgtgtgtatgttggttaaattcttttaaactaaggaaacaagaacca

SEQ ID NO: 103633 - DNA, 558 bp, Homo sapiens
atgaaataaccatgtctttgggattcagcaatggtggtgcctatagagtcaacagaaaaagcctcagcattcacactgtaattgagctcattcaaacaaagcgaccttcactaggtactttcctgtttagagagcatgtggactttgattttacctgccctcaaactgactctttgctcrttataatggtataaaaacacacccctgggtggagattttagatgctaatgagacatgaaacatatgaacaagcttgtatagttactgcgcatgtgcacccagaggaccacccagaacatgcttactggtaacacctcttcccacttccttatgaataatcatgtaagagtcccataaagagagtctccctagtgccagtctttgctgtctcatcctgatgagtagtctgccctgaactctctctctttcagggtgtatgcctattctgcacttaacttccaaaatattatttttcttttgcaataaattacttatatttcatctcctttgctgtgtgtatgttggttaaattcttttaaactaaggaaacaagaacca

SEQ ID NO: 103634 - DNA, 558 bp, Homo sapiens
atgaaataaccatgtctttgggattcagcaatggtggtgcctatagagtcaacagaaaaagcctcagcattcacactgtaattgagctcattcaaacaaagcgaccttcactaggtactttcctgtttagagagcatgtggactttgattttacctgccctcaaactgactctttgctcattataatggtataaaaacacacccctgggtggagattttagatgctaatgagacatgmaacatatgaacaagcttgtatagttactgcgcatgtgcacccagaggaccacccagaacatgcttactggtaacacctcttcccacttccttatgaataatcatgtaagagtcccataaagagagtctccctagtgccagtctttgctgtctcatcctgatgagtagtctgccctgaactctctctctttcagggtgtatgcctattctgcacttaacttccaaaatattatttttcttttgcaataaattacttatatttcatctcctttgctgtgtgtatgttggttaaattcttttaaactaaggaaacaagaacca

SEQ ID NO: 103635 - DNA, 390 bp, Homo sapiens
aattccttaaaaatgacatctgagaatgttttttaaaaaatgttatatctaaatgtggatcytgaatcatccccaggttgtaaaacaggaaagttgtgtcgttttgtgagtaataggaaatactaagtatagacaagcttctaagtgtaagccaatgcatacattaagtaaattaaaccaaaaaagattaaccagccatgtttcaggttttggaacatgtaatgtataaatgtaacctactagaaaaatagttctttgccattaaccctcaaaccaaatcatgagacaattttttcagttgcatttggaagaccatgtttgttagctttggcttaccatttgctgaataaataaaaatggcatgtttaatgctaagtagtatttataacc

SEQ ID NO: 103636 - DNA, 558 bp, Homo sapiens
taccacattttttatccagtaatctgttgctagattccttggtttgtttcatttccttccttttctctacatcccggccagcattttttattttttgttattttgataatagccattaaaactacagtatgatacaacatcattatggttttcattttaatttccctgatgattagtgatagtgagcatttttttgtatacttgctagacatttatatgtcttctttgaagaaatgtctattgaggtcatttgcccttttcttaattagacgattttgtgttgttgttgttgttgttgagaaatttgagtttcttttatagtctagatattaatcccctgttgaatgagtagtgtrcaaatattttcttccattctataggttgtctttttatgctgttaattgtttcctttgcagtgtagaagcttttaggtttgacataatctcacttgtttatttttgtgttgttgccggcgttttgaagtcttcctcataaaatattttctcaaatcaatgtcctgaaatatttttcttatgttttcttctaaaaattatatat

SEQ ID NO: 103637 - DNA, 672 bp, Homo sapiens
cacaggcttgttacataggtaaacatgtgtcatggtgaattgctgcacagaccatcccatcactcagattttaaacccagcatccattagctattcttcctgatgttagattagagctgagattttaacccctgtctgaatataggtctcaggacacatttagaaaaggaaagatgaagtgatggtttaagattttattgtctgagggtgaaaagttaaaattgtgatattggacaagattgtcaaagataaacatatgagagaagagaaactcattggcaactatttacattttgtgggaaaaaaagtttaaaattaaaagatgaaccagtgcaaaatattatctctaaggaaaaatgattattttggtgtggttattttaactgtgatgggatgttgcttggatcacgtgtataaaaactccatagatgaatagttggtgcatacctatagtcccagctataggaagctgaggtgggaggattgtatgaccccaagagttcaaggatgcagtaaactatattacrtcactgcacttagcgcagggcaaaaagcgagacatcatctcttaaaaaaatccataaattccagagataaggaaccaagtaattaaattatggagagaattttcattatggtagtagtggttttaaaagaagagcagtaccagca

SEQ ID NO: 103638 - DNA, 614 bp, Homo sapiens
ccattttataaatgaggcactagaaaatggggcagacatggatatgttaagttgcttgtccatgtcactcagctagtaagtcctgaagccagggtttgaatccatgtagttcactccagtttcaatggttttacgcactaccctctgctccctacatgagtcctaataacagtatctgcctctttgggtgttgtatgaggattgaaagaattgttaygtgcttaataaaggatggtattctttctttctctttcttcctatggctgcttattaaaacaaacaacccctcactcaatatcttagaatcttcttttttagaaatggtgattattactttaccaagtaaaagtggaaaaatatgtctccccaacaaaagggagaaaggctgaacagtgagtacagtgtggtgatggggggttagcatgaaggaattaaacccagccctttccaggttgaggaagaagagccacccacaatggtgcctggacccccaggtgtctgtgaaaaggctacagaactgcagatgctggctctgaaatacttcttccttcatcaactccagatgaactaacccacagagagagcagcctgaaagactgtctgagaaatattca

SEQ ID NO: 103639 - DNA, 602 bp, Homo sapiens
ggggatcactgctctactagatcagctctctgcctatctcctacttggctaaagacagcttgtcttcatctccctgaatgtttctacctctctacacatcattcttaatccaaagggattcccagattcagagaaatgagtgtttccttccctcctgtataaggtttacctccctggtttctctatattttgggcctcagactgacctcttcctaaagtgcctgcccccatgaatgttcattccattcagagagggtcacatgcccaaccacagrgatatcctcttgtcccatggcattaacagaacaagcgcgcaacaatctgacatcactttccccaaagttggatttttcagtgcaaaatgatgccatatgggagatattcatgtcaagccaacccaggctcaatatcatttcagttttctcctcctcatgagttaaaaaaccatggtgtgcacagcaatgtgtgcatgggagagagggacagttgcatttggaggcacagttttcccatagaaatatctttccaaatgatgtttaggagctcaggctgggcacagaagcctatatagctacaaacacaccctgcatagtgctaattgc

SEQ ID NO: 103640 - DNA, 541 bp, Homo sapiens
tctccatttccagcttccccttctctgaaggctgctgctaaactcaaggcagagccctgtctctctgggctgagcacctgcagggccagctgtaggagggtgctggtttgggggtgcgaccctctttctcttcatcgtagtctactattgcttaaacaagttgtttctgatttggtggaaggacagaaagaagcagagtcaacatctgaattgaatgcagtgtgaaaggaagggatatgggcagcagatacagacagtgcattgatccataacctacactaatcagtgaaagcagaagcctggagacaaaggtggttaagaacccacaggaatcctgrgtagactttggactttttacaagtgtgtaatgggagtgaggccatggcgtttagatcttaagaagtatggaaatcctaacatctgtattacatatatgataaactgaattgcttttcaaaacatactctttttcctggtattatcactttaactcaggcctggagactttaatcaaaaaataatgtgaattatgttctatctc

SEQ ID NO: 103641 - DNA, 541 bp, Homo sapiens
tctccatttccagcttccccttctctgaaggctgctgctaaactcaaggcagagccctgtctctctgggctgagcacctgcagggccagctgtaggagggtgctggtttgggggtgcgaccctctttctcttcatcgtagtctactattgcttaaacaagttgtttctgatttggtggaaggacagaaagaagcagagtcaacatctgaattgaatgcagtgtgaaaggaagggatatgggcagcagatacagacagtgcattgatccataacctacactaatcagtgaaagcagaagcctggagacaaaggtggttaagaacccacaggaatcctgggtagactttggactttttacaagtgtgtaatgggagtgaggccatggcgtttagatcttaagaagtatggaaatcctaayatctgtattacatatatgataaactgaattgcttttcaaaacatactctttttcctggtattatcactttaactcaggcctggagactttaatcaaaaaataatgtgaattatgttctatctc

SEQ ID NO: 103642 - DNA, 645 bp, Homo sapiens
ttctatatttccacaaatgtgcaatcacagtatggagggtggagtgtcacaactaagtgggggtaaatagataatgaaaaataagatttaccagtgtaaatagaattggcctcaccaacatggccttggtagtccccgccaagtcctttcttagggtttctatttcctgatctacatgccctgagtggtcatatctaccctgccaatattgcaaggtgtgtcgsgagaagccaaaagataaggaatgtgaccaacataaagtgataaagaaataaataacactagcagtggttgctgctatttagacacgggagcagaaggaaatgataactacgtaaaatggctaacacgggcccaagcaggtgctctgtttctattggttcccttccctgcccccatctacctttagcttcctctggggacatcctccctcctgcatggagacaccaccgcccaataacgtgagcctccctcttcgtaatagccctggcagtgtggaacccgctgaaagcgcgttgtgaggatgagcagagacctgccagcagctaaaattcgcgctttaacacaatcagccctggccgagcatgtgcagtgtctcctccttcggcagtgggggctgatgggcagatactgcccaaatgctca

SEQ ID NO: 103643 - DNA, 562 bp, Homo sapiens
gaaagtcgatttgaagttgaaaatcaaccagtcctcaactctcattggttttcttaattcactgtaaatttgcaaatacttttataaaaactgccctttataattgtacagcaattctatctctactatgctaattataaagagagttttgccactatcttaccaccaagtataaaagaaacaaaatattcataaaaaatgatccaaatgggactcacttccagaatggtgatgtgaagagcttttcaaatccactccctaaaaacaacaataactggtgaaaattatagataaataaccatttaaagttcctggwaattgtcctaaggacatacagcacgaagaaaatatttattcaagacaatctcttatatttcagtaagaactgcaaacaattgtgatgcttgaaccacaatatatttccccaccctctccagttgagtgtgatgatgttccagtaaggatgggtgcagccactaacgcagggccccctctcaacctagatcctcgtctacagtataccctgagagaagcaggccaccagcattactcatcatcccca

SEQ ID NO: 103644 - DNA, 562 bp, Homo sapiens
gaaagtcgatttgaagttgaaaatcaaccagtcctcaactctcattggttttcttaattcactgtaaatttgcaaatacttttataaaaactgccctttataattgtacagcaattctatctctactatgctaattataaagagagttttgccactatcttaccaccaagtataaaagaaacaaaatattcataaaaaatgatccaaatgggactcacttccagaatggtgatgtgaagagcttttcaaatccactccctaaaaacaacaataactggtgaaaattatagataaataaccatttaaagttcctggtaattgtcctaaggacatacagcacgaagaaaatatttattcaagacaatctcttatatttcagtaagaactgcaaacaattgtgatgcttgaaccacaatatatttccccaccctctccagttgagtgtgatgatgttccastaaggatgggtgcagccactaacgcagggccccctctcaacctagatcctcgtctacagtataccctgagagaagcaggccaccagcattactcatcatcccca

SEQ ID NO: 103645 - DNA, 636 bp, Homo sapiens
ttcagtctttctttctgcattatgagctcagttaatgaaaactcagggtagggatcagaggtaagaggtaattattttcttctttgtcaggtctggagttgaggattgagagamaggattgtggggcggcaggggtcgggggctggagggggttggtcagagagaccttgaggcttctgctttagttcagcatgtcaaagcactatattttaaggtattagtttatcagcctcaacacttctttttttaattttttttaacttcattttattttaagttccaggatacatgtgcaggacgtgcaggtttgttacataggtaaatgtgtgccatggtggtttgctgcacctattaacccatcacctaggtattaagccccacatgcattagctatttatcctgatgctctccctcccccaaccccctccgacaggccccaatgtgtgttgttcctctccctgtgtccatgtattctcattgttcagctcccacttataagtgagaacatgcagtgtctggttttctgttcctgcataagtttgctgaggttaaaggcttccagctccatccatgtgcctgcaaagaacatgatctcattcctttttatggctgcatagtattattccatggtgtatt

SEQ ID NO: 103646 - DNA, 636 bp, Homo sapiens
ttcagtctttctttctgcattatgagctcagttaatgaaaactcagggtagggatcagaggtaagaggtaattattttcttctttgtcaggtctggagttgaggattgagagaaaggattgtggggcrgcaggggtcgggggctggagggggttggtcagagagaccttgaggcttctgctttagttcagcatgtcaaagcactatattttaaggtattagtttatcagcctcaacacttctttttttaattttttttaacttcattttattttaagttccaggatacatgtgcaggacgtgcaggtttgttacataggtaaatgtgtgccatggtggtttgctgcacctattaacccatcacctaggtattaagccccacatgcattagctatttatcctgatgctctccctcccccaaccccctccgacaggccccaatgtgtgttgttcctctccctgtgtccatgtattctcattgttcagctcccacttataagtgagaacatgcagtgtctggttttctgttcctgcataagtttgctgaggttaaaggcttccagctccatccatgtgcctgcaaagaacatgatctcattcctttttatggctgcatagtattattccatggtgtatt

SEQ ID NO: 103647 - DNA, 602 bp, Homo sapiens
cccaacccacacttttactctagccatgtccaaatcctacttagattcaagctggagtcctgactttatcaatgtcttaagtggttaaattactaaaggatgagaatgtttaaacaaatctaaacatgcttaaacaaataatcataatgttcaattttaacattgtagagtaccaaaaaagtttatcgctatcactgtaattccaagcccctttctacagttgcaaaaagatgccgtctttttctcatggctcttcccyggagatattcccaaggacctccagcatagtttaattaatctaaaatgttaatttctaatgactactgtctgagcctcctcagacagccaaccacccctttggtttctgccaatggccatcagagccatccagaccaatttgctatgacagttcttctcctggtgctgggccagggaactcaagcaagagatacattctgtgccccaaaccagccttccttatgaattgctctaaacctggctgaactatacccctttgacttcccaaaggcacaactacaagcaagcactatagccctgacaagaccatctcaaattcttaatcattcaatcttaaacaaacc

SEQ ID NO: 103648 - DNA, 570 bp, Homo sapiens
acaccaactattcttaggtttggtcatttaacataatcccagacttcttggaggctttgttcatattttctcattcttctttctttgtctttgttggattgggttaattcgaagaccttgtctttgagctctgaatttctttcttctacttgttcagttctattgctgagactttccaaagcactttgcatttctataaatgcatccagtgtttcctgaagttttgattgttttttctttatgctatctatttccttgactatttctcccttcacttcttatatctttttttggatttccttgcattgggctttgtctttctctggtgtctccctgattagcttaataactaaccacctgaattctttttcaggtaaatcagggatttcttcttggtttggatccattgctggtgaactagtatgatttttggggggtgttaaagagccytattttctcatgttaccagagctggttttctggtgccttctcatttgggtaggttctgtcagagggaaggtctagggctgaatcctgctgttcagattctttttcccacagggtattcct

SEQ ID NO: 103649 - DNA, 467 bp, Homo sapiens
tatactgaatatttactatatactcagtatatatttgttgaactcattaaagtgagcagaaaactggaagcaatacttagtctaggaatggtcacttagggagtaatctgttcgtgaaatgggaaagacacaagcatggtggggtcagatgtgtggctcctgggaatggttaaattagcgctagagattatagagctcccagtaaggtaaagtacagagattagtttagacagtaagtgaatcttctgtattttatacaggggtaatattggtatttaaatagtgagtttaatttaaagaaaactcacaatggkgggaaaaacttcaagagggtggtaagatggggctggtggtgggttgtgagtataagcaggagttgggtgtggtgtccaatgtggtaaatggggcaagtccagtccccccacagattaaagtcatgcaggcagcatgtgatagatctagaattc

SEQ ID NO: 103650 - DNA, 565 bp, Homo sapiens
gagataggcttgaaaaggacatagtatagctcatgatacacagtaactatatgtcagcatatggtagctaccatcttcatcattatatttagtattatataatacccaatcataaggctctaccataatagatataatcatctgattactgaaagacaatgaggttccttacatatttcagctttataaataatactagatttgacatgttttgtacaggaagctattttatgttatttccttaggagatttccagataaatgaaatgaatatgaaataaatgaaatgaatcaaataaaatgaaatgaacattgtcaaagaatttaaatatacatcatcaaatattttgcaaagggttgtcccaacttctacttctactagcagtatgtaacattgactctttcatggcatcctcactgatagtcaamattttgtatttttttcttagtacttactcattgactttaatcattttcttaactatatatatctctaatgccatattatctttttcttatttttggagaatgtatttattgacgtaatgtaagagtaacatgaaaga

SEQ ID NO: 103651 - DNA, 557 bp, Homo sapiens
agtcacttagtattccttacactcaggaaggctgactataaaggcttacacttcctgctgtgattgtatccttcttgaaagaaatgaagcagcaacatgaacttagttccctttatctgcacagtgattctaagtctcartttctgccgtcttccctctctgactatttaatacacttatcgtttctctgcctggcattcccctataggagagattgaatttaacaaatgtacactaagaatgatagctgacactaattcaatgagcagaaggttaaatccgatcataattcctgaggtaatggagacgggtcaggtatgcagatctctgaagagtcaaagagattaaaggagactacacagttcctttgactctgtagccactaggaaactataatagcgttttaaggtagggtagtactggagcctaaagatttattttttaaaaaatgaacaaagcatcacagtcaagctgatgcaataattttgcaatcctttgagctgttaaactcaagaaagatgttagctaaatgcaatctggaataaatacattaattt

SEQ ID NO: 103652 - DNA, 507 bp, Homo sapiens
cagtggctcctgtcttgtaatcccagtgctttgggaggctgagatgggaagattgtttaaggccaagagtttgagaccagactggataatatagtgagaccctgtctccacaaaatcgaataaaaatgtttattttgtatcgtagcttactttctatatctttgtctatgctacaaatctacatgcctttgggagcaaataatcatatggattcagagttataaagtaccttgaacacacttagtaggacttctaatttcataaactgaggtagggaccatgtcaattttgtcttgatatcctagatgtatccaggaggtaacatcgattgaataaaggagtgaatttactgaaatgaagagagaaaaggaaataacaaagaaaataaattgagaaaaagtaagaaatacartaaagaaaatttttgcattttggggaagggagaagaacaggttggaatgcagagaaagaaagtgaaaaagaataagagaaggtggaaaaatttga

SEQ ID NO: 103653 - DNA, 553 bp, Homo sapiens
tgggtgagagagagagagaccctgtccgcacccgcccctacaaaaaaaaaaamcccagcatggcccaggctcacacctatgctgcctcccagtcctgggcatggccctgagtcctcaccttaccccaccccagctccctgacaggacctagtcagaaagccccagccttccaagcacatgcactccactcagtgccctgcggagggaaatcaaagcgaggcaggaaccagtttccaaaaagtaacacccaacaccaaagacgtgtgctcgtcactgaatgtagatttcaccttgaaaagaaaaaaccttgaaccttaatgatatgtgttcagagttgaaatgtcctgatgtctgcaatttattttgtgttaaaagataaaatgccttgatggacagatagataaagcaaaaaaatcttttggagttttaatgtatttgcaaattttcataatgataagaaaggaacatctaacagagggtgcgttggcactgacacctcaggccctgctgccttattcatacagggccagctgtgaaaggtggggccagctgt

SEQ ID NO: 103654 - DNA, 518 bp, Homo sapiens
aggttgttttttctttatggtgtgtgtatgaacgttcaattactccagcaccatttgttgaaatggcactttccttcatyaaattgatattgcacatttgtcaaaaatcagttggacatatttgtataggtctattttggggttctttattatgttccattaatctatgtgtctatccctccaccaataccaccacacagttttgacaacttttataagtgttgaaatcatcatgcagactgattcctcctattttatcaattctttacaaaattgttttagctattctacttcctttttctttccatctaaattttagaatagtatcttttatgtctacaaaaatcttgctggaattttggtgggaattgctttaagccagtatatcagttggggtctttactatgttggatcatctagtctgtgaatatagtatatcttctattcatttgtttagatattctttgattttactcatcagcattttatagttttcagcatacatgtcctgtacctgt

SEQ ID NO: 103655 - DNA, 323 bp, Homo sapiens
aataatttagatggttggtaaatgtgatggttcatattaagygtcaacttgattggatcgaaggatgcgaagtattgttcctggatatgtctgtgagggtgttgccaaaggagattaacatttgagtcagtggactggaagaggcagactcacctaatcaattccagcactgctaaaataaagcagacagaaggtgagagaagcccacttgctgagtcttccagtcttcatctttctcccttgctgaatgctttctgccctcgaacatcaggctccaagttctttaacttttggactcttgggcttacaccagtggtttgcaa

SEQ ID NO: 103656 - DNA, 598 bp, Homo sapiens
atagattttgtcaaaagtttacagcttcagattcagttcattcaacttacagaaactgccaactgaagaagctaattggcaaagctaactctcattgtcaaaccagtacttcacatcaaatgtaccttcaatcagaaaayatgtctgacttcagtttttaattaaagaaaatgataatgtgcatccctatgataactatctcacttattaattttcatttaaactaagttgaaaaaggggaggaaggcagttcccttaccactagaacataagctctgaaagggcagggatttttatctgttgctcactgatatgttttccacacaataagaacatagtaggtgcttaatatttgaagtattttgtgaatactggatggaaaagaagatgacagataatacatgatagacagacagatgtaaataaacactgaactccaccatgagtgtgtaggcaggataaaatgaaatctctcgtcgcctcatggaatctgtcttttcaaattatccctagaagtcttttcaacctggggcaatacatcatatactgagatttcaactgcatgagtctacctttttttttctagtacagtaagaaa

SEQ ID NO: 103657 - DNA, 598 bp, Homo sapiens
atagattttgtcaaaagtttacagcttcagattcagttcattcaacttacagaaactgccaactgaagaagctaattggcaaagctaactctcattgtcaaaccagtacttcacatcaaatgtaccttcaatcagaaaatatgtctgacttmagtttttaattaaagaaaatgataatgtgcatccctatgataactatctcacttattaattttcatttaaactaagttgaaaaaggggaggaaggcagttcccttaccactagaacataagctctgaaagggcagggatttttatctgttgctcactgatatgttttccacacaataagaacatagtaggtgcttaatatttgaagtattttgtgaatactggatggaaaagaagatgacagataatacatgatagacagacagatgtaaataaacactgaactccaccatgagtgtgtaggcaggataaaatgaaatctctcgtcgcctcatggaatctgtcttttcaaattatccctagaagtcttttcaacctggggcaatacatcatatactgagatttcaactgcatgagtctacctttttttttctagtacagtaagaaa

SEQ ID NO: 103658 - DNA, 598 bp, Homo sapiens
atagattttgtcaaaagtttacagcttcagattcagttcattcaacttacagaaactgccaactgaagaagctaattggcaaagctaactctcattgtcaaaccagtacttcacatcaaatgtaccttcaatcagaaaatatgtctgacttcagtttttaattaaagaaaatgataatgtgcatccctatgataactatctcacttattaattttcatttaarctaagttgaaaaaggggaggaaggcagttcccttaccactagaacataagctctgaaagggcagggatttttatctgttgctcactgatatgttttccacacaataagaacatagtaggtgcttaatatttgaagtattttgtgaatactggatggaaaagaagatgacagataatacatgatagacagacagatgtaaataaacactgaactccaccatgagtgtgtaggcaggataaaatgaaatctctcgtcgcctcatggaatctgtcttttcaaattatccctagaagtcttttcaacctggggcaatacatcatatactgagatttcaactgcatgagtctacctttttttttctagtacagtaagaaa

SEQ ID NO: 103659 - DNA, 668 bp, Homo sapiens
tcctagtaagatccactcagagcacttgagagatgctgtgttagttcattctgcattgctataaaggaatacctgagaccaggtaatttataacaaaaagagatttctttggcccatgattctgcaggctgtacaagaaacacaatgctggcatctgcttcttgtgagaacctcaggaagcttaaaatcatggcagaagtccatgtaggtaacatggtgagaaagggcatgagagagggggagagggtgccagactcttttaaaccaccaggtcttgtgtgatcttatagagtgagaagtcactcattaccgtgaggacagcattaagccattcatgagggatcyatccccatgacccaaccaaccccccaactccctccacaggaccacctccaacattgcaggtcatattttaatatgagatttggagggaacaaaacatccaaaccatatcagatgccttttatgtaaagttatatctaaacacttaaccaaactcattataatttgtcataggatttgctgtctagacatagcaaacttcctcttggaagatcttatttcgtgtgccaaaaaatcaagaatggtttaagccaggcaaactctttgattgaaagtaaattataaccattgtttgcctgctcacttttgcttttaatgtacatgtg

SEQ ID NO: 103660 - DNA, 668 bp, Homo sapiens
tcctagtaagatccactcagagcacttgagagatgctgtgttagttcattctgcattgctataaaggaatacctgagaccaggtaatttataacaaaaagagatttctttggcccatgattctgcaggctgtacaagaaacacaatgctggcatctgcttcttgtgagaacctcaggaagcttaaaatcatggcagaagtccatgtaggtaacatggtgagaaagggcatgagagagggggagagggtgccagactcttttaaaccaccaggtcttgtgtgatcttatagagtgagaagtcactcattaccgtgaggacagcattaagccattcatgagggatccatccccrtgacccaaccaaccccccaactccctccacaggaccacctccaacattgcaggtcatattttaatatgagatttggagggaacaaaacatccaaaccatatcagatgccttttatgtaaagttatatctaaacacttaaccaaactcattataatttgtcataggatttgctgtctagacatagcaaacttcctcttggaagatcttatttcgtgtgccaaaaaatcaagaatggtttaagccaggcaaactctttgattgaaagtaaattataaccattgtttgcctgctcacttttgcttttaatgtacatgtg

SEQ ID NO: 103661 - DNA, 668 bp, Homo sapiens
tcctagtaagatccactcagagcacttgagagatgctgtgttagttcattctgcattgctataaaggaatacctgagaccaggtaatttataacaaaaagagatttctttggcccatgattctgcaggctgtacaagaaacacaatgctggcatctgcttcttgtgagaacctcaggaagcttaaaatcatggcagaagtccatgtaggtaacatggtgagaaagggcatgagagagggggagagggtgccagactcttttaaaccaccaggtcttgtgtgatcttatagagtgagaagtcactcattaccgtgaggacagcattaagccattcatgagggatccatccccatgacccaaccaaccccccaactccctccacaggaccacctccaacattgcaggtcatattttaatatgagatttggagggaacaaaacatccaaaccatatcagatgccttttatgtaaagttatatctaaacacttaaccaaactcattataatttgtcataggatttgctgtctagacatagcaarcttcctcttggaagatcttatttcgtgtgccaaaaaatcaagaatggtttaagccaggcaaactctttgattgaaagtaaattataaccattgtttgcctgctcacttttgcttttaatgtacatgtg

SEQ ID NO: 103662 - DNA, 596 bp, Homo sapiens
taattatttattggttataaaacatggttatgaaaaaatctaaaaacctaaatctcataaaaaaagaagcaatgagaaaaatatggtttacaggtattattcaacaataacagatgctcatttttgttcaaggttcttctactgggagtgagagtaaattgagagaagttgtatttcagtattaattaaaaatgaaaagtgggggttttttaattgaattctctttggraactaataatttacctatacccttaagatacacagtaatttgttggaagaaagtcaaataatttaaacacatttcatataatgtgtgtgttttttttttaaaaagttcccgtggaataaacaggtgaaaataaaacattaaaaaaaatcaaagaccctgaaaagaagaaatttgaccctaaaatctcaaacattcgcatactgtggcttatttcaacttactggcagtgtgatatggtcggaagagagggccatttgcaagacagagaaaaggtaaagagagagaaattatgtggaaaggaaggagagaacacaaacgagtttattttctaaagtgtacaaaatgttaagtacctcatcaattatat

SEQ ID NO: 103663 - DNA, 524 bp, Homo sapiens
tgaaagccagagtttagtggaaaaaatattttgaatgtgacataatattgaagattttaaaacaataaaataatgactcaattttaataaagctagttcttatatagacatggggcagatttatttgatgttgaccatcaaacccacagtgggagagtgttagtgagcatttgctgggggtgtcagtggaaaaacacagttgaaccagttaagtagacaatgagtagtataggtaagaaataagagtctaaactaaaggcatgatcaygggataacagggaaggaaattatttgagagtaattaagggggtaaaaagagcatcataacttttaataatcaatatgcagtggaaacattacaattaatctacccaataactcttggggcaatcatccttgtgaatggcaatgtgaggtttcgacacgaaaagtatcagctctccaagaaaaaggatcaataagaataaatattatatattcatagaaatacaggcaggaaaagaaatcgtattgaagttacacct

SEQ ID NO: 103664 - DNA, 572 bp, Homo sapiens
acttaaatcccttgcagaccctgaaatgggactmcagggactctacggctatatgatcaaaatgactatgtatgtttcacttcatctcaggccctggaaggaaaaatattcttcttacacagcctggcaccaagggataatgaaactatttctctatggcctcctgatgggtcagcatcctcctgaaaatactcttcctacagggtgaaaaataattctccatatatgtgaaatgccttgagctctttagaagaaaaacccaggttaaatttcagctatgattattaccatcattatccctcactcattccatataatctgacacattatattcccttcagccccatggaaccccttttctgaatgttgattcattaaaaattcatgtataataaaaaattctgtgtgcctagaaattcagtgaaccccattttttatgggaaatctgtttcttctgatcgtaaaaatagtgtattttctcttggatgtttgcatttacatcagtagagtgttctatcaaaaacaatctgagatacagacaagaagttagtggaatagaaataagattgtac

SEQ ID NO: 103665 - DNA, 491 bp, Homo sapiens
tactgagaaattcttttagaaaccaatgctggtgtgctcattgctactrgctaggtattgcttctaggccatttcagtgaacaaagttggaaagagatagatagaaaaagatagaaatggggacagagttagagatagagagatatagagatggaatagatatatatacagagagatgtatatagatatataactgtatttgatattcctaatacaaatgtaatattatagggttttttctttaaagttctttatattctttttttctcttatgttgaaatactgatttctaataatatttccctacatatttacttaatttatcgtactcttttttttgtttttgtttttgtttttgtttttgagacagagtctcgctctgttgccaggctggagcgcagtggcgtgatctcagctcactgcaacctccgactccctggtacaaggaattctcctgcctcagcctcctgagtagctgggattacaggcat

SEQ ID NO: 103666 - DNA, 491 bp, Homo sapiens
tactgagaaattcttttagaaaccaatgctggtgtgctcattgctactggctaggtattgcttctaggccatttcagtgaacaaagttggaaagagatagatagaaaaagatagaaatggggacagagttagagatagagagatatagagatggaatagatatatatacagagagatgtatatagatatataactgtatttgatattcctaatacaaatgtaatattatagggttttttctttaaagttctttatattctttttttctcttatgttgaaatactgatttctaataatatttccctacatatttacttaatttatcgtactctttttkttgtttttgtttttgtttttgtttttgagacagagtctcgctctgttgccaggctggagcgcagtggcgtgatctcagctcactgcaacctccgactccctggtacaaggaattctcctgcctcagcctcctgagtagctgggattacaggcat

SEQ ID NO: 103667 - DNA, 572 bp, Homo sapiens
aagtatagagacacagtataaacttttgtttgcaagaaaaatttgtagccgttttacatcttccagcrctccttgggtcacccttgaagaaatcagatataatcttactctggtctttaaataagggaaaccagaggtgatccctggaggttcagaagactcctaagacccagataggttagagcagctctatgttactaaattggtgaattaattggtgaaaataaaagaataatatattttttaaaaaattttaaaaatgagactgccttatcactaaggatacataatggtttaatggataaataagctatttgttttttactggccatgtatgctcctgtttctttgagcttctggctcttgcttctggatccttcaccagattacatcttcgacagcccctgaaaatttggagttacctgagagtcgaagacacctgtcctacttgattcttcttacttgtacagtcatctgagaacaaaattcaaaaaggccagtcatgctttaagcaggtctcatttcccagactgcaaacaaacatggaggtctatctgggaccagagacttga

SEQ ID NO: 103668 - DNA, 575 bp, Homo sapiens
acagtataaacttttgtttgcaagaaaaatttgtagccgttttacatcttccagcgctccttgggtcacccttgaagaaatcagatataatcttactctggtctttaaataagggaaaccagaggtgatccctggaggttcagaagactcctaagacccagataggttagagcagctctatgttactaaattggtgaattaattggtgaaaataaaagaataatatattttttaaaaaattttaaaaatgagactgccttatcmctaaggatacataatggtttaatggataaataagctatttgttttttactggccatgtatgctcctgtttctttgagcttctggctcttgcttctggatccttcaccagattacatcttcgacagcccctgaaaatttggagttacctgagagtcgaagacacctgtcctacttgattcttcttacttgtacagtcatctgagaacaaaattcaaaaaggccagtcatgctttaagcaggtctcatttcccagactgcaaacaaacatggaggtctatctgggaccagagacttgactacctgatgcttgc

SEQ ID NO: 103669 - DNA, 609 bp, Homo sapiens
ttaaataagggaaaccagaggtgatccctggaggttcagaagactcctaagacccagataggttagagcagctctatgttactaaattggtgaattaattggtgaaaataaaagaataatatattttttaaaaaattttaaaaatgagactgccttatcactaaggatacataatggtttaatggataaataagctatttgttttttactggccatgtatgctcctgtttctttgagcttctggctcttgcttctggatccttcaccagattacatcttcgacagcccctgaaaatttggagttacctgagagtcgaagacacctgtcctacttgattcttcttacttgtacagtcatctgagaacaaaattcaaaaaggccagtcatgctttaagcaggtctcatttcccagactgcaaacaaacatggaggtctatctgggascagagacttgactacctgatgcttgccttgattccaggatactctgaattttctcagatcttgggttgagtctttagagagcttgtctggcaggctttcctgagcccaccatgaaggtcatcatctccacttgctttgccctgagtcacagcaaaaagctaaaa

SEQ ID NO: 103670 - DNA, 609 bp, Homo sapiens
ttaaataagggaaaccagaggtgatccctggaggttcagaagactcctaagacccagataggttagagcagctctatgttactaaattggtgaattaattggtgaaaataaaagaataatatattttttaaaaaattttaaaaatgagactgccttatcactaaggatacataatggtttaatggataaataagctatttgttttttactggccatgtatgctcctgtttctttgagcttctggctcttgcttctggatccttcaccagattacatcttcgacagcccctgaaaatttggagttacctgagagtcgaagacacctgtcctacttgattcttcttacttgtacagtcatctgagaacaaaattcaaaaaggccagtcatgctttaagcaggtctcatttcccagactgcaaacaaacatggaggtctatctgggaccagagacttgactacctgatgcttgccttgattccaggatactctgaattttctcagatcttgggttgagtctttagagagcttgyctggcaggctttcctgagcccaccatgaaggtcatcatctccacttgctttgccctgagtcacagcaaaaagctaaaa

SEQ ID NO: 103671 - DNA, 593 bp, Homo sapiens
aagtttttgcagttatgaatagagctgctataaacatcatgtgcaggtttttgtgtraacttaagttttcagctcgcttgggaaaatactgaggagcagatggttaggtcatttggtaagagtatgtttagtttcacaagaaaatgccaaactgtcttccaaagtggctgtactattttgcattcccaccggcaaggaatgagaatatctgttgttccacatccttaccagcatttggtgttatcagtgttctggattttgccattctaataggtgtagagtggtatcttgttgttttaatttgcaattccctaatgacatatgatgttgagcatcttttcatattcttatttgccatcatctttggtgaggtgtctgttcagggttttttgcccattttttattgtgtggttcattttcttattgttgagtttaagagttctttgtgtatttggcttaatagtcctttaccagatatatcttttgcaaatattttctcccagtgtgttgtcttctcattctcttgatgtgccttttgcagagcagaagtttttaattttaatgaagtccagattatcaattatttcttttgt

SEQ ID NO: 103672 - DNA, 593 bp, Homo sapiens
aagtttttgcagttatgaatagagctgctataaacatcatgtgcaggtttttgtgtaaacttaagttttcagctcgcttgggaaaatactgaggagcagatggttaggtcatttggtaagagtatgtttagtttcacaagaaaatgccaaactgtcttccaaagtggctgtactattttgcattcccaccggcaaggaatgagaatatctgttgttccacatccttaccagcatttggtgttatcagtgttctggattttgccattctaataggtgtagagtggtatcttgttgttttaatttgcaattccctaatgacatatgatgttgagcatcttttcatattcttatttgccatcatctttggtgaggtgtctgttcagggttttttgcccattttttattgtgtggttcattttcttattgttgagtttaagagttctttgtgtatttggcttaatagtcctttaccagatatrtcttttgcaaatattttctcccagtgtgttgtcttctcattctcttgatgtgccttttgcagagcagaagtttttaattttaatgaagtccagattatcaattatttcttttgt

SEQ ID NO: 103673 - DNA, 518 bp, Homo sapiens
tataattctgcttatatgaagtacctagagtagtcaaagtcatagagacaggaaataatggtggttgtgccaggggctagggagggaagaatgggaaattaatgggtatagsgtttaggaactttagtctaagaaaggagaatattggatgccagaaattcagttttctttctgttccaagatccctttagctagagcgacatattgaagtcagagttcctaagggaaaatcattgtgtatggagatcatccttgtggatcaaatgtgaatcaatagtagatcaaaagatattccacttttgcagatattgacatttgttggacccgtaagattttatctagtattagatagataagatgtgaaccacttctcaacgctgcagactcaaatactaggaaatactaagaacctcaggacaaacaaatagccagtccaaaaagactcacagactagataagctgtcatctaccacctaacagataatgtatccctgttaaccactatctccagatgttca

SEQ ID NO: 103674 - DNA, 603 bp, Homo sapiens
gggaaagccaaatatgcacccctaaccaagcacactggatgtcccccttctagttagcccacaggcagcttccccacaccagcagtctccaatcagggcacacctgaagccttccctttcctcagctataaagctgtcccactcctctacctgccttctaagctctgtcaaaatgcaagtgccggtggctgatgccggtggctgwcgcccttgcgtcagaataaataaccattgcttttttcatttgatgggccttcgttttcacactttgtcatctttaagcttttagccctttgaaggattctgagactggaaaataaatgaaaggatatttcaaagggggaagttctttttttaaaggctttattctggtcaattgatttccaagtgtgcaatgtcccatggggtaggccacaaagaggcctagagtgcaccatctgtgcggctgcagctcctggctctcaacagaactgagatctaagtcctcatgatctgatcagcttccgagggcctaaacctcctattaccaccaacttggggattaggagttcaacaaataaatttggtgaggggacgcagacacacaaacattcagaccatagc

SEQ ID NO: 103675 - DNA, 603 bp, Homo sapiens
gggaaagccaaatatgcacccctaaccaagcacactggatgtcccccttctagttagcccacaggcagcttccccacaccagcagtctccaatcagggcacacctgaagccttccctttcctcagctataaagctgtcccactcctctacctgccttctaagctctgtcaaaatgcaagtgccggtggctgatgccggtggctgacgcccttgcgtcagaataaataaccattgcttttttcatttgatgggccttcgttttcacactttgtcatctttaagcttttagccctttgaaggattctgagactggaaaataaatgaaaggatwtttcaaagggggaagttctttttttaaaggctttattctggtcaattgatttccaagtgtgcaatgtcccatggggtaggccacaaagaggcctagagtgcaccatctgtgcggctgcagctcctggctctcaacagaactgagatctaagtcctcatgatctgatcagcttccgagggcctaaacctcctattaccaccaacttggggattaggagttcaacaaataaatttggtgaggggacgcagacacacaaacattcagaccatagc

SEQ ID NO: 103676 - DNA, 603 bp, Homo sapiens
gggaaagccaaatatgcacccctaaccaagcacactggatgtcccccttctagttagcccacaggcagcttccccacaccagcagtctccaatcagggcacacctgaagccttccctttcctcagctataaagctgtcccactcctctacctgccttctaagctctgtcaaaatgcaagtgccggtggctgatgccggtggctgacgcccttgcgtcagaataaataaccattgcttttttcatttgatgggccttcgttttcacactttgtcatctttaagcttttagccctttgaaggattctgagactggaaaataaatgaaaggatatttcaaagggggaagttctttttttaaaggctttattctggtcaattgatttccaagtgtgcaatgtcccatggggtaggccacaaagaggcctagagtgcrccatctgtgcggctgcagctcctggctctcaacagaactgagatctaagtcctcatgatctgatcagcttccgagggcctaaacctcctattaccaccaacttggggattaggagttcaacaaataaatttggtgaggggacgcagacacacaaacattcagaccatagc

SEQ ID NO: 103677 - DNA, 446 bp, Homo sapiens
gaattcattggcatagtcccaagaaactttacttggcaagcaagctattgattttggcgggggtgggatggtgtttatcagtcacccctactagcagagatgtgataacactgcagtcagagtagttgagttttaaaattttgacttgccaaccaacagaacattatttatrtggtaaaacttagacatcagaggctacaggcactcaggctaaattctgacccattcattggtgacaaatgttaagggatttttgccccattagccctttttttactcatgatggtactctgaacagaagaatctcctctaacaatttaagaccattcattgtataagcatgtaaatcatcaatctcaatgacacattttcacaactatacactgaattggctcagaggcttcactcataactttaactttttttccctctttactacaaatttt

SEQ ID NO: 103678 - DNA, 448 bp, Homo sapiens
tgaattcattggcatagtcccaagaaactttacttggcaagcaagctattgattttggcgggggtgggatggtgtttatcagtcacccctactagcagagatgtgataacactgcagtcagagtagttgagttttaaaattttgacttgccaaccaacagaacattatttatgtggtaaaacttagacatcagaggctacaggcactcaggctaaattctgacccattcattggtgacaaatgttaagggatttttgycccattagccctttttttactcatgatggtactctgaacagaagaatctcctctaacaatttaagaccattcattgtataagcatgtaaatcatcaatctcaatgacacattttcacaactatacactgaattggctcagaggcttcactcataactttaactttttttccctctttactacaaatttta

SEQ ID NO: 103679 - DNA, 575 bp, Homo sapiens
ggcaggcagatcacctgaggtcaagagtttgagaccagcctggccaaaatgktgaaaccctgtctctactaaaaatataaaaattagccaggcctggtggcacgtgcctgtagtcacagctacagctacttgggagggtgaggcgtgagaattgcttgaatctgagaggaggaggctgcagtgagccaagatcgtgccactgcattccagcccgggtgacagagcaggactctgtctcaaaaaaagaaagaaaaaaaaaagaaaacaagagaaaggtggtggtggaggaagatggcctcctattacctcattggagttacgtttcagagttccgacagggaagaaacgaagtgagatgaatttcatggaggtttttttatttttagacccagaaaactagtttaaaatacccatatgaacaaaaagggattaaagaaaaagcagtcctgaatagcagaatattatttagataaacaataaagttaatatagatcttctaaaaaatgatggcttgttgggaagaggccagaaaagctcagatgtgactttgtataatgaaaatgaaagtagaaaca

SEQ ID NO: 103680 - DNA, 575 bp, Homo sapiens
ggcaggcagatcacctgaggtcaagagtttgagaccagcctggccaaaatggtgaaaccctgtctctactaaaaatataaaaattagccaggcctggtggcrcgtgcctgtagtcacagctacagctacttgggagggtgaggcgtgagaattgcttgaatctgagaggaggaggctgcagtgagccaagatcgtgccactgcattccagcccgggtgacagagcaggactctgtctcaaaaaaagaaagaaaaaaaaaagaaaacaagagaaaggtggtggtggaggaagatggcctcctattacctcattggagttacgtttcagagttccgacagggaagaaacgaagtgagatgaatttcatggaggtttttttatttttagacccagaaaactagtttaaaatacccatatgaacaaaaagggattaaagaaaaagcagtcctgaatagcagaatattatttagataaacaataaagttaatatagatcttctaaaaaatgatggcttgttgggaagaggccagaaaagctcagatgtgactttgtataatgaaaatgaaagtagaaaca

SEQ ID NO: 103681 - DNA, 575 bp, Homo sapiens
ggcaggcagatcacctgaggtcaagagtttgagaccagcctggccaaaatggtgaaaccctgtctctactaaaaatataaaaattagccaggcctggtggcaygtgcctgtagtcacagctacagctacttgggagggtgaggcgtgagaattgcttgaatctgagaggaggaggctgcagtgagccaagatcgtgccactgcattccagcccgggtgacagagcaggactctgtctcaaaaaaagaaagaaaaaaaaaagaaaacaagagaaaggtggtggtggaggaagatggcctcctattacctcattggagttacgtttcagagttccgacagggaagaaacgaagtgagatgaatttcatggaggtttttttatttttagacccagaaaactagtttaaaatacccatatgaacaaaaagggattaaagaaaaagcagtcctgaatagcagaatattatttagataaacaataaagttaatatagatcttctaaaaaatgatggcttgttgggaagaggccagaaaagctcagatgtgactttgtataatgaaaatgaaagtagaaaca

SEQ ID NO: 103682 - DNA, 561 bp, Homo sapiens
ctatttgtttttcaatgccctcccatcctctttgtttccaaatctttaatgatgtccaatgctttctttgcttcttattacatttgtttcattttgtttaaaatgttaggttccatagtggtttcaatctatcattcctggtggatcagatctaaatattgtgagactgcttcatattcatctgctgattcttcagtaaatcaaagtgctaactgaatgttaaaaaactatacyatactatgcaaaaatgaatttttgtgttttagcaagtctaagatatcaccaattttatcatgcaccattatttcatattgcaccaaaaaatagtggctaattataattaaagattcattcaattgtaagatgcattcagtgttatgaaaatatgtactttctggaataaaatatggcaattcgttaaattctgcttttttgtaaacgtatcaatctctagagaattgtgcactccctcccacccaccccttgatattggaccatttaatcaacctacaagagcttctaaattcgaactttaattctcaaaaattctactcattcttc

SEQ ID NO: 103683 - DNA, 561 bp, Homo sapiens
ctatttgtttttcaatgccctcccatcctctttgtttccaaatctttaatgatgtccaatgctttctttgcttcttattacatttgtttcattttgtttaaaatgttaggttccatagtggtttcaatctatcattcctggtggatcagatctaaatattgtgagactgcttcatattcatctgctgattcttcagtaaatcaaagtgctaactgaatgttaaaaaactataccatactatgcaaaaatgaatttttgtgttttagcaagtctaagatatcaccaattttatcatgcaccattatttcatattgcaccaaaaaatagtggctaattataattaaagattcattcaattgtaagatgcattcagtgttatgaaaatatgtactttctggaataaaatatggcaattcgttaaattcygcttttttgtaaacgtatcaatctctagagaattgtgcactccctcccacccaccccttgatattggaccatttaatcaacctacaagagcttctaaattcgaactttaattctcaaaaattctactcattcttc

SEQ ID NO: 103684 - DNA, 561 bp, Homo sapiens
ctatttgtttttcaatgccctcccatcctctttgtttccaaatctttaatgatgtccaatgctttctttgcttcttattacatttgtttcattttgtttaaaatgttaggttccatagtggtttcaatctatcattcctggtggatcagatctaaatattgtgagactgcttcatattcatctgctgattcttcagtaaatcaaagtgctaactgaatgttaaaaaactataccatactatgcaaaaatgaatttttgtgttttagcaagtctaagatatcaccaattttatcatgcaccattatttcatattgcaccaaaaaatagtggctaattataattaaagattcattcaattgtaagatgcattcagtgttatgaaaatatgtactttctggaataaaatatggcaattcgttaaattctgcttttttgtaaacgtatcaatctctagagaattgtgcactccctcccacccaccccttgatattggaccatttaatcaacctacaagagcttctaaattygaactttaattctcaaaaattctactcattcttc

SEQ ID NO: 103685 - DNA, 563 bp, Homo sapiens
ccagcatatagggacatccagcttgaggcatcctgaggcccactcacctgcatgggtgaggccaaaggggcccacttctccattatataccrgaacagcatgaagatcttgtcagacagtcggttggcatccagtctggggtagggaaaatctctccagtggttgacatatttgtaaatggctttgctgaatttctcaagggctgcatttaaaacacacaaccacagactgagaaaaatataaggatggggcagacgataaaataatttgagaagagagtgctgatgattagtaaatatgtaatggtttttagatgatcttacgactgcatcaaatacacatatagaaagtgctcagccacaaaagtgaaatgcaaattaaaagcataatgagccactactatccagaatgtctaaaatttaagatagtcaatgccaagtgttaacaagactaaggtgcagctggtattctcactgctggtagaagggcgaattggttcaagcactttgcagaactctttggcactatctagcaaagttgaatatgcattccatttgacccaa

SEQ ID NO: 103686 - DNA, 563 bp, Homo sapiens
ccagcatatagggacatccagcttgaggcatcctgaggcccactcacctgcatgggtgaggccaaaggggcccacttctccattatataccagaacagcatgaagatcttgtcagacagtcggttggcatccagtctggggtagggaaaatctctccagtggttgacatatttgtaaatggctttgctgaatttctcaagggctgcatttaaaacacacaaccacagactgagaaaaatataaggayggggcagacgataaaataatttgagaagagagtgctgatgattagtaaatatgtaatggtttttagatgatcttacgactgcatcaaatacacatatagaaagtgctcagccacaaaagtgaaatgcaaattaaaagcataatgagccactactatccagaatgtctaaaatttaagatagtcaatgccaagtgttaacaagactaaggtgcagctggtattctcactgctggtagaagggcgaattggttcaagcactttgcagaactctttggcactatctagcaaagttgaatatgcattccatttgacccaa

SEQ ID NO: 103687 - DNA, 430 bp, Homo sapiens
agtgtatttactgcagttgtgtccatgctcacttgaggcctttttcccttaccagtcgagccttcctagaggaaggtcacataccagttaaatgccactattttgcctcttagtgtgcacgcttaagcccactcacccaactcctgagatcttattgggaagctgctgatcactagcttcagatgttttctatcttttgagagactrcctttcctgggcactggctgttaccaattcttattttagagagatggttaaaaaacaacctgatgatcacctgagggtcacctgacattcctgggtgggggcctttcctgctctgctcatgtgtgcctaactacctactctaatgtgatcattccaacatttctatgatgtttagttctaaggcttgctctgcctcttcacattttattttttgcctttagta

SEQ ID NO: 103688 - DNA, 347 bp, Homo sapiens
gtagccaggccaggctatgatgaaagcagccttgccacttggaacagatgaccaagctcaccctatggtattataagtatcagtgtgggaaaagataccatgttgaatttatggaagcctcaaagagatattcacaattcagacttctagggcaaggccaacgctatctatagtagagacttcaatatcttttaccaagcagctccatgtgtgytactgagcacatgtagagctagagcacctaaccatggggtaccaagtgaccttacagccccagctgcccatcattagctaggttctctcatcagactcaccaagttacaaagccaggtgggtccagcaactat

SEQ ID NO: 103689 - DNA, 347 bp, Homo sapiens
gtagccaggccaggctatgatgaaagcagccttgccacttggaacagatgaccaagctcaccctatggtattataagtatcagtgtgggaaaagataccatgttgaatttatggaagcctcaaagagatattcacaattcagacttctagggcaaggccaacgctatctatagtagagacttcaatatcttttaccaagcagctccatgtgtgttactgagcmcatgtagagctagagcacctaaccatggggtaccaagtgaccttacagccccagctgcccatcattagctaggttctctcatcagactcaccaagttacaaagccaggtgggtccagcaactat

SEQ ID NO: 103690 - DNA, 582 bp, Homo sapiens
gggatcatcattggcagcaggtctgagagaagggaggaggggatggaattcagtttgcaagtggtggaatcggcccaaggcaagagaagagacattcctctgttgtaacaggaacagaggtgggagagatggaggcagtgagttgcatgggaagaaggtgtcttctgctggctttgtttcctgctgagagtgagggggcagcaggaaaagggggcagcggtttkcagagagtgaaagaagggatctgaaagatttcagcaagaagttagttctgcagacaccaggtgatatggtttggctgtgtcctcactcaaatgtcttcctgaattgtagcgcccataattcccatgtgttgtgggaggcgacctggtggaagataattgaatcatgggggtggtttccgccatactgttctcgtagcagtgaataagtctcacaagatctgatagttttataaggggttttctgctttcacttggctctcattctctcttgtctgccaccatgtaaggatgtgccttttgccttttgccttctgccttctgccatgattgtgaggcctcctcagccacatggaactgt

SEQ ID NO: 103691 - DNA, 582 bp, Homo sapiens
gggatcatcattggcagcaggtctgagagaagggaggaggggatggaattcagtttgcaagtggtggaatcggcccaaggcaagagaagagacattcctctgttgtaacaggaacagaggtgggagagatggaggcagtgagttgcatgggaagaaggtgtcttctgctggctttgtttcctgctgagagtgagggggcagcaggaaaagggggcagcggtttgcagagagtgaaagaagggatctgaaagatttcagcaagaagttagttctgcagacaccaggtgatatggtttggctgtgtcctcactcaaatgtcttcctgaattgtagcgcccataattcccatgtgttgtgggaggcgacctggtggaagataattgaatcatgggggtggtttcygccatactgttctcgtagcagtgaataagtctcacaagatctgatagttttataaggggttttctgctttcacttggctctcattctctcttgtctgccaccatgtaaggatgtgccttttgccttttgccttctgccttctgccatgattgtgaggcctcctcagccacatggaactgt

SEQ ID NO: 103692 - DNA, 353 bp, Homo sapiens
ctccttaggagggtcgctgcagtgcagaacagggaatggatgaggagataatacagaaatagagtgaattttgcagaagcaggattytaaatcagaggcagtagaaaggcatgaatacacagaaatcttctggggggggagctgagatgaaatgggagttagagccaatcttatctagatcataaagggcatggtgatgctggttacacattctgcaagctccattaactcttggtaaaacacacatgcctgaggctaatagatttttatccaaccatagctgttctccactctcaacaaagcaaataatccagattgttcctttgcctttattcctctccagttgccatttt

SEQ ID NO: 103693 - DNA, 602 bp, Homo sapiens
tccaacattgggaattatattccaatatgagatttggacgaaacacacatcaaaattacatcattctaaccctgatacctcccaaatctcatgttcttctcacatttcaaaatataatcatgtcttcccaataatcccccaaattcttaactcattccagcattaactcaaaaacccaaagtccaatgtctcatttgagacaaggcaaatcccttcacctatgagcctayaaaatccaaaacaatttagttacttccatgttacaatggagatacaagcatttagtaaataatcctattccaaaagagagaaaattgccaaatgaaaggggctacatgcccgatgcaagtccaaaacccagcagggccattactaagtcttaaagctccaatataatctccttttactccatgccccacatccagaccacactggtgcaaggagtaagttaccaaagccttaggcagctccaccctgtggctttgcaggatgcagtccttgtgcagccttgggacttggtgccctgcatcccagacactctaggtccagccatggctaaaagggatcaaagtatagcttgggccattacttcaaagggtgca

SEQ ID NO: 103694 - DNA, 583 bp, Homo sapiens
acctggatttctctattttttctctattttggaaagccaggcagaaatggctggcctagaacttttctttaaaatattaccatgatagtttaaaaagcaaagatacagtgaaaatttaaaggtctttctcagagagctttcacctcagagagctctcagagatcatgtccaatcccctttaaacgtttaagatattgtaagtgttaagaaagaatgtttttgagaatgaaaaagaaagatgtttgaatgtgttttcatcttgatctggttaaataacaaacaataaattttatgatgttaatttaaaaatgtttcacgttgaatgaataaaatcttcaatctctattttcactctaaaaaactgcattccactataaaaagcaataaatggtcagcatctgtgagtggcacattgcagtcacaataatttcagtatctattttgataattgctcttgatatcttcacaaaatgctttgctcaaaatctttataagcaggatttcagacataaaagttattctctctctgtggtataatgagcaaccactttgataggaatggtrtgacagacataaacataaa

SEQ ID NO: 103695 - DNA, 412 bp, Homo sapiens
cagaggcaaacagccaagtactttcaagattcaatgcatacaactaatttagagaccaaggaatgctagcactttttaaaaggcatattttcagggggaaagctttgatgcttaatacatcacaataatgcacacagagaagcaggatgctgagccctaacctgaaaaggctcacttttgaaagcgagtaataacacttttgatatgaatgctagaatatataatgctgtggtatatatagagacatcattacacggagagtcaaatgcatcaaacaagccatttacttttaaaatgctctgtagtttattttgcaatttattattaattaaagacctaattggttcaagacttggactataccattgaatcactaaaaacaaaamcacttctaaggagaacaaatgaattc

SEQ ID NO: 103696 - DNA, 599 bp, Homo sapiens
tcaagatagagaagattttgaatgttactaccacaaagaaatgataaggtttaaagtgattaacatggcaataaccttgatttggtcattatataatgtatatatgcatggaaacatcatactgtacccataaagatataaaawtattttgtgtcaattataaataaagaatgaataaaaaagaaaattgtccgttgatgttacaaagaatagacatgatttggagaaaaatctagattctcatctgcattctggcatgctagcacatactttctttgtagggtgggcagggcatatataagtcacttaaaatatccaattttataatcatcaggtgtaaaacagggatagtaatggccatgccattgggttactggtattaggaattgtaaagggaataagagtcatgagaacattttgatatgttatgaaatgtcataagatgattatgtctttgaatattgtcctctttgagccctctttttccttcattgattttgttacagtgctactccttcttagcactctgtgggtgctctgtaaataagatccctttcatatgactccccttgcaaaactgagtagctgaagttacccag

SEQ ID NO: 103697 - DNA, 551 bp, Homo sapiens
aggttgtgataggcactggtttgatcatttgtgacaagcagctcttctttaatatctactggttgcacccaagctgttatcagctcctcttctccttgggggcttcttagtgtctatgtgtccatacagaacattactttttatgagggaattttgcctgaaacaccaactctttgcagaggtgcctgttaactcataattcacagggatttggtcttcgtccatgctcaccctacctttgcctgactttgaaatactgagaactaccctcaggcttragtgctgaatttgctgtggttgtgggcacacaacttgggttgtcttgctcctcttgtgaggtgtaaggctttttcccacttcccgtttcctgtagctttccactgcctctgatttccagatgacagagtctctgcaacttctaataatcccttcactaggaccaagcttgaaaacaaacagccctttgcacatattaagtgctcaaatagtttgtgaaatagagttgagttgaaaaccatgttatcagtgctgaaagaatttagtgtttggtt

SEQ ID NO: 103698 - DNA, 604 bp, Homo sapiens
acggcaataagcatttttatcacaaaaaggacaaaccttctctaaataatcaaagctcttattaggggaaaacctttcgtaaataattatttattcctaaatggaagtcaaatgcaccactaaatatcttccagggaaatgtgaagctttcaatagtgcatttaacatgagacagtcccttggaaaacactcygaggatgccacatttccatcttccaataacttccaaggtccacataacagaatctgctaaagccatcaacctgaactgaccccagttggttactgatttgtttgcataagatcctgttactcaggctgggcatagtgtctcacacctgtaaatctcaccactttgggaggccaaggtgggaggattgcttgagtccacgagtttgagaccagcctgggcaacatggaagaccttgtctctgcaaaaaataataaaaaaataaaaaataaatagccagacagacacagttgtatgagcttgtggtcccagctactaaggaggcagaggtgggaggattgcttgaacctgagaggtcaatgctgcagtgagtgttgcagtttgcaccaaccagcaccctccagcttgggtgat

SEQ ID NO: 103699 - DNA, 604 bp, Homo sapiens
acggcaataagcatttttatcacaaaaaggacaaaccttctctaaataatcaaagctcttattaggggaaaacctttcgtaaataattatttattcctaaatggaagtcaaatgcaccactaaatatcttccagggaaatgtgaagctttcaatagtgcatttaacatgagacagtcccttggaaaacactccgaggatgccayatttccatcttccaataacttccaaggtccacataacagaatctgctaaagccatcaacctgaactgaccccagttggttactgatttgtttgcataagatcctgttactcaggctgggcatagtgtctcacacctgtaaatctcaccactttgggaggccaaggtgggaggattgcttgagtccacgagtttgagaccagcctgggcaacatggaagaccttgtctctgcaaaaaataataaaaaaataaaaaataaatagccagacagacacagttgtatgagcttgtggtcccagctactaaggaggcagaggtgggaggattgcttgaacctgagaggtcaatgctgcagtgagtgttgcagtttgcaccaaccagcaccctccagcttgggtgat

SEQ ID NO: 103700 - DNA, 604 bp, Homo sapiens
acggcaataagcatttttatcacaaaaaggacaaaccttctctaaataatcaaagctcttattaggggaaaacctttcgtaaataattatttattcctaaatggaagtcaaatgcaccactaaatatcttccagggaaatgtgaagctttcaatagtgcatttaacatgagacagtcccttggaaaacactccgaggatgccacatttccatcttccaataacttccaaggtccacataacagaatctgctaaagccatcaacctgaactgaccccagttggttactgatttgtttgcataagatcctgttactcaggctgggcatagtgtctcacacctgtaaatctcaccactttgggaggccaaggtgggaggattgcttgagtccacgagtttgagaccagcctgggcaacatggaagaccttgtctctgcaaaaaataataaaaaaataaaaaataaatagccagacagacayagttgtatgagcttgtggtcccagctactaaggaggcagaggtgggaggattgcttgaacctgagaggtcaatgctgcagtgagtgttgcagtttgcaccaaccagcaccctccagcttgggtgat

SEQ ID NO: 103701 - DNA, 537 bp, Homo sapiens
ctggaaaactacaatgaaaaaaaaaaaatctatcctgaggccccggtggggctggctcagaggcaacaccctttccccttcccatgtcctgtgaatgaatgtcttgctctgtgtatgtgtccaggaccctgaggtgaagagctggggtagataatctgatgagcatttggtccaatggggaagtggtccataggctttccatgggtcattatcctttggagctgtgtaagccttgtgctgggagacctaggtgacatattaggagcagtggttcttcctccccaggcagaggttgcatgcacaaatgcacaattctctttccacactctaggcagtgcargtcccagcagagcattgttctcattagttgctctcctacaactggttttcagaacaaatgcaaagcacaaactttatcccaaggggctgatcctaagaaaataacaatacagaaacaggcacaacactgaagatacatgaagaagaaatacaaatgtttgtgccataattttttctaatactatctgatttttatgc

SEQ ID NO: 103702 - DNA, 566 bp, Homo sapiens
attttgctcatatgagaaagaacttataaatctcataaaattaaataacgttttgcacttgtaaaaactgactawaagaataggttgaaaggagagtgtgtacctctcctttaattatgtactttattaagaacatcctctaataattttttgagagatgagtctcactctgttgcccaggctggagtgctgtagcatgatcataactcactatagcctcaaactcctgagttcaagtgatccacctgccacagcttctcaagtagctggtactacaagacctatctataaccttttcaacaatataacttctaaattgaaccctggtggttactaaggtgtgatacacagtccttctttgtgtacttttttgtaaatgcccatctgaggcctgtttgatgaagaaattcaaataatctaaaatttggagaaaaaataatgaattatttgtaattattcaaaatttgattaaatctataaggccagtagcagagaaaaataacatattcactcagttgaacactatacagacattacaatgacctctctctcttttttttacaacc

SEQ ID NO: 103703 - DNA, 566 bp, Homo sapiens
attttgctcatatgagaaagaacttataaatctcataaaattaaataacgttttgcacttgtaaaaactgactaaaagaataggttgaaaggagagtgtgtacctctcctttaattatgtactttattaagaacatcctctaataattttttgagagatgagtctcactctgttgcccaggctggagtgctgtagcatgatcataactcactatagcctcaaactcctgagttcaagtgatccacctgccacagcttctcaagtagctggtactacaagacctatctataaccttttcaacaatataacttctaaattgaaccctggtggttactaaggtgtgatasacagtccttctttgtgtacttttttgtaaatgcccatctgaggcctgtttgatgaagaaattcaaataatctaaaatttggagaaaaaataatgaattatttgtaattattcaaaatttgattaaatctataaggccagtagcagagaaaaataacatattcactcagttgaacactatacagacattacaatgacctctctctcttttttttacaacc

SEQ ID NO: 103704 - DNA, 632 bp, Homo sapiens
gctattcttatatcaaactaaacaaacttcaaagcagcagtagttaaaaaagacaaagagagaaattataaaatgataaaagggctagtccaacagggaaataacacaattctaaaaatatatgcatccaacactggagctcccaaatttataaaacaattactactagacctaagtaatgagatagacrgcaacacaataatagtgggggactttaatactccactgacagcactagacagcttatcaagacagaaagtcaacaaagaaacaatggacctaaactatacctgacaacaaatggacataacagatatttacagaacattctacccaacaactgcagagtatacattctattcatatgcacatgaacattctccaagacagcccatatgatagaccacaaaacaagtctcagtaaattttaaaaaatcaaaattatatatcaagtactctctcagatcatagtggaataaaattggaaatcaagtccaaaaggaaaccccaaaaccatgcaaatacatggaaattaaataaactgcttcttaatgatcattgggtcaacaatgaaatcaagatggaaatttaaaaattctttgaactgaatgataatagtgatacaacctatc

SEQ ID NO: 103705 - DNA, 632 bp, Homo sapiens
gctattcttatatcaaactaaacaaacttcaaagcagcagtagttaaaaaagacaaagagagaaattataaaatgataaaagggctagtccaacagggaaataacacaattctaaaaatatatgcatccaacactggagctcccaaatttataaaacaattactactagacctaagtaatgagatagacggcaacacaataatagtgggggactttaatactccactgacagcactagacagcttatcaagacagaaagtcaacaaagaaacaatggacctaaactatacctgacaacaaatggacataacagatatttacagaacattctacccaacaactgcagagtatacattctattcatatgcacatgaacattctccaagacagcccatatgatagaccacaaaacaagtctcagtaaattttaaaaaatcaaaattatatatcaagtactctctcagatcatagtggaataaaattggaaatcaagtccaaaaggaaaccccaaaaccatgcaaatacatggaaattaaataamctgcttcttaatgatcattgggtcaacaatgaaatcaagatggaaatttaaaaattctttgaactgaatgataatagtgatacaacctatc

SEQ ID NO: 103706 - DNA, 613 bp, Homo sapiens
atcgcatttaatcctagcaatatgtaagtttaaaggactgcattcccctctactttaaagcttatatcctagatactcagtttgtgaccttggttgacctttggcatttcacgcaagttgaacagcaaaatcaaagcagccatttttaattcgtcattcccaagccctatctgagtggttccaaagtcacctgagaggaaggtttaaattagtccctctcaccccaccattgctataaaacagcaacgttttcattccaattcagccwtaaagaggtttctcttcttactgggttttgaaatcatttccttttttctttcgtttgcccttcttccttcctgtgttgtactatctctccaaccacgtctataagcagactcaatcttcttgcagaggaagatgagctggcactctgcaaacttctttaataaggacccaaagtttacttgacattaacctctagtaggtgagaaattccaaaaaagctttggggtacattagaatttccaaagctctgaaagatatttcaggagatttaacagcagagttgcaacttacacgtgaattctggtctatagtggtcatgtgagttaaattcgaatcctctacttgt

SEQ ID NO: 103707 - DNA, 594 bp, Homo sapiens
aaccacactcacaaatacacacacataaatgaaatcatgtacatctggtgaaatctgaataagctctatggattgtgccaatatcaatgttttgatttttatattgtactgtggttgtgtgggacattggcatgggatgcggagagttgggagacacttgcataggactcagtatattctttagcaacctcctgtgactctgtaattatgtaaaaataaaaattttaaaagtctttgaaaaattgaagactttgtgagatgtcagatgccagcatcttagtaaactgtactcactaggatgtgccattgaacctagctgactcatttgtgcagggctgttttccggtgtcattattttcttcccacttctcctggcagacagctggggcaattgttaagtttggaaatggattctggagtcttctagagtatggagtattgctgactataatggtggtggtaggatttcctggatttgtgagtggctattgaggtcttgaggcaagggcagcatggacagtttgagtgggaaggagaggmagataccattctgctaggagtttattctgctttacaaagacacacagtagatct

SEQ ID NO: 103708 - DNA, 513 bp, Homo sapiens
acatatttcaggttggtttaaagggtttagtggaacttaggggataatgccctccaagccaaattttagtgctgctacctcccatgatgaatcacgtgttgccctgtaaagagatacatttatactgtacattgctggtaggcatttacacagcatatatttattgagcagatatattagtggatagaagatttccaatcttgtggagcttacattataacaaggagacacaaacaataaacataatacataaaacatttaatatatcatgttagagcatgatacatgcttaaagaaaaacaaaagcattgtaaagtaagggtggttcaatgctctggataggtcatggagacagatgataacattaaactatggagcgagccttattggcaaggtagcataagaacagagtcttgaagaaataagatagtgttgcaagcrgtgagcaggattgaacaaagccttgaggcagcagcttatatatagtagttgaagaaaaaagatgtcaatgtg

SEQ ID NO: 103709 - DNA, 553 bp, Homo sapiens
gaggtagggcacgactgcaggttgctttgtgaattatgtagaaaacaccttctggcttcttttattagtatgcacattgcttcgtattttggagactgttttcatgcgacgcacctatgggattcatttacttgcccacacttatgcactcttcacttggatctatgcctagggttggagcgctgagacctgctgtctgtcccmagcaacttccaggcagtgggtgggtgagaatagagaaggcacaattgaatgtggaaagtgggtggaggaagaacggcatgtagaaggaatgggccggaaggggcactgggccacccagcctggtggtggaggtggaagggcagggaaggctttctggggaggtgatttccacatgggtcctgctgtctgagagaagctagacaggatgttgtggagacaggttgctcatctggaaacgggaggagatggacttcaaggtatttatgaggaatcaacaccaggggagaaggagaggagggagcaggggtgggtaaagggagaagtcagtcagtgatgcagaccccagaaa

SEQ ID NO: 103710 - DNA, 573 bp, Homo sapiens
tcagttctaataagaatgttaccttagtttagtgaaattaatgtaagatgaaataacagttcagttgcatttcatatggattcatttaagaacctactgcaagtgaggaaggtagtatgctaggtcttagggtaacttgaagatgaggacatagtaatattgtcaagaagcttaaaatatagtgggataaacagatgtgtaaatagataattaaaatgcaagaccaagtgaattaagtgctaaatagataaccagcagcctgtagggatattctattctaatttgggcttcaggaaaaaaattatggtgtagatggcacttgacttgagctttgaataatgtatagatgcctactaggtttatttatataaacattcaaaactatagtagcatacataatctcagtatgaacttatgtatgcatatgtatgtgtcagtatgtatgtgtgygtatgtgtcaatgtatagttacagtgggattagcatgtacccttctaaatactttcattttcatgaaatatgaaaaaatagaagggcttgcaaaatagctcctcctttaatttatgctattag

SEQ ID NO: 103711 - DNA, 559 bp, Homo sapiens
ttcctccctctcagagggacttcagaggccctaaaagggtaactctctttcctggagtatcacagtaaattggcaatggagactaagtgtgaattcagacacccagagcgccagtgccgagcttttacctgctctgttctctcttgatcctgagcctggtttttggttaccaaaattctcactatcctctgtactgtaaagtcctccctgctattcattttagatttgcatgttgcaaataaagcctagaatgctcaggaggctaaacactcaaagtcaatgacctgccccattgaggcaaagaacatctctctccaatcttttgggtctgtcttaaccccaaagaagagggactcccagaaagcagtgaagtctgcacctctgctaccttctcagggggctcagcacctccctgaagcaacagaacctccctaaggcacacatatgctcatgtcattccctccctgaccttgccctgcttaaaggctccccrtgtatctccactgcccaccacagaaaattcccactgctcaggccagtctataccctggccccaccc

SEQ ID NO: 103712 - DNA, 478 bp, Homo sapiens
atagtcttgcagtatcctgccatcactgagaagrctgactaccttgcccctgaacttggagtacaaccatttaacttgctttgataaacagaaaattactacactttgcatagagatttcagatggcttccataatggggattcttcctctttccatttaccatgagaatatcacctggctagtacactgttcccagaaggagagtgagaaactaatgaagtcagattgcccccacctgatccagaccaaattggccaaactctaactactaccaagattcagaatttggtccatttcaaataaacagagccatccaccaaacccagcttaaaaaaaatgaaatccaacaacatgtgagatataaacatctaatgtagtttggagggtttttctcttgcagaaaaacataactgataaatcaactctgctaaaccaagagtgtgggaaatatgtacaaccttgttgtgtcaggaattc

SEQ ID NO: 103713 - DNA, 622 bp, Homo sapiens
ttttctttacactttaccaactaggtatgcaaccctaaactccatcgcttggtctggcctgctttgcactgcgtgtaggtgcaatcctacatgttcttcttgtttgtggcttcttggactcaacattgtgtttctgaaatttagtcacatagttgcaagtacatgtgattttttttcacttctctataytgttccattgtgtggatttactgtaatgattgatctatccttaatatatatttggccagcttcttttttgaacagttacgaataattctactagagcattctttcatatatcatttgatgcaattcctctgtatatatacctttgagtagaattacagggtcattgtgcaaaatatcctcatagacatagaaaagtttaaaagataatttaactaaatgtactcctgtcagctttacctccattctattttttgccatttgcatgtatcttatcaattatataattaccccaacaagacattattattttatgcagtaaacattcatttagaattatgcacatatttaccacttcattaatttgtattcctttttgcatattcaatttaatagtttcaaaaagtccttttattggcaaggcagggtggctcac

SEQ ID NO: 103714 - DNA, 622 bp, Homo sapiens
ttttctttacactttaccaactaggtatgcaaccctaaactccatcgcttggtctggcctgctttgcactgcgtgtaggtgcaatcctacatgttcttcttgtttgtggcttcttggactcaacattgtgtttctgaaatttagtcacatagttgcaagtacatgtgattttttttcacttctctatactgttccattgtgtggatttactgtaatgattgatctatccttaatatatatttggccagcttcttttttgaacagttacgaataattctactagagcattctttcatatatcatttgatgcaattcctctgtatatatacctttgagtagaattacagggtcattgtgcaaaatatcctcatagacatagaaaagtttaaaagataatttaactaaatgtactcctgtcagctttacctccattctattttttgccatttgcatrtatcttatcaattatataattaccccaacaagacattattattttatgcagtaaacattcatttagaattatgcacatatttaccacttcattaatttgtattcctttttgcatattcaatttaatagtttcaaaaagtccttttattggcaaggcagggtggctcac

SEQ ID NO: 103715 - DNA, 586 bp, Homo sapiens
gacaggatctcattttttaaatggctgaatagtactccactgtgtatatgtaccacattctctctccctcttttttttttttttttttttttttttgagatggagtctcgctctgtctccaggctggagtgcagtggcgcaatctcrgctcactgcaacttcagcctcccaggttcaagtggttctcctgcctcagcctcctgagtcgctgggactacaggcgccagccaccacgcccagctaatttttttgtatttttagtagcgatggggtttcaccatgttggccaggatggtctcaatctcttgacctcatgatccacccacctcggcctcccaaagtgctgggattaccggtgtcagccaccgcccccggccataccaccttctctttatctattcatctgttgctggacactttgattgcttccaaatcttggctattgtgaacagtgctacaacaaacatgggagtgtggatacctgtttgatacacttacttcctttcttttgggtatatacccaccagcgagattgctggatcatatggtaactctaattttagtcttttgagaaacctttaaactg

SEQ ID NO: 103716 - DNA, 621 bp, Homo sapiens
attttaggattgttttctctatttctgtgaagaatgtttttggtattttgataggaattgcattgaatctgtagattctttgggtagtatggccattttaacaatgttgatacttctaatccatgaacatggactatcttttctttttttgggtgtccttttccatttctttcattagagttttatagttttcattatagagctatttcatctctttggctgagttaattttcaggtatttaattttatgtgtgacctttgtaagtgggattacttttttgattttgttttcaaattgttcactattggcatgtagaaatactactaattttttatgttaattgtgtattctgcaaatttactgagtttgtttatcaattctaatagtttttggtacagtcttcaggttttacaaatataagatcatattgtttacaaacaagcrtaatttgacttgttcctttcctatgtggatgctctttatttttcttgagtgattgctccagccagagcttctactattatgttgaataatagtagtgaatgtgagcattcttgtcatgttccagatcttagaggaaagccttttagtttttcccaatttagtatgatactagttgt

SEQ ID NO: 103717 - DNA, 621 bp, Homo sapiens
attttaggattgttttctctatttctgtgaagaatgtttttggtattttgataggaattgcattgaatctgtagattctttgggtagtatggccattttaacaatgttgatacttctaatccatgaacatggactatcttttctttttttgggtgtccttttccatttctttcattagagttttatagttttcattatagagctatttcatctctttggctgagttaattttcaggtatttaattttatgtgtgacctttgtaagtgggattacttttttgattttgttttcaaattgttcactattggcatgtagaaatactactaattttttatgttaattgtgtattctgcaaatttactgagtttgtttatcaattctaatagtttttggtacagtcttcaggttttacaaatataagatcatattgtttacaaacaagcgtaatttgacttgttcctttcctatgtggatgctctttatttttcttgagtgattgctcyagccagagcttctactattatgttgaataatagtagtgaatgtgagcattcttgtcatgttccagatcttagaggaaagccttttagtttttcccaatttagtatgatactagttgt

SEQ ID NO: 103718 - DNA, 579 bp, Homo sapiens
acaagtgggttaatcaaccataattctatctgtgtatttctctacttagatcattatgtctataataataataatcccctgcctatcaatctattgatattaaaattactattttaaataaaactaaattagatgctgggctaccctcaatctcatttagtggaaattcaagcaaaaatattattgattctccctagatttttattttttgagacatggtctcactctggagcctaaactggagtgcagtggtttgagattggctaactgcaatctatagctcccagcctcaatctgtttcccaccttggcctcccaagtagctagractacaggtggacaccactatacctggctaattgttgtatttttactagagactgggtttcaccatgtttcccaggttggtctccaataattgggctcaagaaatctgcctgcctaagcctcccaaggtgctcaattacaggcttaagccacagcatccaccctggtactgttacttcaaaatgtacatttgacatttgaaggaaaaatatttacataatgtgctatatgccaacatgcgtgaataaataaa

SEQ ID NO: 103719 - DNA, 580 bp, Homo sapiens
cactttgcaatcttccaaccagctcctcattcttagatacaaatgtcaagctaggaatcagcaggctgttggggatggaagcttccaatgtgaaaaatagaaactaatacaaattgaagggggacctagaggtaacaaagacaatgcaacaggcagagaaattttcaaactcaagattctttaggttggaaactaacagaaatgacaataaaatgtaaaaataaaataagggagaaaaaccctgagaaaattcgacttcaagaagtccaatatcaataactttcaagaaaacaggaaaaaaaaaatggagaagagaaagtcattagggaaataatactaaaaaaagttttcctccaaagtgaagtaagtgcccagatagagcacacaaagtatgygatgagaaggatgaaatatctaccacatcatgaactttttggggactaaagagagaaagatgaacccaaaagctgccagaggaaaacaactaaccacacacaaaaggaactaatggtagaacagcaccagacttttgaaaagctacactccatcttagaatacagtcgaacaaagcctttaaaag

SEQ ID NO: 103720 - DNA, 421 bp, Homo sapiens
gctgcagggagccgtgaccactgyactgcactccagcctgggcgacagagtaagacgctgtctcaaaaaacatttttttaaatttttaattaaaaatgtattaattatgttggtctttcactgtctcgtaacaaaagttaagacatttttccttttgtttttctcctctccatccaggccagtcagttggaggagctttttccagtgcaaagacagctatgtcttcatggctttccactttcaccacttccacctcccaaagtctcactgagccaccagatgagaagccttgagcaaggcgtcagaggctgctattgctttctgaggtttaagtgtcccctgtctgtctgctgctcccaggctgttactagccacagatccacagcaggggaccatatgtcgaactgtttacatggatgtt

SEQ ID NO: 103721 - DNA, 608 bp, Homo sapiens
atatttttaactaaaaattgagtaagtcaatctaaatactcagaaacttcaaaagaatcccctgttagttccagctggtgaaatccctaagaaaaaaaaaagaacaatggaacagaactaatatttaaaactataaggcaggaaaaccatcttgaaataagagaagataagaatctagacagtgaaaaagamtaacatgtatctagaaaaagaaatcaagagtggtcaaatctcagacatatgttagtaaaactactagacttgagaaacaaacaaaaattaacactttcttctggcaaaacaccatattacttacaatgaaacaaaagtaaatatggcaccaggtttcttgaaagaaatgcaggaaacaagaatagagatactctgtcaagaaactccaagaaaaaaaatgtgagcctaggattatttctatccagcatatatgtaaataatatattttctgacaaagtacatttaacatttaacacaagttcaaaaaataggagaatagctcaagaaataagaaagtagattaagtacctaactgtcacaaaggtaataggatatcatttaaagcagagaaaacaaataataggcactcagtcaag

SEQ ID NO: 103722 - DNA, 572 bp, Homo sapiens
acaatgattgaatgaaacagcctgagtcatcctgagcayttactctactcaatgcagagcattctcccaacccctgttatgctgttaaacatgattattggaaaatgtccggggaggaattgtgggatagagggagtaacaggtaacaacgaggggttgctgtgcttctcttctatgcaaattatcatattttgggtaaaacaatgccagcatagaatctgatattcaggcacaggaaaggggtgaagttccatttgaagagttattcctaaagcaaccgtaagtggtgggtggagccaaggaaagtggaaaagtggggatcaattagaaataaagattaagattaattgtgaacatggggcaattttcagtatgatagtggggtggagatggggcagtaactgagagcctccacacttggtgccacagtgtctagaccagtgtgcctactggcacaggccttgtgttgatagcaatccctctctctggtagcatgcattgcactctatgccacattttattaaatgattccatggcactctgctcacaccacttgcagaggttctatgctt

SEQ ID NO: 103723 - DNA, 536 bp, Homo sapiens
tctacatgcgcctccatatatgcgcacctcttccctccccttctaccctctgccattgcagtcagggaagacagtggctaagatgtgcagtgtgttacctttcccatgagtacttgcatttttaaacttccattttcattttggtagagacaatgcgtgcttccctacatatgctctcatttccttctcggtcatgctggtaagtctgcaatgctagttcctgacaggcaaggtcatgtgatgtagtctagccagtggcctgtgactagaaatggcaccttcagtttctagcagggggtctgccaccgccacattctcttttctttactacccttaataatcacaagacagaaggagcctggatctttgagtcactggctcgagctagccctagttaacctgcatgggcctttgtgtgacggacaaatcaacyatcagtgtgctacgccactgggatttggcaatttatttgttcctcaacatattcttattaattccttctaatacatttacataaagaaatatgtgttcatcag

SEQ ID NO: 103724 - DNA, 574 bp, Homo sapiens
tatactataaattatttctagattatttataatctttatacaatgtaaatgctatataaatagtggttacactctatatttttgatttgtattatttttattgtcatagttaactttttttttaaagacaaagtgtcactctgtcacccaggctggagtgcaatggcattattttygcttactgcaaccattgcctctcaggctcaagcaatcttcctgccccagcctcccaagcagctgggaccacaggcacatgccaccatacctggacattttatgtatttttttgtagagatggggttttgtcatattacccagggtggtctcaaactcctggcctcaagtgatcctctcacatcagcccctcagaatgctggtattacaggcatgaaccaccatacctggccatttttaattttttaaaagaatattttccatctgtagttggtggaatccatggatatggaatccatggatgcagagggctgactgtactcatattcttagtctcccttagagctaaaggtatctggttctggctttgaagatctaaaggaaagtttgtaatgagaga

SEQ ID NO: 103725 - DNA, 384 bp, Homo sapiens
atccacctgctgccccatttgtgacatatttttcatgttttacaaatacaaatccttaatagaacatgtacgactggtgatgaaataatattccaagataccagactgtgcatattgttttactgcctctctgctcactctgcattaagagcttcattgattccaacacccaarccaccattttgtaagggggagcctatagttactggtggcctgagagggttcattgtgtatcaacgctgcttcccctataaagttcaacatgctgcctgaaatatgaaaatcatcttcttgatttccttcagtctttcaaataaatacttgtgaatttaatcaaggagtcagaaaagacagttggaattagaaaataaaatggtatcaatt

SEQ ID NO: 103726 - DNA, 592 bp, Homo sapiens
cggagagcactgcaccccataaagaaaaaaaaaaagattttgcttacaaagggagccttcgatgatgtttgcatttatagtaataacagaaatgataatagcagtaaacaggtgttgctaggtgtctgagcaagtgttaaacacattacacgttattgactcatttaatgcccaaaataatctcaccaagcaggtgccaatactcgttccatttagcgctacttcttaaaaagtttttttttttctgaaaaagcagtaacggtcattgcttcccaccaggagtgagatttgtaattgcagtttccctggaaaattgtgaggtctgtttcatagtcattggcccggagccaactacwgtggcattttagttaaccccatctctgcttccacttccttcttttttctttggtcatttgactgcttttctaaaaagaaggagaggtttaaattcacttcttgaaatgaaacctaggaatatttttgcattcttttatccaggctttatctggcccaggttaccccacatttaaacagactatgatattgctgtgctggaatctctgaagttataccccagagcattgctctaaac

SEQ ID NO: 103727 - DNA, 521 bp, Homo sapiens
ggagcacgtacttatgtcagccawtggcttattccttgatgtcaatgttttggctttatttggtgaactggtggttgagttgatccttacttgctattcagactacctctgatccttctgaagaccagaaccatctggatggctcatttgactttgctcagaaaggtccttaatctctaagtacatcagttcaagcacagactcagactgagatggagaaatgaaagatggcccactttgggaggcagaaatgggtagactgcttgagcccaggagtttgagaccagcctgggcgaaatggagaaacaccatctctatgaaaaactgcaaaaaattagccaggcttcatggtgcacacccatagtcccagctattaggctgaggtgggaagatcacctgagcctggaaggtcgagtcttcagtgagccgtgattatgccactgcactccagcctgggtgacagaatgagaccctgtctcaaaaaaaaaaaaaaaagactagcaaaacaaaaaaaagaattc

SEQ ID NO: 103728 - DNA, 534 bp, Homo sapiens
tagaatgtagtttgatttaaagacatttagacatgctaatttgaaaactattcccttgatcatatgtgttttcatctgggtcctcagagaagcaaatgccaaaacagaattaaatgtgcaaaacgcctgtgagagagaatggggagggatctgggtagggctgggagagctgtcagagcacaatggatgtccaccctgagtgaaggagagagggaagagagaagaaaggttgggtagaagcattccagactgctgtaaartctaaggaaagtttggcaaggttacttgggagtcttgagccagtcatctgtcaaaggagtccctcttctcccagggatagctctaagtatcctgttgtgctcagtcactgactgggagcaacccataggtagtgtggtcttgctgcaaaggtgacagtgaatttcagggtgcagagctagaacccttgtcaatatggcccctgcaattggaggttgtgattcacattctcatactcatcacactatgacaatcataaaaatattaaagtttgac

SEQ ID NO: 103729 - DNA, 570 bp, Homo sapiens
tgctgatttttcaggccttacttgtctcagccacagtggtccaggccatgcttttactacctaaagtccagccgaaattcaagaccagcccatttagcagaagccctggtgactttctagccttttaaaatctttctcccccagaggcaagaagatatttccaagtactgctaaccccagtccttacatgcctacctcttgctgctgtgttccacccactaaatacaatcccctcgagaccaagaygaactcaacttaaagcttaattggatagatctctttagacattgattattagatttctagctacttcaattagaaagaaatggcctttctctatgtcttgtgtatgaaatctttgcacaactttagtcacatatacacacaactgagtgtagcttgccatctgctggtgaaatacgatatcacttttaagagagtttttttttttttttcttgttcccccctccccaatgcattcgaaggtctggatcattcttgaggcaatagcagtgtgccactcagcacaatcatattatgaatatccagatactatcaggccatggaaag

SEQ ID NO: 103730 - DNA, 401 bp, Homo sapiens
ttgggcaagttgactcctattcctgagccccatatttttctcttctgtraaattcagattaaaaaaacatggctttgatcaaacattataaataatatatagacagactgcttgtttttattgtattgccagaaatgaatcctactaatattgccatctatggacagaaaatgtattacctgtcttcatcaagacccagacgaggaagaacacgaaaagcggagattaattttactgccatctccagaaccgtcatcctaatatttacttacattttattattatttcaggctcatgcacatatacttagcatggatcattggccacagactcgcatacatttaactttattaccttttgcctcatgtatctcattaaaattttgctgcttaatcaaggat

SEQ ID NO: 103731 - DNA, 572 bp, Homo sapiens
agtccagcctgggtgacagagcaagactcagtcccaaaaaataaaaccacctggacagagagaggaaaaagttgtcaattgtgttatatccaaattttatcatttctgaatttcagctagacagagggaagaacagcctccaatcaaaacactgcatgggagataacttggatgagaagaagaagcatgagccagtattgcacaggcctctttgtcatgtttgccttcccccatgatcctcttcctgcaatgccctccttcatatcagccatgggaacaactgataaggatcctgaactttgctgatgctcatgtaatcatgtgcaagctcacagagagaggggtacatgtgagaatgtatatgtgagagagccggtgtgttttcttaataatgggatcctactacgtacrtttctaggtatcttgcttttctcacttaaaatatctcagctgagggtggcttgattccttacaggtttgtaattttagatgaagtgtctatttcatcgaagctttatctatggaatgtgtggagcctgggttgaggatccagcactccagcaagtgcttct

SEQ ID NO: 103732 - DNA, 572 bp, Homo sapiens
agtccagcctgggtgacagagcaagactcagtcccaaaaaataaaaccacctggacagagagaggaaaaagttgtcaattgtgttatatccaaattttatcatttctgaatttcagctagacagagggaagaacagcctccaatcaaaacactgcatgggagataacttggatgagaagaagaagcatgagccagtattgcacaggcctctttgtcatgtttgccttcccccatgatcctcttcctgcaatgccctccttcatatcagccatgggaacaactgataaggatcctgaactttgctgatgctcatgtaatcatgtgcaagctcacagagagaggggtacatgtgagaatgtatatgtgagagagccggtgtgttttcttaataatgggatcctactacgtacatttctaggtatcttgcttttctcacttaaaatatctcagctgagggtggcttgattccttacaggtttgtaattttagatgaagtgtytatttcatcgaagctttatctatggaatgtgtggagcctgggttgaggatccagcactccagcaagtgcttct

SEQ ID NO: 103733 - DNA, 427 bp, Homo sapiens
aagatgtggaggcaatccctcacaagtagtttcaaaacagtcacagcatggggcggaaggtagaagtatcaagcacccacctcttcaaatgctaggcctccagagggtcaaccctgtggtcctgctgctccctgaaggtccccaaaaccccctctggtccccctcttggtgaagggttttgggggaaagaaaacaggagccactrggagtcccaagggcaggagagggaaacaccacctgcagctcagagacaccacagctttttctcaaatactttgggtagcatgacatatgatcccccctccctgcggcctctctctcagactgaattggcctctttttctgctttatttttctgaatctctctgttctcttctctctcttcatgtgtcccttttcctttgtttcaacttttatagaaactatt

SEQ ID NO: 103734 - DNA, 515 bp, Homo sapiens
aattcctcacacagggcctcaggatcccccatccctgaaatttccaggtgatgtctttccctctcaagtgtagagtggaactgtcaggatatgactcctgtcaatcatccctaagcaatgcccatgagccccttcgcagacacgtgctgcctacctgcagtggggaggaaagcagggagaggctgcaaaaccctggttagtgtaaaatcaccctcattttctcttgtgtttctataatagaatgaagagacacccattccccagtatcycaaatcaagtaagcgagtggcaactgccaccgtggcttccaatttcttccttgaggagtgtaataaaagaatcagatgacaccaaaagcatgaaccataagagaaaaagaatttataaattggacttcactaaaattaaaaactcttgctcttcaaaaaacaccattaagaaaatgaaaagaaaagtaatatcctgggagaaaatatttgcaaaatgtaactgaaatgacttgtattcagaagaca

SEQ ID NO: 103735 - DNA, 600 bp, Homo sapiens
ttgataatatagaccacagctccttcacaggttgtggtaaggatcraatcagagctctataaagaactctgctgagctctgtaaagagactagacagcgggcaagtgggggtgtggaaagtggggcagagactgtcttgagcctgcatggataactctgcatccccagagtcaggaagagagctgggcacatgcagcacaaccaacagtcattgagcactactgggtgcagggagtgttgtagtcttcaccgttctatgaatgagaacttactattgttcccattttacaggtgaggaaattgagacacaggaaaggtaagtaatttgctcaggatcatatagttggcaaatagcaaagtggggatttcgatccagcattccatatctccctctcctgctttattcttctccatagcatacctcatcatctcatcatctaacattgtgtgtgtgtgtgtctgtgtgtgtgtgtgtgtgtaacagtctctcttcaaccaaactttacttaggctcttctgagctctcttctcagctaggccttgaccttggctcctgtccttgctgggcctgcatcgaatcctgctaaagtggtttagtga

SEQ ID NO: 103736 - DNA, 600 bp, Homo sapiens
ttgataatatagaccacagctccttcacaggttgtggtaaggatcgaatcagagctctataaagaactctgctgagctctgtaaagagactagacagygggcaagtgggggtgtggaaagtggggcagagactgtcttgagcctgcatggataactctgcatccccagagtcaggaagagagctgggcacatgcagcacaaccaacagtcattgagcactactgggtgcagggagtgttgtagtcttcaccgttctatgaatgagaacttactattgttcccattttacaggtgaggaaattgagacacaggaaaggtaagtaatttgctcaggatcatatagttggcaaatagcaaagtggggatttcgatccagcattccatatctccctctcctgctttattcttctccatagcatacctcatcatctcatcatctaacattgtgtgtgtgtgtgtctgtgtgtgtgtgtgtgtgtaacagtctctcttcaaccaaactttacttaggctcttctgagctctcttctcagctaggccttgaccttggctcctgtccttgctgggcctgcatcgaatcctgctaaagtggtttagtga

SEQ ID NO: 103737 - DNA, 614 bp, Homo sapiens
tttttgcataatatacttttctgactcaacattttgcaggaattacaattggaggacaaagggttgtagtaaccattggtgcatgccatgattcaatcatttgacatttattgagctcttcaatgtaccagacaaagtgctakactctaaggatataaaaatgattatactacctcttcattcaaggattctacagtcaaattaagaaacagacacaaatgcataattacaatgcaacaggctggaggtatggattgtggcttatctaaggagctatggcaatacatgatgaggtagatacctcatcttcagtatggctgttgttcagtcagtttcatggaattaagaataaccgtgagtgacttttctgatttgcctagagctgttttcaagatgagaaactttctgggctatccttttgtggctatatagacttttgcctccgagagacttagacaaagtattttctcaagtacacattgcttgctaggttttattacctatatgaaaataagaagtgaactccctgtagcacagcagaaagaagacagataattatttgtgctagaccagaagagattgtcctgcatttagcatagatattcacgctcaat

SEQ ID NO: 103738 - DNA, 614 bp, Homo sapiens
tttttgcataatatacttttctgactcaacattttgcaggaattacaattggaggacaaagggttgtagtaaccattggtgcatgccatgattcaatcatttgacatttattgagctcttcaatgtaccagacaaagtgctagactctaaggatataaaaatgattatactacctcttcattcaagrattctacagtcaaattaagaaacagacacaaatgcataattacaatgcaacaggctggaggtatggattgtggcttatctaaggagctatggcaatacatgatgaggtagatacctcatcttcagtatggctgttgttcagtcagtttcatggaattaagaataaccgtgagtgacttttctgatttgcctagagctgttttcaagatgagaaactttctgggctatccttttgtggctatatagacttttgcctccgagagacttagacaaagtattttctcaagtacacattgcttgctaggttttattacctatatgaaaataagaagtgaactccctgtagcacagcagaaagaagacagataattatttgtgctagaccagaagagattgtcctgcatttagcatagatattcacgctcaat

SEQ ID NO: 103739 - DNA, 588 bp, Homo sapiens
aagcctctctgtactctgaggacctgctcttctaccagcaagcttgattctgacttcttaggaggaaaatggggtagagcctctgggcaaaaatgagaagcattccttttttccctgtggtctcctcacagacaggagcatccatttgctgtccccatcttgtccctatatcttggcaatgcccatgaaaccaagtccaaactccttagcatggcaaacaatgttttaygggaaagcagcttcttaatttttcttagcttcgatttcatcatgtataaaagaggtattaaataagactacttcatagggtggagataattaaatgagggcctagacaaacttaacagggtgctgggcacaggataggtgcccagtaattgtgtgttagcatatagattatgatttgctccttgccgattcctccagcttcctgtgtcaccagaccatgcccatctttccccgccccaggcagaactccagcaacatttaattacggtttttaaaggtactttgctctctctcttccccctctggacttttgcatattagcttttctgcttgaaatgcctcctgtcctccttccctaac

SEQ ID NO: 103740 - DNA, 582 bp, Homo sapiens
gggccatgatgacaatggcggttttgtggaatagaaaggcgggaagggtggggaaaaaattgagaaatcggatggttgccgggtctgtgtggatagaagtagacatggagacttttcattttgttctgtactaagaaaaattcttctgycttgggatcctgttgatctgtgaccttatccccaaccctgtgctctctgaaacatgtgctgtgtccactcagggttaaatggattaagggcggtgcaagatgtgctttgttaaacagatgattgaaggcagcatgctcgttaagagtcatcaccactccctaatcttaagtacccagggacacaaacactgcggaaggccgcagggtcctctgcctaggaaaaccagagacctttgttcacttgtttatctgctgaccttccctccactattgtcctatgaccctgccaaatccccctctgcgagaaacacccaagaatgatcaataaaaaaaaaaataaaaataaaaaaatgagtcctcttagacactgcagtaagagggcaaatcgaatcaacctctttgacggctatttggcacaatgttcttccaaagc

SEQ ID NO: 103741 - DNA, 582 bp, Homo sapiens
aagtatgctaaataccactgaattgtaaattttwaaatggttgtgtgctatgtgaatttcatcttaagttttttaaaagttgaaaaggctttaaaaaaatgtgagcccttatcacccccaccctgcacattctgatttgcctcctagggagcatactgacatgtaagttcactttataagggatgtgaggtgactacctggcttagagtgactcatcatcacttattatgtactttggaagcttgagagcagtgcattttgggcaatttgctgattgctttaggcaatcctaacgttgagccccgtgggtagcaagaaatagcaggtgattagaacagaagcaattactctcagaaaagcatcattaatttcaaaagctctcgtcctgagatatgtggctaagtggggacaaattaggatgctgtctagaggaaagaaagtgaagtagtttccccctctttaggacagaaaggtaacctaatgtcatctgttccaagtagttaaccctcctctgggggtgggaatggcggacttgggattggcccgttgtaggaaggtcggccgtgggaggcctagggtctg

SEQ ID NO: 103742 - DNA, 582 bp, Homo sapiens
aagtatgctaaataccactgaattgtaaattttaaaatggttgtgtgytatgtgaatttcatcttaagttttttaaaagttgaaaaggctttaaaaaaatgtgagcccttatcacccccaccctgcacattctgatttgcctcctagggagcatactgacatgtaagttcactttataagggatgtgaggtgactacctggcttagagtgactcatcatcacttattatgtactttggaagcttgagagcagtgcattttgggcaatttgctgattgctttaggcaatcctaacgttgagccccgtgggtagcaagaaatagcaggtgattagaacagaagcaattactctcagaaaagcatcattaatttcaaaagctctcgtcctgagatatgtggctaagtggggacaaattaggatgctgtctagaggaaagaaagtgaagtagtttccccctctttaggacagaaaggtaacctaatgtcatctgttccaagtagttaaccctcctctgggggtgggaatggcggacttgggattggcccgttgtaggaaggtcggccgtgggaggcctagggtctg

SEQ ID NO: 103743 - DNA, 617 bp, Homo sapiens
cattgtaagtatgctaaataccactgaattgtaaattttaaaatggttgtgtgctatgtgaatttcatcttaagttttttaaaagttgaaaaggctttaaaaaaatgtgagcccttatcacccccaccctgcacattctgatttgcctcctagggagcatactgacatgtaagttcactttataagggatgtgaggtgactacctggcttagagtgactcatcatcacttattatgtactttggaagcttgagagcagtgcattttgggcaatttgctgattgctttaggcaatcctaacgttgagccccgtgggtagcaagaaatagcaggtgattagaacagaagcaattactctcagaaaagcatcattaatttcaaaagctctcgtcctgagatatgtggctaagtggggacaaattaggatgctgtctagaggaaagaaagtgaagtagtttccccctctttaggacagaaaggwaacctaatgtcatctgttccaagtagttaaccctcctctgggggtgggaatggcggacttgggattggcccgttgtaggaaggtcggccgtgggaggcctagggtctgtaccaattccagtttaagctgctgaattc

SEQ ID NO: 103744 - DNA, 428 bp, Homo sapiens
agattcctaccatgcaaaagactgaagtggggactgagagaaactctcagagcctgtatagccaggaatgtggaagataaagggtctgaagcatggggcacatgttgagggccaccccaaggggctgctttgctgggtgaggcccacaaaagcccacacacaaatgtgtaggaggcccacaaaagccaagaatcttcttgctttcacacatccctggtgcacrtgcacaatttgtgagtgggggtatgaagtctcaccattgtagtggaggagaacaataacctaggagaacattactcaggagatctgggattcaggaccatgttactgacactttggttagagtatgtgtgcctctctgagcattagcctctgtctggaagagaataataacctgatgataaccctggccttgggagacattatgg

SEQ ID NO: 103745 - DNA, 526 bp, Homo sapiens
ccttgcccacactctgacattccaagacaggtaacagcataggcagaaagtatttttggtacagtraggatgagtgttcaagaagaataaaaattcagagggaatagaaaagtcacattttagccttagagccaaacagtatctcagcgattcttcaacctggaccgagcatcagagccactgggagggcctgtttaagcccaagttgctgcaccctgcccccggagcttctcattcagttggcctagggtggaacagaagacttcgtgtttctagcaagttctcagctgatgcagattctgctagtcttggaaccacgctttgaaaaccaccgctctagctcacaagctgaccattctttcattctcatctctctcccttttactcagcttgccctctttgggggtctcacttctcctctgtgaacagtgccctgaggaacagctgaggagtctggacacagtcctgctgtgtacttacaattatttctaggacacaccaacacacccatctctttggaatcttt

SEQ ID NO: 103746 - DNA, 526 bp, Homo sapiens
ccttgcccacactctgacattccaagacaggtaacagcataggcagaaagtatttttggtacagtgaggatgagtgttcaagaagaataaaaattcagagggaatagaaaagtcacattttagccttagagccaaacagtatctcagcgattcttcaacctggaccgagcatcagagccactgggagggcctgtttaagcccaagttgctgcaccctgcccccggagcttctcattcagttggcctagggtggaacagaagacttcgtrtttctagcaagttctcagctgatgcagattctgctagtcttggaaccacgctttgaaaaccaccgctctagctcacaagctgaccattctttcattctcatctctctcccttttactcagcttgccctctttgggggtctcacttctcctctgtgaacagtgccctgaggaacagctgaggagtctggacacagtcctgctgtgtacttacaattatttctaggacacaccaacacacccatctctttggaatcttt

SEQ ID NO: 103747 - DNA, 644 bp, Homo sapiens
  misc_feature (1)...(644): n = A,T,C or G
catttttgtttaaattccaaatatgatgtttgaaatcgtgatattctggagtgatatggtttggctgtgtccccacccaaatctcatcttgaattgtaacttccacaattcccacatgtcatgggaggaacccagtgggaggtgattgaattatgggggcaagtctctcctgtactgttctcrggatagtgaatgagtctcacgagatctgatcattttaaaaggagagtttccctgcacaagctctcttctcttgtctgccaccatgtgagacatggctttcatgttccgccatgattgttaggcctccccagccacatggaactataagttcaataaatctctatcttttgtaaattacccagtgtcgggtatgtctttattagcagcatgaaaacagaccaatacatggagctatagaggaacatggctaaacaagtaagagcaaaatcatgttgtcttgttggggactggtgtttgtaaataacagcctcagagctgaagtggtataaactttagtggttccagcagacagtagcttgtctgcagagtcatgtgttgtgcacatgcattggggatgtcatccacaaggacagccacccagtctttaatatcacganctcagaacatcctatccacccaac

SEQ ID NO: 103748 - DNA, 644 bp, Homo sapiens
  misc_feature (1)...(644): n = A,T,C or G
catttttgtttaaattccaaatatgatgtttgaaatcgtgatattctggagtgatatggtttggctgtgtccccacccaaatctcatcttgaattgtaacttccacaattcccacatgtcatgggaggaacccagtgggaggtgattgaattatgggggcaagtctctcctgtactgttctcaggatagtgaatgagtctcacgagatctgatcattttaaaaggagagtttccctgcacaagctctcttctcttgtctgccaccatgtgagacatggctttcatgttccgccatgattgttaggcctccccagccacatggaactataagttcaataaatctctatcttttgtaaattacccagtgtcgggtatgtctttattagcagcatgaaaacagaccaatacatggagctatagaggaacatggctaaacaagtaagagcaaaatcatgttgtcttgttggggactggtgtttgtaaataacagcctcagagctgaagtggtataaactttagtggttccagcagacagtagcttgtctgcagagtcatgtgttgtgcacatgcattgggkatgtcatccacaaggacagccacccagtctttaatatcacganctcagaacatcctatccacccaac

SEQ ID NO: 103749 - DNA, 606 bp, Homo sapiens
tcattaatatttagcatagactgtaaaatcactgccattagaattttttgaggtttcccaaaccattgtaacttccccacatgttatkttggtcactccttcccttatgattggcaggaaaagcctgacctgtgtgcttgtgtggcccaggcactaagagcctcaggttcacagggcatgccctcgtgctagtgctgctagagagggggtagaccatgttacacaggaagcatcacggtgttgtgcaatgggactgggttgggggcgggcaagttctgttccctaccaagactcctatcagaaagggtctcttcttgccacagagactacagcaacaaggcagagaaagtttattaaggtgggaaacaggcatcagacaaagcagcacatttgagggactccttcttaggcaaacagataaaagcactcccagaaaagcaaaaacagaatgacctcaacattttgcaacacatattggaagaaaccagcctccgcagaaatcaactgatggaagctggagtaaacatggactttttacaaattgcaaaagtaatgtcagagaccctgaaacaaggtgatatagcttagatgtttgtcccctctaaa

SEQ ID NO: 103750 - DNA, 606 bp, Homo sapiens
tcattaatatttagcatagactgtaaaatcactgccattagaattttttgaggtttcccaaaccattgtaacttccccacatgttattttggtcactmcttcccttatgattggcaggaaaagcctgacctgtgtgcttgtgtggcccaggcactaagagcctcaggttcacagggcatgccctcgtgctagtgctgctagagagggggtagaccatgttacacaggaagcatcacggtgttgtgcaatgggactgggttgggggcgggcaagttctgttccctaccaagactcctatcagaaagggtctcttcttgccacagagactacagcaacaaggcagagaaagtttattaaggtgggaaacaggcatcagacaaagcagcacatttgagggactccttcttaggcaaacagataaaagcactcccagaaaagcaaaaacagaatgacctcaacattttgcaacacatattggaagaaaccagcctccgcagaaatcaactgatggaagctggagtaaacatggactttttacaaattgcaaaagtaatgtcagagaccctgaaacaaggtgatatagcttagatgtttgtcccctctaaa

SEQ ID NO: 103751 - DNA, 606 bp, Homo sapiens
tcattaatatttagcatagactgtaaaatcactgccattagaattttttgaggtttcccaaaccattgtaacttccccacatgttattttggtcactccttcccttatgattggcaggaaaagcctgacctgtgtgcttgtgtggcccaggcactaagagcctcaggttcacagggcatgccctcgtgctagtgctgctagagagggggtagaccatgttacacaggaagcatcacggtgttgtgcaatgggactgggttgggggcrggcaagttctgttccctaccaagactcctatcagaaagggtctcttcttgccacagagactacagcaacaaggcagagaaagtttattaaggtgggaaacaggcatcagacaaagcagcacatttgagggactccttcttaggcaaacagataaaagcactcccagaaaagcaaaaacagaatgacctcaacattttgcaacacatattggaagaaaccagcctccgcagaaatcaactgatggaagctggagtaaacatggactttttacaaattgcaaaagtaatgtcagagaccctgaaacaaggtgatatagcttagatgtttgtcccctctaaa

SEQ ID NO: 103752 - DNA, 606 bp, Homo sapiens
tcattaatatttagcatagactgtaaaatcactgccattagaattttttgaggtttcccaaaccattgtaacttccccacatgttattttggtcactccttcccttatgattggcaggaaaagcctgacctgtgtgcttgtgtggcccaggcactaagagcctcaggttcacagggcatgccctcgtgctagtgctgctagagagggggtagaccatgttacacaggaagcatcacggtgttgtgcaatgggactgggttgggggcgggcaagttctgttccctaccaagactcctatcagaaagggtctcttcttgccacagagactacagcaacaaggcagagaaagtttaytaaggtgggaaacaggcatcagacaaagcagcacatttgagggactccttcttaggcaaacagataaaagcactcccagaaaagcaaaaacagaatgacctcaacattttgcaacacatattggaagaaaccagcctccgcagaaatcaactgatggaagctggagtaaacatggactttttacaaattgcaaaagtaatgtcagagaccctgaaacaaggtgatatagcttagatgtttgtcccctctaaa

SEQ ID NO: 103753 - DNA, 550 bp, Homo sapiens
tccagcttaggaacattcaaaacggctaggcccagaactgatatttgtgtataacatatggtttttctcatatagatagactattccagcatcatttagtgaaaagtgacctgcaagacaatcttgctgaaattgctttgaatctgaacatcagctggggagaactgcattacatgaaacttcatacacataaatgtgttttatttttctatttatgtcttagaattattaaaataaattttcatacaaatactatatgtattttgttagattcattcagatyctatgcatttttcttcctaatacataaggcatatttttaaaaaatatgttttctgtttgttgccaaagaataaaaatgcaattgatttttgaatattaaacatatctagccatggtattgaattcttctaattcctaataagttgtcaattattttattctttctaggtaaatattgatactataataaattttccttctttctgtttctttccttttcctattatttacttttcttgcattactaggctagtttggactttatttt

SEQ ID NO: 103754 - DNA, 550 bp, Homo sapiens
tccagcttaggaacattcaaaacggctaggcccagaactgatatttgtgtataacatatggtttttctcatatagatagactattccagcatcatttagtgaaaagtgacctgcaagacaatcttgctgaaattgctttgaatctgaacatcagctggggagaactgcattacatgaaacttcatacacataaatgtgttttatttttctatttatgtcttagaattattaaaataaattttcatacaaatactatatgtattttgttagattcattcagatcctatgcatttttcttcctaatacataaggcatatttttaaaaaatatgttttctgtttgttgccaaagaataaaaatgcaattgatttttgaatattaaacatatctagccatggtattgaattcttctaattcctaataagttgtcaattattttattctttctaggtaaataytgatactataataaattttccttctttctgtttctttccttttcctattatttacttttcttgcattactaggctagtttggactttatttt

SEQ ID NO: 103755 - DNA, 550 bp, Homo sapiens
tccagcttaggaacattcaaaacggctaggcccagaactgatatttgtgtataacatatggtttttctcatatagatagactattccagcatcatttagtgaaaagtgacctgcaagacaatcttgctgaaattgctttgaatctgaacatcagctggggagaactgcattacatgaaacttcatacacataaatgtgttttatttttctatttatgtcttagaattattaaaataaattttcatacaaatactatatgtattttgttagattcattcagatcctatgcatttttcttcctaatacataaggcatatttttaaaaaatatgttttctgtttgttgccaaagaataaaaatgcaattgatttttgaatattaaacatatctagccatggtattgaattcttctaattcctaataagttgtcaattattttattctttctaggtaaatattgatactataataaattttccttctttctgtttctttccttttcctattatttacttttcttgmattactaggctagtttggactttatttt

SEQ ID NO: 103756 - DNA, 609 bp, Homo sapiens
tcatcattagtccattcaaaataaagactacaccaacataaaagcaagcaggatctcccaatcctttgaaaagatacagataakcagtgtttaatgaatatatgactcgaaagcaattgggcataattatctcagtgctttgcaatcaagagcttatgaatttgctgaaagcatttgctttccagattgccgctgtgtttaattctttacccttataagagtttgtgtgtgtgtgtgtgtgtatgcaaacacatatatgtatgtgtgtatatatgtgtgtatatatacacatacacatatgtaagctcacccttaatgaggtattatatagttacactttatactttttataattgcatttgtactttcctctaatgaattactattatactgtaatgatttgttggggattcacatttatttaggtgatgctgctagtgttcagtgtctggaactgtctgtagaaccacttaatgaatacaaaagaaaatccattgcattatttttatcttttgctaggctctaggaagagttaagatatgattttgacttcagggtacagctttagtctatatgaaatgatccagtcatttgatccattattatgta

SEQ ID NO: 103757 - DNA, 609 bp, Homo sapiens
tcatcattagtccattcaaaataaagactacaccaacataaaagcaagcaggatctcccaatcctttgaaaagatacagataagcagtgtttaatgaatatatgactcgaaagcaattgggcataattatctcagtgctttgcaatcaagagcttatgaatttgctsaaagcatttgctttccagattgccgctgtgtttaattctttacccttataagagtttgtgtgtgtgtgtgtgtgtatgcaaacacatatatgtatgtgtgtatatatgtgtgtatatatacacatacacatatgtaagctcacccttaatgaggtattatatagttacactttatactttttataattgcatttgtactttcctctaatgaattactattatactgtaatgatttgttggggattcacatttatttaggtgatgctgctagtgttcagtgtctggaactgtctgtagaaccacttaatgaatacaaaagaaaatccattgcattatttttatcttttgctaggctctaggaagagttaagatatgattttgacttcagggtacagctttagtctatatgaaatgatccagtcatttgatccattattatgta

SEQ ID NO: 103758 - DNA, 609 bp, Homo sapiens
tcatcattagtccattcaaaataaagactacaccaacataaaagcaagcaggatctcccaatcctttgaaaagatacagataagcagtgtttaatgaatatatgactcgaaagcaattgggcataattatctcagtgctttgcaatcaagagcttatgaatttgctgaaagcatttgctttccagattgccgctgtgtttaattctttacccttataagagtttgtgtgtgtgtgtgtgtgtatgcaaacacatatatgtatgtgtgtatatatgtgtgtatatatacacatacacatatgtaagctcacccttaatgaggtattatatagttacactttatactttttataattgcatttgtactttcmtctaatgaattactattatactgtaatgatttgttggggattcacatttatttaggtgatgctgctagtgttcagtgtctggaactgtctgtagaaccacttaatgaatacaaaagaaaatccattgcattatttttatcttttgctaggctctaggaagagttaagatatgattttgacttcagggtacagctttagtctatatgaaatgatccagtcatttgatccattattatgta

SEQ ID NO: 103759 - DNA, 609 bp, Homo sapiens
tcatcattagtccattcaaaataaagactacaccaacataaaagcaagcaggatctcccaatcctttgaaaagatacagataagcagtgtttaatgaatatatgactcgaaagcaattgggcataattatctcagtgctttgcaatcaagagcttatgaatttgctgaaagcatttgctttccagattgccgctgtgtttaattctttacccttataagagtttgtgtgtgtgtgtgtgtgtatgcaaacacatatatgtatgtgtgtatatatgtgtgtatatatacacatacacatatgtaagctcacccttaatgaggtattatatagttacactttatactttttataattgcatttgtactttcctctaatgaattactattatactgtaatgatttgttggggattcacatttatttaggtgatgctgctagtgttcagtgtctggaactgtctgtagaaccacttaatgaatacaaaagaaaatccattgcattatttttatcttttgctaggctctaggaagagttaagatatgrttttgacttcagggtacagctttagtctatatgaaatgatccagtcatttgatccattattatgta

SEQ ID NO: 103760 - DNA, 265 bp, Homo sapiens
aaaccaacaaagtaccaacagtatcaaaacaaagtaaacttcagactaatatcccttgcgaatataaacacaaaattcctaaacaaaattgcaaaaatagatttcaataatatattaattatataccatgaccaaatgaggttttcttccagggatgcaaggctgtttcaatattcaaatacatcatattacatgttaasaggcaaaataagaaaaatcacataatcatataaattggtacagaaaaaaaatttgaaagaattca

SEQ ID NO: 103761 - DNA, 647 bp, Homo sapiens
ttttggggcagcaatctgcttggtatccttcagccaacctcccaatgaccctgtgtgggcatcagagagccccagcctcccacacctctgcttagggccaagccaaaggtcctgagtcagagctgagagatggagtcacatattgccccctaaagtaggaatgccctccaatccttttccacgcagggtgagatcccaaagtcagggcaaaataaggggcaaggagaggcggggtaaagggagaaatcaataaaggagtctgtttttcttaaaaaaaaaaaaaaaaagtcctttgcacaacatgataaagcctcctggcttcaggaaactgattctggcagaaatcttggttcagcttgattcttttggttcccataggggtctttgggtgataataaaagctctgtgtctggagcaaacatagagccacaacaattatttgcaaagtgaatgtctagtcatctggaaccagaaataaattcagcatgagtatcamaagcaaaagtcaaggggcataaagacacttaactagaaacacctatatgccctcctgtgtgtaagcatacccagagaagtcctgggctctttatctgtcattggagtatggtgctttcctgcctgggtgtgtgttcggctgatgacaccat

SEQ ID NO: 103762 - DNA, 632 bp, Homo sapiens
aagtgaatacttcagaaataaaggagaacctacttgctgttatctgcagcattcagtaccaagactgacacattcactaatgagtaatatcttgttacacagacttagaatcactcytaggtcatcctgtgttaattaggttcttcagagtttttcaacacagtctgcagacattgtgctcaaatctgcaattgtgcagctcatgagtgaaagagaaaaatacacgaggtagattttgtggcaacatcctatgttcagcggatcctgtggagtaactaaaaagaaaaaaagttcagttgtagtatctaggccagtacggttttagaatataacgtttaaaatggcagccttaaatagaaatcatatttatttcaagttcaactttagacattaccataaaagtgaaacatgacaaaaatgaagattcttagtctacatttaaaattaaaaaacaagaaaattaccagttgtaatttcaagttaacttttgccttctatacaaaatataactgtcacagaaaataacgaacacatgaataagtacacatttttaaagctctttcaaaatagacaacttaaattaccaaagccagatctcttagttatttgtctggtagcaacaaatgatcata

SEQ ID NO: 103763 - DNA, 392 bp, Homo sapiens
cgcgcgcgcgcgcgcctgtcggcaccagcggcagttttgcagtttcccgggtcctcgcgaccgtcccccgcccctcccttactctagctgcccccgcccttttcctctgccggatgccaccggaaagccaaaacaattggggccgcgcaggcgcgaaagaggaaacggaaagagcaggaagggcgggggcggcgcgaggtgacgggaagcgtaattgaagggggttcccgggaaaggtcatgggagagcccttgaggggcgcgtgcgcggcagaggggcactccgagkagccgcggcggccgaggccttgggcctagacgggcggatggagaggcccgacaagttcattgctaggaaatctagagagcaaaacaccaattgttatgctgaag

SEQ ID NO: 103764 - DNA, 553 bp, Homo sapiens
gtggctttgcagggtatggcctccctcctggctgctttcatgggctggcattgagtgtctgcagctttttccaggtgcatggtgcaagatgtcagtggatctaccattctgagatctggaggacagaggccctcttctcacagctccactaggcagtgtcccagtagggactttgtgtggagttccttctgcactgccctagcagaggttttccatgtgggccacacccctgcagaaaacttgtgcctgggcatccagacatttctatacatctgaaatctaggtggaggttctcaaaccccaattcttgacttatctggactctcagactcagcaccatgtggaagctgccaaggcttggggcttgcaccctctgaagccatggcctgagctgtacattggcccctttcagctacagctagagcagctgggacacagggtaccaagaggaggggaaccctgggcccgscccatgaaaccactttttcatcctaggactccagacctgtgatgggagggactgccatgaagacctctctcatggcctggagac

SEQ ID NO: 103765 - DNA, 608 bp, Homo sapiens
taaaaaacataatttgtgcagaagagaaaggagaaaagcataagttgtacaaaaggggacctttactccagcaatgagatagagaaaaaagagagggaaagggagaggaaaaggaagaccagtaggtgggtggatggaagtcttgatggatgtaggtggatggatggatgaatggatggaaaartagggagaaggataaatgaacagatagatacataaatagatacatatctatatacatatctacatacattggaagatagatatatgtctccaaattaatgttcttaaaaaagtttccagtttttattgaaagccaacaagttgactcagagccatgcctcctgaaacatatgcggcaaaatacccgatttctcacctatcttaatgactgctgtaaaatcatagtctcttgcctcagcttgatctccagcttgcactcagtttttcaaaaaggagactattttgcatacttttaaagaatgcattgtggtttataatttcacccgtcttttttcacttcaactttggtgatagtatagttctgtatagcttctttattatttacatgcaaagagaagtcagcttcctactctgttacatgattc

SEQ ID NO: 103766 - DNA, 525 bp, Homo sapiens
tcttttggaacttcttcagccagtttcagtattgatctttatacaaacaagtctgctgtctacacagttaactgcaatttgatcaggttgaaaagatcattaataaggtctactagctgcatattttcctaagcaaatgttcagtggcaggtggttcggcacattagtattcagcattgcttttctggtttacacctgtgggtgaaaacgtcatggctcttctgtaamgataatctacttgagaatatgcttttcttagaaataaggttagtgattggtacttggtaaagccatcttgataaaaccatcatgaaggtggaagcaatggataatggcttttggtaggtatatgtgatttttttttcttgagatattaatacaatttctaggaacaattcttagaacatcaaggctatttgagctccagcacctgatgtaaaatgttgatgataagaaccaataatttatatatgacatgatgtgaaacaggtttttaattaaattaagagtggatttaaactctgt

SEQ ID NO: 103767 - DNA, 614 bp, Homo sapiens
gtagtactaagaagtgcaatagaattttatacccactcttgcttttgagaactttgactttaacaagaaaaatttccttcatgatgcgagaattctcttaaagtcaaaaggagtgaactgacatgatatttattgttatattgacaaattttaattattcatgggagaagcaactgcgctggtggttattattaactatttatacctggggcatgttttcggtacttttctacctacttcgtttaaggcatctggccaaaattattacatttgtatgtgtctaatttcacagcaaacttagtatttgaaaatmttgggatagtgcattgattccagtaataataattacattttagctagctctcaagggcatctaaagcttgaacatcagacacacaatcaaggtaacagaaagtgatattttgatgtctggtcttagacaaagcaatttgatagctcatggctaggtctatataaccaagaacaagttagggttaaaatacacattgtgctcaatttttttgcagcctagttgttcaaaggattttttggagagctgaacactgtaactcatggcttttgtgaaaaggtgattctgaagaaataggaccagc

SEQ ID NO: 103768 - DNA, 536 bp, Homo sapiens
agctgaaaaattatctagattcctttgtggagcacatagacaaattcaacctctggctttatgcaaaartttaaaacattttcatttgtgtcttccttttcatgtaatgcgaagtacctcacttagtcatgctctgtgtttgcttttcacagcaatttctagggcttttttttttttaatacctgaaaggaaagcatattgcaagataagagatagaaaccagtagaaaagatagataaagaacaggcaaattatctccccttctttaatgcacttgtttcttttttatgccctttccatttcttcagtagcatcttggagaaaagtcctacacacaagtgattgtatcaagggtcttggaagaacagtgtgtttcatggttaccttattagaattaccatcagattgtgtttctagagcaagttgataagcacgaggaagatgtagtccaataagccctttagtcttatgcctataacttggtatttaaaatccatctgtctgtgataggctgctgaataatgctccccgccccc

SEQ ID NO: 103769 - DNA, 620 bp, Homo sapiens
ttgtttaaacaataaaatgacaacccatatgtcaagatgatcacaccacaagaggaatgcagcgagctgacagttgaaattacataatttaaatgagkatctgattccaaaacagtgtatgagaacaaagtgatttctttaaaataatttataataaacactaaggtttgaacgtctaatggtccaaaatattcaaaagtttattttatttatttctttttaatttttaagaaagcaatttgtttacctgaatgagaagacggaatcagcaggtatttttgagcctgggacaatacagaaacctctggcaactctgaatcactgaggttccccacatgctcaggaatttataaacacaaatgcactaagtggtgggtcagaataaacacaaatagattcagcttccatttctcctgctctactgcccatattacagaaggtggctggttccccaattgtttatcaagtgcagattggtaggaatctgatagcgggataacacaagctgtgaaacttttcgttaggcagctacttgagtttccccaagtttcaaacacacacacagagtatccttaaccactgtcccacagggcatgaaagcctttgaggagaaccacaga

SEQ ID NO: 103770 - DNA, 620 bp, Homo sapiens
ttgtttaaacaataaaatgacaacccatatgtcaagatgatcacaccacaagaggaatgcagcgagctgacagttgaaattacataatttaaatgaggatctgattccaaaacagtgtatgagaacaaagtgatttctttaaaataatttataataaacactaaggtttgaacgtctaatggtccaaaatattcaaaagtttattttatttatttctttttaatttttaagaaagcaatttgtttacctgaatgagaagacggamtcagcaggtatttttgagcctgggacaatacagaaacctctggcaactctgaatcactgaggttccccacatgctcaggaatttataaacacaaatgcactaagtggtgggtcagaataaacacaaatagattcagcttccatttctcctgctctactgcccatattacagaaggtggctggttccccaattgtttatcaagtgcagattggtaggaatctgatagcgggataacacaagctgtgaaacttttcgttaggcagctacttgagtttccccaagtttcaaacacacacacagagtatccttaaccactgtcccacagggcatgaaagcctttgaggagaaccacaga

SEQ ID NO: 103771 - DNA, 551 bp, Homo sapiens
tctgaatacagaattcaaggaaatgccatgactgaataccataatttgaagatcattgtgtatagatagatttttgaaccacagaacttaatggcgttatttagggraagagtttagatacgttaaaataaatataaaataggggcatggtatggagctgtaggaaactctcataattagatgtaaagcataggagttagaaacagcaagaaagagaaagcaactataatacatagatgagatagaaaatcaggagaggggacattaccatgagaaggaaaattttccagaaggaagaaaaaataaacaatgctgatactgccaagaagctaataaaagtcatgacatatgaactttttatttgttgatagttcagcagagtaacaagatggtttctgcagggaaatgtgaaggcaaagggagttttaagtagaagatactggaatatgtcgtatgcagttaggaatgattcagaagagagaggaagaaattaggattcagaataaaagggcagagttaataaaggaaatttctggctaagacaagaggaa

SEQ ID NO: 103772 - DNA, 551 bp, Homo sapiens
tctgaatacagaattcaaggaaatgccatgactgaataccataatttgaagatcattgtgtatagatagatttttgaaccacagaacttaatggcgttatttaggggaagagtttagatacgttaaaataaatataaaataggggcatggtatggagctgtaggaaactctcataattagatgtaaagcataggagttagaaacagcaagaaagagaaagcaactataatacatagatgagatagaaaatcaggagaggggacattaccatgagaaggaaaattttccagaaggaagaaaaaataaacaatgctgatactgccaagaagctaataaaagtcatgacatatgaactttttatttgttgatagttcagcagagtaacaagatggtttctgcarggaaatgtgaaggcaaagggagttttaagtagaagatactggaatatgtcgtatgcagttaggaatgattcagaagagagaggaagaaattaggattcagaataaaagggcagagttaataaaggaaatttctggctaagacaagaggaa

SEQ ID NO: 103773 - DNA, 617 bp, Homo sapiens
tgtcccgcatttattttcattttaaatagtgtatcagtatttgggggctccttaaaattcattgggatgggtttaagaggcctctgctttatagttgcaatttctactatgtcctcaactgtagtgaacaactaggttcactatatctacagaagacaactcaacagaaagtagacaaatttttttctgatacctgctttaatcagaaagataattagtaagggtttaaacatatcaatataaccaggaccttcctttcaagggcagcatgcaagcctcagctgacaaaattaactgcttgtggatatgaatggctgaagacaactaactctgtacttgggtggtattacagaagtattcaattctgctgtctgttggccactagagtttccattcaattaggcrattgtgctttttagtgcctgagaggtacatgaggcccccagaatccagttagtaatatcagtagaaagcatcagaaattttacattatatatatatatatatatatatatatatatatatatatatatatatagtatacgtaggaaataaatattaagtagtcctgccatacatagtctatagtccaaagttttttattaatttttttatgt

SEQ ID NO: 103774 - DNA, 617 bp, Homo sapiens
tgtcccgcatttattttcattttaaatagtgtatcagtatttgggggctccttaaaattcattgggatgggtttaagaggcctctgctttatagttgcaatttctactatgtcctcaactgtagtgaacaactaggttcactatatctacagaagacaactcaacagaaagtagacaaatttttttctgatacctgctttaatcagaaagataattagtaagggtttaaacatatcaatataaccaggaccttcctttcaagggcagcatgcaagcctcagctgacaaaattaactgcttgtggatatgaatggctgaagacaactaactctgtacttgggtggtattacagaagtattcaattctgctgtctgttggccactagagtttccattcaattaggcaattgtgctttttagtgcctgagaggtacatgaggcccccagaatccagttagtaatatcagtagaaagcatcagaaattttacattakatatatatatatatatatatatatatatatatatatatatatatagtatacgtaggaaataaatattaagtagtcctgccatacatagtctatagtccaaagttttttattaatttttttatgt

SEQ ID NO: 103775 - DNA, 454 bp, Homo sapiens
gaattcctctccatcctcttttacaaactgyatattcgaacatcgggtgggaaggaggtcttgtctcagaacactttggtatcatggtatctgtcacactgcaacctccaatgaaagtgaagtttgtctccattgtgagttacagtaatcatttagctactccatacatggcaagcaaaaataaataaatagataaacaaggaaaataataagctctgattgtgtgtgtgtgtgtgtgtgtgtgtgtgtgtgtagatacaaacacacattttcactcccgagattttgtgatactctagctttaacaagaattgttcagctatttccctagcattagaggttaaaagatattgagcttactgacatctaagctttggggctgccactgaggttatttattttcaattttgtatcaagtggcagcaacaatgctgtgctgtgaattaagtagctt

SEQ ID NO: 103776 - DNA, 606 bp, Homo sapiens
atatttaccaacaagcttgaaaatacatttatttcttacattcttctcttttcttttagtttcaattcttgttgaaacacctcttttagcatttcttttaataaaggcctaccaaaccataattactttatgtgtatttgaaaatgtctggattctattttataaagctacagctattacttccatttgataagtgaggaatctgagttgcagatttgataaataaatttctcagacagggaaactcttaaaagtggccaacagagaatgcccaagacaatggaataatataatttgaagggtaaaattctccttttctaaaattctattcttagctgacatttactgatgtaaaatatgakgtctaattatcttgcctcgtttgataatgagtctcttctttctggtaagcttaaagattcttccataatattctgcaggagtatttagatgggtctagatatgaatttgcttctcttactctgctggcgacttggtgctctcccttaaactgagattattgttcttcgcatctctctgcacaatgagagcctttctctaattctgtctattttctcttttcatagctcttccttgtgggccaca

SEQ ID NO: 103777 - DNA, 606 bp, Homo sapiens
atatttaccaacaagcttgaaaatacatttatttcttacattcttctcttttcttttagtttcaattcttgttgaaacacctcttttagcatttcttttaataaaggcctaccaaaccataattactttatgtgtatttgaaaatgtctggattctattttataaagctacagctattacttccatttgataagtgaggaatctgagttgcagatttgataaataaatttctcagacagggaaactcttaaaagtggccaacagagaatgcccaagacaatggaataatataatttgaagggtaaaattctccttttctaaaattctattcttagctgacatttactgatgtaaaatatgatgtctaattatcttgcctcgtttgataatgagtctcttctttctggtaagcttaaagattcttccataatattctgcaggagtatttagatgggtctagatatgaatttgcttctcttactctgctggcgacttggtgctctcccttamactgagattattgttcttcgcatctctctgcacaatgagagcctttctctaattctgtctattttctcttttcatagctcttccttgtgggccaca

SEQ ID NO: 103778 - DNA, 585 bp, Homo sapiens
tgtattgtttatcaaaatgggattattttctatcagcttttgtgaagcctgtttttttacttatgattttcagatacaagtaaatcttatatgactatttatttatttatttgagacagagtcttgctctgtcacccaggctgagtgcagtggcacaatctcggctcactgcatcctctgcctcccgggttcaagagattctcctgccttggcttcctgagtagctgggattacaggtgctcgggaccacacctggctaatttttgtatttttagtagcgacagggtttcaccatgttggccaggcaggtctggaactcctgacctcgtttagtgatcctcccacctyggcctcccaaagtgctgggattacaggtgtgagccaccacaccccgctcttatatgacaacattttaaataattgtatagaatcctatcaaggacaactatgatgatctatttataaaatctaccattgttgaaaattttggttatttccaatgttttatactgtaaatactgcttcaatgagtattcttgttaactctttaaatgcttctttgagtatttcttgtggagtttttga

SEQ ID NO: 103779 - DNA, 610 bp, Homo sapiens
tttccaatgttttatactgtaaatactgcttcaatgagtattcttgttaactctttaaatgcttctttgagtatttcttgtggagtttttgagttaaagcctaggtaaaacattttaaataatttaatattatgaatttctgtaagagaatattgcttaatatttccaaactttgacaagacaacttaataygctgaaactttaaaatcttgttcccacccgtaagacacagattccaaagaagagatgcagatctcaaatacctactgggattattatgttgtttgggagtgagctgcttacacagcgttttactggagttcattagaacttcaataagcaggttgtccattagatgtaagaatctgaacaaattagtcacatggtctctatggcaacgagtaaatgctgttagaatctgtgaacactccacagaacaatccagcaaaatgggcctgcctcatgcaaaggagcatttttaccaatccctttcattgtgtttctggtataagaaccttagtctaaatgcacctttttctgatgaaatttttgtcatgggcagtgtgaaaattaaaggaacaattcaaagccagggagcagtgattgcatg

SEQ ID NO: 103780 - DNA, 487 bp, Homo sapiens
ggagttcaagaccagcctgggcaacatggcatgaacctatctctacaaatttttttttttaatcagccaggcatggtggtatgtgcctgtagtcccagctacttgggaggttgaggtgggaggatcacttgggtccaggagtttgaggttgcatkagctatgatggcaccattgcactccagcctgagcaacaaagccaaatcctgtctcacaaaaaaaaaaaaaaaaaaaagtaaaaagaaaaagttgtaaggtatccagaggtgggggaaagcatattatatacagaagaacaaagataacatgacagcagaccttttattagaaacaagacaagcaggaagatagtggaacagtatctttttttttttttttttttaagacagagtcacactctgtcacctaggctggagtgcagtggtgcaatctcagctcactgcaacctccggctcccaggttaaagcgattctcctaccgcagcctccca

SEQ ID NO: 103781 - DNA, 571 bp, Homo sapiens
tatacctagaaaaattttaagagtcctccaaaagacttttagacctgataaatcaccttagtaaattattgggatataaaattaacatacacaaatcagttgcatttctacacaacaacactcaagctaagaaccaaatcaagaactcaaatccatttacaatagctgcaaaaataataaaatagctagtaatacatttaacctaggaatacatttaaccaaggaggggaaagagctctataagaagaactacaaaacacagatgaaggaaattgtagatgacacaaacaaatggaaaaatatcccatgctcatggattggaagaatcaatattkttaaaaatcatcatactacccaaagcaatctagagattcaatacaattcttatcaaattaccaaagtcattttcacagaattagagaaacaattctcaaattcatatgaaaccaaaaaagagctgaaatagccaaagcaattctaagcaaaagaaaaaacgagaggcatcacattacctgacttcaaaatacactacaagtctatagtaatcaaaacaacatagtcctggtacaaa

SEQ ID NO: 103782 - DNA, 585 bp, Homo sapiens
cgaggctgtgttagttttgtggtgctataaggaaatacctgagactgggtaatttataaagaaaagaggttcatctggctcagagttccgtaggctgcacaagaagcatgrtgccagcatctgcttcttggtgagggcctcaggctgcttccactcaccgccaaaggtgaaggggagctggcgtgtgcagagatcacatagcaagaaagaaagcacaaggggtgggaggtgccaggttctttttaactgccactctctcaggagcaataacttcctaccacgagaatggcatcaaaccattcatcagagatctgcccccatgacccaaagacttcctgctaggtcccatcaccaacattagagatcaaatttcaacatgaggtctggaggggacagatatccaaactatagcataggctttcagtaaagataatatcttctgctgttatttattttaaaggtccagcaatcattactaactattctgttttgtggacctgcctgtctatgctgaatctcaagctatgttcccattctactcagtttcagctccatctcttggctgttctctcacacccagctcac

SEQ ID NO: 103783 - DNA, 532 bp, Homo sapiens
ctaggtctgggacaggactggggaacttgcaggtgattctgtgattctgacacagcagtggttcccagacaacaccctgaagtgagccttggctgttgggttatgaatttttgggggcaaagggtgggctagtggggacatctacttgagacctgttagcaggttttgactaatgacagatgatgaggtagacaaatcttgggtttaggtttctctttctctcatttatgttcctttctgtcaacaaactaccccctggttatctaggaacctcctaagtgttttccattctgacctctctggcagcattccataactcttctttccctcccttttaccccctttatgaaaacttactttgctagataacattccctttgcaaagatactctgcagatattcctcaaccataatccacactgatctgataatgggtggtatctggaatcaaaatcacagactcagctgggaggagcttggagcrtctctgctagaggttcagaagaaagccaaggttcagaggagagaagtg

SEQ ID NO: 103784 - DNA, 517 bp, Homo sapiens
cctgccatgttgtgaggactctcaagcagttttgtggacaagcctgtgtggctagcaactgccaatagccagccaggaactgaggcctcctgccaacagccacacaagtgagctgtcttgggagcataccctctagccccagtcaatcttagtcctcacagtaggtcatcagttggyggtaggagaacatcctgctatacagaaatgttcattgtaactatgggccttcctgaggcaacgttttcacctcttatcctcaaaggtgagatataggttggagagaggtgccaggggaaaggtaatatgaggactgttttaaatattatggttggaaccttcttgggcaaattgggggcagcctttatggtgtgtctaggtgtcatgaattcctaaaaggaaatattgtgatagggtaagacaaattcaacccctcttattttctatgtggttaatggggtctcctgggggcccaagttgaaatcctcagttactcctgacatcaagcccaatcaacagt

SEQ ID NO: 103785 - DNA, 654 bp, Homo sapiens
atgactgattagttttaaaaaaattgttctctgagggtgggacatgtctgcagggtgtattcaaaattatccacagcattaataatcccacaaatctcttatttatcattgtgaaggacatctaagagtcagactcttaatcttagatctgtccctcaccagctccatgatgttccctctatactcgcaatgtcaaccactgcggactgtggaaagaagaaaacatatgtaaaggtgcattataaactactccataaatgttggtactattttggggagatatagttatcatggtgatgatgatggtgatgatgatkgttgctagttgagtaccagttgccttcataatgcagtatatgaaaggaaaaatatgaggaaattgactagagagagcctgaagtgcaagagtgtaatataatgtaaatgtgattttgttgctctgacccagaatgggaaaaaccatgggcacatccaaaaggtcttgtgaaaaatgattctctttagttctcttccaacgtattgaatatgtttacaaataatagatgcctattaatagatgtcatttattggaattttttaccctgtacttagtactgctaagcattttgcatgaatcatcttattctgttagtgggggcagaaattgatattcta

SEQ ID NO: 103786 - DNA, 607 bp, Homo sapiens
ctctctccccctgcactctgtcctgtgagctctagccactttgggctcactgtgtccccagcttcttctgttcatttcaaggagactgccaggctctgctaagactctgtctaagcagtgacctaaaatctctctctgagcagttacctggggcaatctcaaggctcactttatttgtttcatggcgtcagtctcatttgttgtctgatgtccaatatcttgaaaaccactgtttcacatattttgtctgtattttgtttgtttgtgcttttaggcagaagaggaagwctggtcctcattatttcatcttagccaaaaacagaagctggacgtaagaatttaaaagaagtcaagttttcctttaaaatttcaagcaggcaaaatttcagtaaattataggatttcttcccaaatcttttttgaaaaaaatatgcttattactacatttggcctctgaaaatttcttaaaataaacaattcataggtgaagaaatcatgataaaaggtgttgtggtgagctctgactgcttaaattcataaattaaggttttaaagcatggggaacaatattatagaatcaaacatgattattataactgttggcaac

SEQ ID NO: 103787 - DNA, 617 bp, Homo sapiens
cccttgctgtctccattccttttttttgttccctctgggagtgtctgtcaaaatgtgctgtttctatttactttttcaactttgatcttaaatttctggaatgaaagcaatcattttagaaatggaaagaaaccataaattatatatttcaatcccccattccacatatgaggagatggagttcacactgctgactactaacaaggccaggagtgagagacacaggactttggtgactcacgtcagcacctgcaaatatttgaaaaccatgagtcaccaaataggaatcaaagtacaccatgctaactcttaaataccagtgtctacctgttccttgttaaaattaaggtcaaaatgtccacaagagtatctctcgatgttgagagattagctctgtttgtggtgtgtatgaaataactttgaagttgcactacctgttctacttactatgttagcttgttccagaatcttttgtttatctaagactcttgcacaatctggctccttcatatttgtcttttttttttgtgaatttcwtaaaattataaggtaaccaagaaatgagcagcatttgttaaatttctttgaataaaagtaaaacaatcagatagttggta

SEQ ID NO: 103788 - DNA, 605 bp, Homo sapiens
gttcttgtcatttattaactatggtatatatttgttwccctccatatgtccttaaatgaggtcttaggatgagtgtggacatttcaggctgctgacaccctggacatttttgcttggggtcaacataggagattgacttgctcacttggaaaattaatattaaatgttgctcttcttctattgcttgttcctggtgtttagttgtctggttttagtgggtcctgcatcctatcaaagccaaagctctaaaaaagcatgtcagttggaatcatcgtatagtattttttaggtattcatatgtatatccctcttgagagactgacagttcacatctatccagccatatatttctgtagttcttatcaccaaggtacttgaaactcaaaggataaagaccatgtactctcccctcactaggtgattaggatgagctcccccgctaatgatgagaaaagtgagaaaagtcagagactgcttattttttgatgaatgctcttcaaattgatattaacttatataaaaaagcaggtttcacaagggtattaatatacatgacaatataccacacagcaaagagagtttttgcgctttcaaatattctggga

SEQ ID NO: 103789 - DNA, 556 bp, Homo sapiens
cctcacaatatttaataattttaaattgtattccataatcactactaccagcaatataagcagccaataacaaaacatttcataatatcaagtaccccaaaaaagggaaagagcaagatcattagctagacacctagattcttggcaacgagggtagaaatatctagcttttaattgactttttatttctatctcacctgaataattgatattggttagatatgagtaataacattttgtgaatcttcaaaattttcaccttttgggttaycttaagacttttttttttaaattaaaagtgtttactgaaactttgtgatgatatacaagtctccagtgaatcacattgaaaacttgaaattgtccacgtttatttttgtaggccctgttttattggcagaaaagtatctgatgcgtgcatcttttgatttctactacttaaattatccatagggaaaaattttggaccttctgcataatcattaatacgattaataatgataataataacaatcccagaagtattattactattaaaagtcataatgataataga

SEQ ID NO: 103790 - DNA, 340 bp, Homo sapiens
tcctttcctgcccttgttgagttgcccttttctctgtgtagccacttagctgcctgtgctgatacttgctgctggctaagcttgtcataagttcagtgtgacaccctttcccgtgatgggctgattacagtaaggtcccaatctagtggtgcctccctctattgctgggttgggtaatctcccagttactctgggtttgaccatgtgacttgctttggtcaacaggaaacaggatgttrgcagagacttgaaaagtgcttgctcattggggtttgccatcttttgctgctctagggaatccagcagctgtcaccatgtaaacaagcccaggctagaccag

SEQ ID NO: 103791 - DNA, 633 bp, Homo sapiens
cctttgggaggtgattaggtcatgaggggagagccctaatgcatgggattagtgcccttttaagaagaggccaggctggtgtggtggctcatgcctgtaatctcagtaccttgggaggcctaggggggtggatcacctgaggtcaggaggtggagaccagcctggccaacatggcgaaaccccgtctctactaaaaatacaaaaattagctgggcatggtggcaggcrcctgtaatcccagctacttgggaggctgaggcaggagaattgcttgaacccgggaggcagaggttacagtgaaccaagatcacaccactgcactccaccctgggcgacagaatgagattctgtctccaaaaaaaaaaaaaaagaggccagagggctagctcgctctctttccaccatacgagggcccacaaagtcagcagtctgccacccacatacctgaaggtgctgggaacctgatctcagacttccagcttccagaactgtgataaatacatttctgtgggttacaagccacccagtgtatggtattttgttaatagcagcctgcaccaagtcagggagaccgacaagacgccacataaatacatgccatagcattggaaggtgccgagtaccatgggtggg

SEQ ID NO: 103792 - DNA, 569 bp, Homo sapiens
tagggaggaatttgaaatgtttatgttaccagagtgtaaaaaacattgtccagttgtttatctaatctttcattgggcttgcttttaaaaacacgtttagatttgaagtagcctgggaaaaataaactgttccaggccataagctggatgccccagtggatataacatggatccttyttcattcgttttgagaaatttcccaagcagacagatgtctttataccttcttttgcagtttcttcatccataaataactattatcaagaactggaattacaaatgctctgtggatttctttttaactttgattcctacagaaattactactgggatcttatttcttctctggggtggacattttgttgttgtacctattcagtctcacaaattctccatgtgtttttatccagtgaaattcatttcctaaagatttgtatcagctaaagcaaagaactttttgagaaccttttttggttcacagagcagccaggtctactgggggagtagaaagaagagattctatactgtgttctgttgtaactgctttccaacctcccagcggaaaaggc

SEQ ID NO: 103793 - DNA, 649 bp, Homo sapiens
tttcttccactttatgacatgatttttatcttttcttatagtgtcttttgatgactataaattcttaattttaaggcaatcagtatttttcttttaggctatgacraaattaaggaatccttcactacactgaggtcataaagacattctcctacatgtgttcctaaaatatttgttgttttgtctttcacatttaagtatttaatccaaccaaaattgacttttctgtatggttgaagtatgagtctaatttcatttttctcaatatggttatccaattgcttcagaaacatttattgaaaactatttttacccactgatctgcaatattatctctgtcatatttggacattctgtttctggagacattattatgatgcattggtctattagtatatccctacattaattccatactatgttttagctttacaattagacttgatatctggtggagcaaatttttcaagaatggctgttttgaggcctttgctcttccatgtaaattgtattttatgtatgtattttctcaagctttattaaagtataaatgacaaataaaaattgtatatatttacggtatacaaagtgatgctttgatattgaatgtgtatacgctgtgaaatgctaattaacatatctagtattt

SEQ ID NO: 103794 - DNA, 607 bp, Homo sapiens
agatgctaaataagcatgttaaaaagtcaatttctcccattgtccctgaaaaacaatgcctcgtgattaactttcttttctcgagtgatcatctagtagacgtgtcatcaaccaaccatgttacccgggctaactgagctacatgacagaaaatcatctagtgaagagggtaccgtgctggagtgagactcctgggcttcagttcctgctccacagctggatggcctttggcaagtcacctaaccagcagaggcctctattcagtcatctataaagtaggggggtaataagtacctatcttgtaggattttttaaaagattaaataaaagttcccataaggatatgccaggcatacaaaagtggtcgacaartgttattgttatcataaataaattggttttaaaacagctaataattaaataaaactttttgctgcatttatggtgttccaattgagtaatgacacagaaaagagagttcttcataaagaatatactaggtatgaagcaaacattatagattacattttttggttggtgttctgtcccaaatgaatgaattcatccagttgaacataaactgcttagtactagattgtgggggatc

SEQ ID NO: 103795 - DNA, 607 bp, Homo sapiens
agatgctaaataagcatgttaaaaagtcaatttctcccattgtccctgaaaaacaatgcctcgtgattaactttcttttctcgagtgatcatctagtagacgtgtcatcaaccaaccatgttacccgggctaactgagctacatgacagaaaatcatctagtgaagagggtaccgtgctggagtgagactcctgggcttcagttcctgctccacagctggatggcctttggcaagtcacctaaccagcagaggcctctattcagtcatctataaagtaggggggtaataagtacctatcttgtaggattttttaaaagattaaataaaagttcccataaggatatgccaggcatacaaaagtggtcgacaagtgttattgttatcataaataaattggttttaaaacagctaataattaaataaaactttttgctgcatttatggtgttccaattgagtaatgacacagaaaagagagttcttcatraagaatatactaggtatgaagcaaacattatagattacattttttggttggtgttctgtcccaaatgaatgaattcatccagttgaacataaactgcttagtactagattgtgggggatc

SEQ ID NO: 103796 - DNA, 511 bp, Homo sapiens
tgtgacgtgtgcattcgtctcacagagttgaacctatctaatgattgagcggttttgaaacactcattttgtagaacctgcaagtggatattgggagtactttgtggccttctttggaaaagggaatatcttcacataaaaaytacaaagaagcattctgagaaacttctttgtgatgtgtgcattcatctcacagtgttggacgtttcttttgatagggcagttttgaaacactctttttctagaatctacaagtggatatttggagcgctttgaggcctaatgtggaaaatcaaatatcttcacataaaaactacacagaggcattctgagaaacttcttttttgtgtgtgcattcaactcacatagttgaagtaatctttggatttagctgttttgaatctcctttttgcagaatctgcaagttgatacttggagccctgtttcaccctatagtggaaaagcaaatatcttcacataaacaaaccctacagagaagcattcagagaaa

SEQ ID NO: 103797 - DNA, 619 bp, Homo sapiens
tgaagatgttttgttttctaccatagggcaaaatggggctccaaatatctacttgcattttctacaaaaagagagattctaagctgctcaatcaaaagatacgttcaacactgttagttgaatgcacacatgccaaagaagtttctcagaatgcttctgtgtagtttttatgtgaagatatttgcttttccacaataggcctcaaatcgttctaaatatccacttgcaggctctacraaaagagtgtttccaaattgctcaatcataaggtaggttcaactgtgagagttgaatgcacacatcataaagaagtttctcagaatggttctgtgtagttttactttgaagatatttcattttccaaaacaggccccaaagctctccaaatatccacttggtgattctgcaaaaagagcgtttcaatactgctccataaaaagaaaggttcagctctgtgtgaggattgcattcatcacaagaagtttctctgaatgcttctttgtagtttttatatgaagatagttccctttccaccacagggtgcaaagagctccaaatatccacttgcagattctacagaaaatgagatatgaaagtgctcaaggaaaagataagttca

SEQ ID NO: 103798 - DNA, 619 bp, Homo sapiens
tgaagatgttttgttttctaccatagggcaaaatggggctccaaatatctacttgcattttctacaaaaagagagattctaagctgctcaatcaaaagatacgttcaacactgttagttgaatgcacacatgccaaagaagtttctcagaatgcttctgtgtagtttttatgtgaagatatttgcttttccacaataggcctcaaatcgttctaaatatccacttgcaggctctacgaaaagagtgtttccaaattgctcaatcataaggtaggttcaactstgagagttgaatgcacacatcataaagaagtttctcagaatggttctgtgtagttttactttgaagatatttcattttccaaaacaggccccaaagctctccaaatatccacttggtgattctgcaaaaagagcgtttcaatactgctccataaaaagaaaggttcagctctgtgtgaggattgcattcatcacaagaagtttctctgaatgcttctttgtagtttttatatgaagatagttccctttccaccacagggtgcaaagagctccaaatatccacttgcagattctacagaaaatgagatatgaaagtgctcaaggaaaagataagttca

SEQ ID NO: 103799 - DNA, 619 bp, Homo sapiens
tgaagatgttttgttttctaccatagggcaaaatggggctccaaatatctacttgcattttctacaaaaagagagattctaagctgctcaatcaaaagatacgttcaacactgttagttgaatgcacacatgccaaagaagtttctcagaatgcttctgtgtagtttttatgtgaagatatttgcttttccacaataggcctcaaatcgttctaaatatccacttgcaggctctacgaaaagagtgtttccaaattgctcaatcataaggtaggttcaactgtgagagttgaatgcacacatcataaagaagtttctcagaatggttctgtgtagttttactttgaagatatttcattttccaaaacaggccccaaagctctccaaatatccacttggtgattctgcaaaaagagcgtttcaatactgctccataaaaagaaaggttcagctctgtgtgaggawtgcattcatcacaagaagtttctctgaatgcttctttgtagtttttatatgaagatagttccctttccaccacagggtgcaaagagctccaaatatccacttgcagattctacagaaaatgagatatgaaagtgctcaaggaaaagataagttca

SEQ ID NO: 103800 - DNA, 657 bp, Homo sapiens
tataaatcaaatataaatcacatttattaacaataattcatgttctaaaaattggattttttttccatctgagataatatcattagaaaaggaatcttctacttgagttggaaaaacagtaggtggaattcaataccagagaagcagcaaagaaaggacgggcagcaggatagcagtttattgaagggaggatctgaaaatagcaacagaaacaagaatggcccacaacacaacatgaatgtgcaacaagagatgtttccaaatccaaagaccaaagcttcaacagcgtgagaggaggcattcagatacttcttcactgcttgctctacagaattaactttkggagagcacaatgaacattgtgacatttatggcattggcgaaaactggtgaaggaacccctatgggtgaaggaagaatataaggtggaacagtgctacagttggagtgcaggtaaagacattgagcaggccaaactagtgagacctagggacacagtgtctacttttgactgaggcttaataggaacagcagagaatgtcccttctacactctgccaccagattaaaaattaatgagtatcaggtaacagaataaactcttagaagaagaccagcataagaacaaaaccctggagaataaacctttctaaggcac

SEQ ID NO: 103801 - DNA, 573 bp, Homo sapiens
tcattatctacagatctgcagcttcttaatttccctactgtctttttgcattgttttcctgattctctggcatactctgttcttgtaaaaggctcacggtgatacacatcaagggtagagatactgatcattgtctggttcttgtcacgaattcccacaggagctgattctcaaagacctaagactgcctcagtaaaatctaaatttagttcactcctctgaaagctaattttatttctagcttcagacacagttcttggttgccttacttttatttgtaaacatatttattaattttaattgtatttaagttgtacaatatgatattctgatgtatatgtatatgtatatgtatatrtgtatataatgtgtgtgtgtgtgtgtgtaacgtatatgcgaatgttgcagccatcatggaaaacaatatgaaggtttaacaaaaaattataaatagaactaccatatgacccagcaatctctctaatgagtctatacccaaagaaaatataatcagcacctttgagaggtatgtgcactccaatgtttattgcagcattattcacagtagtcaag

SEQ ID NO: 103802 - DNA, 560 bp, Homo sapiens
ttggtgatcccaggttgtctggtcacatttaagagtgaggcactaaagtgatcactggaagctctgtgcacatggtctgacctggctgaatagaaacttcattgtaggttgattaggcagggatctggaactctggaatacagcaatcrcctattagtattggtagttttttgtttgtttttgtttttccttttatgttggtgtgtttccctggaagggaatcctctgttctcttgcctgatgatactggtggtggtggcagcaggggaggtgtaagactggctgccagcattctcagggctgagtggggaaagaggtctgaaggtgatgactcccatttcagtatgtggactcccatgtcttctgcttgctcctccccagagagtaaacctttaaccttctgctgagactggacaggtgatttgtgggactattacacttctgccaacttccaactaatcctattttcaggttaatctgcacctttacctttcatggtaactgagctctcctagaagttgaaccatcaatcagtttgcttatagctctttgctcccacc

SEQ ID NO: 103803 - DNA, 560 bp, Homo sapiens
ttggtgatcccaggttgtctggtcacatttaagagtgaggcactaaagtgatcactggaagctctgtgcacatggtctgacctggctgaatagaaacttcattgtaggttgattaggcagggatctggaactctggaatacagcaatcacctattagtattggtagttttttgtttgtttttgtttttccttttatgttggtgtgtttccctggaagggaatcctctgttctcttgcctgatgatactggtggtggtggcagcaggggaggtgtaagactggctgccagcattctcagggctgagtggggaaagaggtctgaaggtgatgactcccatttcagtatgtggactcccawgtcttctgcttgctcctccccagagagtaaacctttaaccttctgctgagactggacaggtgatttgtgggactattacacttctgccaacttccaactaatcctattttcaggttaatctgcacctttacctttcatggtaactgagctctcctagaagttgaaccatcaatcagtttgcttatagctctttgctcccacc

SEQ ID NO: 103804 - DNA, 622 bp, Homo sapiens
atcttttagagggccctattcacgcttaacccagttttgttttggtttatgttttgaaaatgtatgaaagtctcaatttattttttaaaaaatattatgaactagaatataaaagtgacaaatacagtacatttaaaacgcacatactcatttccattgcttggaagctttatgaaaacagaaatcagaggataaggccaacagggcggagtggggagcggggagatcccctcaagacggagaaggcctggtgaggagaggcagaggggttctgggagaggtcggagcaggtacctcagggggtcttaaaacatggttctccgataaaacgataacctcttatagtgtttatagaactcagaaatgatatttatttaactttattatgaggcaatacatattttcctgtatttctagatatagtttggaaaactctccttaatagtctgttttgtatgccttgtatttaaaagttttagtcatttttgaaagactattgctgctgcaaatagttgtgtgctktacattctcagcttcagtcaattttttaatgtaagagcatcataatctaacccgagcatccacttggagaatgtttttttgtgtgtggtctagggtgaca

SEQ ID NO: 103805 - DNA, 381 bp, Homo sapiens
atggagtgaaagaatcacaatctttcttcagtcagcagtggaactcatggcaggtttttgagcagagagagttgaagaaagagaggaaaccctgctcctacagtagaacaagtgactctcagcactgtgtgtggttagggtgagctggaaggccttcatcagccatcatggggctcctggagcaagtggtagcctgcaaaacgccccagatcaatgcctatccctctttrtctgcgaggaacagccaccaggtttagttttctccaaatacacgataggctcccagagcagggcacactttgcatcaggctctccaactatcactctgggccccgaggggatggagctcaggaaagagaaatctgcacgtttgtggaggag

SEQ ID NO: 103806 - DNA, 547 bp, Homo sapiens
ttaacatatttgcttattaattgtacctagttccagaaatagtttaatgaagcatatgtcaaaataatattaaaagtcataagaataaaaggaaaattatgaagaaatcagaaacctaataactgctctatagaagcattaaaatgggttctaaactctttgggagccaagtcagaagaaattaagaccagttacatggaaatcattaattaataaaataacatttagcttgggaggtaagacaaaattttccctaacaactaaatcaaagagaaattcacaagaaactttcttatataagagaataaaagataccatctttatcagaaattttacacagagtgcagaaatagtatttacaatgaygatctcttgaggctattcttggtaagagttgaaaggtagcaaatcgttacattctataatttggaggcaacacagtgtgccttcttttgaaaacagaataaaggtattttctttctacccaactagaaccatgtcagtggatctgttcagatgaacaaatttgcaaagattgtaacacgcc

SEQ ID NO: 103807 - DNA, 628 bp, Homo sapiens
tgaatttcagtttttaaatgcatgaattaaaataaaagccaggataaaataatacttaatttgatgctttaaactaaaaaatgcaattggcaagtgaaaaatatctaaatgcttagtgaagagttattacaatcacctttctttaatttcagcactgtaacgggagacaaaaaaacacttttaaataggcaattactttcattaggaaatataaatataaaattaagtaatataataatcatgaagttaataatatacattatggacaagataaaaactaaaatatcagggcatgaaaaaacacttttctacaacatcatagcccrtaatcagaacatatagtgaatgcatttttgaacaataaaaagaataactgaagacctcataaatgttcataacttgcacaagaaatcttacttaaaatttaaaagaagtttataaaaataattttcaaatagctagcattttattttgatttggtgacaaaagttaaaacctaatttttccctcaatttaaaaaaaaaggcatatttaaaatcctaagctttaaagatgatgcccaatgaagtaacagggattgtgtctgtgaatacaaaattgtgtatttcatgaataaacttatttatga

SEQ ID NO: 103808 - DNA, 549 bp, Homo sapiens
aaactgagtccaaaagcactgcaaaactccataatatgtaaatacagactgaaattttaaatctaaaggtaaagcaaaaatgcttttgaagaaaaactaagaagataaaacattcttgaagtagataaatatttcttaaacaagaattaaaaagcactaaacataaatgatgaactagactactttaaagacttaaacttctgttcattaaaagcactattaagagagtaaaaagacaaacctcatagaagaagaaatagttgcaatacccatcatcaatgaagaactcatattttgaatatataaagaactcccacaaatcaaaggaaatgacaggctaacagaaaagtgggccaaagaagtgaaccggaacttcacagaagaaaataaccaaacagccaatatacatatgaaaaagtactcaacttcattaattggggaaatataaagtaaaatcattacggtayactactttgtacccaccagaattggaaaaatgaaaaagatggggggaaaaaaacgagtgttggaaacatgtggagcaactag

SEQ ID NO: 103809 - DNA, 630 bp, Homo sapiens
ataatccagcagctcaattacatcatcgaaattccattttcttcttttttctactccaatcttcatagggtcagtttcatccaaaaaaaaaaatcttgttactggttgtagcatttttttttttcatgtgcagtagagagaaaaaaatgtrtcatcatctgtgaattttcttaataaaggtctgaaagtcctatctctacttttgtaattcatttttctcgtattaagttattctgtatatataaaatatccttttcacatgaattaaaaaaatagttaaaaattagttttccaccacagattatttctttaggtcacaaactaaattcagaaaaccaagctctgaggtagaatggatgagatgtgctgttgttttgtccttcatcatctgcctcacttacgtgctttcataattttttgaagggggcgtaaaatactgtaataatggaaattatttagcctttaaaacatgtaactttttgttagttacctcaattgctatagcagtcaacaatatgctcaataaattgccaaatcatctggtcaaaaatataaaattgccagttgactttttctttgtttctaaagcattagtatgcttttctcaattgtttaagttatctcaatatt

SEQ ID NO: 103810 - DNA, 630 bp, Homo sapiens
ataatccagcagctcaattacatcatcgaaattccattttcttcttttttctactccaatcttcatagggtcagtttcatccaaaaaaaaaaatcttgttactggttgtagcatttttttttttcatgtgcagtagagagaaaaaaatgtatcatcatctgtgaattttcttaataaaggtctgaaagtcctatctctacttttgtaattcatttttctcgtattaagttattctgtatatataaaatatccttttcacatgaattaaaaaaatagttaaaaattagttttccaccacagattatttctttaggtcacaaactaaattcagaaaaccaagctctgaggtagaatggatgagatrtgctgttgttttgtccttcatcatctgcctcacttacgtgctttcataattttttgaagggggcgtaaaatactgtaataatggaaattatttagcctttaaaacatgtaactttttgttagttacctcaattgctatagcagtcaacaatatgctcaataaattgccaaatcatctggtcaaaaatataaaattgccagttgactttttctttgtttctaaagcattagtatgcttttctcaattgtttaagttatctcaatatt

SEQ ID NO: 103811 - DNA, 625 bp, Homo sapiens
gaaccctttgaggcctatggtgaagtaggaaatatcttaacataaaaactacacggaaacattttgagaaacttttttgtgatgggtacattcatctcacagagttgaagctttctttttctagagcagtttggaaacagtcctattgtagaatccccaaagggatatttctgagcccattgaggcctttggtgatataggaaataccttcacataaagctagacggaagctttctgagaaacttcttttcaatgagtgctttcrtctcaaagagttgagcatttcggaaacactctttttgcctaatctgcaaatgcataattggagcatttttaggtctatggtgaataaggaaatatcttcccataacaactgaacataagctttctgagaaactactttgtaatgagtgcattcatctcacagagttgaaactttcttttgatgagccgtttgtaaactgtctttttgtacaatctgcaaatgcatattgggagcactttgaggcctatggtgaaaaaggaaatatcttcagataaacactaaacagaagctttctgagaaacttctttgtgatgggtgcattcatatcacagagctgaaactttcttttgatttagcagt

SEQ ID NO: 103812 - DNA, 625 bp, Homo sapiens
gaaccctttgaggcctatggtgaagtaggaaatatcttaacataaaaactacacggaaacattttgagaaacttttttgtgatgggtacattcatctcacagagttgaagctttctttttctagagcagtttggaaacagtcctattgtagaatccccaaagggatatttctgagcccattgaggcctttggtgatataggaaataccttcacataaagctagacggaagctttctgagaaacttcttttcaatgagtgctttcatctcaaagagttgagcatttcggaaacactctttttgcctaatctgcaaatrcataattggagcatttttaggtctatggtgaataaggaaatatcttcccataacaactgaacataagctttctgagaaactactttgtaatgagtgcattcatctcacagagttgaaactttcttttgatgagccgtttgtaaactgtctttttgtacaatctgcaaatgcatattgggagcactttgaggcctatggtgaaaaaggaaatatcttcagataaacactaaacagaagctttctgagaaacttctttgtgatgggtgcattcatatcacagagctgaaactttcttttgatttagcagt

SEQ ID NO: 103813 - DNA, 582 bp, Homo sapiens
tatgcagtggccagaccctgtacttgcttggccacacacctcttgccacactgtgcctagctccaccttggcaggtatggaatctgggtcagtagttcaagctgagcgcagcctgcttggctgtgwgggaggaacaagcccagcaggtgtgagcaacactcaggcagaaggtgccaccagccacaaaagttcccaattggtgaagctacactccaaggatcctgtgacactaatatatgtccatatcagcagtagaggtgctacttttcaatatcatgagtatttccttctgatggattacatctccaaattttttaggtattactttttatgcagaatacctgctgcataacctgctcccccttgaaccaacttcataattttctggcttagtcataaaccctaataaatagcaaaagatagatgtaatttgcttgtttttagattatgtgaagttgcaagactttatttattttcaaaatgttgacactattaaattatactagctactaaatattttacgaaattacttctgaagagctgcaaaattttaatatgtaaagttgttaatggaagtaatat

SEQ ID NO: 103814 - DNA, 570 bp, Homo sapiens
cctaccctgtggccaggttgctggatgtagcttcttcgctcagccactattgagtcttagttgaataatctgtcatgtttatccttcaagatgagttctgtcacaccatgtagttaagcctggcccagaagaattgttgagacaaaggtaaaaaagacacctcagatatgagaaattccagccaagggatcagagaggagctgaaagaacaagggtttttaaccttatgttatttccccagtgggagtgaataagcagtacccatcacaccayaaagtacttattaattgatccttcaatcttttatttttatttaacactatcctatttttaaggaccccagaaagttctcctacttattttagtcatttttatatatttctttaatacttttaaaagtcctcctcacaactctaaatatgaaacaatacattttaatagcaggaaaataaagtcccagttcttatgtgtgcaataattatgattctcattgtaattatgtaattatgattactcattgagttagataagcccaatgtaagtacctacctgcaaatgaaggaaatagca

SEQ ID NO: 103815 - DNA, 359 bp, Homo sapiens
tgcctcatttaatcttccccaaagttaaattattttccaggtgaggaaaccaatactcacggagaagcaagawcaattaggaaatatggattaggatatagagaaaggaagctcccctctccctcaccctcccctcccccaacactcccacccctactgccccccaaaaacgaatgctgacatccaggcaactcacaccagaacaaaagtactgtgttttcctagtggtgccagcgaagcctcgaggctggcaaacagaagcctatggcagcatcccaagatctcctccctgtcctgtgtccagtcgactccaatgctaaagggaacctatgcctctcatattccacgtggcgtggctc

SEQ ID NO: 103816 - DNA, 359 bp, Homo sapiens
tgcctcatttaatcttccccaaagttaaattattttccaggtgaggaaaccaatactcacggagaagcaagaacaattagraaatatggattaggatatagagaaaggaagctcccctctccctcaccctcccctcccccaacactcccacccctactgccccccaaaaacgaatgctgacatccaggcaactcacaccagaacaaaagtactgtgttttcctagtggtgccagcgaagcctcgaggctggcaaacagaagcctatggcagcatcccaagatctcctccctgtcctgtgtccagtcgactccaatgctaaagggaacctatgcctctcatattccacgtggcgtggctc

SEQ ID NO: 103817 - DNA, 359 bp, Homo sapiens
tgcctcatttaatcttccccaaagttaaattattttccaggtgaggaaaccaatactcacggagaagcaagaacaattaggaaatatggattaggatatagagaaaggaagctcccctctccctcaccctcccctcccccaacactcccacccctactgccccccaaaaacgaatgctgacatccaggcaactcacaccagaacaaaagtactgtgttttcctagtggtgccagcgaagcctcgaggctggcaaacagaagcctatggcagcatcccaagatctcctccctgtcctgtgtccagtcgactccaatgctaaagggaacctatgmctctcatattccacgtggcgtggctc

SEQ ID NO: 103818 - DNA, 627 bp, Homo sapiens
aaattacccagtcttgggtatgtctttatagcagtgtgataatgaactaatacatctatcttcttttatctcaggtaaatattccatttctgccaagatgcccaccaaccagtgcatgccaagactrtgaggcaccatgaatccctggctggctcacatgaaggcaaatccccttcaggaccaggaaggcccaggccactttgtccaaaggtggtccagttccagatactcaggtcttctttagatgtcaccttctcttgacctgctttctcttggcctagcacctctttcagtcaccaccgatatcacttgctttcagattcagatatctaaagaccctcccctagggcataacgtcccgtctcatccatctttatgaagatagtgcacagtgggggtggggggtacttgaaagacctgggctttcagattgtgcagacctgggtgtgagctgggctccactgtgtgccagctgagattgagtgatttgctgaactgctctgcacttcaagtttctcatctgttagcagggatttaaaatctgttttgcaaggatgttgtgtggagatgaaatgtgacatctatgtgatgcatgcaaacagtccctggcacataatcattgcttga

SEQ ID NO: 103819 - DNA, 511 bp, Homo sapiens
aagcatattaggttcgttgcctgatgcacacagcaagtcacaaagccgagacaccaggttgcagcagagaaaaatgtttaatcgtagggtcactgaaagaggagataagagaaaacctcaaatccatgtccctgaggagtttaggggtagggtttttaagggttttggagtggactaaagtgtggagacccttgattggtcacagagcgcaaggtgaagtcaytttcctgaagacaggaaaatgaagaagctgtattttcatgctgatcctgttcctctgtgagggtcttcaaactggttgttggaattcaggatctgaaaaacatctcatgcaactcttaaacaaactgtcacagatcctgtctataggaaccatgggaatgcaaatcaattcttaaacagccttaaaatcctaatgtcagaaatcctatcaatagaaataatggagatgcaaatggtcagtatctagtgctgcctgacttttagcaacaaggaagtgggccaaagtgca

SEQ ID NO: 103820 - DNA, 562 bp, Homo sapiens
cactcttgctatcagctttgcctgagatgcagccttccctgacctctttgtgtttcctccatcacattattctaatgatcttttctctccttgatactcaagtagagtcttgtgccaaagttatgaggtggaaagaaacataacatgttccatacctctagaawctaaatgtagctggtgtatggccatgcggttttactcaggatgaattagagaaatagggtttagttagataacatcttacagttcaccagttaaaaaaaaaaaaactaaacttttatcccaagcacaattcaatgtcgttgtaaaatgagaggcatacacaatatatgctgaacattaatgaaggaaagagaccatatgagctgtgtaagggaagatttcacagagaaaagagcctttaaggacgggtaggatatgcattgccaaaaaagaggcagagatgtcatggatataaaagtcatgtctggatgatgctaaatcagtaattctggctggaatgatgtttggggagagtagtgaaggataggagtaaaaagccagagtggagccatcctatgaa

SEQ ID NO: 103821 - DNA, 520 bp, Homo sapiens
tgtgtgtgtaatggattatcacgtgctattacatgcaagcatctatatttaatgatgtataatagtggatgtaatccctgaatcaagatacaaaaaccaaggttctctctattccaacttgctttgttactttaggaaaatcactgaattatcctgctgagtttccttacttacaaaagagtgaacttatatcccaattttaaaatacatttaaccatraaatcctaatttaaaacaatctcaacatgtaaaatagataaagattaagctactctgcttgaaggagagatgggtagctaagattgactgaagggttactgtcctcaaggtcactcatgacctccaaattgctaaatttcaagatcatctctcagttctcaccctatctgacttctcagcagtatttgacccagtccatcactctgtcctcttttttttaaattttattattattatactttaagttttagggtacatgtgcacaacacactctttaatgcaccctccatacttggcttcc

SEQ ID NO: 103822 - DNA, 595 bp, Homo sapiens
atgacctatatatactccatgtatgtctgccaaatctatatgtccacagctttttgctgtctgtgaggaatctcaagcttcacatggcaaaactgaactcatgattatacccatcccagacatgcactccccaagatttctccatcctggttgacaccagccctttagttgctgaaggcaaaagttttagaatctttgttgcttcccttttactcacacttcacatgtaatctttctaccttcaaaatatatccaggatccaggtacttttcaccatcttcactgctatcacctgaaccaggtgatagatcatcatctctggcctaaattcctacaatagcctcctaaacagttctattccctccttacaccttacccacaatataccagccaaaatgatcttgaagctactcagatggtgtaattccttgactcaaaaatacacagcaccttcccaagtcatttagaacagaagccacagtctttacaayacaaggtctaacataatctactttattgtctactattttattcctttattacttacaggtctccttgtcattcttttaatacattaggtacattcttgcctcaa

SEQ ID NO: 103823 - DNA, 595 bp, Homo sapiens
atgacctatatatactccatgtatgtctgccaaatctatatgtccacagctttttgctgtctgtgaggaatctcaagcttcacatggcaaaactgaactcatgattatacccatcccagacatgcactccccaagatttctccatcctggttgacaccagccctttagttgctgaaggcaaaagttttagaatctttgttgcttcccttttactcacacttcacatgtaatctttctaccttcaaaatatatccaggatccaggtacttttcaccatcttcactgctatcacctgaaccaggtgatagatcatcatctctggcctaaattcctacaatagcctcctaaacagttctattccctccttacaccttacccacaatataccagccaaaatgatcttgaagctactcagatggtgtaattccttgactcaaaaatacacagcaccttcccaagtcatttagaacagaagccacagtctttacaacacaaggtctaacataatctactttattgtctactattttattccyttattacttacaggtctccttgtcattcttttaatacattaggtacattcttgcctcaa

SEQ ID NO: 103824 - DNA, 476 bp, Homo sapiens
tattctttctactttgccttaactctttatttcccttagaaaatgtagccaaggcacaacttgaaacaagaatgaaagakaatgtgagactgccttgtttctacctttctctagctgtggctcacttaggcagtaaataaattaatataatttaaatgcttagtgtctgacatatagaaagggctcaatcagtattagttataagtattagtttttttgacacattaaaacgtaaatttcttaattttttttccctttacaagtctgacctagcccttttctactttctatcttttttctgggacacataggttggtttgtttctctcactccctctctccctctcactccccctctctccccctctctctccccctctctccctgtctctccccgctccccttttctccccctctctccccctcccccccctcgctctttccctctctctcctctctctccctctctccctctca

SEQ ID NO: 103825 - DNA, 476 bp, Homo sapiens
tattctttctactttgccttaactctttatttcccttagaaaatgtagccaaggcacaacttgaaacaagaatgaaagagaatgtgagactgccttgtttctacctttctctagctgtggctcacttaggcagtaaataaattaatataatttaaatgcttagtgtctgacatatagaaagggctcaatcagtattagttataagtattagtttttttgacacattaaaacgtaaatttcttaattttttttccctttacaagtctgacctagcccttttctactttctatcttttttctgggacacataggttggtttgtttctctcactccctctctccctctcwctccccctctctccccctctctctccccctctctccctgtctctccccgctccccttttctccccctctctccccctcccccccctcgctctttccctctctctcctctctctccctctctccctctca

SEQ ID NO: 103826 - DNA, 476 bp, Homo sapiens
tattctttctactttgccttaactctttatttcccttagaaaatgtagccaaggcacaacttgaaacaagaatgaaagagaatgtgagactgccttgtttctacctttctctagctgtggctcacttaggcagtaaataaattaatataatttaaatgcttagtgtctgacatatagaaagggctcaatcagtattagttataagtattagtttttttgacacattaaaacgtaaatttcttaattttttttccctttacaagtctgacctagcccttttctactttctatcttttttctgggacacataggttggtttgtttctctcactccctctctccctctcactccccctctctccccctctctctccccctctctccctgtctctccccrctccccttttctccccctctctccccctcccccccctcgctctttccctctctctcctctctctccctctctccctctca

SEQ ID NO: 103827 - DNA, 476 bp, Homo sapiens
tattctttctactttgccttaactctttatttcccttagaaaatgtagccaaggcacaacttgaaacaagaatgaaagagaatgtgagactgccttgtttctacctttctctagctgtggctcacttaggcagtaaataaattaatataatttaaatgcttagtgtctgacatatagaaagggctcaatcagtattagttataagtattagtttttttgacacattaaaacgtaaatttcttaattttttttccctttacaagtctgacctagcccttttctactttctatcttttttctgggacacataggttggtttgtttctctcactccctctctccctctcactccccctctctccccctctctctccccctctctccctgtctctccccgctccccttttctccccctctctccccctcccccccctcgctctttccctytctctcctctctctccctctctccctctca

SEQ ID NO: 103828 - DNA, 519 bp, Homo sapiens
tatcatatatatatataaatgaactagggaatcatgcgtgtgaacttagttttggtagttcttctgccttttattttgtgtgtgacttggaataagtcacttatcttctatgagtctcagtctccttcctaaaataggaaaaaaaaattccttcacctgaattaatcattggattctgggaggctaaaataggatagcattgttaaagrtttggaggcaacccacctccatagacatatgtatgtgtgcacagatatacttgtgtattattgtcattgctattcttagggaagagccaggttttaaacccagttcccttcatacttaatttagtccactgacctacattcagaggggcctgtaaagtagtattgccaaaatatgtatataagagtaacctagagtacttgctaaaataaaaatccccaagaccattcccagttaatttaatttaaaagtctgaaatgaactccggagttggcatggttaatagacaagcctgatttttctgttccctct

SEQ ID NO: 103829 - DNA, 563 bp, Homo sapiens
ttctatgcacttaagtgtgtttttatggtggccaataagggtcattcctttctacatttagcactcccttaagaacctcttgtaaatcaggtctgatggtaatgaattcccttagcrttcacttgaaaaggatcttatttctcctttggttattaagttagtttggctagttatgaaattcttagttggaatttctttttcctaagaatgctgaatataggcacccaatctcttctggcttgtagggtttctgctaaaatgtctgctgtttgtctgatgtggtttatttttacataacctgccccttctctctagctacttttaacatattttctttcatttagcccttgaagaatgtgatgacaatgtacctttgggatggttgtcttatatagtatctcacaagggttctttgcatttattgagtttgaatactgacctttctaatgagattgggacagtttacatgacaatatcttcaaatatgttttccaagttgcttgctttctctccctctttcagggacaccagtgaattatagatttgatttctttaaccaaact

SEQ ID NO: 103830 - DNA, 519 bp, Homo sapiens
cagtgtagactgccctgaagatttcatgtgggaattaagaaatggcttatgccaaataatagaaatgaagctcattaacattgctaagtattaatataaaaacatgatatgcctcactggccactcaattcatctcagccaactctttgtctcttatcttacctctttctcttctctccatcttcatactcaggagaaaaaccacaaaatgcctttctttgtctcatgaagagaaattctcccctcctctgaagtcttggcctttgaactgaatgggcctacytcttccatcctactccagagacacaccaagaccttcttctaggtcgacacaggaattttttcctcggagggagcctggggaataaaatgtcctcactcatttcgccttcactacagatgtctcagcagaggagacattttgtactggtagaaatatccagtgaaacagatacaaaaatctatataaaaagtagatgattaatgccacagatgtgaggaatattcagtttagaattc

SEQ ID NO: 103831 - DNA, 630 bp, Homo sapiens
aagctacagttagtttaagtagcttgttctggataataaagcctcaaattatgaaacatccttgagagaagcgaaattgaaaaaaaaattaacattgtctgttcaagagaatttgactgatactatcagaaacagttagttctcccaagcttgattccaggggatgtcttttcacttactgcctatcaactagccattcagctttcagtaagtgagtgtgaattagccatagatcctccacttgtctgattactttgaggtttcacatcttattttatcatttggtcaggtggtagagaccagttcaactctgtcatacattggcattcttgcaatttgctttctcaatttcttgtgtaacattaaggagaatagaccaatgcctatgaatatgtatttatatgcacagttaattttgatagcagtttgttcttgtggctcattcctggaattatttgtagtgagttagagaatatagtgccatgctttattaatacatgacagagacataattttttttcaaactgaaaaggaycatttgactaataggtcacagaatggcaattactgtagaagtgcaggttacaatgctgatagaaaatcattaacaatggcatttgatttaaaact

SEQ ID NO: 103832 - DNA, 495 bp, Homo sapiens
atctgggctgagggaagaggaggcagtaaggcaagtggtggttcctcctcctttccctttttaggcttttctgtgcataatggagccagggccaccttaattaaagcccatagtgttagagctgttactgggacctgttgcccttgtgcataatgttgtgtaagatttctcccaacttgttcccagagctctatgtcatcattccttcttttgagaaccatggattatggtttacaacaatttgcagtaggtcccttaattaagcctgcgaaactgaggctccactagctttaagcaactgtttcaacacttttatatattgtttccattgagctgataactgttgccccatgatgaaacctcagcctgaacaattccccccaracttggagatcctgagtgggcaccaatgacttactgattactcactgaccacgcagtccttttcacctctgtttttgggggggtccgtcgtgcttcctttgctgtgttcct

SEQ ID NO: 103833 - DNA, 542 bp, Homo sapiens
ttcaaccaattgccgtttccagcccttgcttcactccaccttccatggtatatgtgcttccaattcccaagactaaacaaatttcatgagtttaattatttgttttataacagtcttcctctctgcaagacttacatttccttttttttttttttgcacactgctaactcagtttctacttctttacttgctttacatattatagtttgaagtaacaaatgtctccagttttattgaagtcggagatcctgttctgtatacttacygcattgagataattctaagacaggagggtgcaaaatctgtgcttttgtgttactttaaaaccagaagtctttctcttctattttatttgaattctaatcaacatacttttcctccaaggagctaggagctttcttgactgactcatgtcttctcaccacttccacattctatatgctacttatctttctttctggagttatctatttataatttgatttattttaagttccttgatagtagaaacaaaccaaaacaaattaaacaataaacaaaac

SEQ ID NO: 103834 - DNA, 542 bp, Homo sapiens
ttcaaccaattgccgtttccagcccttgcttcactccaccttccatggtatatgtgcttccaattcccaagactaaacaaatttcatgagtttaattatttgttttataacagtcttcctctctgcaagacttacatttccttttttttttttttgcacactgctaactcagtttctacttctttacttgctttacatattatagtttgaagtaacaaatgtctccagttttattgaagtcggagatcctgttctgtatacttactgcattgagataattctaagacaggagggtgcaaaatctgtgcttttstgttactttaaaaccagaagtctttctcttctattttatttgaattctaatcaacatacttttcctccaaggagctaggagctttcttgactgactcatgtcttctcaccacttccacattctatatgctacttatctttctttctggagttatctatttataatttgatttattttaagttccttgatagtagaaacaaaccaaaacaaattaaacaataaacaaaac

SEQ ID NO: 103835 - DNA, 602 bp, Homo sapiens
accaagcattcttgtgctctcaggggcctgagaagccccctgcccctgtaggctcagaagggcctgttaccactgcctggcctctccctgctcctggtgcccactctgattttggagcaaagttgaggatgaccctgggtgctgttgtgacccaggcagatgtgtgcacacttggggtggtgctgacacagcagtcccctgtcaccttggctccctctggactttgggcaccaaagagcacaggagagagttgagggaaatctgagagtggctcagcatgggcctgcaggaacccctcagcatgaacagcctgggtgctgtggacagcatattgatggtggcaggaggcagacaggatcctggacagaagacagtggctccccagtgaagcctcaccttcaagccagggatggcctgaagcctgggggctaagctktcacttctgtgatccagagtgagaagttatggtgctttctctcgcctgcctatggctgcccacagtccactcaacacacactttcttcctttggaagcccataaaaaccctggactcagccagactggggagacaacaggacttcctgcctgcaaataggagctac

SEQ ID NO: 103836 - DNA, 661 bp, Homo sapiens
ctattttaaaatgtcttcaaatttctttatggtgaataaagctgtcagaagcatatatgtctcccttgtcctcacaatagttgactcctgcagggctgtcacaaggccaataaaagaatgacctcggggatatgaaagtggagacacttcaaggtgtctccaaagatttggtctcacaacacttgaattggctcatgtaagcagccatgtcacaagtgctgaaaaaataactcccacaaaatggctacacatttacagagaaaagatttttttgttacatactaatacagcaaatcaatccttgaaaaagactaggaatcttgacttaagtgatctctttatttaggcagtgactctcagaagcctctaaggaaaacttgctaactccaagtaaccttgcacaaattgtttttctatatttactttggtttttaatatcttttattttccttgtatctaaagtggagatgatgcttgctaaggttcttaccagctagaaaactggtaactttaggacagttctcctcttccttggaggaccccagagaggtcccaggggtgaagaccctagccctaaccagagagtttcacttctgttatattattgatgtctgtctsttctggataagctgggaaatacatgattctgtgatatgtgtta

SEQ ID NO: 103837 - DNA, 624 bp, Homo sapiens
gacctcttttgtctaatgtccattcttttactccatgtctttttattggataatttaattcatttacattcgaggtaatcactgataggtaaggacttactactgtcattttgttcattctttttcagttgttttgtagattctttattcctttcttcctcttgtcctatcatcctatcttcttttgtatttaggtgattttctatagtggtatgctttgattccttacttgttgtgttttatatatctactatatgtttttgccttttcttactgtaagaattacataaaatatcttatagttgcaacaggttagttaagctgatgataaattaactaactttgattacatttaaaaaactgtacatttttactccatcactccacatttkatgatttatgtcacaaattacattttaaattttacatttcttaatgtatcattgcagtcattttttaattgttttatctcttaaccttcatgcttcagacagaaatggtttatgcaccaccatgagagttagattattttgaatttgtgtactcatttttattagtaagagtttgcttttatatgttttcattttactaattaccatgcttttctttcagctgaaataacta

SEQ ID NO: 103838 - DNA, 510 bp, Homo sapiens
aggttcaagccattatcatgcctcagcctcctgagtagctggaattacaggtgtgtgccactacacctggctaatttttgcattttcagtagagacagggttttgctaatttggccaggctggtcttgaactcctgacctcaagttatctgcctgccttgacctcccaaagtgctgagattacaggcacgagtcaccatgccagactctttagtatttcttaaaagacatgtctgttggtgatattttccctcagattttgtttgtctggggacatctttatccctccttatttctgaagaatagttttcctggatgaaatactcttgattgacagtttaactgcagcaccttgaatatatcattccactctctcttaacatgcaaaatttcttctgagaaatctgctgttagcattattacaactctttcataagtgatttgcatcttttctcttgctgcttwcaggatcctctccttgtctttggtttttgacaatatgccttagtgt

SEQ ID NO: 103839 - DNA, 605 bp, Homo sapiens
atgatgatgctgtgatgttgaagttgaatttgggccactttaaagcttaagtttttaatagaacagaaatttatggagccacaataattacactccaaaatgaacataggtttgtttcagaaaactcacacaaatccaaattatatgcccctaaagttttatttaagtatgtcttaatttgaaaaaaaaaatgcagagaagtagaagggaataagagaggaaaagaaaaattttaaaaaagaaatgtaaaaagggaaaaaaggaaaaaataaggtcttacaagtgttcgattttctcttagtgtatcaggcagagcaagaaaacgtgtaaatagcccaggcaagtcattaataaaggtgtcargttagagcctataagtgctcctaatctacctgaagatccgtcacgacttgcaccagcagagttcacgtggtaattgacaatagctaatattatcagatcaccagcgtttcagggaaagattttcttcatgtgcaaatctctaaattttaaataatggcaacccactttattagtaaatagcttgtgttagacaatgtaacatatttgcaggcctgattaaacatataggctggcagtttgta

SEQ ID NO: 103840 - DNA, 409 bp, Homo sapiens
gaattccttatgataaacaatatttgcttaattctaaatatgttcagtgtcatcaagttgaatatcctcaatgtctaaaacccttgtgaagatagagatctgtcattgtttatttttccctatacaatttgatagctctcattctcaaagtaatatgcatgttttcatatttaattcaacttttaaaaattacatccactggtagtctaacaataagttcttttcagattataagggtttttttttwaaaacatttttgctttgtgattcatggggatttgtactttgttgaagggagaaagtaacttatccaagcaaacaaagacttccagtggtcagcttaatcaataaagtatttagggggatatccttcctcttccagacctatcagtgtcattattttcattac

SEQ ID NO: 103841 - DNA, 656 bp, Homo sapiens
atacaatgagacttaataaagcattaagaaaaatagaaacaataggcaaagcataagatttggcaagatacattggatggaatgcagatggccaataaatgtatgaaaaaatgtttaactttttaaataaaagaactacaaattagaaaaaaaaaaaagagagagaaaagaagaggcacgggctggccgcggtggctcatgcctgtaatcccagcactttgggaggccgagacgggtggatcgtgaggtcagaccatcctggctaatacggtgaaactctgtctctactaaaaatacaaaaaattagccgggcgtggtggcgggcgcctgtagtcccagctactcgagaggctgaagcaggagaatggcatgaacccgggaggcagagcttgcagtgagccgagattgcgccactgcacaccagcctgggcgacagagcgagactcygtctcaagaaaaaaaaagaaaagaaaagaaaaagaagaggcatgattgctttcctaatgtgaggatattgatgcctcctgtgagacaaattgcctaggcattagttctcaagtgagttatctgtctgagctcttccaaagacccttgatgaagcccttttctctgcaagggccctagaggaggaggatgtcctccgactttccatagtt

SEQ ID NO: 103842 - DNA, 578 bp, Homo sapiens
cacttacttcgcataggttcagaaaacatctgtttcatggttctgtgggcacttcctcctaagaaagaattcagaaaaggcaggttactaaatgaactgcagcctgtagctatagttgatcataggatgtcacctggtccttatcctccccctcctccactatccactctgaatccccctcactatgatcttggcaggtcrtggtagcttaactggtggtctgatctaattcctcattcttggggtttcacacatatttctccctgcccccactgtgagaaagaagtccaactgcttcctgctgctctgtatcagttatccttgccattatggtgacttcttttctgctgatctctttgcatgagtaattcataactgttagttcaatggagctttgctgtgttttctggcaagagtcactgggaatggagcacaacacagaagtctctgactatatatatatcgcaacatgaagaataacacccatactttcagaatcttatctccatgttggtgcttcagctgtgtcttgttgcttctggataatgaactatgtgtgctggtgtgccccaacaagc

SEQ ID NO: 103843 - DNA, 610 bp, Homo sapiens
gttatcctatcttctaaatctcttcaccttaatttgacagtttttgaaatgataggtcagatttaaagaaaaacaacagaatttcatgggagaaaacatcatttgtggcagtacttaaaattcagtgttttgtttctgtaattccatttctccgctggggagatgggtttaggatgagatggaaaggcaagagagaagtaaaaggaagaggagaaagataatttcactggtgtgccctttgacattcatctcaagggataatcagataataaattgttcttgaaataaaattttatccctagttcactgttaaaattcaaacaaatttaacttaaaatctgtaagtatgaaatgttctgacaaagtacagatttcatttttcaataaactcaaacaatacccacatttattaatcaaataaaatttctcayaattctttagtatgatatagttatcatgaaaaatttaaactaccgaaacattgagggagctagagtctttcatgttctcaagtcatatctagaagattaaattatatttttctctaatataacaagttaagacagtagaaataaaaataagttattagtgatttgatatcctttagaca

SEQ ID NO: 103844 - DNA, 610 bp, Homo sapiens
gttatcctatcttctaaatctcttcaccttaatttgacagtttttgaaatgataggtcagatttaaagaaaaacaacagaatttcatgggagaaaacatcatttgtggcagtacttaaaattcagtgttttgtttctgtaattccatttctccgctggggagatgggtttaggatgagatggaaaggcaagagagaagtaaaaggaagaggagaaagataatttcactggtgtgccctttgacattcatctcaagggataatcagataataaattgttcttgaaataaaattttatccctagttcactgttaaaattcaaacaaatttaacttaaaatctgtaagtatgaaatgttctgacaaagtacagatttcatttttcaataaactcaaacaatacccacatttattaatcaaataaaatttctcacaattctttagtatgatatagttatcatgaaaaatttaaactaccgaaacattgagggagctagagtctttcatgttctcaagtcatakctagaagattaaattatatttttctctaatataacaagttaagacagtagaaataaaaataagttattagtgatttgatatcctttagaca

SEQ ID NO: 103845 - DNA, 610 bp, Homo sapiens
gttatcctatcttctaaatctcttcaccttaatttgacagtttttgaaatgataggtcagatttaaagaaaaacaacagaatttcatgggagaaaacatcatttgtggcagtacttaaaattcagtgttttgtttctgtaattccatttctccgctggggagatgggtttaggatgagatggaaaggcaagagagaagtaaaaggaagaggagaaagataatttcactggtgtgccctttgacattcatctcaagggataatcagataataaattgttcttgaaataaaattttatccctagttcactgttaaaattcaaacaaatttaacttaaaatctgtaagtatgaaatgttctgacaaagtacagatttcatttttcaataaactcaaacaatacccacatttattaatcaaataaaatttctcacaattctttagtatgatatagttatcatgaaaaatttaaactaccgaaacattgagggagctagagtctttcatgttctcaagtcatatcyagaagattaaattatatttttctctaatataacaagttaagacagtagaaataaaaataagttattagtgatttgatatcctttagaca

SEQ ID NO: 103846 - DNA, 518 bp, Homo sapiens
acaattaaaactattcagtttctacctgtgattattctaatgtctaatgtcattaattcaatagaactctaagaaaatcttgaattaaaacacacactgaatggaaaaagattccacttttcacataatgtgttcaataaggtaattaccttgagaaatctaacatggcaaacatctttgtcatttaggattttgaattgttcatgtttattttttcctataattaatgcttatcatttgccaaacatatctgacaaatacatactttaggggaatagcattcctaaacatcctgtaaaagaacgttgaaaaaccatggccacttgtcttgagctccataatatgttgttagtttagaaatctaaatatttgtaawtttattttgaataataagcatgttgaaaaaaatgcacagaagtatcttgattgaaaagtgttctgaaagcatgtaatattcagcatgctctaagtgccagtagagcttggatgttatttgattaaaaaaaaattctggtact

SEQ ID NO: 103847 - DNA, 581 bp, Homo sapiens
ctgaactcccaagggattatctaccccctcaaaagagttatttctctcttaaagtttaactgcccccatacaagacttaatttttttgaccaggatgaaacagctctagtcacaacattctttttcaaaatagtctacgttttagatttctagtttttttttttccttttagctcctctttgtataatactcacacttgatccatgcacacttaacctccttgtaaaatgtgtttcttcttgtcttgaggccatcaaactcccagcagtcatgcaacgggagcctcagatgatggctcctttcttaccagggacccttagataggcctctgagagagatctgactgctgttttccccagaaaaatgccccctatcatatgaagcagttaagagtagtcattgtccctatcctaatggcagttagatgtacctcttcagaggggggactgatggcagtggtggcctgtctggagaagcrgttgcaaagaagctggctgtagtggaggaggcatggcctgggctgtgtgctccatgaaatgagcatgagccaggacaaggtagaagcctcaccaccccccttc

SEQ ID NO: 103848 - DNA, 580 bp, Homo sapiens
taaacattgttcttagagatacctcttaaagtcaagctagagttctttccttcctcctggaatcattagaaaatgattctygtctcagactctgaaagaaatcttgctgcgttcatgatgagatggctttaaatacctgtccttttgattaggaattaacattgcacctacttaagtgacctcaggttagaataccaagttttatgcactgattaaaatttttcattgaagcatgttgctgttggccagtttcccatgaaatcatttatttatgtagtcagccagccaaccaacacatttattgagcacctattatgagccagtcactcttctaggtgctggacacttaaagcaggtcttaaacttcagtgggggtcttgttgtaacagagattctgattcaggaaatccagagtggggcccaagatcctgaatttccaagaaactcttgctgctccaaggaccaccaaaattattgtatgaatttcaagaaagatggctcttgagacccagcttaaattctgcattcctaagagaatggagttaactctaaatagggtcagattttcaactaaagtttg

SEQ ID NO: 103849 - DNA, 476 bp, Homo sapiens
agcctgggtgaaaaaaaaaaaacaarcaaagaagaagaaaaagaaatcttctcctcacctcacattgattccaatagtgatatggtttggctctgtgtccccacccaaatctcatcttgtagctcctgtaattcccatgtgttgtgggagggggcccagtgggagatgattgaatcgtgggggcgggtctttcccatgctgttctcatgatagtgagtgtgtctcaggagatctgatggtttttaaaaacagggtttgcatgcacaagctctttttttttgcctgccaccatccacataagatgtgacttgctcctccttgccttccaccatgtttatgaggcctccccagccatgtggaactgtaagtccaattaaacctctttccctggtaaattgcctggtctccagtatgtctttatcagcagtgtgaaaacagacaaatacaattggtcaccttggacaatttactgaatt

SEQ ID NO: 103850 - DNA, 550 bp, Homo sapiens
cgcattactgccgtctctgcctgtatcgccatcgggccrtcctccctctgcatgaggctctgtgacctcaccccttccgtcaagaagccagcgactggtcatagggtctacctgaaatcctaccttgatgacatctgcacacgccctattccaaacaaggtcgcactcacaggcaccaaggttaacacttggatgtgtccctttgggacacaatcagcacacagcactggctaaactctatccaaaggggagttaatttggataaggaatggagattctgggaagaaaaccaggaaggcagagctaaaacaaataaacaaatgacaaagacagcaacaaagtaaagcctgggtttactttgtaacccagcaataaagtaaagggttcctgagctctcctgcaccaggaacgtctggagagtgatgtcatacctgctgtctgtccctccccacagccttgatagcaagctggagccatcattccccgggctctgctgtgggggtgacgcccaccttatcctggtccaggactcactttcctgtgtgtctcc

SEQ ID NO: 103851 - DNA, 550 bp, Homo sapiens
cgcattactgccgtctctgcctgtatcgccatcgggccgtcctccctctgcatgaggctctgtgacctcaccccttccgtcaagaagccagcgactggtcatagggtctacctgaaatcctaccttgatgacatctgcacacgccctattccaaacaaggtcgcactcacaggcaccaaggttaacacttggatgtgtccctttgggacacaatcrgcacacagcactggctaaactctatccaaaggggagttaatttggataaggaatggagattctgggaagaaaaccaggaaggcagagctaaaacaaataaacaaatgacaaagacagcaacaaagtaaagcctgggtttactttgtaacccagcaataaagtaaagggttcctgagctctcctgcaccaggaacgtctggagagtgatgtcatacctgctgtctgtccctccccacagccttgatagcaagctggagccatcattccccgggctctgctgtgggggtgacgcccaccttatcctggtccaggactcactttcctgtgtgtctcc

SEQ ID NO: 103852 - DNA, 605 bp, Homo sapiens
tttgaacaagtgtgactgggagatyagatgacatttctgcagcctgactgtggaccctgagttgtatttctctatcttgcagtgttgataaaaatcacctaccccagggggttctccccaggccttacgtctcacctagcagatggtgggatttttatggataggtcactggacattttcaggaagcaagaggggcatcctcaggaatgttttaaccatgagggaacagagaatttgcagagatgggcaggagaggaagaacatgaaggagggcagcaaccacctgggtacaggtgtttattttgaccatggaggaaccgtgaataccacccaatgagtttcctgccacgtcaccacagtcacctctaaatgaccctctagggcaggggcaattgttattttcctctgaggtgaggcacagcaggtcagcaaatgggaaccgttagctagctgtgggtgtgtctggcctgaagtcaggtctgtctgtcctcaaactgcactcacagctttaccttgctgtgggtcttccctgctgggtgcaggcgggggctcctcaggcagaaaacaccagagaggtccttggttctgaacagcactgggtggaa

SEQ ID NO: 103853 - DNA, 605 bp, Homo sapiens
tttgaacaagtgtgactgggagattagatgacatttctgcagcctgactgtggaccctgagttgtatttctctatcttgcagtgttgataaaaatcacctmccccagggggttctccccaggccttacgtctcacctagcagatggtgggatttttatggataggtcactggacattttcaggaagcaagaggggcatcctcaggaatgttttaaccatgagggaacagagaatttgcagagatgggcaggagaggaagaacatgaaggagggcagcaaccacctgggtacaggtgtttattttgaccatggaggaaccgtgaataccacccaatgagtttcctgccacgtcaccacagtcacctctaaatgaccctctagggcaggggcaattgttattttcctctgaggtgaggcacagcaggtcagcaaatgggaaccgttagctagctgtgggtgtgtctggcctgaagtcaggtctgtctgtcctcaaactgcactcacagctttaccttgctgtgggtcttccctgctgggtgcaggcgggggctcctcaggcagaaaacaccagagaggtccttggttctgaacagcactgggtggaa

SEQ ID NO: 103854 - DNA, 605 bp, Homo sapiens
tttgaacaagtgtgactgggagattagatgacatttctgcagcctgactgtggaccctgagttgtatttctctatcttgcagtgttgataaaaatcacctaccccagggggttctccccaggccttacgtctcacctagcagatggtgggatttttatggataggtcactggacattttcaggaagcaagaggggcatcctcaggaatgttttaaccatgagggaacagagaatttgcagagatgggcaggagaggaagaacatgaaggagggcagcaaccacctgggtacaggtgtttattttgaccatggaggaaccgtgaataccacccaatgagtttcctgccacgtcaccacagtcacctctaaatgaccctctagggcaggggcaattgttattttcctctgaggtgaggcacagcaggtcagcaaatgggaaccgttagctagctgtgggtgtgtctggcctgaagtcaggtctgtctgtcctcaaactgcactcacagctttaccttgctgtgggtctkccctgctgggtgcaggcgggggctcctcaggcagaaaacaccagagaggtccttggttctgaacagcactgggtggaa

SEQ ID NO: 103855 - DNA, 562 bp, Homo sapiens
tctccactgagcttcttaccaagttctaggctaatgtcctattatattaaccaacctctgggttccagatcacgtcagaccttgagcctcttacttgttttcctgcctacaacctcagcttctccaaaactgaggtcaagtccttgattcacagccaaggaccttctggaggcgggtaccctgcccccaggctcaatattcatagctgtccctgctttcagccttcctcaactcaaatcaagtctggatgtggttttggggtgctcagaccccatgcttatcacctaccctggcatccagggaaagtccatgagaagcgcgtggcaagtgtggggcacagagcaggtgcccacaacatcccaacgggggatcacacggaggatcacacggaggatcacaccaccggtggtcacgagacagactgaggtaaagagcaggcgcccacaacatcccaagggaggatcacacggaggatcacaccrccggtggtcacgagacagactggggcacagagcaggcgcccacaacatcccaatggaggatcacacggaggatcacacca

SEQ ID NO: 103856 - DNA, 432 bp, Homo sapiens
agtcaggagttcaagaccagtctgggcaacagagtgagttttccatctctacagaaaatatttaaaaaaatagccaggtatggtggtgtgtgtttatagtcccagctacttgggaggctaaggtgggagggttgcttgaggccaggagttcaagactgcagtgagccatgatcatgccactccactgtggcctgggtgacagagtgaaatcctgtctgtcccccctgacaaaaaaaaaagcttgtggacagaacccacccatggaagagcagagctaggaccctgataaaaaccatgcctgtaactgaaactactactasacttcttattaagggagattataaaattgtagattattttaagaaactgtttatgccaatttgagtcaggtttttgctttgttttttttctttttaacctgcaagaacgctc

SEQ ID NO: 103857 - DNA, 567 bp, Homo sapiens
attttgaataatattttgtatttctgtggtgttggttgtaatgtctccagtttcatttctaattgagtttatatgtatctcttctcttctttagtaatgattaatctggctaatgatatatcatttttttagcttttcaaagaaccagatttttgtttcattgatctctatttttgtttgtttgttttggtttcatttagttctactctgatctttgttatttcatttcttctgctaactttgagtggagtttatgattgtttctctagttccttgaagtcaacactaggttatcaatttgtgatctttcagactttttgatgtaggcatttagtgctataaatgttcctcttagcactgctttttctatatcccagaggttttgataaattctgtcactattattcttcatttcaaggaatttttaaatttccatcttgatttcattgtttcccccaaaataaytcaagagcagattgtttaattttcatgtacttgtgtagctttgaggatgccttttgtaattaatttccagttttttccacagttgtctgagtagatacttga

SEQ ID NO: 103858 - DNA, 590 bp, Homo sapiens
attttgtaacagaaagttagcctaaaaatagtaattagtctagttgttttttttcctgaagaagcattgtagttctgtgagttcagttatattggtagtagatgccagcaggtaaaatatgatgtatcaaagtccttaggttagttgatcatatggagctctttttctctttattatgttttagttcttaaatatcaccacatatcagctcaaatgcaagagtttgtacgtagaaatgctaattcaacatcatgctctaatatacccattacagttaatgttcctttaaatagtaaaagtgaggtgcattttttaayagaaaccttaacatggcataggagattatcacaatctcttatattccacttttcactcacattcaaaattttggaaacaatgttcataaatgacagagaggaagagagagagagagagagacaaaaaagaaaatttaatttttaatctgcaagcttcatttcgtatgcataaatattaaattttatccacaattatattatgttgccgtttcagaaaacctgtcaaacagtgtttttcctctgctctcacaccaccacaacaagattcataaa

SEQ ID NO: 103859 - DNA, 557 bp, Homo sapiens
cacaagaagagtagcatgggggtgaccacacccatgattcrattacctcccaccaggtcacttccacaacacctggggattgtgggaactacaattcaagatgagatttggatggggacacagagccaaaccatatcactaatcttagtctcaattttcccatcatcagaatactgtcagcacttactctaataccccatgcgttcatgtcccttttgtaattcactctttctaaagaacattcttctctttggctacacagcctatctttccatctttttttttttaagtataacttatgtaaaaactttaaggcttctgtgtcttttctacattttcactggctctctaaggggtcatctcaggtgccaatgaaggcagtcttcagtctggattcctttcaaggatgtgaaaattatctcttcaaaatacattaggcaatgtctgcctactttggattttgtgacggcttgaaacaatgcagtccacattttaactgacaagtttagaggtgtcagtggtatttgagctttctgtgcctcaaaaactcaccatct

SEQ ID NO: 103860 - DNA, 518 bp, Homo sapiens
ggctacaaataaatgattccatgtacttacttctgctgtggtttatcacaaagaccaaagccaatggaaaatgaggagagagcaacagagatcccttggggaggggggcaatttgaaatgtatcaggctataagaaatggtgcttttaaaaacatattgaataacatgatggagagaaagattttcttgtttttgtttttgtttttgtttgagacagagtctggctctgtctcccaggctggagtgcagtgrcgcaatctcggctcactgcaacctcggcctcctgggttcaagtgattctcctgcctcagcctcccaagtagctgggattacaggtgcccgccaccgtgcctggctaatttttgtatttttagcagagacggggttttgccatgttggccaggctggtctcaaactcctgacctcaggtgatctgcctgtgtcgccctcccaaaatgctgggattataggtgtgaggaactgtgcccggccaagattttaaacaaatataagcagct

SEQ ID NO: 103861 - DNA, 518 bp, Homo sapiens
ggctacaaataaatgattccatgtacttacttctgctgtggtttatcacaaagaccaaagccaatggaaaatgaggagagagcaacagagatcccttggggaggggggcaatttgaaatgtatcaggctataagaaatggtgcttttaaaaacatattgaataacatgatggagagaaagattttcttgtttttgtttttgtttttgtttgagacagagtctggctctgtctcccaggctggagtgcagtggcgcaatctcggctcactgcaacctcggcctcctgggttcaagygattctcctgcctcagcctcccaagtagctgggattacaggtgcccgccaccgtgcctggctaatttttgtatttttagcagagacggggttttgccatgttggccaggctggtctcaaactcctgacctcaggtgatctgcctgtgtcgccctcccaaaatgctgggattataggtgtgaggaactgtgcccggccaagattttaaacaaatataagcagct

SEQ ID NO: 103862 - DNA, 518 bp, Homo sapiens
ggctacaaataaatgattccatgtacttacttctgctgtggtttatcacaaagaccaaagccaatggaaaatgaggagagagcaacagagatcccttggggaggggggcaatttgaaatgtatcaggctataagaaatggtgcttttaaaaacatattgaataacatgatggagagaaagattttcttgtttttgtttttgtttttgtttgagacagagtctggctctgtctcccaggctggagtgcagtggcgcaatctcggctcactgcaacctcggcctcctgggttcaagtgattmtcctgcctcagcctcccaagtagctgggattacaggtgcccgccaccgtgcctggctaatttttgtatttttagcagagacggggttttgccatgttggccaggctggtctcaaactcctgacctcaggtgatctgcctgtgtcgccctcccaaaatgctgggattataggtgtgaggaactgtgcccggccaagattttaaacaaatataagcagct

SEQ ID NO: 103863 - DNA, 552 bp, Homo sapiens
ccagtatttgtccttagaacaggtccagttgacaaaggcrctgcaggatatgaaagattctcattacaatgtcacggcaacatgactgaaattattaactctccacgtgggatgatggatggtatagggtggagatgtccttggcagaacatattgcttaattatcttcttttagtaccagcttacagtcacgttcctatgatcgagtactattccaaatgaattcataaagagagaatatttaaagatcttatccaataaaagagcagattaaatgtcagatcttcattagtggttctttaatcaaagttctttttgtggttttatgacaaatgctttcatttttggcacttgaacctaagacccccaggtctaaaaggaacttttctcatttgaaataaaggaggatttaatgattttcaaaagtagaatttatggtctggtggataagacttataagtagaatctggagagcctttaattttagtgttggaatgaatgacacctcggatcttttacagggctgtaaagccctgtgacttagtttcccta

SEQ ID NO: 103864 - DNA, 552 bp, Homo sapiens
ccagtatttgtccttagaacaggtccagttgacaaaggcgctgcaggatatgaaagattctcattacaatgtcacggcaacatgactgaaattattaactctccacgtgggatgatggatggtatagggtggagatgtccttggcagaacatrttgcttaattatcttcttttagtaccagcttacagtcacgttcctatgatcgagtactattccaaatgaattcataaagagagaatatttaaagatcttatccaataaaagagcagattaaatgtcagatcttcattagtggttctttaatcaaagttctttttgtggttttatgacaaatgctttcatttttggcacttgaacctaagacccccaggtctaaaaggaacttttctcatttgaaataaaggaggatttaatgattttcaaaagtagaatttatggtctggtggataagacttataagtagaatctggagagcctttaattttagtgttggaatgaatgacacctcggatcttttacagggctgtaaagccctgtgacttagtttcccta

SEQ ID NO: 103865 - DNA, 552 bp, Homo sapiens
ccagtatttgtccttagaacaggtccagttgacaaaggcgctgcaggatatgaaagattctcattacaatgtcacggcaacatgactgaaattattaactctccacgtgggatgatggatggtatagggtggagatgtccttggcagaacatattgcttaattatcttcttttagtaccagcttacwgtcacgttcctatgatcgagtactattccaaatgaattcataaagagagaatatttaaagatcttatccaataaaagagcagattaaatgtcagatcttcattagtggttctttaatcaaagttctttttgtggttttatgacaaatgctttcatttttggcacttgaacctaagacccccaggtctaaaaggaacttttctcatttgaaataaaggaggatttaatgattttcaaaagtagaatttatggtctggtggataagacttataagtagaatctggagagcctttaattttagtgttggaatgaatgacacctcggatcttttacagggctgtaaagccctgtgacttagtttcccta

SEQ ID NO: 103866 - DNA, 552 bp, Homo sapiens
ccagtatttgtccttagaacaggtccagttgacaaaggcgctgcaggatatgaaagattctcattacaatgtcacggcaacatgactgaaattattaactctccacgtgggatgatggatggtatagggtggagatgtccttggcagaacatattgcttaattatcttcttttagtaccagcttacagtcacgttcctatgatcgagtactattccaaatgaattcataaagagagaatatttaaagatcttatccaataaaagagcagattaaatgtcagatcttcattagtggttctttaatcaaagttctttttgtggttttatgacaaatgctttcatttttggcacttgaacctaagacccccaggtctaaaaggaacttttctcatttgaaataaaggrggatttaatgattttcaaaagtagaatttatggtctggtggataagacttataagtagaatctggagagcctttaattttagtgttggaatgaatgacacctcggatcttttacagggctgtaaagccctgtgacttagtttcccta

SEQ ID NO: 103867 - DNA, 521 bp, Homo sapiens
atccaataaaagagcagattaaatgtcagatcttcattagtggttctttaatcaaagttctttttgtggttttatgacaaatgctttcatttttggcacttgaacctaagacccccaggtctaaaaggaacttttctcatttgaaataaaggaggatttaatgattttcaaaagtagaatttatggtctggtggataagacttataagtagaatctggagagcctttaattttagtgttggaatgaatgacacctcggatcttttacagggctgtaaagccctgtgacttagtttccctataggttagaaacagaakgccataaaatatacgaatacttgcaatgctgtagattggtaacatttatcaggcgacatcaggattcttaatagtctgcagtgggctcatgtcattcttaaaaaaatatagtcactacctttaagcaagttacccatgtaattgatttaattagttaatatttgagaaatattttagagatggaatggataatgcgatatcatt

SEQ ID NO: 103868 - DNA, 521 bp, Homo sapiens
atccaataaaagagcagattaaatgtcagatcttcattagtggttctttaatcaaagttctttttgtggttttatgacaaatgctttcatttttggcacttgaacctaagacccccaggtctaaaaggaacttttctcatttgaaataaaggaggatttaatgattttcaaaagtagaatttatggtctggtggataagacttataagtagaatctggagagcctttaattttagtgttggaatgaatgacacctcggatcttttacagggctgtaaagccctgtgacttagtttccctataggttagaaacagaaggccataaaatatacgaatacttgyaatgctgtagattggtaacatttatcaggcgacatcaggattcttaatagtctgcagtgggctcatgtcattcttaaaaaaatatagtcactacctttaagcaagttacccatgtaattgatttaattagttaatatttgagaaatattttagagatggaatggataatgcgatatcatt

SEQ ID NO: 103869 - DNA, 521 bp, Homo sapiens
atccaataaaagagcagattaaatgtcagatcttcattagtggttctttaatcaaagttctttttgtggttttatgacaaatgctttcatttttggcacttgaacctaagacccccaggtctaaaaggaacttttctcatttgaaataaaggaggatttaatgattttcaaaagtagaatttatggtctggtggataagacttataagtagaatctggagagcctttaattttagtgttggaatgaatgacacctcggatcttttacagggctgtaaagccctgtgacttagtttccctataggttagaaacagaaggccataaaatatacgaatacttgcaatgctgtagattggtaacatttatcaggcgacatcaggattcttaatagtctgcagtgggctcatgtcattcttaaaaaaatatagtcrctacctttaagcaagttacccatgtaattgatttaattagttaatatttgagaaatattttagagatggaatggataatgcgatatcatt

SEQ ID NO: 103870 - DNA, 568 bp, Homo sapiens
gacctggagccagtgaacaggacacagggtttattaaggaaactttcatacagggccattgagcggtggcaggctggacaggaggagcactgtcatttgtcaaaagcatgcagtttacacagatctggtgcaggtacattctcaggctttgcttaagtgatttccacaggtgcatctgctacacacatctccccttcaycataaaagcaggattgtgttcccctgtccttttcccagctttttcatatgtgtaagtcgtgacataaaatgcaaactctggtcatttttatcctttttctgcacttttccacttatggctggcttgtcttcaagtctgttgcttcttctttcttatgttcagatatttccatttacttactctctcatcgaagtgccctagaaatggggccagtagtggcttctgcacatagcactgagattatctttctaaattcttcctctgtactatcctccacaacagcacattagcttccatttgggtcaaattaacctcaacttatgaacttcaatatccaccatcattacatcctcttgtttcattaggcac

SEQ ID NO: 103871 - DNA, 502 bp, Homo sapiens
tgtggtgattagagctaatgagaggwttgaggagaccgacattcacttccaattgcagttccaaattaacaccttctgcagatacacattccagaaatctcatgccctgtactttcttctacaccgttttctctcccctttgtttccattccagccatgcaggaagcagcgtctgtcctggcacattgcgacatgttgtccatacccgcttgttcttccctgcctgtgttctggtaacactgtgttcactgttgaactcttctaggtatgctttccccccactccagttgttggtgttttctgtctacatcctcttagtcctctataaatagatacttttatgatactcacgtgttccttattgagtgtacagttgagtactggtgagtacatgcacattgttgtaaaaccaatctccagaatttttcatcttggaaaactgaaatgctacactcattaagcaactctcccatattcccctcccctaggccctaagagccac

SEQ ID NO: 103872 - DNA, 352 bp, Homo sapiens
tcataatctcttttaatctagagaaatctgcccctctactttattctctcctgctattgacttgttgtagaaaccaagtttggtrtcctgtgttctttcctacatttggaatgcatttgcttgcttccttttggtgtctttcaatgtgttactctatccacagtatttcttgtaagtggaagcaccagatgcttgaatagattcaggttcaaggttttacaagaatacttcatagatggttatacaagaatacttcagaaaggaaaatatttatagatttttgcaagtgtttattcgttgaaaaatttggtttcttaatattttggggctgtccttgtatctgcatcctatg

SEQ ID NO: 103873 - DNA, 352 bp, Homo sapiens
tcataatctcttttaatctagagaaatctgcccctctactttattctctcctgctattgacttgttgtagaaaccaagtttggtatcctgtgttctttcctacatttggaatgcatttgcttgcttccttttggtgtctttcaatgtgttactctatccacagtatttcttgtaagtggaagcaccagatgcttgaatagattcaggttcaaggttttacaagaatacttcatagatggttatacaagaatacttcagaaaggaaaatatttatagrtttttgcaagtgtttattcgttgaaaaatttggtttcttaatattttggggctgtccttgtatctgcatcctatg

SEQ ID NO: 103874 - DNA, 616 bp, Homo sapiens
ggcatagtggcaggcacctgtaatcccagctactcaggaggctgaggcttgagcccaggaggtggaggttgcaatgagccgagatcrcaccacagcactccagcccaggcggcagtgagagactgtctcaaaaaaaaaaaaaaaaaaaaaaaaaaaagaagtcccttatgtgtgatgataaaatttgatgaagagcaacattggtggacttacactaccagagatcaacatttattataaatgttctataattaatacagtgtagtattagctcaggagagaaaaaatagatcaatggaaaagaatagggagtctaaaaacagatccacatgtatacagtgagtcagtttatcagccttgaaatacgttggagaaataatagtcatttaataactgatgctgggttcactggctacttaacactagttcttcatacaattgcaggcaataaatacaaatagcatgcagctggcagactgggatcagtggctatgcctccactagactgcccatagaagcacatagtaacagctaccaaaggtgtctgatctgtcttgtctttttttaaactcattttgttcaggtataatttacataaaatgcagactttaactac

SEQ ID NO: 103875 - DNA, 616 bp, Homo sapiens
ggcatagtggcaggcacctgtaatcccagctactcaggaggctgaggcttgagcccaggaggtggaggttgcaatgagccgagatcacaccacagcactccagcccaggcggcagtgagagactgtctcaaaaaaaaaaaaaaaaaaaaaaaaaaaagaagtcccttatgtgtgatgataaaatttgatgaagagcaacattggtggacttacactaccagagatcaacatttattataaatgttctataattaatacagtgtagtattagctcaggagagaaaaaatagatcaatggaaaagaatagggagtctaaaaacagatccacatgtatacagtgagtcagtttatcagccttgaaataygttggagaaataatagtcatttaataactgatgctgggttcactggctacttaacactagttcttcatacaattgcaggcaataaatacaaatagcatgcagctggcagactgggatcagtggctatgcctccactagactgcccatagaagcacatagtaacagctaccaaaggtgtctgatctgtcttgtctttttttaaactcattttgttcaggtataatttacataaaatgcagactttaactac

SEQ ID NO: 103876 - DNA, 616 bp, Homo sapiens
ggcatagtggcaggcacctgtaatcccagctactcaggaggctgaggcttgagcccaggaggtggaggttgcaatgagccgagatcacaccacagcactccagcccaggcggcagtgagagactgtctcaaaaaaaaaaaaaaaaaaaaaaaaaaaagaagtcccttatgtgtgatgataaaatttgatgaagagcaacattggtggacttacactaccagagatcaacatttattataaatgttctataattaatacagtgtagtattagctcaggagagaaaaaatagatcaatggaaaagaatagggagtctaaaaacagatccacatgtatacagtgagtcagtttatcagccttgaaatacgttggagaaataatagtcatttaataactgatgctgggttcactggctacttaacactagttcttcatacaattgcaggcaataaatacaaatagcatgcagcyggcagactgggatcagtggctatgcctccactagactgcccatagaagcacatagtaacagctaccaaaggtgtctgatctgtcttgtctttttttaaactcattttgttcaggtataatttacataaaatgcagactttaactac

SEQ ID NO: 103877 - DNA, 616 bp, Homo sapiens
ggcatagtggcaggcacctgtaatcccagctactcaggaggctgaggcttgagcccaggaggtggaggttgcaatgagccgagatcacaccacagcactccagcccaggcggcagtgagagactgtctcaaaaaaaaaaaaaaaaaaaaaaaaaaaagaagtcccttatgtgtgatgataaaatttgatgaagagcaacattggtggacttacactaccagagatcaacatttattataaatgttctataattaatacagtgtagtattagctcaggagagaaaaaatagatcaatggaaaagaatagggagtctaaaaacagatccacatgtatacagtgagtcagtttatcagccttgaaatacgttggagaaataatagtcatttaataactgatgctgggttcactggctacttaacactagttcttcatacaattgcaggcaataaatacaaatagcatgcagctggcagactgggatcagtggctatgcctccactagactgcccatagaagcacatagtaacagctaccaaaggtgtctgatctgtcttgtctttttttwaactcattttgttcaggtataatttacataaaatgcagactttaactac

SEQ ID NO: 103878 - DNA, 370 bp, Homo sapiens
taagagagtgtaatcaggtcctaataaatacattcaaaatgtaaaatcttaatacaaacctcagcactcmctgtaagaagtgacaattaagctagagtgaatcccctgaccactctcagaagacacataatgcatttgagaccagcctggccaacatggcaaaaccacgtctctactaaaaatataaaaattagccaggtatggtggtgtgcacctgcaatcccagctacttgaaaggctgagttaggagaatcacttgaacaccagaggcagaggttgcagtgaactgagatcacaccattgcactccagcctgggcaacaagagcaagactgtgtctcaaaaaaaaaaaaaagaagaagaagacagat

SEQ ID NO: 103879 - DNA, 436 bp, Homo sapiens
cggaattcagtagctacatcccccaggcatatattggagggattagcaatgcgagctatgaccagagacagacctgggtgagaagtgaccacgtgctggcagccctcgctcactctcggtgcctccttggccttggcacccactctggctgtgcttgaggagcccttcagcccgccgctgcactgtgggagcccctctctgggctggccgaggccagagccggctccctctgcttccagggaggtgtggagggagaggcatgggcaggaactggggctgcgtgcggcgctcacgggccagcatgagttccgggtgggcatgggctccacgggccccgcacatggagtggccagccggcactgccgggccccgggcagtgaggggcttagcacctrggccagcagctgcggagggtgtgctgggtcacccagcagca

SEQ ID NO: 103880 - DNA, 650 bp, Homo sapiens
ttagtatatgttttttgaaaaaaggaaacgatcaaaagggtgtgtattggatatcctcatgtacaaaagggtgtgtattggatatcctcatgtacgtggcacagtgctaggtattatctagtcacagagacaaatccaacttggaacctctcctgtcctgaaggagcttggcatcttctagtagagatggggttttgccattatagccaggctggtctcaaactcctgacctcaggtgatccgcctgcctcagcctcccaaaatgctgggattataggcrtaagccgctgctcctggactctcctggattttccttcctctatgttccttaaatgtcagtgttctgcagggttctgaggaccacttcttttctcattcctgggtaatcccatccactctagtaaatttattaataactatcatctgcatgctgagttctccaccatgtatgtctcaatccttgtcatccctcctgggctgtatacgtgtgcatgtgtatgtctcttaattcatttttacagagtggtcccacaaggatcaacatgtctaaaatcaaatccatcactttctccacccgcaaggataccccttagaagccccaaacctgatattcctccctaattatcttaatctcaatggattttcatcct

SEQ ID NO: 103881 - DNA, 611 bp, Homo sapiens
tcttggcttccatacgtgtctcaggcagggaagctttcttcttccccacgttttccctcatgggtgggtggattgcctagaatgagtgctaygagactgtgactggccttgtcttccaggacaggtggtgtcccatttcctctgcatttcctgtctcattcttgagggacatcctctcctctgcttctgggtggcctgactcccttgatcttctggaagagctgatgtgggcttgaagccccagctgtgacaataagaacacagtgactcgtgactacgtcttgactgaaatgcaggccttgaatctaatcattacgttgaaaagaggtgttgagcctacgaaatgaaggcatgtctggaaaaagagacacagcaatatgttacagccaaactataacctaaatcccacgaacgcatgtcatcccacctgctattcgtttctgtcagagctgtcacccagtgatctacaaacgagaaaggggagaaacagctttgaaaagaaatgctaccttttgggtagtgaaggcagctatgtggctgatacctcatgctccttgtgttatttccaccccttcggtggtactccatgaatttcaccccacatctgagaa

SEQ ID NO: 103882 - DNA, 569 bp, Homo sapiens
agtgtttctactcaaaacacctgtctccctgccaaggtgaaggctagatggtaaaaaagaaagttcccttttttctgataaactaggctgtctccataggaagtaccctgaaggcccccagctccgactccgagagcagagcccagactctcctactttgaacggacatgarctctatgcctcttggggtttctctgcctgcccagtcaccctggataacgtgcttgccctagattgtctcctaggccaagtcctctccaagttcttggccctttgtcctaaggttggatctcttcctctcgcttcccttgctccgagctgtgtctctggatacaccccctgcaaactacgcttcctgagctcggctggcatctggctgtgttcagcaaatgggaagcccagacaggggactggagagcaggaagacgggagaacaaggagatttctcctccttcagcagccacagcagcaatggcgtgtcctccacagttaactggaagaaaaagcctgagtccttgtctcctcctggattgccaaagggtcttctccttagacatgtaaatacacaa

SEQ ID NO: 103883 - DNA, 599 bp, Homo sapiens
tagaaatctgtgaggtattgttttgttttgttttgttttttgtacttgaaattgggttttactttctacagtttttaattattttttctttctgctttttcactaggcttcatagatctcccttgcacatgtgcaattttgctgtgagccagaaatttgcatagttcattctttgaatttgggtctcatactttctgaggttggcttgttgccaaaactttccttttaaatttttagctgtttttaaggtctaaattctcatttctagcacttttaatcagggacttcatttttttctccattaataaaaattttaattttctactgatacataatggatgtacatattttggtagtacatgtgataatttaatgcattcatataatttgtaaaaatgaaactaatgtaattgagtatccaacaccttaaatatttgtctgtttcttatgctagaaacacctgaatgattatcttctaactattctgaactgtacagtagcttgttgtaaactattatttctgggcaagrccagctccacggctacacgatcagtgtggctgcagagacaggcacttggttttatgctctacttcaaag

SEQ ID NO: 103884 - DNA, 516 bp, Homo sapiens
agatgtgggagaggggaagtcatgtatatatgtrtatatatatatatatatattttttttttttttattttttttttccaggagtcttgctctgtcgccaagatgggagtgcagtggtgcaatctcctctcaccgcaacctctgcctcccaggttgaagcaattctcctgcctcagcctcccaagtagctagcactacaggcacccgccaccacgcccagctgatttttttttttttgtatttttagtagagacggggtttcatcatgttggacaggctagtcttgagctcctgaccttgtgatctgccctcctcagcctcccaaagtattgggattacaggtgtgagccacagcacctgcctagtcagattctacacagaggaatgaagataagaatggccgtctatctctcatctcaaacaagggaagggaagagacagaggagcaaaatctctccaggattgaaaggaaaaaagtcaacctaaaattctctaccagagaaaatatctttcaaa

SEQ ID NO: 103885 - DNA, 516 bp, Homo sapiens
agatgtgggagaggggaagtcatgtatatatgtatatatatatatatatatattttttttttttttattttttttttccaggagtcttgctctgtcgccaagatgggagtgcagtggtgcaatctcctctcacygcaacctctgcctcccaggttgaagcaattctcctgcctcagcctcccaagtagctagcactacaggcacccgccaccacgcccagctgatttttttttttttgtatttttagtagagacggggtttcatcatgttggacaggctagtcttgagctcctgaccttgtgatctgccctcctcagcctcccaaagtattgggattacaggtgtgagccacagcacctgcctagtcagattctacacagaggaatgaagataagaatggccgtctatctctcatctcaaacaagggaagggaagagacagaggagcaaaatctctccaggattgaaaggaaaaaagtcaacctaaaattctctaccagagaaaatatctttcaaa

SEQ ID NO: 103886 - DNA, 620 bp, Homo sapiens
aatttttatcagtgtgtaaaataaataaaataaaatacataggattacaattaaaacctattacctgaaagtacagttctatccctgggcttagctgtggtccatggccccaggtgagctactcctaacgagggcctaagggcaaattacaagtgtcaacttccaggctgaggaagaaaatggtggagacaacacaggaatgaggggcagcttagaatcaggagcccactgtggttactcacccaacccataggaagaggagccttcccctaggaagactgcagctggtggctaagagtggggttagtgggtggctaagagtggggttagcgggtggctaacactggtgttagagttgagcaaaataaaggctcagagaactaaaaacagctacaggcacaagctgtggtctttgctagactgagacttcccgcctcctccctccctggaagacattgatttttcccttgacaggaagtcatttatatatcagagaatggctccccttagcaatcagggctaaccacacgcgtgacttaattccgtyatcctcttccttcattccagaaactccatatttctgaaagaatatttgcataaccagctcacagagcagtttt

SEQ ID NO: 103887 - DNA, 581 bp, Homo sapiens
ctgtatgtgggtaaaagactagttatgtgttcaaaatacagtgatgaagaggccaatgagaaggtggttgtaaatgaagagataaagagcatggtgcaataaagggtgataggatcctctctcagccatcacacgatttgctttcttcagccagctcygtcaaaagtatcccctattagaaacgctgtccccttagagagtagtttgttgaaggtttctaacagaaaaagacaaggctcggacactagcagccctgcaggaaacagttgtattcaaagcagacgtgaaaaccctgtatcatgtgatgcactgccaatgcaacagcaccttcaagcactaacttcgatagaccctcagcctctgggatgacctggcatttccctctatctacgtgaactcgctgaggccccctttaacaatttagtaactccttttggcatggtgcactggcccaatggactaagtgtcctattgaagaatgcaatagaagcagacagcgagattggcctcaacagggttgcagaaagccctgtctcagcctggtcatgaattcaggtcaaccagtgccacttttatgaaaa

SEQ ID NO: 103888 - DNA, 435 bp, Homo sapiens
ccatcacacgatttgctttcttcagccagctctgtcaaaagtatcccctattagaaacgctgtccccttagagagtagtttgttgaaggtttctaacagaaaaagacaaggctcggacactagcagccctgcaggaaacagttgtattcaaagcagacgtgaaaaccctgtatcatgtgatgcactgccaatgcaacagcamcttcaagcactaacttcgatagaccctcagcctctgggatgacctggcatttccctctatctacgtgaactcgctgaggccccctttaacaatttagtaactccttttggcatggtgcactggcccaatggactaagtgtcctattgaagaatgcaatagaagcagacagcgagattggcctcaacagggttgcagaaagccctgtctcagcctggtcatgaattcaggtcaa

SEQ ID NO: 103889 - DNA, 536 bp, Homo sapiens
tttgtgtgcagtttactagtacagccccataatactggataagattttccctaaacttctgtgatttaaatgagatggtggttgcctgcactcagactggtaaatgggttggtcccgagaacacttacagaagcaccttgccttgttatttggctttagcattgtattaaaaagttagtagatatttgtaagcattctagagatcatttattacctattcactctttaagttaaattcttgtctatgtaacastgacctaaattgttcattgaaagtaatttcagtcctgaggtaaaaataatcttaatattaccatcttaattacaataataagggctcaatgactttaggatcatccaataagccatacgtttataaaacagaaagagctcaacagatgacattaaggtaggaaacagcctttcaataggagaagaaacacccgatctggagcaatccaatgcttgtgggcaccttagtgaacacatttggccaactcaatgcagaaattgctgtttacaacatggccccaaaa

SEQ ID NO: 103890 - DNA, 522 bp, Homo sapiens
atcatccaataagccatacgtttataaaacagaaagagctcaacagatgacattaaggtaggaaacagcctttcaataggagaagaaacacccgatctggagcaatccaatrcttgtgggcaccttagtgaacacatttggccaactcaatgcagaaattgctgtttacaacatggccccaaaatatgctttgcataggggaatgctgactttacataatatccactaaataaatgttagctctcacagtacaactttcattacacagcctgaggctctgttttcctgctggagaaatttctaccactgacatagatttgtaaatacttctagttcttgtttcttgtctgttctgcctcaagaagaacttacttgtgagaaagatactcaattctacttcctcacaaacatttaaatgaggtgcattgttctggattttgtaggggtggtggttgtttcagtttagttttaattatttcttgtcattttttgacaagcatactagccacttaataccaaaac

SEQ ID NO: 103891 - DNA, 522 bp, Homo sapiens
atcatccaataagccatacgtttataaaacagaaagagctcaacagatgacattaaggtaggaaacagcctttcaataggagaagaaacacccgatctggagcaatccaatgcttgtgggcaccttagtgaacacatttggccaactcaatgcagaaattgctgtttrcaacatggccccaaaatatgctttgcataggggaatgctgactttacataatatccactaaataaatgttagctctcacagtacaactttcattacacagcctgaggctctgttttcctgctggagaaatttctaccactgacatagatttgtaaatacttctagttcttgtttcttgtctgttctgcctcaagaagaacttacttgtgagaaagatactcaattctacttcctcacaaacatttaaatgaggtgcattgttctggattttgtaggggtggtggttgtttcagtttagttttaattatttcttgtcattttttgacaagcatactagccacttaataccaaaac

SEQ ID NO: 103892 - DNA, 522 bp, Homo sapiens
atcatccaataagccatacgtttataaaacagaaagagctcaacagatgacattaaggtaggaaacagcctttcaataggagaagaaacacccgatctggagcaatccaatgcttgtgggcaccttagtgaacacatttggccaactcaatgcagaaattgctgtttacaacatggccccaaaatatgctttgcataggggaakgctgactttacataatatccactaaataaatgttagctctcacagtacaactttcattacacagcctgaggctctgttttcctgctggagaaatttctaccactgacatagatttgtaaatacttctagttcttgtttcttgtctgttctgcctcaagaagaacttacttgtgagaaagatactcaattctacttcctcacaaacatttaaatgaggtgcattgttctggattttgtaggggtggtggttgtttcagtttagttttaattatttcttgtcattttttgacaagcatactagccacttaataccaaaac

SEQ ID NO: 103893 - DNA, 510 bp, Homo sapiens
aagccctcgtctctacaagaaataaaaaataaaaaatttagcctggtacagtggtgtgcacctgcagtcctagtgacttgggaggctgaggagggaggatygcttgagcccaaaagttggaggttacagtgagctatgataatgccagtgcactctagcctgggcaacagagctacatcttgtcttaaaaaagattaaaaagtgttattgtctaagagatgggatgagatcatatattctttttatcattaaaaacttttgttttctaaatttcctatgaggaatatttatttctttataaacagtataaacaactagctttaaaaaatagtgtgtctagcctatgaagaaagaacaagtaataatcttcattctacagcaatggtaatttccccaagatcgttaactcttccaaacctgttttccctggatctcaaattggagcctagagaaggcatttttgctaaaggttagtttgccgcaagggctcagatcaatgaaatttttatc

SEQ ID NO: 103894 - DNA, 510 bp, Homo sapiens
aagccctcgtctctacaagaaataaaaaataaaaaatttagcctggtacagtggtgtgcacctgcagtcctagtgacttgggaggctgaggagggaggattgcwtgagcccaaaagttggaggttacagtgagctatgataatgccagtgcactctagcctgggcaacagagctacatcttgtcttaaaaaagattaaaaagtgttattgtctaagagatgggatgagatcatatattctttttatcattaaaaacttttgttttctaaatttcctatgaggaatatttatttctttataaacagtataaacaactagctttaaaaaatagtgtgtctagcctatgaagaaagaacaagtaataatcttcattctacagcaatggtaatttccccaagatcgttaactcttccaaacctgttttccctggatctcaaattggagcctagagaaggcatttttgctaaaggttagtttgccgcaagggctcagatcaatgaaatttttatc

SEQ ID NO: 103895 - DNA, 510 bp, Homo sapiens
aagccctcgtctctacaagaaataaaaaataaaaaatttagcctggtacagtggtgtgcacctgcagtcctagtgacttgggaggctgaggagggaggattgcttgagcccaaaagttggaggttrcagtgagctatgataatgccagtgcactctagcctgggcaacagagctacatcttgtcttaaaaaagattaaaaagtgttattgtctaagagatgggatgagatcatatattctttttatcattaaaaacttttgttttctaaatttcctatgaggaatatttatttctttataaacagtataaacaactagctttaaaaaatagtgtgtctagcctatgaagaaagaacaagtaataatcttcattctacagcaatggtaatttccccaagatcgttaactcttccaaacctgttttccctggatctcaaattggagcctagagaaggcatttttgctaaaggttagtttgccgcaagggctcagatcaatgaaatttttatc

SEQ ID NO: 103896 - DNA, 549 bp, Homo sapiens
catgctcagttgcctccatagagagaagagatgggagtgagactgaggraagaccagccaggaggctgctgtgtccagtaaaggctgaggagagctgagagggccgggcaggggaaatggaggtgagggaatagatttgagaggttttggagaaagagcccatagcacatgagatggctgtatggaatgagggagagagaagagtctggaaagtccctggtttctagttggacaacctggtgatgatgctacttactatgacagggacacaaaagcggaaggtagagatgcgggcaggggatggggaactgcaattagataagattgctttaagcttcatgcagctgtgagatctccaagccacggtgcccagggccagtcagagctggcccctgacactcaggaacatgcagtcctgggcatcacccacttcagtagagctgtggagtctaggtcccctctcgccaagctggcaaaagctatgaccatatacaccacatttgcatataatttcaaggaactcacaggcccaaaagtttatccatggac

SEQ ID NO: 103897 - DNA, 549 bp, Homo sapiens
catgctcagttgcctccatagagagaagagatgggagtgagactgaggaaagaccagccaggaggctgctgtgtccagtaaaggctgaggagagctgagagggccgggcaggggaaatggaggkgagggaatagatttgagaggttttggagaaagagcccatagcacatgagatggctgtatggaatgagggagagagaagagtctggaaagtccctggtttctagttggacaacctggtgatgatgctacttactatgacagggacacaaaagcggaaggtagagatgcgggcaggggatggggaactgcaattagataagattgctttaagcttcatgcagctgtgagatctccaagccacggtgcccagggccagtcagagctggcccctgacactcaggaacatgcagtcctgggcatcacccacttcagtagagctgtggagtctaggtcccctctcgccaagctggcaaaagctatgaccatatacaccacatttgcatataatttcaaggaactcacaggcccaaaagtttatccatggac

SEQ ID NO: 103898 - DNA, 176 bp, Homo sapiens
aatatttgcagagctttctgagctttgagaattgttcttcaaacactttgtgttggcattttaccccaggcttcagttattttctctcatgtattcacagtttagtattcaatgaaggactcaataatttcctaggaaggtctgcagacwcacggtcatctgtattcattagcatg

SEQ ID NO: 103899 - DNA, 582 bp, Homo sapiens
atttaaactaatgaataaaaatttccmtcattgtaaactctatgttgatgtttcaaatagaatattttattccctgtgtgttttgagtagtagcacctttaatgttttatctatttatatttgtacaaggcatattacacatctgaaatgaacacagtactaattagcataaagtcaatgttagccttagactttacaggtaagtctacagaatacagaaagaaaaaatataatgtcatatgtacttcttaaacagttgtatcagtggaaaaactgatgatgcattcatgttttcctcaatatttagtgaggagagcaaaaatgagtaataagaaggcaagaaaaaatatccactgtgtcactgtaacaggcactagatgatgaggtcatagaatgtattcatctttatttattcagaaattagctccatacctagcacataaacattcccatctcaggtctcagttcgcttgtgcttctgtaacaaaatagctgagactgataagaacagaaacttgtttctcacagtccaggaggctgaaaagttcaaaaccatggttctggcagttttggcaccaagtg

SEQ ID NO: 103900 - DNA, 527 bp, Homo sapiens
ccaacataacctagatgcagatctacaaatataccctagatgcaaaatcctcaacaacttgaatatgacactatgtaaaaaagtgacacatgaccaagccatgtttattccagaaatgcaagacagttgcaatattttaaaaaatctaataatataattcatcatattaatattctaaaataggaaaatgcatgatcatttcaataaatgcaggggaaaaagacactattcaacagttacttstgataaaaattcagcaaaccagaaatagcagaaaattccttcatcttgataaagagcatacaaaaaatccatcatatttagctgtgaaacactgaatgttttccacatgtatgctcaggaataaagcaaagatgtttgcttttatcactctttttcaacataatacttagagttctatccagtgcgtaaggaaaaaaaggaagaataaaataaatgcagactggaaagaaataagtaaaactgttcctatttgtaaataatatgattatatatgtagaaattta

SEQ ID NO: 103901 - DNA, 527 bp, Homo sapiens
ccaacataacctagatgcagatctacaaatataccctagatgcaaaatcctcaacaacttgaatatgacactatgtaaaaaagtgacacatgaccaagccatgtttattccagaaatgcaagacagttgcaatattttaaaaaatctaataatataattcatcatattaatattctaaaataggaaaatgcatgatcatttcaataaatgcaggggaaaaagacactattcaacagttacttctgataaaaattcagcaaaccagaaatagcagaaaattccttcatcttgataaagagcatacaaaaaatccatcatatttagctgtgaaacactgaatgttttccacatgtatgctcaggaataaagcaaagatgtttgcttttatcactctttttcaacataatacttagagttctatccagtgcrtaaggaaaaaaaggaagaataaaataaatgcagactggaaagaaataagtaaaactgttcctatttgtaaataatatgattatatatgtagaaattta

SEQ ID NO: 103902 - DNA, 537 bp, Homo sapiens
attaatatttggagctggtgtttaagaaaaaccatgtttgatgttggaaaatgctatgtccggtataactatagatgtttggaaagcagctcagttatgctaaagataaagaaaggagagaaaaatgacagaaggggaggtttgaacaaaacaaaataatacctgaaaatgttgaatggatatgtaatatttgtgaatgtttatgttctctatttcaccattatttaaacatttatattttcaaagggagacaataattatattttgaaatcattttrtttttttatagagtgctgtattttttcttttcaatttcaatttggtgagcaaacaaaatcagtcagattattatacataattaggtttcctttttgagatttgttgaaactctttatcctttatgtatgtatttcaagtagtataataaaaaagaaatataaaatgattagatatacataaaagtattgtagattatgtttttcatattttctttcttttaatgtattttgcagatatacccattccagattatgattt

SEQ ID NO: 103903 - DNA, 537 bp, Homo sapiens
attaatatttggagctggtgtttaagaaaaaccatgtttgatgttggaaaatgctatgtccggtataactatagatgtttggaaagcagctcagttatgctaaagataaagaaaggagagaaaaatgacagaaggggaggtttgaacaaaacaaaataatacctgaaaatgttgaatggatatgtaatatttgtgaatgtttatgttctctatttcaccattatttaaacatttatattttcaaagggagacaataattatattttgaaatcattttgtttttttatagagtgctgtattttttcttttcaatttcaatttggtgagcaaacaaaatcagtcagawtattatacataattaggtttcctttttgagatttgttgaaactctttatcctttatgtatgtatttcaagtagtataataaaaaagaaatataaaatgattagatatacataaaagtattgtagattatgtttttcatattttctttcttttaatgtattttgcagatatacccattccagattatgattt

SEQ ID NO: 103904 - DNA, 619 bp, Homo sapiens
tgttcttttgtctgctaattttcgagtaagcctgtgctctctataactttcagtctcaatatccttctaccatcagccttttgtctaaacattcttattctggtttgtttccctgaactcttgacatcaatctctgttccttcaatattctgtttcttctactggaagcaytctttcccagatttcacccactttactcttctcaatctctgtgtctgagttaaatgcttccttaggtttctatgtaggattgtctgtccatctgtaatttttctatatctctcatgttaacatagttacatcctttactgaaaaatgtctcctttaaaaaaaatcaatgtgtttgtttactttattaaaatgccctctaaactgcaaggtcaaagaaggtaagtatgatatttggatattaatatctaccacttaatacagaaactattctagcacttgtataggcagtataagacataattttagaactctaaaataaaaactcataaactgaagttaaatatccatttcccactgctatctccttttccttttaacacattgatatcatttggatctgtgtccccacccaaatctcatgtcaaactgtaagtcccactgttggagg

SEQ ID NO: 103905 - DNA, 619 bp, Homo sapiens
tgttcttttgtctgctaattttcgagtaagcctgtgctctctataactttcagtctcaatatccttctaccatcagccttttgtctaaacattcttattctggtttgtttccctgaactcttgacatcaatctctgttccttcaatattctgtttcttctactggaagcactctttcccagatttcacccactttactcttctcaatctctgtgtctgagttaaatgcttccttaggtttctatgtaggattgtctgtccatctgtaatttttctatatctctcatgttaacatasttacatcctttactgaaaaatgtctcctttaaaaaaaatcaatgtgtttgtttactttattaaaatgccctctaaactgcaaggtcaaagaaggtaagtatgatatttggatattaatatctaccacttaatacagaaactattctagcacttgtataggcagtataagacataattttagaactctaaaataaaaactcataaactgaagttaaatatccatttcccactgctatctccttttccttttaacacattgatatcatttggatctgtgtccccacccaaatctcatgtcaaactgtaagtcccactgttggagg

SEQ ID NO: 103906 - DNA, 619 bp, Homo sapiens
tgttcttttgtctgctaattttcgagtaagcctgtgctctctataactttcagtctcaatatccttctaccatcagccttttgtctaaacattcttattctggtttgtttccctgaactcttgacatcaatctctgttccttcaatattctgtttcttctactggaagcactctttcccagatttcacccactttactcttctcaatctctgtgtctgagttaaatgcttccttaggtttctatgtaggattgtctgtccatctgtaatttttctatatctctcatgttaacatagttayatcctttactgaaaaatgtctcctttaaaaaaaatcaatgtgtttgtttactttattaaaatgccctctaaactgcaaggtcaaagaaggtaagtatgatatttggatattaatatctaccacttaatacagaaactattctagcacttgtataggcagtataagacataattttagaactctaaaataaaaactcataaactgaagttaaatatccatttcccactgctatctccttttccttttaacacattgatatcatttggatctgtgtccccacccaaatctcatgtcaaactgtaagtcccactgttggagg

SEQ ID NO: 103907 - DNA, 619 bp, Homo sapiens
tgttcttttgtctgctaattttcgagtaagcctgtgctctctataactttcagtctcaatatccttctaccatcagccttttgtctaaacattcttattctggtttgtttccctgaactcttgacatcaatctctgttccttcaatattctgtttcttctactggaagcactctttcccagatttcacccactttactcttctcaatctctgtgtctgagttaaatgcttccttaggtttctatgtaggattgtctgtccatctgtaatttttctatatctctcatgttaacatagttacatcctttactgaaaaatgtctcctttaaaaaaaatcaatgtgtttgtttactttmttaaaatgccctctaaactgcaaggtcaaagaaggtaagtatgatatttggatattaatatctaccacttaatacagaaactattctagcacttgtataggcagtataagacataattttagaactctaaaataaaaactcataaactgaagttaaatatccatttcccactgctatctccttttccttttaacacattgatatcatttggatctgtgtccccacccaaatctcatgtcaaactgtaagtcccactgttggagg

SEQ ID NO: 103908 - DNA, 457 bp, Homo sapiens
ccttttctcaaaaatgtcatatagaaaacatttctaccctataaaaattactaataacattagcatcaatgacttacaagtagacacaagtaagatgaaacacagattaattcataccatcaaattcatatggccaagtataatcccattatataactattttctatcactaagcatagtccagctataagtgtaaaagtatgatgaaaaatattgctaagacattaagtgaaaatatactgaaaagaattcttaaagacaagaaatacaagaacacaccaatttgccatcacactttatgttcagccctttagtgaaaaaaaaagttttctaattaatatttcttttacactggggacaagtacataatayagtcatcaatttgcttagattctgaaataccattcatttatgtacatattttctctattcaaatgtactattcacatcacttatc

SEQ ID NO: 103909 - DNA, 590 bp, Homo sapiens
attatattatcatgtcattttacagattaaaaaatacaagttcagggttcgggcttacacctgtaatcccagcactttgggaggccaagagggttagatcaccgggtcaggagatcgagaccatcctgactaacatggtgaaatcctgtctctactaaaaatacaaaaaattagccgggcatggtggtgggtgcctgtagtcccagctactcaggaggctgaggcaggaggatggcgtgaacctgggaagtggagctggcagtgagccgagatcgtgctattgcattccagcctgggatacagagcgagactccatctcaaaaaaaaataataataattcaagttcagagagatgaaacaactttttaaggcaatcagactacagatctaactgtcatttacactaaaacattttaggaaaacaaaatcataatgcttttgtggtattttgatatttcaagaaaaatagttatawgttttggtgtgtggcgtgtgtgtgtgtgtgtgtgtgtgtataaaatgattctacattaaatcaaaaatttaacttaaaattttaaagatagagtaagggctgataataggtttac

SEQ ID NO: 103910 - DNA, 590 bp, Homo sapiens
attatattatcatgtcattttacagattaaaaaatacaagttcagggttcgggcttacacctgtaatcccagcactttgggaggccaagagggttagatcaccgggtcaggagatcgagaccatcctgactaacatggtgaaatcctgtctctactaaaaatacaaaaaattagccgggcatggtggtgggtgcctgtagtcccagctactcaggaggctgaggcaggaggatggcgtgaacctgggaagtggagctggcagtgagccgagatcgtgctattgcattccagcctgggatacagagcgagactccatctcaaaaaaaaataataataattcaagttcagagagatgaaacaactttttaaggcaatcagactacagatctaactgtcatttacactaaaacattttaggaaaacaaaatcataatgcttttgtggtattttgatatttcaagaaaaatagttataagttttggtgtgtggcrtgtgtgtgtgtgtgtgtgtgtgtataaaatgattctacattaaatcaaaaatttaacttaaaattttaaagatagagtaagggctgataataggtttac

SEQ ID NO: 103911 - DNA, 318 bp, Homo sapiens
agatgattaacattacttagcaataaakctttttaaaattaaggtaagtacattatttgtttaaacataatactattacacactttacagtacaatgtaaacataacttttatatgcattgagaaaccaaaaatttttgttgacttgttttattgtgatttttgctttattgtgatggtctggaacaaaacccacagtatcttcaagtatgtctcgaatatgtagagaatttttaaaaatttttagcatattttacaaaacttattgccttataagtactcactcaatattttatttaaggagtacatcttgattttt

SEQ ID NO: 103912 - DNA, 318 bp, Homo sapiens
agatgattaacattacttagcaataaatctttttaaaattaaggtaagtacattatttgtttaaacataatactattacacmctttacagtacaatgtaaacataacttttatatgcattgagaaaccaaaaatttttgttgacttgttttattgtgatttttgctttattgtgatggtctggaacaaaacccacagtatcttcaagtatgtctcgaatatgtagagaatttttaaaaatttttagcatattttacaaaacttattgccttataagtactcactcaatattttatttaaggagtacatcttgattttt

SEQ ID NO: 103913 - DNA, 595 bp, Homo sapiens
gggtgcgcaaaccaacacaacacatgtatacatatgtaacaaacctgcacgttgtgcacatgtgccctagaacttagagtataataaaaaaagttgtaaagataaattttgtctagaattcaactaacaggcacctagaaatgtttaaggataattaaaattcgaagatgaaatttgaatgttaacataaagcaaaataaaagaaatgccaaatacatacaattttaaaactataacaacttcaaacttcaaaaagaaacttttatattattatgttatataatatttttatttttaaaggcayttttttcttgtgattaaaggtatgttttctcttaaaaacatgtatttctctacatttaaaaaaagattttttaacttaaaaaataaattttcttcctttttctattcctattttattttttttaatttttttagacttttggccatttttcttaactttatatagcactaaaatgacttataaaatactataattatataaattttgataggatgttagtggaaatttatatgctattctgttagtttattaaattaatgtttatttttatacaaacattaattattttca

SEQ ID NO: 103914 - DNA, 560 bp, Homo sapiens
cagccccttccatcacaggcctggtgacctaggagaaaaaaaagtggttttgtgggccaggcccaaggtcatcatgctgtgagcagcctagggacttggcaccctgtgtcccagctgctccagccayggctgaaaggggccaatgtagactttaggctgtggcttcagagggtacaagccccaagccttggcagcttccacttgatgttgagcctgtgagtgcacagaagtcaaaaatgggggtttggggatctctgcctagatttcagatgtatggaaatgcctggatgtccaggaataagttcactgcaagggtgaggccctcataaagaaccactgtttagggcagagtggaagggaaatgtggggttggagcccccacagagagtccctactggggcactgcctaatgcggctgtgagaagagggccaccgttctccagaccccagaatggtaaatccactgacagcttgcaccgtgcacctagagaagactaagacactcaatgtcaccctgtgaaagcagccatgagggaggctgtaccctacacagccacggg

SEQ ID NO: 103915 - DNA, 616 bp, Homo sapiens
gactgacagtttaatgcccacctctcaccctttccagggtctcagatgttctctacctattggataagaattaggctgagttggtatagcaacccggtctctctgttttagtcccaagctacttctgcagacacccattgcccttgttgcttgactcaaacctttctgcctcaatcatccactccagtacaaagttggcatatctcataacatcatccacccaaatggaaggatcagaggtatccagcatcattagagggattctagcagtctgtcattccttagtcctgtrctccacccctgtggaatccccttataggggaggtacccaagggaagtataaactccagattagagacagcgtggcctctctggagtactatggcaccctgaactgcaattcatccccaggacatgtactctataggggaaaaggaaaaagaattgttgagaaagactgagactttacaggcacagacagcctagtcaggtgggtttctcatccacctccaccccaaccaagctcagtgtccctcaatatgcactgcagtgctgtttcctttgcattggtgcatagtgtttagtgttcctattgccctagtcagatgggctaccc

SEQ ID NO: 103916 - DNA, 616 bp, Homo sapiens
gactgacagtttaatgcccacctctcaccctttccagggtctcagatgttctctacctattggataagaattaggctgagttggtatagcaacccggtctctctgttttagtcccaagctacttctgcagacacccattgcccttgttgcttgactcaaacctttctgcctcaatcatccactccagtacaaagttggcatatctcataacatcatccacccaaatggaaggatcagaggtatccagcatcattagagggattctagcagtctgtcattccttagtcctgtactccacccctgtggaatccccttataggggaggtacccaagggaagtataaactccagattagagacagcgtggcctctctggagtactatggcaccctgaactgcaattcatccccaggacatgtactctataggggaaaaggaaaaagaatkgttgagaaagactgagactttacaggcacagacagcctagtcaggtgggtttctcatccacctccaccccaaccaagctcagtgtccctcaatatgcactgcagtgctgtttcctttgcattggtgcatagtgtttagtgttcctattgccctagtcagatgggctaccc

SEQ ID NO: 103917 - DNA, 564 bp, Homo sapiens
actacaaattgattaaacctctttcttttgtaaattgtccagtgtcaggtatgtctttatcagcagtgtaaaaaagsactaagaaactccccttgggctggggaaagaacaaaatgctggttgcttcactagcaccttcatcatgacacagctgccatatagcgtagagcccagtctctcttccttgtgagctcccaactcctatccttcactaagcagaactccttgcttgggcctgcagagtagctacctcacccaagctgaacatttctattgccagtggctctgtgttatcctgtgatggagctcccagaggcaaatgacagccaactgccactgccaatgcagtggtacctgcccttgctgtcttagactgggaaagaaataaaagagcctgaatgctttactcatgcttccagcacactatgattaccatatgatcaccatatggcatggagcccaatctctattctctgtgagcccctgatcccctgctcttcaccaggcaggggccccagcaaaggctcatagtgcagcagccccactcctggctgaaaatgccca

SEQ ID NO: 103918 - DNA, 498 bp, Homo sapiens
atttcataaaatgattggaaatattcacagcagaatggactaagccaagaaaagaatctcagagattgaagactgattatttaagttaacacagccagaaaataaataaagaaaagaagaattttaaaaaatgaaaggtcaggcatggtggctcatgcctgtacctgtaatcccagcactttgggaggataytgagaccatcctggctaacatggtgaaaccctgtctctactaaaaatacaaaaaaaaaaaattcactgggcatggtggcaggtgcctgtagccccagctattcaggagtctgaggcaggagattggtaggaacctgggaggtggagcttgcattgagccgagatcatgccactgcactccagcctgggctacagagcaagactccatctcaaaaaaaaaaaaaaaagaaaaaaaaaagaaaaagaaaaaaaccttggagaaataagggattctataaaaaatttccccaatttcactagagagatt

SEQ ID NO: 103919 - DNA, 438 bp, Homo sapiens
tgaagactgattatttaagttaacacagccagaaaataaataaagaaaagaagaattttaaaaaatgaaaggtcaggcatggtggctcatgcctgtacctgtaatcccagcactttgggaggatactgagaccatcctggctaacatggtgaaaccctgtctctactaaaaatacaaaaaaaaaaaattcactgggcatggtggcaggtgcctgtagccccagctattcaggagtctgaggcaggagattggtaggaacctgggaggtggagcttgcattgagccgagatcatgccactgcactccagcctgggctacagagcaagaytccatctcaaaaaaaaaaaaaaaagaaaaaaaaaagaaaaagaaaaaaaccttggagaaataagggattctataaaaaatttccccaatttcactagagagattgacata

SEQ ID NO: 103920 - DNA, 644 bp, Homo sapiens
aagtgctaaacatgaaaatgaaggactgttacctagcaccagaaaaacacactcaagtatatagaccatcaacactataaagtaattacacaatcaagtttacrtaactaccagctaacaacatgctgggaggatcgaatgtgcacatgtcaatattgaagataaacaagctaaacacccacttaaaaggcatggagtggcaaagtggataaagaatcaagacccaactgtatgctgtcttcaagagacccatctcacatgtgagaacacccataggttcaaagtaaagggatggagaaagaactaccaaacaaatgaaaaacaaagaagaacaggtgttgctgttcttattttagataaaactgacattaaactaacgatgatcaaaacagacaattaagggtattacgtaatgatgaaggattcaattaaacaagaagacttaactatcctaaatatatatgcacctaacactggatcactcagattcacaaaacaagctcttagagatatacaaagaaacttacataactacacgatgacagtggcagacctcaacacctcactgacagtgtaagacatatcactgaggcagaaaactaacaaagatattcaggacctaaacttgacacttggccaaatac

SEQ ID NO: 103921 - DNA, 644 bp, Homo sapiens
aagtgctaaacatgaaaatgaaggactgttacctagcaccagaaaaacacactcaagtatatagaccatcaacactataaagtaattacacaatcaagtttacgtaacwaccagctaacaacatgctgggaggatcgaatgtgcacatgtcaatattgaagataaacaagctaaacacccacttaaaaggcatggagtggcaaagtggataaagaatcaagacccaactgtatgctgtcttcaagagacccatctcacatgtgagaacacccataggttcaaagtaaagggatggagaaagaactaccaaacaaatgaaaaacaaagaagaacaggtgttgctgttcttattttagataaaactgacattaaactaacgatgatcaaaacagacaattaagggtattacgtaatgatgaaggattcaattaaacaagaagacttaactatcctaaatatatatgcacctaacactggatcactcagattcacaaaacaagctcttagagatatacaaagaaacttacataactacacgatgacagtggcagacctcaacacctcactgacagtgtaagacatatcactgaggcagaaaactaacaaagatattcaggacctaaacttgacacttggccaaatac

SEQ ID NO: 103922 - DNA, 644 bp, Homo sapiens
aagtgctaaacatgaaaatgaaggactgttacctagcaccagaaaaacacactcaagtatatagaccatcaacactataaagtaattacacaatcaagtttacgtaactaccagctaacaacatgctgggaggatcgaatgtgcacatgtcaatattgaagataaacaagctaaacacccacttaaaaggcatggagtggcaaagtggataaagaatcaagacccaactgtatgctgtcttcaagagacccatctcacatgtgagaacacccataggttcaaagtaaagggatggagaaagaactaccaaacaaatgaaaaacaaagaagaacaggtgttgctgttcttattttagataaaactgacattaaactaacgatgatcaaaacagacaattaagggyattacgtaatgatgaaggattcaattaaacaagaagacttaactatcctaaatatatatgcacctaacactggatcactcagattcacaaaacaagctcttagagatatacaaagaaacttacataactacacgatgacagtggcagacctcaacacctcactgacagtgtaagacatatcactgaggcagaaaactaacaaagatattcaggacctaaacttgacacttggccaaatac

SEQ ID NO: 103923 - DNA, 584 bp, Homo sapiens
attaaacaacctgaacctgaatgacttytgtgtaaacaataaaatcaaggcagaaatcaagaaattcttagactctgatgaaaacaaaaatacaacacactagaaactctagaacacagataaagcatggttaaaaggaaagtttattgtgctaaacacttatgtcaacagctagaaagatctcaaatttgcaacctaacatcacagatagaggaacctaaaaaacaaaaaagaaccaacctcgaaggtagtagaagaaaagaaatggccacaatcataacggaaattaacaaaatggagatgagaaaaaaatgtaaaaaaatcaacaaaactgaatgttgggtatttgaaagaaaaaataatgttgataggccattatctaaacttataaagaaaaaaagagacaatattcaaataaacacaatcacaaaagagacaaaggggacattaccagtgactccacagaaatacaacaaccctcagggatgattatgaacacctctatgtacacaaactgaaaaacccagagaagctgcataaattccgggaagcaatcttcaaagattgaaccaggaagaaaacga

SEQ ID NO: 103924 - DNA, 584 bp, Homo sapiens
attaaacaacctgaacctgaatgacttttgtgtaaacaataaaatcaaggcagaaatcaagaaattcttagactctgatgaaaacaaaaatacaacacactagaaactctagaacacagataaagcatggttaaaaggaaagtttattgtgctaaacacttatgtcaacagctagaaagatctcaaatttgcaacctaacatcacagatagaggaacctaaaaaacaaaaaagaaccaacctcgaaggtagtagaagaaaagaaatggccacaatcataacggaaattaacaaaatggagatgagaaaaaaatgtaaaaaaatcaacaaaactgaatgttgggtatttgaaagaaaaaataatgttgataggccattatctaaacttataaagaaaaaaagagacaatattcaaataaacacawtcacaaaagagacaaaggggacattaccagtgactccacagaaatacaacaaccctcagggatgattatgaacacctctatgtacacaaactgaaaaacccagagaagctgcataaattccgggaagcaatcttcaaagattgaaccaggaagaaaacga

SEQ ID NO: 103925 - DNA, 677 bp, Homo sapiens
tgaaaacaaaaatacaacacactagaaactctagaacacagataaagcatggttaaaaggaaagtttattgtgctaaacacttatgtcaacagctagaaagatctcaaatttgcaacctaacatcacagatagaggaacctaaaaaacaaaaaagaaccaacctcgaaggtagtagaagaaaagaaatggccacaatcataacggaaattaacaaaatggagatgagaaaaaaatgtaaaaaaatcaacaaaactgaatgttgggtatttgaaagaaaaaataatgttgataggccattatctaaacttataaagaaaaaaagagacaatattcaaataaacacaatcacaaaagagacaaaggggacattaccagtgactccacagaaatacaacaaccctcagggatkattatgaacacctctatgtacacaaactgaaaaacccagagaagctgcataaattccgggaagcaatcttcaaagattgaaccaggaagaaaacgaaactttgaacagactaataggaagttccaaactgaattggcaatacaatgcctatcaatcagaaaaagtgttgacctcaaaggattcactgccaaattctaccagctgtataaagaagagctgataccacacctactgacactatctaaaataattgaggaggagggactc

SEQ ID NO: 103926 - DNA, 584 bp, Homo sapiens
attaaacaacctgaacctgaatgacttttgtgtaaacaataaaatcaaggcagaaatcaagaaattcttagactctgatgaaaacaaaaatacaacacactagaaactctagaacacagataaagcatggttaaaaggaaagtttattgtgctaaacacttatgtcaacagctagaaagatctcaaatttgcaacctaacatcacagatagaggaacctaaaaaacaaaaaagaaccaacctcgaaggtagtagaagaaaagaaatggccacaatcataacggaaattaacaaaatggagatgagaaaaaaatgtaaaaaaatcaacaaaactgaatgttgggtatttgaaagaaaaaataatgttgataggccattatctaaacttataaagaaaaaaagagacaatattcaaataaacacaatcacaaaagagacaaaggggacattaccagtgactccacagaaatacaacaaccctcagggatgattatgaacacctctatgtacacaaactgaaaaacccagagaagctgcataaattcckggaagcaatcttcaaagattgaaccaggaagaaaacga

SEQ ID NO: 103927 - DNA, 550 bp, Homo sapiens
aaatacaacaaccctcagggatgattatgaacacctctatgtacacaaactgaaaaacccagagaagctgcataaattccgggaagcaatcttcaaagattgaaccaggaagaaaacgaaactttgaacagactaataggaagttccaaactgaattggcaatacaatgcctatcaatcagaaaaagtgttgrcctcaaaggattcactgccaaattctaccagctgtataaagaagagctgataccacacctactgacactatctaaaataattgaggaggagggactcatacctaactcattctatgaggacaacatcattctgataccaaatcctggcagagatgcaatgaaaaaaaaaacttcagacaaatatttctaatgaacatagatacagaaatattcaacaaaatactagcaaaccaaatctagctgtacatcaagaagctaatccaccacaatcaagtaggttttatttcttgcaaaatattttcagaatggtacttccaaggttttcttctagagattttatagtttgaggttttacat

SEQ ID NO: 103928 - DNA, 633 bp, Homo sapiens
tgtatagaaacacctgaatgtctaggcagaagtatgctgcaggggaagggccctcatggagacctctgctagggcagaaggaagatgtggggtcagagcacccatgcagggtctccactggggcactgactagtggagctgtgagaagagggccgtcattctccggatcccagaatgatagatccaccaaaagctcacascactcaccaggaaaagctgcaggcactcaacaccaacctgtgaaagcagccagaagggaggctgtaccctgccaagccataggagtggagcttctcaaagccatgatatcccatctcttgcatctgtgtgacctggatgtgagacatggagtcaaaggacatcattttgaaactttaaggtttaatgactgctctgttggatttcagacttgcatggggcctatagctcctttgttttggtcaatttctcccatctccaatgggtgtatttacccagtacctgcactcccattgtatctaggaaataactaacttgcttttgatgttacaggctcataggtggaagggacttgccttttctcagatgagattttgaacttgaacttttggggttaatgctgaaatgagttaagactttaggggattcttggaa

SEQ ID NO: 103929 - DNA, 633 bp, Homo sapiens
tgtatagaaacacctgaatgtctaggcagaagtatgctgcaggggaagggccctcatggagacctctgctagggcagaaggaagatgtggggtcagagcacccatgcagggtctccactggggcactgactagtggagctgtgagaagagggccgtcattctccggatcccagaatgatagatccaccaaaagctcacaccactcaccaggaaaagctgcaggcactcaacaccaacctgtgaaagcagccagaagggaggctgtaccctgccaagccataggagtggwgcttctcaaagccatgatatcccatctcttgcatctgtgtgacctggatgtgagacatggagtcaaaggacatcattttgaaactttaaggtttaatgactgctctgttggatttcagacttgcatggggcctatagctcctttgttttggtcaatttctcccatctccaatgggtgtatttacccagtacctgcactcccattgtatctaggaaataactaacttgcttttgatgttacaggctcataggtggaagggacttgccttttctcagatgagattttgaacttgaacttttggggttaatgctgaaatgagttaagactttaggggattcttggaa

SEQ ID NO: 103930 - DNA, 610 bp, Homo sapiens
gttgcagtgaggactctgcatatgtgcacactggcgaaacagtgagtggagactgtgcacagtgcaagccggcaatgcagtgaggggggactgtaagtaggtgtgcactgttggaggtatatttgcagaagctctccagtgagagcagagtcgagtctgctgctayggtgatggccactgagaagcaccctcgttgggcatgcaaagctgccctccaagagggtatggcctggcggggaccccaggagaggccagtcgacaggagagcatctaatcacattggcatatcccacgggcaagacagcccttctctgtgcaggtctgacaatcaataatgaccaaagtcactcagaggcgtgtggtaagccttaggaaatgggtgtccctggctgtgcttcaccggaaccattcttatgtcaaactatctgggctctacacgtactggaatcctgtctttgctacttctccaagcaactctccttgctagctcgaatgtccatggggattgtgaagtctcgtaaagctaggattctggagctctttggaaagagtaagccactccatcgtatttaactcacccctcccctcacctctcagggtcaggaatgag

SEQ ID NO: 103931 - DNA, 542 bp, Homo sapiens
taagtgttaattcagtggttattttttccttgaaatttactgtgtttcttgaatggacacatgtatctttcatcattttggaaagtttaarccattaagtattcacatatttatctgctccatttattttattctagctctctatttaaatatatcacctcacacaactcattatttgtgataaccactcttctacatttccattttttcatctcactgtattgaaatgtgctcatttgcttttctgatttagcttccagtgatctagttcttttgctgtgtccaaaatattatcatactcatgctcctaatgtttaattttagtcataatatcatttatctttaaaatttgttattagtttcatgttaaaactgaaagattacattgtatttttttcatttggcagatattttcaaatttacttcttagaacataatacaaatacatgtttttcaatgtgtctgtaataataccagaacagcaatttttgtgacttttttctgttatttttcctgctacttattgcaaaatgtgtcctgtt

SEQ ID NO: 103932 - DNA, 542 bp, Homo sapiens
taagtgttaattcagtggttattttttccttgaaatttactgtgtttcttgaatggacacatgtatctttcatcattttggaaagtttaaaccattaagtattcacatatttatctgctccatttattttattctagctctctatttaaatatatcacctcacacaactcattatttgtgataaccactcttctacatttccattttttcatctcactgtattgaamtgtgctcatttgcttttctgatttagcttccagtgatctagttcttttgctgtgtccaaaatattatcatactcatgctcctaatgtttaattttagtcataatatcatttatctttaaaatttgttattagtttcatgttaaaactgaaagattacattgtatttttttcatttggcagatattttcaaatttacttcttagaacataatacaaatacatgtttttcaatgtgtctgtaataataccagaacagcaatttttgtgacttttttctgttatttttcctgctacttattgcaaaatgtgtcctgtt

SEQ ID NO: 103933 - DNA, 542 bp, Homo sapiens
taagtgttaattcagtggttattttttccttgaaatttactgtgtttcttgaatggacacatgtatctttcatcattttggaaagtttaaaccattaagtattcacatatttatctgctccatttattttattctagctctctatttaaatatatcacctcacacaactcattatttgtgataaccactcttctacatttccattttttcatctcactgtattgaaatgtgctcatttgcttttctgatttagcttccagtgatctagttcttttgctgtgtccaaaatattatcatactcatgctcctaatgtttaattttagtcataatatcatttatctttaaaatttgttattagtttcatgttaaaactgaaagattacattgtattkttttcatttggcagatattttcaaatttacttcttagaacataatacaaatacatgtttttcaatgtgtctgtaataataccagaacagcaatttttgtgacttttttctgttatttttcctgctacttattgcaaaatgtgtcctgtt

SEQ ID NO: 103934 - DNA, 586 bp, Homo sapiens
aacaaaggagttaaaccctgctactgccctaatttagtggctagagtttccagcagtggggcagagaaagtgggctcctagagttgtacaaagccaagaaatccaggagactaaggtaactagagtttctaggtctgagaagctagagattcaaagagagaaatctctgatatctacagatgttctcctttcagtgcttagcagaatactgattagtgtatatatgtgagtaatctgctcactgccagggaaacaagcatcttcaaagattaaaaacaaacaaacaataacaacaacaaaaacmagtgcctgacattcacatatgacctggattatacctgtatttgccagccaaatgaaagaaaaaagctaaattcacagtgcatttggtaaagcaatttaaaaggtcttgcctcaggggtagaaattaattacatttaaactgagcactgagttgaacgcaacaaaaaatcataaaagaagtatctaaaaggatcaagcggttttaaacaaattaactgtgtcctagagaaaaagctcatattttgtacagaaatacaaaatatccagcactcacaaagataac

SEQ ID NO: 103935 - DNA, 586 bp, Homo sapiens
aacaaaggagttaaaccctgctactgccctaatttagtggctagagtttccagcagtggggcagagaaagtgggctcctagagttgtacaaagccaagaaatccaggagactaaggtaactagagtttctaggtctgagaagctagagattcaaagagagaaatctctgatatctacagatgttctcctttcagtgcttagcagaatactgattagtgtatatatgtgagtaatctgctcactgccagggaaacaagcatcttcaaagattaaaaacaaacaaacaataacaacaacaaaaaccagtgcctgacattcacatatgacctggattatacctgtatttgccagccaaatgaaagaaaaaagctaaattcacagtgcatttggtaaagcaatttaaaaggtcttgcctcaggggtagaaattaattacatttaaactgagyactgagttgaacgcaacaaaaaatcataaaagaagtatctaaaaggatcaagcggttttaaacaaattaactgtgtcctagagaaaaagctcatattttgtacagaaatacaaaatatccagcactcacaaagataac

SEQ ID NO: 103936 - DNA, 666 bp, Homo sapiens
agaggctttccatttttcgagagtggctagaaaaaaaagctatgtttacaacatgactctactaagaaacctgaatattatttcattacttcttatcaagctaatatgagaaaggaagcaataagataaaaataaatgacagtcacttcttggactggaagcaaagaagtttaacaaaagaaaaaaaagcattcttccccactttcttaaaaattgagaccacattttaaaataattttgcttgaggtctaattaaaaatattatagtttctattttctggaatattatagtttttcaaaactgcaaccagtaggcagataaataaatataaattacgataaacataatgtagatgtatctttacagaaaactttagatcaaatgttarctttttctacaaagcgtcagattttaagtatgttaggctttgacaatcatacagtttctgttgcaaccactcaactctgacataatagcctgaaaacatctatagaccacatgtaagtgaatgatcttgtgtccaaaaaaaaaaccttgttatttatgaaaacactgcagtttttactttatgcaatcattatatgctacaaaatgttattttaaaaaattgtttcaatcatttaaatctctaaaaaccattattaccttgcaggctgtaccaaaac

SEQ ID NO: 103937 - DNA, 666 bp, Homo sapiens
agaggctttccatttttcgagagtggctagaaaaaaaagctatgtttacaacatgactctactaagaaacctgaatattatttcattacttcttatcaagctaatatgagaaaggaagcaataagataaaaataaatgacagtcacttcttggactggaagcaaagaagtttaacaaaagaaaaaaaagcattcttccccactttcttaaaaattgagaccacattttaaaataattttgcttgaggtctaattaaaaatattatagtttctattttctggaatattatagtttttcaaaactgcaaccagtaggcagataaataaatataaattacgataaacataatgtagatgtatctttacagaaaactttagatcaaatgttaactttttctacaaagcgtcagattttaagtatgttaggctttgacaatcatacagtttctgttgcaaccactcaactctgacataatagcctgaaaacatctatagaccacatgtaagtgaatgatcttgtgtccaaaaaaaaaaccttgttatttatgaaaacactgcagtttttactttatgcaatcrttatatgctacaaaatgttattttaaaaaattgtttcaatcatttaaatctctaaaaaccattattaccttgcaggctgtaccaaaac

SEQ ID NO: 103938 - DNA, 519 bp, Homo sapiens
ccattattaccttgcaggctgtaccaaaaccataggccacaggctgccaatgctcacactgaagaaacaaaattgtgatatcagtgcagccttcacacagaaaatagagtttgaaactagaatatcaactacaactggagagttaaatgaaaagtcttattagttagttggagtgggttttgcaagacactggtgagaagtacagaatttggggtaattgsagtaattacgtgggcttaaatatatatgtgtgggtagaagagggagatgtcaagcgatgagagtagagatgagtttaggataaattacaaatgtcttcaggccatccaaagtgtttataatttattctaatggaagtgacaagacattaatgagatctaaaatagggactacaagaaacagattacaatagataaacaagactgtaggcagagagcttcttaattccacagttcattggcaagtccaagaagaaacttaaggtgacctgaactatagtaatgacagaggattcactta

SEQ ID NO: 103939 - DNA, 626 bp, Homo sapiens
gagccatgaacaaaaagctcctttcatcttatggacctgggtccttgggacagaaagaggaggaagcgctaagaatgggaaaatactgagttctgattcagaatagagaataatgatttcaaggtttcccctttctcctctcccttatccctctctccctatcataaggagttctctgcaaaggttttatattgagggtccctaataaggatagctcagatgggggtgcctgagacttgaatggcagacatgcacaggaggatggttggctagcggggaatgagtcctagactgcagctcccattagacattgtaatgcactggctgtttgccaattctggtatagggagagtatctttctctagtgaggcctgccaggtaaagccattgtcatggcctatggttaggcctgaaagattacacatagggtttctgcctggagttggactcctcaaatgccttttggattttctgtcaagtggtaaacattaagggaagattaaaacaactccaatttgacaagacaactaaggtcactgttcatgaagrgtgggctcttgctgtggaaacttggataatttaggatactatagagaagtgtggaatgaataatataaaaagaatgg

SEQ ID NO: 103940 - DNA, 545 bp, Homo sapiens
ggtctaaatattgacccactttttgttcccaacacaatgtccctaaaaatggcgatgggaagctttgcaccccaggctcttatgagccggcacgagctggctmcagcacaccactggtttccacttgaaatagtgagaatatctagtttttattgagaacgtggctgtgcacagcctagaacaggatttctcagcctcacttctacaggccttctgggctggcacatcctctgttatgaggcctcactgtccatggtaagatgtttggcagcatccctggcctttacccaccatgggccagtagtattctcccagttgtgacaactaaaatatcttcaagctttgtcaaatgtccctgtgggcaaaattgtgcccgttggagaaccactggcctagaagaagggtgagttggctcagtatggaagctgtgtatttgttttgaggtcctgctaacatttgaaggcaaagagaaggcctgacatttgctgtgggcttgggcttcataaatgcccgtcaaagaatggtctatgcaaaggcagtgattt

SEQ ID NO: 103941 - DNA, 580 bp, Homo sapiens
gcggtggcaggctggacaggaggagcactgtcatttgtcaaaagcatgcagtttacacagatctggtgcaggtacattctcaggctttgcttaagtgatttccacaggtgcatctgctacacatatctccacttcatcataaaagcagaattgtgttcccctgtccttttcccagctttttcatatatgtaagtcgtgacataaaatgcaaactctggtcatttttatcctttttctgcacttttccacttatggctggcttgtcttcaagtctgtttcttcttctttcttatgttcagatatttccatttacttactctctcatcraagtgccctagaaatggggtcagtagtggcttctgcacatagcactgaggttatctttctaaattcttcctctgtactatcctccataacagcacattagcttccatttgggtcaaattaacctcaacttatgaactttaatacccaccatcattacatcctcttgtttcattaggcaccatctaaaccaagtactttcgaagtaataaacataaaaagttaaaaaacttggaacacagtttttactatgact

SEQ ID NO: 103942 - DNA, 580 bp, Homo sapiens
gcggtggcaggctggacaggaggagcactgtcatttgtcaaaagcatgcagtttacacagatctggtgcaggtacattctcaggctttgcttaagtgatttccacaggtgcatctgctacacatatctccacttcatcataaaagcagaattgtgttcccctgtccttttcccagctttttcatatatgtaagtcgtgacataaaatgcaaactctggtcatttttatcctttttctgcacttttccacttatggctggcttgtcttcaagtctgtttcttcttctttcttatgttcagatatttccatttacttactctctcatcaaagtgccctagaaatggggycagtagtggcttctgcacatagcactgaggttatctttctaaattcttcctctgtactatcctccataacagcacattagcttccatttgggtcaaattaacctcaacttatgaactttaatacccaccatcattacatcctcttgtttcattaggcaccatctaaaccaagtactttcgaagtaataaacataaaaagttaaaaaacttggaacacagtttttactatgact

SEQ ID NO: 103943 - DNA, 580 bp, Homo sapiens
gcggtggcaggctggacaggaggagcactgtcatttgtcaaaagcatgcagtttacacagatctggtgcaggtacattctcaggctttgcttaagtgatttccacaggtgcatctgctacacatatctccacttcatcataaaagcagaattgtgttcccctgtccttttcccagctttttcatatatgtaagtcgtgacataaaatgcaaactctggtcatttttatcctttttctgcacttttccacttatggctggcttgtcttcaagtctgtttcttcttctttcttatgttcagatatttccatttacttactctctcatcaaagtgccctagaaatggggtcagtagtggcttctgcacatagcactgaggttatctttctaaattcttcctctgtactatcctccataacagcacattagcttccatttgggtcaaattaacctcaacttatgaactttaatayccaccatcattacatcctcttgtttcattaggcaccatctaaaccaagtactttcgaagtaataaacataaaaagttaaaaaacttggaacacagtttttactatgact

SEQ ID NO: 103944 - DNA, 555 bp, Homo sapiens
attatttatgctcatgtgaatgccttctagtaagtttggccttcttgaatgcagtcatagcttgcacacgtatggaattgctgggtcgtgttttattttgtgtgtgttttccttgcagttatccaatgggtcctgagagagtgtgttggagtctgaactgccattctcagcaagtgtctgacccttaaccctgagccaggcagagtccggggactaaggttccatgcaggaatggagtggggtrgcccatctcatggaggaggagatgagacataggcaacaagatgtggttaaagacggacagggggtcagaaatcaaagaaaaagagaaaatcaagtatcatcatctctcaagggtcggggtaccagaaagaaagccaacttgaagcaatgagtatttattgccagttataactacagatagctgagtggggagagaagcgttggaagcaaaatagaagaagaaacccagaaatgtccaggtgtgcgaaaacaagtgccggcagtcgcattaagagtttactggggccttgaccgtggtcagggagagaaatg

SEQ ID NO: 103945 - DNA, 564 bp, Homo sapiens
gctgggtgtggggaggcagggaccagacctaggcttctgaggaactaagatggacaagcctaggcgactaagaactgaggctccgggaccccacggcacagcgtctccctcctccatcagtcacctcccagcccagctgtscctgccctgcagccaggttccctttcatgattgtgcaaagatttgattaatatctatctcccccgcactgccggttcctgcccatcccaggggatccctgtgccccagcccctcaggagtcagcgggtccctggggaagtgcagcacctcctgaaggtcccaaggggccatttcctgggctgctgagggtcctatgtcctgctcctctccagggagctttggggcagagctgctgtgaactgtctcctctaatggtggcagcggaagtccctagggatgacagacaagcagttgccctcacccctgctttcttgttctggaagggtgcagaaggagtgacactggtggagatcagcttgtctctgggcttcagtttcctcaaaggagaactggggatttacttatttatcaggttatgtgttt

SEQ ID NO: 103946 - DNA, 503 bp, Homo sapiens
gataggtaataatatgaaaatcttctaaaggcattacaggaacacgaaaatgtaattaaatactcactaatttgtaatgttttatgtaagyggaacacatttaactgaaaattgcttttatataatactcaaacgcgactaaaaactttttaaccagcggagtaagtcttcaaattgataatctggactatattggaggagaaatttcaggcactcaaatatttgaaatgctacaaaatatttatataaactattatttaacaatttctgtttgtagagtgctatacagtaatcaatataaatgacatctcaagtctttctatagctttgaccacatttacctcctaattttaattattaatatgttggagcagtgcatacaactagattctgatcttcctttttaatgagtacaaatatgtgctttgagacagcattaaagaaagagcaccttgtaaaaattcaatgccaagagacaagatattcttgattctgaagtcttg

SEQ ID NO: 103947 - DNA, 608 bp, Homo sapiens
catgtgcagagtgtgaaaatctcatcagatcaaggaacacaaagacatctttttcatatttcgaatgtaaaactgttttggaaactgttatttttagaaacagttaaaaacattttttcattagtttttcatgtaaaattgtgacaaccagcatgaaataactgtcatcacagaagcatggtatattcgattccaaaacatattctttgtaagttttaatatatttatgtattatttatacttagattgtaacccataatgtacagatattatttttccttcaactcttaagaatattcttaaataataaaattaaaattaatgaattataatttttgttgcttgggaaaaagartagacacacacgtgacagtgcatcacttcaccccatcatttcatctcatcatttcatctcatcattttatctcatttcatctcatcccatctcatctcatcatttcatatcatctcatcatttcatctcatcatttcaccaaatctcatctcatctcatttccatttcattttcattatttcatttcatcatttcatttcactatttcatttcatttcatctaatttcatttatttcattatgtcatttcata

SEQ ID NO: 103948 - DNA, 608 bp, Homo sapiens
catgtgcagagtgtgaaaatctcatcagatcaaggaacacaaagacatctttttcatatttcgaatgtaaaactgttttggaaactgttatttttagaaacagttaaaaacattttttcattagtttttcatgtaaaattgtgacaaccagcatgaaataactgtcatcacagaagcatggtatattcgattccaaaacatattctttgtaagttttaatatatttatgtattatttatacttagattgtaacccataatgtacagatattatttttccttcaactcttaagaatattcttaaataataaaattaaaattaatgaattataatttttgttgcttgggaaaaagaatagacacacacgtgacagtgcatcacttcaccccatcatttcatctcatcatttcatctcatcattttatctcatttcatctcatcccatctcatctcatcatttcatatcatctcatcatttcatctcatcatttcaycaaatctcatctcatctcatttccatttcattttcattatttcatttcatcatttcatttcactatttcatttcatttcatctaatttcatttatttcattatgtcatttcata

SEQ ID NO: 103949 - DNA, 608 bp, Homo sapiens
catgtgcagagtgtgaaaatctcatcagatcaaggaacacaaagacatctttttcatatttcgaatgtaaaactgttttggaaactgttatttttagaaacagttaaaaacattttttcattagtttttcatgtaaaattgtgacaaccagcatgaaataactgtcatcacagaagcatggtatattcgattccaaaacatattctttgtaagttttaatatatttatgtattatttatacttagattgtaacccataatgtacagatattatttttccttcaactcttaagaatattcttaaataataaaattaaaattaatgaattataatttttgttgcttgggaaaaagaatagacacacacgtgacagtgcatcacttcaccccatcatttcatctcatcatttcatctcatcattttatctcatttcatctcatcccatctcatctcatcatttcatatcatctcatcatttcatctcatcatttcaccaaatctcatctcatctcatttccatttcattttcattatttcatttcatcatttcatttcactatttcatttcatttcatctaatttcatttatttcattwtgtcatttcata

SEQ ID NO: 103950 - DNA, 583 bp, Homo sapiens
gtttttcactccattgttgttgtttacccagtttatgggggttgtaatgtttatcacactccttggatgatttccgaaggtaagatatctggaatggtttttctaaaaatgaactcattgaaaaaatgtcttttatgacaattttcagtggatggagctgtaacactatttgtgaattattttcagtcatgtttacaccagagttgtccacacwagaattatccattcgttgaactctgagatagactccttttttttgagacagtgtctcactctgttgtccaggctggagtacagtggcatgatcacagctcactgcagccttgaccacctgggggctcaagcgatcctcccaccttagcttcccaaggagctggtattacaaacatgtgctatcatgcttggctaatttttaaaaatttttttgtagaaacagagtctccttatgttgcccaggctggcaggggttgggggctgagactctttcttttgtaaaagttgtttctaagtgactactttttagagaaggtaccctgcctttcaaagacctcataaagacaggatttgtaccttccaatatagt

SEQ ID NO: 103951 - DNA, 544 bp, Homo sapiens
aagcgatcctcccaccttagcttcccaaggagctggtattacaaacatgtgctatcaygcttggctaatttttaaaaatttttttgtagaaacagagtctccttatgttgcccaggctggcaggggttgggggctgagactctttcttttgtaaaagttgtttctaagtgactactttttagagaaggtaccctgcctttcaaagacctcataaagacaggatttgtaccttccaatatagttaaattcacacattagaccattttatgttgaaattatattaatttgtgtcagcttatattcaatgactgttggctagatcattcttaagaaatgggaatacaggaagaatggacaattttacccaactgggaaaaaaaattctaccatcttctaattattctgacttcctcataaaaatgtgttggatgacacaatcagcttttgtttggtgttatttatagaatttctgcctccctacagatcaccccatcctgagatctgctgccttacacagtggaggctgttttctgagtgtcggata

SEQ ID NO: 103952 - DNA, 544 bp, Homo sapiens
aagcgatcctcccaccttagcttcccaaggagctggtattacaaacatgtgctatcatgcttggctaatttttaaaaatttttttgtagaaacagagtctccttatgttgcccaggctggcaggggttgggggctgagactctttcttttgtaaaagttgkttctaagtgactactttttagagaaggtaccctgcctttcaaagacctcataaagacaggatttgtaccttccaatatagttaaattcacacattagaccattttatgttgaaattatattaatttgtgtcagcttatattcaatgactgttggctagatcattcttaagaaatgggaatacaggaagaatggacaattttacccaactgggaaaaaaaattctaccatcttctaattattctgacttcctcataaaaatgtgttggatgacacaatcagcttttgtttggtgttatttatagaatttctgcctccctacagatcaccccatcctgagatctgctgccttacacagtggaggctgttttctgagtgtcggata

SEQ ID NO: 103953 - DNA, 175 bp, Homo sapiens
tctgttatctctttgctgatattcctrctttttaatatttttttctgattcctttatttctttgattatgttttccttttgacatttgagtataatgaagagagttgttttaaagtctttgtctagtaagtttgatgtctgggtttccttagggatattttctgtcaatttattt

SEQ ID NO: 103954 - DNA, 549 bp, Homo sapiens
gcctggccattatacacatgttatttaataaacaatttattataaagagaagaaatgcatttttactgtcttttataatgtcaatattacgtatatcagtgctttttttaaaatgtggattcaagtgactgtcttctgtaacttgcttttagccttaggaatttttttagagttttttttttttatatggtargtctgccagcaacaacttcagttaatgtttctgtttatctggctaagtctttgtgttattttcatttttgaaaaataattgctggataaggaattcgtggctgagaggtttttttcctttgcatcttttgaatatattattctactgcctcttgccttccattgtttctcttaagtcagctgttaatcttacaaaacataggtgctcagaaaataaacatgtgcatgaatatttacagcagtaatattcatacagtcaaaaagtggaaacaatccatatgcttgttgactcataaagggacacccaattttcagctataacgaagaatgaagtacttatatatggtataatattgg

SEQ ID NO: 103955 - DNA, 530 bp, Homo sapiens
ccacaactcctatgaaagccgaggaccacaggcccctgaagacaatcacaggtctctagactcacagctcatgaccgtcctctgcagacacagcttctcctcggatggctgagggttgtcattggctgtgttcttccttgtgcatgacaacaggagacatagaaggtctgtaagcagccctgcaagccaggttctgagcaagccctcctgtgtggggccctcttacctggacataggtgtgtaaaccaaaaatgaaactctaagctccctaaccaactgaatgaactcctcctctcagccaagcacacaccaaaatcaacctgaaatacaatgcagcccatgatcggaacggatgattggatatgccttaacttaccctcttccctttaaaattcaggcacaactgaccagcttttaatatgaagacagagaccttgagactgacaaagaaaactctttatagcaataagwtaccaatgtgacagataccacgtcctaagagaaatcaaagtattttcctcaagatattg

SEQ ID NO: 103956 - DNA, 450 bp, Homo sapiens
ttgagaaaaggaggaagccagggtgtgtggacattgagagagagagagagagagagagagagagagagagagagagattgtgatgtatgtacaggactaacactgagacctggttatgtaatggtgtagtactgagtatcatccccaaatagtgaggtttcattccatgaagrctatgcatgtatctcatttgggaaaacagcttttgcaggtgtaaattaaggagcttgaaacagggagatggtcttagattaatcaactgggacttaaatgcaaactcaagtgtcctaaaaaaaacaagaggtagagagagatttagcatagactgaagtggagaaggcagtgtgaacacagagacagagattgcagtgatgtgtccacatcccgggagagagaagccaccagaagctggaagagctaaatcagactgctccctagagcttcagaagg

SEQ ID NO: 103957 - DNA, 509 bp, Homo sapiens
ctctgctctatgtggactctatgttgtgtagccatttgtggaaggcttctgtgattttgtgacctagagaaaatgaatctctgctaaaatcaaatctaagaaagattggcaaagggaatttaaagatttcctaaatttttggaatttccctaggcattaaaacatgagaagtggcaataattcaaaccaacgatgccctccaagaatgaggatttttccaatgcattaggttgggtcccctcagtgagaaggatgccaaagattcgcatgcrggcagtatatttacaaagtgcgggaaacaagcaagtgagcaagggaggggaggagggaaagggaaagtgaaaagtgcctcagaaggagccacctctgaggatgacgagagctcaagcccacatagaaacacaggaaaaatgcctctgttattccacctgagaggtgagggagctgggggatgtgtacacctcccttgtcatcactgattgacaaccgtcctaggggatgctaattcc

SEQ ID NO: 103958 - DNA, 590 bp, Homo sapiens
aataataagcaactccatctctccccacttcatccttctcagccctcgrtcctctgtgatctggctcatgttcctgctgccttactgaggctgctttagtaagggtactagtaagcttccaactggcaactccaaatgactattttcagtatacaacttacttggagtctacttagcatcttcagttattgaacttcctcctttaactcacttccaaaatactactctctcctccttccttctctatttctttgttggctcttcttcctctgccttctcttcaaatatttctacttcctctcactccttccagttctcttttctgtttccacaatacttgttctatcaactactcctttcacttcgttcacaataatactgatgattcccaagcatatatctctcatcatgcgtccccctcacatatctgctctttaattcttctttttaattcatttgataccttctaaaagtctctcacaattcagatagtccttcaagccaggaacatgggagtcattctcaaattatctttctcactcaccccctgtcccatctccaaatttttatataagcttcagatttcatgg

SEQ ID NO: 103959 - DNA, 637 bp, Homo sapiens
ggtgaccccatgtttctctgcttgaatgaggatgaggtgggagaataaaagaagaaattggttgacaattcaagtttgccatacccacacacatgatcttatttgatcttcacagcacctcttggtagcaggaatgatgactttattgatgagaaaaatgaggcttagaaaagttaagggacatgttaaagatcccattgaagtcaatggcagtgtaggagtgtggacatatctgcctgattgtggaggmtgagctcttaaccaacacccaacagacagcagaggctgaagctggccacaggacctcacttagtattcatttctcaggttatatataagggattgtgtgtgaatcaaaataccttacaataagtctactttattcttccatcaccagctgttagggacaataatgaagccatgtctgcattgggaaggtctccttcgtaacaaataggattatactgagattgcaatgggcatcaccattccttatatataaaaaggaactccagagggccactggttggaatcatactttgttcattccagatcactgagtgtccagtcttatctagaagcccagaagccagatgctggtccttggtcttctatcttctcatagtgatggcctgaa

SEQ ID NO: 103960 - DNA, 637 bp, Homo sapiens
ggtgaccccatgtttctctgcttgaatgaggatgaggtgggagaataaaagaagaaattggttgacaattcaagtttgccatacccacacacatgatcttatttgatcttcacagcacctcttggtagcaggaatgatgactttattgatgagaaaaatgaggcttagaaaagttaagggacatgttaaagatcccattgaagtcaatggcagtgtaggagtgtggacatatctgcctgattgtggaggatgagctcttaaccaacacccaacagacagcagaggctgaagctggccacaggacctcacttagtattcatttctcaggttatatataagggattgtgtgtgaatcaaaataccttacaatargtctactttattcttccatcaccagctgttagggacaataatgaagccatgtctgcattgggaaggtctccttcgtaacaaataggattatactgagattgcaatgggcatcaccattccttatatataaaaaggaactccagagggccactggttggaatcatactttgttcattccagatcactgagtgtccagtcttatctagaagcccagaagccagatgctggtccttggtcttctatcttctcatagtgatggcctgaa

SEQ ID NO: 103961 - DNA, 554 bp, Homo sapiens
tgcagtaagtcacttgaataaagtttcttctgcttattaagtggaagtgctacttaataaggaagtatttcagcagtgcagagatttggaaaatgccttagaaaaagacaggacatggccgaaacttctcaaaaaaastgttttaaactctaacaggattctgaatgtgatttttccagttggttctaaatgtagtttaaatcccgcaaactgagggtcatagatgaggcataccctatattctaaacatgttatatacacctgcagaattaacttaaaaatgaccaaactggttgccaaaccacctttatcctttaaatctaagaaaacagaaatttcaagtctcgtgaaagtgaagagtttggggaagtaaacacaactgagggttaggaatcactatggcagtgtacaccattgtgttggtgcttcatcccactaacgccgggggagaactccaaaacaagtgcttttggagaatgagtacaagaaggagcaaccagggttttacttcatctgtggctacatattagcctcaagaaaatttagggggcaca

SEQ ID NO: 103962 - DNA, 554 bp, Homo sapiens
tgcagtaagtcacttgaataaagtttcttctgcttattaagtggaagtgctacttaataaggaagtatttcagcagtgcagagatttggaaaatgccttagaaaaagacaggacatggccgaaacttctcaaaaaaactgttttaaactctaacaggattctgaakgtgatttttccagttggttctaaatgtagtttaaatcccgcaaactgagggtcatagatgaggcataccctatattctaaacatgttatatacacctgcagaattaacttaaaaatgaccaaactggttgccaaaccacctttatcctttaaatctaagaaaacagaaatttcaagtctcgtgaaagtgaagagtttggggaagtaaacacaactgagggttaggaatcactatggcagtgtacaccattgtgttggtgcttcatcccactaacgccgggggagaactccaaaacaagtgcttttggagaatgagtacaagaaggagcaaccagggttttacttcatctgtggctacatattagcctcaagaaaatttagggggcaca

SEQ ID NO: 103963 - DNA, 554 bp, Homo sapiens
tgcagtaagtcacttgaataaagtttcttctgcttattaagtggaagtgctacttaataaggaagtatttcagcagtgcagagatttggaaaatgccttagaaaaagacaggacatggccgaaacttctcaaaaaaactgttttaaactctaacaggattctgaatgtgatttttccagttggttctaaatgtagtttaaatcccgcaaactgagggtcatagatgaggcataccctatattctaaacatgttatatacacctgcagaattaacttaaaaatgaccaaactggttgccaaaccacctttatcctttaaatctaagaaaacagaaatttcaagtctcgtgaaagtgaagagtttggggaagtaaacacaactgagggttaggaatcactatggcagtgtacaccattgtgttggtgcttcatcccactaacgccgggggagaactccaaaacaagtgcttttggagaatgagtacargaaggagcaaccagggttttacttcatctgtggctacatattagcctcaagaaaatttagggggcaca

SEQ ID NO: 103964 - DNA, 514 bp, Homo sapiens
aacaaaaaaattaaatatgacctgaagctacrtatatcaatatgggtaaatctcaaagccgtcatgttgaacaaattgctggcaatttgaatataagaacagtatggtaccacagatgtcaagtttttaaataaatacaaataaactgttggttattctggagacacaaatatggagtgaaaacataaaagcatgtgtaggaatgttaacagcaaattcagggtagtggttagctctgcaggaggacaaaggactaggatcagagactggaacacaaaggatttcaagaatatctttactgagttatttttgaaatcacacataaagcaaaatgttaagatttgacaaatctggatggtgggtagatgagtgtttatcatgtgtcagtttttggaatgaaatctattattttaattcaagtccaataaaactctcaaggagatttttgccaatgttatttggttgccgtgttgattgtattgatgaattcagtcaacagcctcccttttgaatg

SEQ ID NO: 103965 - DNA, 581 bp, Homo sapiens
tcaacaaaaaaattaaatatgacctgaagctacgtatatcaatatgggtaaatctcaaagccgtcatgttgaacaaattgctggcaatttgaatataagaacagtatggtaccacagatgtcaagtttttaaataaatacaaataaactgttggttattctggagacacaaatatggagtgaaaacataaaagcatgtgtaggaatgttaacagcaaattcagggtagtggttagctctgcaggaggacaaaggactaggatcagagactggaacacaaaggatttcaagaatatctttactgagttatttttgaaatcacacataaagcaaaatgttaagatttgacaaatctggatggtgggtagatgagtgtttatcatgtgtcagtttttggaatgaaatctattattttaattcaagtccaataaaactctcaaggagatytttgccaatgttatttggttgccgtgttgattgtattgatgaattcagtcaacagcctcccttttgaatgccttttgcaatgtgatggcagctccacccttcaagagatagagtctatttccccacccttgaata

SEQ ID NO: 103966 - DNA, 529 bp, Homo sapiens
aaaggcaaggcccattgtagcctctagtttgccctccctggaatcaggcacttcatcaagtttgtcctttaatctttaacacaaagaaaaccttagggaaaaataactaggacaagtgcactgcccagagaagcaactggcacagacagcaagttggcatgacctttaccagctctctgcagctgagaaattgtggtaattattcttagcatctgcacatgcattttttatgagtctcaaaatgtccagacaagaaaaaggaagagagcaaggtcaggaggaaactcctttgacaaaggtggagccaggaaggggacaggtggggaccatctgcacattcaatcatttctcatttttgattaagaaaggtggtctagagaccagggctgaaatttatacacacacagatacacayacatatttcctgccttcaaaaattttatactttactgttagaggtaagccatatatgtaatcaatcattcccataccaggataaaattcaggggagatgatttccaaggaagtg

SEQ ID NO: 103967 - DNA, 600 bp, Homo sapiens
ggactcttgctgtgtaatagacatgattaggactaatagcccacttcttttaaaactcttcctatgaaaaatatgttaaaaaaaaaaaaaaaaaaaagcagacctaggcggctatgtttatatcacatgacccagaccttatttgaatgtacagtggaaaatctgcccaagagtgtggctggcctgttgacccaagtttattctctggagaattttaaccaaaaaacacaagtaccatggtcagtctggtggtgagaacttgaactgactacttatgtatgtttgtgggctagtggccatgttgaggcaccatagaaacagagaaagttagtttaaagaaggacggaaagaatcagagtgaagcagagctgagttggaccctgatacccyagagacatgagaatgaagctttggttcccagtagctcctggagtctagttcccatgaggcctcacagccgttcagcttccttatccttgaaattgactactttagctttacaaaaaaactctcactctgctgagctagtttgaatagatttctatttgccatagccaacaatccctgactaagagagcctgagaaggtgtcaaataagga

SEQ ID NO: 103968 - DNA, 594 bp, Homo sapiens
aacctccaggtcaggtttaaagttatttaaaaatggggagtcataaaggttgkgcagtgcacccaaagttatgtagccagtgttcttggctggaattatgcaacaaagatgtataaagtctttgcctatttgctctgtgccaggcactattctggacactgtggatgtagtgacaaatatatagaactaaacaggcaaggatgacagtgattctctctctgccactaaaatcaaactggtatcatctgcttgtgctgacttaaagaagaaagagggaaaaggaatgaggtacaagatgccttggctgctattcaatgtgtcagggtggacttcagtggactcagaatgtttaaatggtgaaaaactagagcagctccttccacccacatgctgtctgtgttcaggtagataagtagttcaagcgagagatgaaaatagagcctctgttgaagagcagtctgtttccctcaaaatcttgtttggaaaaaaactttagttggccattttctagttgaataaaaactcacaaagacataagagaaatattttctggcaatacatttgcactgaaaatagcagaaaggcagaaccagc

SEQ ID NO: 103969 - DNA, 587 bp, Homo sapiens
tatcttaaaagaaatatgtcagtaggcaggtattgggtaaggacacagcagtcagtggaattttcatgtgcaaaggtatgaaggtataaaaagcatggtagatttggaaaattgcaaaggttaggaattgaagggaaggtaagaataggtgaagacagagcagaaagctgagcagatgaaggaggatcctcaaagatagacaaatgtgtgtgtgtttttgtttgtttattttttggtgagacattatctcgcccctggtgcagccagtcacttcttcctgtacttgcgaaacacttggagcatatttctctttaacatatgtgatattcatggatctgtctcctctactttactatgagttcctagaggatagctctgctatcatctgtgctcaccatgcttggcacttattagggcattagaaaattagagtttrtgcaagaatgaatgaacaaatgagaatgaaagaaataacctacatactctgccactgaacgggttcagaaaacattctttatcaaagacctatgagacatccttataaagccacattagaaatacatatttatctctctactgaagcaatg

SEQ ID NO: 103970 - DNA, 586 bp, Homo sapiens
catgtaggtcctggtcttggcttggggtgctcttcctgtgttacactgccaggcctagctaagtcccaggcactggtacggccctctaaattccagatccccctgaggtgtggggcccaggttaaagagcagtactttctggaagtgacatgtgtcacttccagcctgaagtatagaaaagcccatgtggttttccgttttctggctgcagccataagagtgctgcctattccagatggtaaggctgctaactgtggagtctcagtcagcctgagatcctgagtgactgtgtggagcagagcctcttgctcacccrcaagggacatgtaacctgagccagaaataaactactttttgtgtttagcctaccaggtttattgttacaataaaaagacctagcctatcccgattaacacagatcctctgtatgatggttactctgcagccacaggccagccacatttaacaagaaatacaatgtagccactgtcctcatggaccacttaatctaatgggggttacacttacataaatgatcttagaggaagggcacctctgcttgagggggtaattggggtacagatgg

SEQ ID NO: 103971 - DNA, 627 bp, Homo sapiens
accatataatctcacttatatgtggagtgtaaaaaagttaaactcttagatacagagtaaaatggtggttagcagcagctgagaggtagaggaattggagagatggcttgaagacaaaatttcagttagccatcagaaataagttcaagagatctactgtacgtcatgcttcctattagttaataacaatgtattacatgttttaaaattgctgaaagagtagattttgtgttctcactaccaaaatataagtatttaatgttaaataatttgatgtagccattctacaatgtatatgcataacaaaatatgctgtrcaccataaatatatacaatttttgtcaattataaaataaattttgtcagaactgttgcttgcttgcttgttcctgcagagaagggtgatttggggtgaagaggaaggagataaggaaatgatctcttgtgagtggcacaggttgaaagttgcctacatgtgaaaaaaagcagagctgagcacggacactgaggaaataattttgtagtagtcaggtcatgatccaagttgctaaggagcccaagtaattaaatatggctgaaatcttgatagaggggcatttttttcacctccatttaaaacctactgat

SEQ ID NO: 103972 - DNA, 627 bp, Homo sapiens
accatataatctcacttatatgtggagtgtaaaaaagttaaactcttagatacagagtaaaatggtggttagcagcagctgagaggtagaggaattggagagatggcttgaagacaaaatttcagttagccatcagaaataagttcaagagatctactgtacgtcatgcttcctattagttaataacaatgtattacatgttttaaaattgctgaaagagtagattttgtgttctcactaccaaaatataagtatttaatgttaaataatttgatgtagccattctacaatgtatatgcataacaaaatatgctgtacaccataaatatatacaatttttgtcaattataaaataaatkttgtcagaactgttgcttgcttgcttgttcctgcagagaagggtgatttggggtgaagaggaaggagataaggaaatgatctcttgtgagtggcacaggttgaaagttgcctacatgtgaaaaaaagcagagctgagcacggacactgaggaaataattttgtagtagtcaggtcatgatccaagttgctaaggagcccaagtaattaaatatggctgaaatcttgatagaggggcatttttttcacctccatttaaaacctactgat

SEQ ID NO: 103973 - DNA, 571 bp, Homo sapiens
tgtgctagactatatatcttctctttcaaaattgttctcttcgaggatttatttattgtacacaaataaacatgaactgttttttcccatcarctccttcaataaagagaacatgttttctcaagttatgttttagcccttttggaatgagcacaaaagagtagagtcatagaaaaaatctgtaaatttttcaagagagtaagaaagtcttgacatgttttatgcaagtgtaaccaatgccaaatgttcttgctgggtatccacttggaatgtggggacagagattcttccaaacccaccctttctgtttgcagctgtaatgctgggtagaaagagtgcatttaacagttatttggtttatttgattgaagctgggtccttcccagcagtgccttgtcccagcagtgccatataatgaatctctgtatccagttgttgcatcaggaaagcaagagtggaacagtacttctagggtaggtatctttttaattcagttcaattcattataccttgcaatcacttattgactctctaacctaaacttggttcctttaataactcatctgccctt

SEQ ID NO: 103974 - DNA, 589 bp, Homo sapiens
agaaactcatcatatgtttttgctttttataatttattttgctcctctttcttcagcaatgagaagagttccttgcaaaaaaaagccccaaaccaaaaccaaacccyaaacacttctctatttgtccctaaccagcagggaaagagttttcttcagtcagtgagaccacagagaacatctggctgattaacagatgttaatgccagaatagctttggtttgatcaacgatgtgatcaatcatgaaagttataattttagcaaggtttagactgttccattaaataaagatggaacatgtctgatgttccagattttcagaaaaaaaaatatttctccaaaaacagtattttcagaacatctgcctgcatataattttagatgtgatttttaacatgtccatatggtaactaccttacctaaaaatgaaattggggagaggggggaaggtaaagatttattttttccttgtggttgggggaggacacaagttttgtgcattattaattttatgcattgaagagacagtagggaaaatatagactgaaatactgagattcaattagtttatttaggaggaaattgtttaat

SEQ ID NO: 103975 - DNA, 420 bp, Homo sapiens
taaaagaaaacaaaagatcaattgtacaaaagggcaacagctggcaacttcaattggtgaacttggcaatgcaattcaaaagatattccacaatatccattgggatattcccaagtattccattgggaatactccatgccagtcattttcccaggatggtcttgttcaaaagtggcacattttagaagtgcatgtggcttacagagagcatgctgaattttattcaccatggtgtgtgctcacagcccagctcaagattcatgaacctgctggaaacgggagaaaaatgatgttaaaagctggggagctgcargtgcttcacatgtgatgttctatctgtgtacagtaatccaggttaacaaccttccctgttaaaggcaatatggaatcgtttattaagtaaactctctctcacacaca

SEQ ID NO: 103976 - DNA, 611 bp, Homo sapiens
gtatcctccactagaccacacagataagccaaacagctctccaaatagaacaaggctgaaggaggcctgagaagatgattgccctgcagtttctggtcaggaacagaatcaaaagtcaaaaatgtgacaagtgaaagaaactcatattcaaatgtctgtatcctctcattaatatgagattcacggatgtttgatttctctgtaactgtcaaatccatgcagaataaattgttagggggaagtgagcttgatgcagagtttccagaatgcagacatgagtagggtcagcccatatatttttacatgataactatccatcttaccttagactaaggacttaggartggatgggtgcagttggggaatatctgaatgttaaagttggagaccaggaaaaaatacatttcctgtctggaataccagaaccaaaagaaaaaagagctatccggcctcttgaacaaaatgttacaaatggagtatgtattcacgaagttgcctatataattatgaattaatctaacagactttataagaagccacttgtaaaaatgacatctagaaatcactaagcaaagaaaaatatgatttgtctgcaaggtggaataaaagaa

SEQ ID NO: 103977 - DNA, 580 bp, Homo sapiens
atgagcacgtatttctttttaggttcaaaatttcacaatggaaatttaaccaaaaattatttccagttgtaaaactagcataattcaaacatgtaaatgtacaatacacataccaaataaatcctgtatgaatatagctacaaagctctcaawgaaaacaaatgcattgtatatgtgtatatatatgtatatatgtgtgtgtgtgtgtgtgtgtgtgtgtgtgtgtgtgtgtgtgtgtgtttcttatttcattcaggttactctaacaaaataccacagactggatcacttgtaaacaacagcaattcatttctcacagttctggaggctgggaaatccaagatcaaggcaccagcagattcagggtctggtgggggcccatttcctcatttatacacggcaccttcttgttgcatcctcacatggtagaaagagaagcaaattatctcgggatttttataaggacacttattccacttttgagggatccaccctcatgaactcattttatctagttaacctcccaaagaccccaccccctaatactatcacactgggggctagaatttcaacatatgaa

SEQ ID NO: 103978 - DNA, 495 bp, Homo sapiens
aaaattatttccagttgtaaaactagcataattcaaacatgtaaatgtacaatacacataccaaataaatcctgtatgaatatagctacaaagctctcaatgaaaacaaatgcattgtatatgtgtatatatatgtatatatgtgtgtgtgtgtgtgtgtgtgtgtgtgtgtgtgtgtgtgtgtgtgtttcttatttcattcaggttactctaacaaaataccacagactggatcacttgtaaacaacagcaattcatttctcacagttctggaggctgggaaatccaagatcaaggcaccagcagattcagggtctggtgggggcccatttcctcatttatacacggcaccttcttgttgcatcctcacatggtagaaagagaagcaaattatctcgggatttttataaggacacttattccacttttgagrgatccaccctcatgaactcattttatctagttaacctcccaaagaccccaccccctaatact

SEQ ID NO: 103979 - DNA, 550 bp, Homo sapiens
cttcagacagtcattgtggttgttctcatgcttgttagtttggcatttgctgttgctataatctagagtctaatcttacgtctcaatcactgccactcaagcactcactagctgagaaatgcatcctcaaacaatagctttaacatgggggctggatctaataagccttgaaatgacataaaaacttctgtaactgttcatttaacagagaacatggaagtaaaaatattagagagaatgccaatggaaggaaaagcacattctagcaggtttacctttgtcaaagtaccttgaccaaacatcagccaagctcctctggcccaagggggaagagcttagccaagtctcctccttggccttctgagcacaactttgatgtccaatcaggctcatgtgcttccacttttggtatctcatccagagttcctttttcccctccacccttgatacttacccaagttcctcttagtaattttccacccagggaccctctcacctgaccrttggctgtaagtccctatgtgcccctgttgtttttggaattgagttc

SEQ ID NO: 103980 - DNA, 634 bp, Homo sapiens
agaccgggcaggtctgtaagtgcaatacgttgctttgtaggtaagaaaaataaagcccagccaggtgccaatgtgacatggagttgggcctccagcccaggtctctgtgccccacatacatggtttaactatctgtattcactgtgcctttttactatctgtgcttctgatgctgtgacacctttgggtcttgctgaccctggagggactgcccttctcagggagaggggtttcctagagctcttaaaggactcacttrcaagttcacctttcttttcttttcttttttattataagttctagggtacatgtgcacaacgtgcaggtttgtacatatgtatacatgtgccaggttggtgtgctgcacccattaactcgtcatttacattaggtgtatctcctaatgctatccctccccactcctgccaccccatgacaggccccggtgtgtggaactcaaacaaatttgtaaaaaaaaagcaaattcacctttgaaatgcaaaatcatcagtacagagctcctaccccagcatctcctctgtggggctctcacactctgggctactatcctcctgccctgaccactcaagggctaggtaccagacatctagggacagccactgctccaaatgtg

SEQ ID NO: 103981 - DNA, 634 bp, Homo sapiens
agaccgggcaggtctgtaagtgcaatacgttgctttgtaggtaagaaaaataaagcccagccaggtgccaatgtgacatggagttgggcctccagcccaggtctctgtgccccacatacatggtttaactatctgtattcactgtgcctttttactatctgtgcttctgatgctgtgacacctttgggtcttgctgaccctggagggactgcccttctcagggagaggggtttcctagagctcttaaaggactcacttgcaagttcacctttcttttcttttcttttttattataagttctagggtacatgtgcacaacgtgcaggtttgtacatatgtatacatgtgccaggttggtgtgctgcacccattaactcgtcatttacattaggtgtatctcctaatgctatccctccccactcctgccaccccatgacaggccccggtgtgtggaactcaaacaaatttgtaaraaaaaagcaaattcacctttgaaatgcaaaatcatcagtacagagctcctaccccagcatctcctctgtggggctctcacactctgggctactatcctcctgccctgaccactcaagggctaggtaccagacatctagggacagccactgctccaaatgtg

SEQ ID NO: 103982 - DNA, 557 bp, Homo sapiens
taagaacagacatccttgcctcattcctgatcttcgtaggaaaacatctagtttttcatcatcaagtatgatgttaagagtaggtttttcattcatcaagtatgatgttaagagtagatgtcattcatcaagttgaggatgttctgctcgaatcctagtttgctaggagtttttattatgaacaagtgttgaattttgtcaaacacttttctgtatctatttacataatcatgagattcttgtccttcagcctgttgaaatgatagattatattaatttatttttctatgttgaatcagccttccatcctggaatagatctcacttggttctgatatataawtttttttacattgttggattcaatttgctaatattttgttgagaatttttgcatctctatttatgagagatattgttctatagttttccttcttgcaatgtctttgtaatactggtctcatagaatgagtcagaaagtattccttttgcttctattttctgtaagtaatccttacttccttaaatgtttggcagaactcagcagtgaattcaatt

SEQ ID NO: 103983 - DNA, 375 bp, Homo sapiens
ctcttagccagtagtttcctctgacaatggttttacttgaactgtggactacttaataggtcttatgtgcctcataagatgtaaaacttcatgagrtacatgtgggaagggcagcttgtatattggtaattggtaagtggtgcagagttaaagcgaacaatgcattgaacaagactggtaagaaatacagcaatatattagcaatatttgcatttgagtggtgggattacaggaattttctggcccagcgttgactctattttccaaatgtacatctttaataataaggaatacatcttcaaagcctacatgactagtgtaaccactttacctcctcaccagcgttgtgacagaattttcagttatcaaaaaaat

SEQ ID NO: 103984 - DNA, 613 bp, Homo sapiens
atgagttttactccaacaaatacattattattattattattattattattattattattattatyatcatcatcatcattttgaaatggaatcttgctcggttgcccaggctggagtgcagtggcgtgatctcggctcatggcaacctctgcctcccgggttcaagcgattctcctgcctcagccttccgagtagctgggactacaggcacccggtaccaggcctggctaatttttgtatttttagtagagacggggtttcaccatgttggccaggctggtctcgaactcctgaccttgtgatctgcctgcttccgcctcccaaagtgctgggattacaggcataagccaccgtgcccggccgaatacattattttttaaatgtcatttgaatcatcttatccagatctaattgaattactatttcaatagaagatgctatattttagtggctctctcaaactaaaactacaaaatgttgttcaaaccattagccacagttcactgcgttatcctttctaaagttatttctagtaaacttctcctttaagtttattgacatttacatgtttttgtcttgttttgttttttaagaagatattgagtaaatgcag

SEQ ID NO: 103985 - DNA, 613 bp, Homo sapiens
atgagttttactccaacaaatacattattattattattattattattattattattattattatcatcatcatcatcattttgaaatggaatcttgctckgttgcccaggctggagtgcagtggcgtgatctcggctcatggcaacctctgcctcccgggttcaagcgattctcctgcctcagccttccgagtagctgggactacaggcacccggtaccaggcctggctaatttttgtatttttagtagagacggggtttcaccatgttggccaggctggtctcgaactcctgaccttgtgatctgcctgcttccgcctcccaaagtgctgggattacaggcataagccaccgtgcccggccgaatacattattttttaaatgtcatttgaatcatcttatccagatctaattgaattactatttcaatagaagatgctatattttagtggctctctcaaactaaaactacaaaatgttgttcaaaccattagccacagttcactgcgttatcctttctaaagttatttctagtaaacttctcctttaagtttattgacatttacatgtttttgtcttgttttgttttttaagaagatattgagtaaatgcag

SEQ ID NO: 103986 - DNA, 613 bp, Homo sapiens
atgagttttactccaacaaatacattattattattattattattattattattattattattatcatcatcatcatcattttgaaatggaatcttgctcggttgcccaggctggagtgcagtggcgtgatctcggctcatggcaacctctgcctcccgggttcaagcgattctcctgcctcagccttccgagtagctgggactacaggcacccggtaccaggcctggctaatttttgtatttttagtagagacggggtttcaccatgttggccaggctggtctcgaactcctgaccttgtgatctgcctgcttcygcctcccaaagtgctgggattacaggcataagccaccgtgcccggccgaatacattattttttaaatgtcatttgaatcatcttatccagatctaattgaattactatttcaatagaagatgctatattttagtggctctctcaaactaaaactacaaaatgttgttcaaaccattagccacagttcactgcgttatcctttctaaagttatttctagtaaacttctcctttaagtttattgacatttacatgtttttgtcttgttttgttttttaagaagatattgagtaaatgcag

SEQ ID NO: 103987 - DNA, 580 bp, Homo sapiens
ctttggttaattcctaagtatttaattktatgtgtggctattgtaaatgggatcactttctacatttctttttcacattattcactgttggcatatagaaatgctactgatttttatatgttgattttgtatcctgcaactttactgaatttatcagttctaatagtcttgtgggtctttaggtttttctaaatataaaattacagtatcagcaaacaaggataatttgacttcttcctttccaatttggatgtcctttacatcttcctctactctgattgcgctagctaggacttctagtactatgttgaataacagtggtgaaagtggtcatccttgtcatgttccagatcttagaggaaaggctttcagtttttccccattcagtatgatactaatgtgggtctgttgtatatggcctttattatgttgagttatgttccttctatactcagttctttgagggtttttatcttgttgtgatgttgaattttatcaaacgttttttcagcatcaattgaaatgatcatatggtttttatccttcattctgttgaaacaaactatttcttacaatttga

SEQ ID NO: 103988 - DNA, 562 bp, Homo sapiens
cacaatcatggcagaaggtaaggagggacaagtcacatcttatgtggatggcggcaggcaaagagagcttgtgcagggaaactctcccttaaaatactgtcagatctcgtgagattttatttgctatcacaagaacagcaggggaaagatctgcccccgtgattcaatcatctcacatcagaccctcccacaacacgtgggaatcatgggagctacaagatgagatttgagtagggacacagagctaaaccatatcagttatcttggcccatgcctaggaataagtgaggacagccagcctgtggggctagaagcaagayggaatcagccatgctagacttaccttgctgtcataatccttgcaaaggtagtttcaattctgtctacatcattgtaagttgtcatttcactcaattttcctaaaaattgtcctaatttaaacactgcctttttttcccccaggactctgacactaccagttcactatattgtggccttctcaatgaaatcctcaagccctcaaattcagctcttacctacagagcatccaaccagcttttta

SEQ ID NO: 103989 - DNA, 658 bp, Homo sapiens
cctcccctttccccccagcccccgacaggcccccgtgtgtgatgctccccgccttgtgtccatgtgttctcattgttcaactcccacttatgagtgagaacatgcagtgtttggttttctgttccygtgttagtttgctaagaatgatggcttccagcttcatccatgtccctgcaaaggacatgaactcattcttttttatggccacacaggatgtttttatttatttagttattttttgagacagagacccaggctggaatgcaatggcgcggtctcagcttaccgcaacctccacttcccaggctcaagtggtcttcccgcctcagcctcctgagtagctgggactacaggcatgtgctaccacacccagctaatttttgtattttttgtagaaagagggttttgccttgttgcccaggctggtctcaaactcctgaactcaagcgctctgcctgcctcggcctcccaaagtgctggcattacaggcgtgagccactgtgcccagccaggctgttcttttaagagatatcaaggttactatagtgagcatagggattaaaaaaaattattgcctctgaatcacacatatccttcataggtatattagcctataacaggaactcccaggttttttggtaaagagcaatgtatgcag

SEQ ID NO: 103990 - DNA, 658 bp, Homo sapiens
cctcccctttccccccagcccccgacaggcccccgtgtgtgatgctccccgccttgtgtccatgtgttctcattgttcaactcccacttatgagtgagaacatgcagtgtttggttttctgttcccgtgttagtttgctaagaatgatggcttccagcttcatccatgtccctgcaaaggacatgaactcattcttttttatggccacacaggatgtttttatttatttagttattttttgagacagagacccaggctggaatgcaatggcgcgktctcagcttaccgcaacctccacttcccaggctcaagtggtcttcccgcctcagcctcctgagtagctgggactacaggcatgtgctaccacacccagctaatttttgtattttttgtagaaagagggttttgccttgttgcccaggctggtctcaaactcctgaactcaagcgctctgcctgcctcggcctcccaaagtgctggcattacaggcgtgagccactgtgcccagccaggctgttcttttaagagatatcaaggttactatagtgagcatagggattaaaaaaaattattgcctctgaatcacacatatccttcataggtatattagcctataacaggaactcccaggttttttggtaaagagcaatgtatgcag

SEQ ID NO: 103991 - DNA, 658 bp, Homo sapiens
cctcccctttccccccagcccccgacaggcccccgtgtgtgatgctccccgccttgtgtccatgtgttctcattgttcaactcccacttatgagtgagaacatgcagtgtttggttttctgttcccgtgttagtttgctaagaatgatggcttccagcttcatccatgtccctgcaaaggacatgaactcattcttttttatggccacacaggatgtttttatttatttagttattttttgagacagagacccaggctggaatgcaatggcgcggtctcagcttaccgcaacctccacttcccaggctcaagtggtcttcccgcctcagcctccygagtagctgggactacaggcatgtgctaccacacccagctaatttttgtattttttgtagaaagagggttttgccttgttgcccaggctggtctcaaactcctgaactcaagcgctctgcctgcctcggcctcccaaagtgctggcattacaggcgtgagccactgtgcccagccaggctgttcttttaagagatatcaaggttactatagtgagcatagggattaaaaaaaattattgcctctgaatcacacatatccttcataggtatattagcctataacaggaactcccaggttttttggtaaagagcaatgtatgcag

SEQ ID NO: 103992 - DNA, 609 bp, Homo sapiens
ggatttaaccatgtaattcatgggaccaattgagagtaatctttctttacaggtgtctggcaaagcagtgtcaagagtcagacacctttactatctttatggaaacttaatttttggccttttatcaatatgtcagacagggctctgaacaaacatgttaagttgagctgttaaactgatgggttttatggaagtttacattcttcatttggtacctgtgttacagtaggtagctagtcagkcatgagcaggacaggagagggccctcccccagcacacacaccaggaatgtcaggcgaccatcacgtgatgctcagggaggttgttaactgtctctctaaaataataattagtcatagccagggccagggaaaggcagtttcccaatagatagaaaaacctgagcctagtgatcagcagcttcctgataagatcccaggagttgggcgattgggctcaagcatgtttattaagggacaaaatggtggaatttaactggcatatgacctccaagggacattcaactagtaagggaagaatgcctcaattgaacatgcgtacaactccaataaacacagtgcacatgctcacctcccaagtgctggcagg

SEQ ID NO: 103993 - DNA, 574 bp, Homo sapiens
tgggcattcactcatatccgtatatggggaaaaatctgattcaccatgttttaggtacctcattggaaggtaggttataaaaacacatctatcactcctgctggtgatataaccaattcaatgaagacgcagtattccttcggtgaaatcataaaagcaattttaawgttttatctcactgtccttttaaacttgctcagtgaaggcaattctacccctgccactggatatagcttgtttggtcacttataggtaatagaaagtaccagattctttctattagaatgcccaaaccaatatatcactacatatttcaatcttcatttcaaagaaaagaactctgccctcctccccaacctacagctggtcacaggcaggtctcagcctttaggagagaagacgtggtcagcttctcctttccttcctcatcccagaccaccatgaaagctgctggttttgacccttccagaatcagagtagggaagggaagagagaaaagaaggggcaagaaagttcttactttactgggacagttgtaagatggcattgtcttttccaaacctggctaatgtca

SEQ ID NO: 103994 - DNA, 574 bp, Homo sapiens
tgggcattcactcatatccgtatatggggaaaaatctgattcaccatgttttaggtacctcattggaaggtaggttataaaaacacatctatcactcctgctggtgatataaccaattcaatgaagacgcagtattccttcggtgaaatcataaaagcaattttaatgttttatctcactgtccttttaaacttgctcagtgaaggcaattctacccctgccactggatatagcttgtttggtcacttataggtaatagaaagtaccagattmtttctattagaatgcccaaaccaatatatcactacatatttcaatcttcatttcaaagaaaagaactctgccctcctccccaacctacagctggtcacaggcaggtctcagcctttaggagagaagacgtggtcagcttctcctttccttcctcatcccagaccaccatgaaagctgctggttttgacccttccagaatcagagtagggaagggaagagagaaaagaaggggcaagaaagttcttactttactgggacagttgtaagatggcattgtcttttccaaacctggctaatgtca

SEQ ID NO: 103995 - DNA, 574 bp, Homo sapiens
tgggcattcactcatatccgtatatggggaaaaatctgattcaccatgttttaggtacctcattggaaggtaggttataaaaacacatctatcactcctgctggtgatataaccaattcaatgaagacgcagtattccttcggtgaaatcataaaagcaattttaatgttttatctcactgtccttttaaacttgctcagtgaaggcaattctacccctgccactggatatagcttgtttggtcacttataggtaatagaaagtaccagattctttctattagaatgcccaaaccaatatatcactacatatttcaatcttcatttcaaagaaaagaactctgccctcctccccaacctacagctggtcacaggcaggtctcagcctttaggagagaagacgtggtcagcttctcctttccttcctcatcccagaccaccatgaaagctgctggttttgacccttccagaatcagagtagggaarggaagagagaaaagaaggggcaagaaagttcttactttactgggacagttgtaagatggcattgtcttttccaaacctggctaatgtca

SEQ ID NO: 103996 - DNA, 604 bp, Homo sapiens
tatgtatttatctcctgcaactgcttagctattgtcacagtagctataaattaacctaataatgccacaccagacactataacccacaccctatagcttaccaacgcatagccaatcactaatcagtgttaagtctgtaaaccaatgagaattcctgacaaacaactttgtatcagcccactcactgttttcctttcttacctttaaaagtctgcctgtaggccctttgcagtggctcactcctgtaatcccagcacttagggaggccaaggcaggtgggtcgcttgaggccaggagttcaagaccagcctgggcaacatggcgaaaccccrtgtctgcaaaaaatacaaaaatcagccaggcatggtggcactcgcctatagtcccagctacttggcggggctaaggtgggaagatcacttgaacctgggaggttgaggctgcagtaagctgagattgcaccactgcactgcagcctgggtgacaaagtgagaccctgtttaaaaaggaaaaaaggaaaagaaaaaaaaaagataaataaaagtccacctgtaactgctactaatcagagggtctattcagggcagcatgcatctatgctcct

SEQ ID NO: 103997 - DNA, 614 bp, Homo sapiens
tcagttggtaaagttgcagtaattaactttggtacataatttgcagtgaggaaaatgtcaccatgtcacagctttagtcttaggcttattttctagtggtggagtatatttattttggtgaaataasaagctgccattgctttttattattgtacgaaagacacagagtacattattcaactcggaaaatctctacctgtgttatactcatttttcacactaatagagaaaattaccacaaacgaattttgaatgaattatggtcacccagtgtttgttacaatttccttttcatcagtaatccaatatggtctcctacatatttcaataaatggatgactttatatagtgaattccacagagaaaatagcacaggaaagagagaatgtgactaaaaatcatattgattatattgaaccaagagcatgttgacttgaaggaagtaaaatggagaattgtcatttaaagtgagacacattaaatcttgactgggcaataaataataaggagctgagctctttcgcttaggtgacactaactttcaccttaaaaatatgatagtgccacagctagtaaagaagatatatttattggcattttgggactaaaagtac

SEQ ID NO: 103998 - DNA, 614 bp, Homo sapiens
tcagttggtaaagttgcagtaattaactttggtacataatttgcagtgaggaaaatgtcaccatgtcacagctttagtcttaggcttattttctagtggtggagtatatttattttggtgaaataacaagctgccattgctttttattattgtacgaaagacacagagtacattattcaactcrgaaaatctctacctgtgttatactcatttttcacactaatagagaaaattaccacaaacgaattttgaatgaattatggtcacccagtgtttgttacaatttccttttcatcagtaatccaatatggtctcctacatatttcaataaatggatgactttatatagtgaattccacagagaaaatagcacaggaaagagagaatgtgactaaaaatcatattgattatattgaaccaagagcatgttgacttgaaggaagtaaaatggagaattgtcatttaaagtgagacacattaaatcttgactgggcaataaataataaggagctgagctctttcgcttaggtgacactaactttcaccttaaaaatatgatagtgccacagctagtaaagaagatatatttattggcattttgggactaaaagtac

SEQ ID NO: 103999 - DNA, 614 bp, Homo sapiens
tcagttggtaaagttgcagtaattaactttggtacataatttgcagtgaggaaaatgtcaccatgtcacagctttagtcttaggcttattttctagtggtggagtatatttattttggtgaaataacaagctgccattgctttttattattgtacgaaagacacagagtacattattcaactcggaaaatctctacctgtgttatactcatttttcacactaatagagaaaattaccacaaacgaattttgaatgaattatggtcacccagtgtttgttacaatttccttttcatcagtaatccaatatggtctcctacatatttcaataaatggatgactttatatagtgaattccacagagaaaatagcacaggaaagagagaatgtgactaaaaatcatattgattatattgaaccaagagcatgttgacttgaaggaagtaaaatggagaattgtcatttaaagtgagacacattaaatcttgactgggcaataaataataaggagctgagctctttygcttaggtgacactaactttcaccttaaaaatatgatagtgccacagctagtaaagaagatatatttattggcattttgggactaaaagtac

SEQ ID NO: 104000 - DNA, 559 bp, Homo sapiens
tggctttatagtatttggaaacagggtctttgctgatgcaatcaagttaagatgaagtcattaagggggtrggggcctaatccaatctcttgtccttagaaggagaaagacagagacacatcaggggaagatggtgaggtgacaatggaggcagagattggagcaatttatctaaatgctaggcaacgccacagagagctgcaaacaccaaggctagaagaggcagggaaggagcctcccctacaggtttcagagggagcatggcctcaccatacctttacttcagacttctagcatccagaactgtgacacaacacatttctgttgttctgagtgacaacagtgtgtggtgtgttattacagctgctctagaaactaacatatcgagcagccagctgtgtgggattgtacctcccaagtaaccctctaagacttaacctttgcccagggctctgtctctagagaactgtgacaatgataggtagacctgaataaagcgaaggatgatatctgcagggatatttgaggacagggagtgctgacaagggaggagccagtg

SEQ ID NO: 104001 - DNA, 437 bp, Homo sapiens
tttattaactgtagccaccattatgtccaatggatctcttgaacttattcttcctaactgaaattttttatcccttgaccaacatcttcaagtgtatttgatctcagaacactccattctcttttcctaatgtaactcatacgttttcttgaaattcttattgcatagaattcgcttggagaaatgctgatttttaatttcaaacaaaaacaaacaaataaaagcataagaaaggtaaaatgaattcagtaagattatggtggttaataataagtataaattctaaattacaacccacatatcctagtactagaggatgcaaaaatttgattcataaaaagagraccataaatagttgttgtaacggttcaataagcgttcttattaaataagccaatgtttcataaatgttatttcatatcattatttgagagaat

SEQ ID NO: 104002 - DNA, 437 bp, Homo sapiens
tttattaactgtagccaccattatgtccaatggatctcttgaacttattcttcctaactgaaattttttatcccttgaccaacatcttcaagtgtatttgatctcagaacactccattctcttttcctaatgtaactcatacgttttcttgaaattcttattgcatagaattcgcttggagaaatgctgatttttaatttcaaacaaaaacaaacaaataaaagcataagaaaggtaaaatgaattcagtaagattatggtggttaataataagtataaattctaaattacaacccacatatcctagtactagaggatgcaaaaatttgattcataaaaagagaaccataaatagttgttgtaacggttcaataagcgttcttattaaataagccaatgtttcataaatgttatwtcatatcattatttgagagaat

SEQ ID NO: 104003 - DNA, 403 bp, Homo sapiens
agctgtagccatagagttccagtccaattattttgcttttaaatttgaggaaattaaggctaaaagaaggaagatgggttcctacatgacacaagatgagttgagggtcagtgtctggtatagaagctggatttctgaatgcttgtccagyaaattgtgcagaaaattttgattcagaattaggtataaacttatttctagattacatttagtagcctaatatcaaagcaatgaaaggattgccacacaaaaattttaaatttgcaaaattacctgatttggaaggcagggcatgtaaaatatttcctgacattaaaataaactacaaaagagataaagatcaaatgactttacagagtctgtttctaatggttcgaagtacttaatcaagttccaacctgat

SEQ ID NO: 104004 - DNA, 456 bp, Homo sapiens
ccatatttaagcaggaaaaaggagaatcagttgtttgtttgctttccttcagaaggcaagaaaagctttctcaaaatctctcagataaacttgttacttggacagcaagggaatgtcaaaattgagaagcccattgttctaacattgccaaatacaaaggactgcaccaagaccaaccagagttttattaatcaggaagaagtgagaggattaatgtcttttagaaagttctstttttcagaatggtgtgaccatatgacagcaaaaaagtgttatgatttgtaatacttaaagtcagaagcaagatgcatgttctaatgttataaatagtgcattgttgtagcatggtatagctgttggagtcagacactcttgaactgtatcacctttgtcaatctaatcaatctctcagaaccatagtttttatagaaataaaagtatttggctcacaaaata

SEQ ID NO: 104005 - DNA, 515 bp, Homo sapiens
aggaatttatacacattttggatcctggcacctgttctgttcttatagtggtgggttttgtaatttggaatgaattctaggtgttagacctgccttaatggtctgaagggacagaaaagattgacctataaactggaaagtgtttcacattagttgatacctctgtttatccctgtttctgtttttaggcctggtaaaatccatgcctagggctaggtagcaatatgttacttgaagagcactacaaagacctgcgtgtgtttagatcaatagtttattttctaaatcctgctgatttggatgttttgtggtttgagggaaactctgaatatttgtcaggttatcatttcgacaaattcttattgttttggaaacttggaaaatgtccataaattccattkaccatcatgacaagaaaaagaaaaaaaatccgaacctgaaaggatgtagagcataaataaaaacaagtaaaatgcaagccatcatttgaatgcattctatgtacgaagtgtttt

SEQ ID NO: 104006 - DNA, 631 bp, Homo sapiens
cttgtggggctgagacaaactctgcacacttagccctgttcaaatttcagactgtgaacaaaataaatgctgtcatttacttcaggccactaaattttggatcagtacgctacacagaaatacatagccacaacatctgtcttaattcacagtatagtgtgttctaaaygagataatgcatactaatattgcaaataactgagaaaatatgtgattattattgcttttgcttgtgttataatcactctatggagtcacttcaaataattacatttattctaatatcttttatttctcctactaaaagtatggtccacaaatcagcagcataaatgtaacctgggagattgttagacatgcagaatctgggatcccaccccagatctactgaatcagaattctgcactttgacaagatccctcggtgattcctatgcatattaagttttgtaagtaccaggagagaccacttaagcaggtcaataattgttgtgtaagatagttccatgattagtcacgtgtactggcagcctaagcgagctactacttctatggatagacactaactcctagtcttctataaatagtaatggtgatccaataagaaaacctctgcattttcatcaggaaat

SEQ ID NO: 104007 - DNA, 474 bp, Homo sapiens
agctgcctttaggccaatttttcagagtctagtagcttccaaatgttttggatcmagggctcactattccaatattttgtaggtaactggctagctggattggcaattacctacatggataaaagtgagcattcctgtctgtgctttttttttaaaaaaaaattaaaactagtggtttgagaaatgaatacaaatcattaataaggtactgtgagaccagagcctcttcaagtttaatttaacctggtgtgtccactcaaagatttctatcatatcttcactttaaacactctttggcccttacccttaatctaaatattagtttgtaaatacttatgtaaacaataaatgtacaaggcccataccattacttagatgctgtaaacatggttaaggactgcagaaaaataactaggactccaagaaacagcttgtatgtctgaaaatgggaaaaaagcaaagccaagccgatgt

SEQ ID NO: 104008 - DNA, 571 bp, Homo sapiens
gcaaacttccaggtagaaagccaggggacatatcctaccttctgcttctctccctctgatgactttccagggcttcttattagccaaactctgtcagaagccagaaagtaaggtgacattcctccatgtagtccataaagctcagacctctgaagcaraatattaaagagagatggctggagaatgaatctgaaagggcaaaaagtatatactggcccaattagaccgtctctttttacctcgtcctcgtatcaagtatttaactctgatactgtattagtctgttttcacattgctataaagaaataccagagactgcgtaatatataaagaaaatctgtttcattggcttatgtttccacaggctgtacagaaaacacgatgttgtcttcttcttggcttttgaggaggcctcaggaaaattacaatcatggtgaaaggcaaagaggaatattccacaagtcccctgggcttgaacccccacccaatcccacactgacaggattctcctgtgggacgtccccgattctggacaggcagctctcttattgtttactagaatcaaggcaaa

SEQ ID NO: 104009 - DNA, 484 bp, Homo sapiens
aaatacaggagtatctgatgaaagccattccattcagaggaggatgctcctccttctttatgcttttttccaaaatacttcaaaaacaaccaccacaaaaagacatgtggccaatctgtctcctttgagagtccactcgctgagcttggaggggtgcttcctgttcttagtcacagatattatctagatatttctaatgccccttccttcccccmgtcccacctgcaaactggaattgaagaaagaagtgtctcaaaaacattaaatcctctcttgcctggcgagatatctttattcctgagtaactcctccaaataacacccctgagtctctgaaaatgtaaaaattgcctgtctagttgaggcaaatgaaggctaaattgagtcataatttccctctagattctcattcacctctagctgtaggaagcatcaccaatacagaattgatgaaaagtgtataaacatattatccagattctcag

SEQ ID NO: 104010 - DNA, 484 bp, Homo sapiens
aaatacaggagtatctgatgaaagccattccattcagaggaggatgctcctccttctttatgcttttttccaaaatacttcaaaaacaaccaccacaaaaagacatgtggccaatctgtctcctttgagagtccactcgctgagcttggaggggtgcttcctgttcttagtcacagatattatctagatatttctaatgccccttccttccccccgtcccacctgcaaactggaattgaagaaagaagtgtctcaaaaacattaaatcctctcttgcctggygagatatctttattcctgagtaactcctccaaataacacccctgagtctctgaaaatgtaaaaattgcctgtctagttgaggcaaatgaaggctaaattgagtcataatttccctctagattctcattcacctctagctgtaggaagcatcaccaatacagaattgatgaaaagtgtataaacatattatccagattctcag

SEQ ID NO: 104011 - DNA, 484 bp, Homo sapiens
aaatacaggagtatctgatgaaagccattccattcagaggaggatgctcctccttctttatgcttttttccaaaatacttcaaaaacaaccaccacaaaaagacatgtggccaatctgtctcctttgagagtccactcgctgagcttggaggggtgcttcctgttcttagtcacagatattatctagatatttctaatgccccttccttccccccgtcccacctgcaaactggaattgaagaaagaagtgtctcaaaaacattaaatcctctcttgcctggcgagatatctttattcctgagtaactcctccaaataacacccctgagtctctgaaaatgtaaaaattgcctgtctagttgaggcaaatgaaggctaaattgagtcataatttccctctagattctcattcacctctagctgtaggaagcatcacmaatacagaattgatgaaaagtgtataaacatattatccagattctcag

SEQ ID NO: 104012 - DNA, 581 bp, Homo sapiens
catgtagcccctgtaggaatttgagtttgaaacccttggtacatgactcaataaaataaaagtttcataaattcagtgtctgttccctctgtactagctgctttgaggaaatataaaacaaaaaataactatactcatatttctcaaacagctgagtctgttggggaagataatagcaaaacatttaagaacatatagtactaaaatgacagtaactatagyatatattttatggctttttatgtcttagcaagctattttgcattcatcactgcagcaggttctttcaggagccccatgaaataatcaaaacagagattatagttcccatttttcagataaaaaaactgagatacaaaaatgtaagttgcctgaccttaaggcacaaggtaagtcacaggtagcataagcttcatggaagactgttttccacagttttacatcctacacagcaccacatagagttgacttttgataaacatttccaaattaataagcaaaagaacctctgtatcaacatatatattgactcataaacatgggcagtaaaagaagcttatagttcagaacaatcagaagcc

SEQ ID NO: 104013 - DNA, 581 bp, Homo sapiens
catgtagcccctgtaggaatttgagtttgaaacccttggtacatgactcaataaaataaaagtttcataaattcagtgtctgttccctctgtactagctgctttgaggaaatataaaacaaaaaataactatactcatatttctcaaacagctgagtctgttggggaagataatagcaaaacatttaagaacatatagtactaaaatgacagtaactatagtatatattttatggctttttatgtcttagcaagctattttgcattcatcactgcagcaggttctttcaggagccccatgaaataatcaaaacagagattatagttcccatttttcagataaaaaaactgagatacaaaaatgtaagttgcctgaccttaaggcacaaggtaagtcacaggtagcataagcttcatggaagactgttttccacagttttacatcctacacagcaccacatagagttgacttttgataaacatttcyaaattaataagcaaaagaacctctgtatcaacatatatattgactcataaacatgggcagtaaaagaagcttatagttcagaacaatcagaagcc

SEQ ID NO: 104014 - DNA, 630 bp, Homo sapiens
ctgagactgggtaatttatagagaaaaagaggtttaatggacttacagttccgcatggctggggaggcctcataaccatggtggaaggcaaaggaggaaaaaaggcacaccttacatggcagcaggcaagacagcatgtgcagggaactgctctttataaaaccatcagatctcacgggacttattcactatcacaaggacagcatgagaaaaacccacccccatgactcaattacctcccactgagtcccttccacaacacatggagattatgggagctacaattcaagatgagatttggrtggggacacagtcaaaccatatcaattgtgtagtgcctaccctacattggattctgtggtgaacacttagatgtaaagcaaagattgttacacttagtaacctacaggtatatggttatatctacatgactttcacccagctttttctttccctatcctccaatctttttccttctagtttctgatcaaccagtcaatttatttgctacactaaagaactcatttatatttttacctttggccacgtctttctctccacaaagtagatgaccgagtgtactgcttaaagttctgcccaaatgagaagtattttccctaccacaaggcc

SEQ ID NO: 104015 - DNA, 580 bp, Homo sapiens
ctatcagtttgaatgagactttgggtgtaaatgagtcattatagctaatgagaagtgtgcttacactatgcgttgtcgttgctcttgagatatctgaccattttattgtttctggcctggggcgagcacaaatgaatgaacaatggttgggatgtcgatgatgtcaatttgtgccagtccacctctcccattctcttctattttgatatttaaataagtattggggcaggaattccaaatatcatatcttcatgttggataaaagaggttttcattctgagttggctcagtgagtggtctcttgggttgaagcagaaccatctgctacttctgttttgattttcacagtcgaatgtacaccttactacataaacataatctatgtattcttaataaaatgacaccctatttatttaatgaaaattcggaaggtgacagataaatggccagtcatatgatcaaaagggggtttttcatttggtttaaagctcatattcttgttgagaacttagcttttaaatttatttrtaaagaaatgtaattaaattgattttttcctgctaatccagaaacataaaat

SEQ ID NO: 104016 - DNA, 536 bp, Homo sapiens
aaattgattcaatgactgatatttatagaatgttaattttttaaaaagggcaactctgtgtggagttcgaaagcttttggcatccttgcctgccctacacaataagaacccagaaaccattctgcacatcaaatggaaacccaatcttataaacctaaataataactcctagtactgatgctctattattaagctttgctgagtcaaagcacttaaatagaattaacaaataaaattttcaaagactcccatgaggtaggtaaatgttttcttgcttatttcttcaragaccacagttcagggtacttgccaaagctaaaaggtcattgttgctgagctcaagagtgccaagaattttctggttgctaatccagttcttagatgattataattagagcttgatataaactatgcctagttttgcatttggttcaaattaacattaaaatttcttgacccatttaaattattttacacttaatggaattgtagagttggaaatgttttgaaaatgatctagtccaaactcttcattt

SEQ ID NO: 104017 - DNA, 575 bp, Homo sapiens
tttcttttgatatttctatgtgtgtgggctgactgatcacaagaagcttaaggttgactggttgagagtgagcaatcaatctaaacaggagcatccaagtatctttgttacagcatttagccttacctaaattacaccagaggtggaaacattgagcagagggggacatgtgcactgcttgaatatggggctctggagtcacaaactggggctcaagctccgctcctgccatttactcatcctcttatctagggcaagtgtgttagtccattctctcatggctataaagaaataattgagactgggcaatttataaagaaaagaggtttaattggcttatgttcctgcaggctgttcagcaatcttgatgctggcatctgctrggcttctggagaggcctcaggaaacttacactcatggcagaaggtgaagggggaacaggcacatcacatggccagtgcaggaacaagagagagaagggggaggtgccactcacttataaactaccagatctcccaagaacttactaatgcaaaaacagcaccaatgggatggtactaaaccattcaagagaa

SEQ ID NO: 104018 - DNA, 567 bp, Homo sapiens
agttaatatgacattatatatcttatggaggagccatcagcagatcatctgtggcagattgtggaatttgagtgaaaagatgaaccactataaaagccaaaaagcaaaaaacaacacaaaaccccaataaacaaaaggttggtccaactgctgtttgcctgaagctggcatctgagaagaactttcccagaaacaaacaacacctgaaattaccatgtgtaaatatgatgggaaggaataactatgacagaaacttgaaaaatccagggtcttactgtttgcttcttgcagctttgcatgygtgtagtttcttctctaatatgcagaactctttaaagtaaaagcaacaagggaacttctctaggactctcattcccttcttggatttctgcctgtccaccatgatttctcctgtccacaccatatctgcaaggtgggccatcctgaattcatcatgttgtctttattctatcattttaagactttgtagatttacattaaacccttcaaagattttcctaattgagaattcaaaatctagaaatattaattgaaatattatatgac

SEQ ID NO: 104019 - DNA, 553 bp, Homo sapiens
catttgacaagttcctacactctgtcaagtgttccttacattgataaaatctcagtaagtcagtgataaagaggaattacttcaacttgataaagaggactgcaacactacaaaaaaaccctacagctaaaactctacttaatggcaaaagactaaatgctttccttctaagagtgggaaccaggcaatgatgtgggttcttactactcttactgaacatggttctggaagtcccttattataatagccaaaaactgaaaacaatcaaaatgctccttaatagggcaatgtttaagcagtagtatatctatactacggaatgctattcagtaataaaaaggaaaacactatttattaatgtaataacttggatagattgcaaggttattatgcagagtgaaaaaaaagccaatctctaaaggtcacatactctatgayttcatttatgtaacactcttgaaattatagagctgtaaaacagattagtggtttccaagagttaaagaggagtttgaacctagaagggagatgggtgtggctataaaaggcaaca

SEQ ID NO: 104020 - DNA, 687 bp, Homo sapiens
tcagcaatttgagctgcacggttctcagtaggtcatgttgtttcatccgtggggcctcagctctcactgatgcagctcctagtaatccaacatgaaatttctttttttttttttttttacttttattctaagttcagggatacatgtgcaggtttgttatgtaggtacacttgtgtcatagcggtttgttgtacagattattttgtcacccaggtactaagcctagtacccactagttatttttcctgatcctctccctccttccaccctccactctcygacaggccctgtctgttcttcccctctatgtgtccatgtgttctcatcgtttagctcctacttataagtgaaaacacacagtatttgcttttctcttcctacatcagtttgctaaggataatggcctctagctcaatccatgtttctacaaaggacatgatctcattcttttttatggctgcatagtattctatggtgtatagatatcacatttctttatccagtctaccattgatgagcatttagattgattccatgtctttgctattatgaatagtgctgcaatgaacatacacatgcatgtgtctttgatagaacaatttatattcctttgggtatgtacccagtaatgggactgctggttcaaacagtagttctcgttttaggtctttggggaatcatcacact

SEQ ID NO: 104021 - DNA, 621 bp, Homo sapiens
agtgctcgaaacatttcttttttcctttttctgttaaatcagtgaaagaaaattataatcaatttctttcttggctaatctcttcctgagtaatttttctttctttttaaatagctccttatctgcagcttttctaaaagtgttcaattctgactgtttcatttcactggatatgatggctttttacatggaacactccactctctgaaaagttcttcatgtactttttcaagtggtataaaatgacacttgaagagtcttttaccaaaaaggcrgttcattgttttggcaacttagcaatatcattagactcaaactccacaaaagcatagttttggcattttcaggctttccacttctggagagcttgaatcttgtaatcatgtcatacttggagaaatatgctcagatctgggtttcataaagcgctggaggtatgtgacctacacagataactccagaagacagtttttcttgctcctgtcattgggctgacaaagactctatcctttgagcagaactttggccaggctcctctgaggcctctgcttgactaggcctgcccttgggcttctctctctgtccttgtagaatccagtttgagcaagaatcctgtgtagt

SEQ ID NO: 104022 - DNA, 595 bp, Homo sapiens
gttgcacattttataaattgcatcacacccaagtgattcatgatatctcattattccttattattaaaaatatatttgccaatttaataagcaattcctaggtattatcaatttttatatttttgtcattgttttaatttgtatttctttggttaaatatttgccttttgaagatgatgtgaacaggcaagagagaaatacatagaaagtaaagtgagaagttggaaagattttcatggctggagcaggaagaaagtgatgacagatggggccattgtgatggcctttgctttcttgtttcagtctgtcctggtcccaagccctaatttatttggtctgtttgagacgatggcagtcacactgaaattcagatcttcttgcyagtagcatttcatttcctcaggttgctgcagtgtgtgcagtggtggaggagctgagcgcttgcagggagtccgctgtgatatgctgccggaagctgtgggatggcagcctgtggtcctgcggctcctggctggtgcttgccaatggatgaaccctctctttaagcccagaaacactggtcctgctagacactgtaaaaatgagcatctccttt

SEQ ID NO: 104023 - DNA, 205 bp, Homo sapiens
ttttacagacagatcatcagtttcaactccttcgtgtcgcctatgaggaaaacaaggctcaaaaacattaagggacttgctctaagtcacayagctagtcagtaaagacttggtctggaaacaagtcagcaggtggggtgggcagcaggcaggagagagaatgtccaggtggaccaccctgtgacagccctcttctccttggagc

SEQ ID NO: 104024 - DNA, 570 bp, Homo sapiens
acgtcttgcccaattccctcttgctatgatggcatacatttctctatgtacggatgtaccaggaatgcctgcccatatgttggcattcttggaagcttggaccttcctagctgatgttttcaacaccagtgccctctctactgattcaatggcatttttccccccattttttttttttttttttgattcaagaccctgcctaagggtcaggcaacattttcatcactgcaatgttgacctcattctcttctcagtttcccaacatcaatgtagaggcgcagctggagttactcatgtccatcacatcgtctcggggtcctactccaacaatacaatttttcttgctcctrtggccagccaatttaacaatatttattgtacgtatgttggatgcctaatactacattgtgctggacaatgtagcatgtttaagaaatagaacatggtgtctatctctatggtttcacaatatctaatactttgtgtttggtacgtggtgtgaacttgtgaaattctttattagaaatgtatttaaaggagatctcaattaaaatccattataccctcacc

SEQ ID NO: 104025 - DNA, 609 bp, Homo sapiens
tatttatttcttgcactataagaagagataataataataatttgtctactcaacttggttataataaggtccaggtgatataatgaatgtggtaatacattggacactctaaagcattacttacatattattaatataaccattatttatttataattccatatgatcagatgaccagaggaatttgatgaacctactactattgatattttcttgcaaatgtgtttgtaggaaattgattatattttttacagataaagcaagctcgttttcaagttaaccagaaatacccattaaagtcttaatcacaggttaacccttgtttcctaaaagtatttagaacaccatttgtttttattgcaatatgatacagtttggctgtgtccccaccaaaatctcatcttgaattcccacatgttgcgggagggacctggtgggrggtaattcaatcatgggggcaggtctttcccatgctgttctcatgatagtgaataagcctgagatctgacagttttaaaagggggagtttccctgtaggagctctctctttttggctgctgccatccatgtaagacgtgacttgctcctccttgccttccaccatgatga

SEQ ID NO: 104026 - DNA, 627 bp, Homo sapiens
tcttgacagtatgtatcattgtataatgtttttattcattatatcaaaatactttacatattatatattcttccacgttatcattaaaacattttttagagcatttcattgcatcactggacttcaacttaatcagttgcatattaaaatatacttgtagctaaaatgttctacatagctttgtttatttccttgggataaatttctataagaggaattgcctggctccatggttttctaatttaatatgtgttggcaaggtattaatcaaagaggtaccacaaattttcactcctatttgcaaaaatctagtgtaccaccactatcctcctttgccgaacagtgagtattatcattcttttaaayatttgctaatttcataggcaaaaagtatatcagtgttcttatactttgtatttctttcactaatagtgaaactgagtttttaagaagtctggtcattttaatgtcttctttgcaaattgtcagttaatgtcctttaagacctatatatttggggaggcaatatacttacccctttctgtttcatagggctgttgtaagaattttttgaagtaatctatttgaatgtgtttgaaatctacaaagcaatacacaaatgtattg

SEQ ID NO: 104027 - DNA, 627 bp, Homo sapiens
tcttgacagtatgtatcattgtataatgtttttattcattatatcaaaatactttacatattatatattcttccacgttatcattaaaacattttttagagcatttcattgcatcactggacttcaacttaatcagttgcatattaaaatatacttgtagctaaaatgttctacatagctttgtttatttccttgggataaatttctataagaggaattgcctggctccatggttttctaatttaatatgtgttggcaaggtattaatcaaagaggtaccacaaattttcactcctatttgcaaaaatctagtgtaccaccactatcctcctttgccgaacagtgagtattatcattcttttaaacatttgctaatttcataggcaaaaagtatatcagtgttcttatactttgtatttctttcactaatagtgaaactgagtttttaagaagtctggtcattttaatgtcttctttgcaaattgtcagttaatgtcctttaagacctatatrtttggggaggcaatatacttacccctttctgtttcatagggctgttgtaagaattttttgaagtaatctatttgaatgtgtttgaaatctacaaagcaatacacaaatgtattg

SEQ ID NO: 104028 - DNA, 452 bp, Homo sapiens
ttttagtagaaatgggttttgccatgttggccaggctggtctcgaaatcctgggctcaaatgagccacctgccttggtctcccaaagtgctgggattacaggtatgagctgctgcgccaggccttaaacctctcttattcttttaagaaccacctctctaaagaacactggcttaatgaaaaatatgtgctctttattctattgcttggcttctttagcaatcattcatttttcaacaaatatttcatgatcacctactatgtgccaagtcttgtgcgaaatyctgatgaatgaattgtcatagctcttgcatttatggaatttaaaatggacatgactttttggtttcacaattttctttcccgttgtctcttgtagatgtatttctaaatttttgtgtttgttttctcaatcatattacaagttttctggttacaagtttcctttgtcct

SEQ ID NO: 104029 - DNA, 522 bp, Homo sapiens
ccacaaggtaaaatttactgtactttaattattttttaattttaaaaatgaaaagccctattatatctaaagtaggaagagttataaaatagagtaatcattatattttaattttaatttatattaatgaactgtctttttaatgcctataatgtctaagtcatagttcatttccaaacgaaattattatgagtctagaatcagaagtgtggtttaaaatagtattttacacttcctgttaagtcrtcatcaattcaattaggttgctgatctagatattcattttcccactggtctttcaactaatgttcctcactcctatatggtgcctttatttcctctagtctttttacccagcaccctaatcctgctccagggtataggctctttctagtggatgtgtgtgagattcttccagctctccatgaagagtgagacaggaaagaaaaccccatccagtcacttcagccttaaagggccttctttgtttttccaatgagtataaaaatgtatgaatactac

SEQ ID NO: 104030 - DNA, 522 bp, Homo sapiens
ccacaaggtaaaatttactgtactttaattattttttaattttaaaaatgaaaagccctattatatctaaagtaggaagagttataaaatagagtaatcattatattttaattttaatttatattaatgaactgtctttttaatgcctataatgtctaagtcatagttcatttccaaacgaaattattatgagtctagaatcagaagtgtggtttaaaatagtattttacacttcctgttaagtcgtcatcaattcaattaggttgctgatctagatattcattttcmcactggtctttcaactaatgttcctcactcctatatggtgcctttatttcctctagtctttttacccagcaccctaatcctgctccagggtataggctctttctagtggatgtgtgtgagattcttccagctctccatgaagagtgagacaggaaagaaaaccccatccagtcacttcagccttaaagggccttctttgtttttccaatgagtataaaaatgtatgaatactac

SEQ ID NO: 104031 - DNA, 607 bp, Homo sapiens
gtgtgttttgggtagggttatatttttgagatacttgtacccattttctttcctatcttgggtcagttacagacttatgtatgccatagcctgaaccattgcctcaaaggctttsctgcagagaaatctcctttgtgagagggaaatttcaaagaagcaaagctttggaaaaaaatctatgaccctttgtcaggtctgtccatgttcttggtacaagtaagataaattatgattaactgaaacagaaaaggcatctagtagaggaacatcaaggtgtttatagaatgaatgagagggctagagaagcaggcttgatctcagggaagacgggcagcagccaaggtcacaatctgggaagagtctggtcacaccccatggacaccatggatatcactactgccagaacctctagtgaacactgctacaaatagacaacaccaccatgccaccacgcatttcctctttcaagaaattctaaattggccttgcaatgtatcatttaatcaagctttgacgacacagatagggccctccagttggcctggagtgagttcaatgccagtgtcctggattccagggaggggtgggggctcttcttaccaggatc

SEQ ID NO: 104032 - DNA, 586 bp, Homo sapiens
tctcttatagtgtacagcttttcatataactgagctgtattaaagcttgttcattcattttgcagagatctatgtgagagtcactttagaaaactcctaaccagcgtcaaacatgtctaatttttgtacctcaatttaaaaatcatgttataaatgactagcccattcctatggcccaagaaagacaagtatttaaggggctcctgaaatattcctttgtaacttttcctgaatttaaaggagaaagaaaatagatttaaaaaaawcctaggttgtataaagagtggattctaggaatttatatcctcttttaaaataagcccaaacagtcttgactgcttcttaaaatgtttagaacctgctattacttttgaatatttttcttccaatcccctactcttatctctagatgtctggttttttttttttttgcttgtttgtttagtgatattctgcattcatgaatatgatgttcccttagcgctttagtcattttttccttttcacatccctcaacaccttcattattatttgttcaatgtcaaggcagacattgatagattttgtagtccactaaggtaaaatc

SEQ ID NO: 104033 - DNA, 575 bp, Homo sapiens
atatgaattttaacatggaattaaaaaaactgttttctctctggaataggtaagtttaatctctactagacyaaatttatttgcatgtttataagcaagaattatctgtgttattctgtgttctacaagtaaacttttattaaaagtatctctacagagtttagtcagtaacaaacatgcatatccctgtagaatcaggtaatttccagaggctccagtatttgattgaaagatatacagtaacctcttttgctaattccaaagtcttaaatttttgcttaaacaaaaattgggtaattactggaagtcgtataaataacaaatggcaaagctaggattttcacccttgcctgaataacctctgctatttcttatttatatttctttttcaaatgtcttgaatgagttatcttctgttgctctctgtattagtccatttccatactactaaaaagaactgctagagaccgagtaattgataaagggaagaggtttaactgactcacagttcagcatggctggagaggcctcagaaaacttacaatcatggtggaaggcgaaggggaaacaaggca

SEQ ID NO: 104034 - DNA, 583 bp, Homo sapiens
tattaatacttttaaaaatgcagttgttagatgggtctagtattggtcaaacaattccttaactgcagttaaccctttgacaatgacagtatctttattataagatgtacaaatttaagtgacctgtattgcaattatttttctttctctcttatttttgagaactctggaatttaaacttatataaatatataactgactccaaactcaatttaagtactcacttaaaaactacattttactctgcttttgtttagcaaaacaatttcattcagcaaacatttttgaataaaataatgtgccatgccaacagtctatttctgggatctaaaaaaatcacatttgctatttttctcacaattaaaataattttagacacagaaaccactgtaaccttttcttagaatacrtaaatgttttcctacttaataactggccattgtttcatacctgtttttattaagtgcctatgagtttgaaaatgacatataaagttacatttttttaaagatgaaaaatgttccaagtgtcttaagtttaagaagctgagctactgatagttacgattccctagaaaagtaac

SEQ ID NO: 104035 - DNA, 590 bp, Homo sapiens
ttttcaataggaagagcttttggatcagtgagaccaataaaaagtttgttttatcatttgattcacattttcctgagctcagtttttaaaaactatcagaaaagagattcggtatatttggtttgcaatagcacattgcaaatagcatattaatgtacatttgcacatwaaaaggcaaggttggggggccagttttttcccaggctacataaatgacatacttggtcagaccaatctcctggaccctatgcaaatcagacaccacctcctccagcttcctaatataactggctgttccccaccccccacccccacacttggggatccctctctctgcttggggcccacttccttctgtctctgtacagggagctacttccctctttcttgcctatgaaacccactaatatataattaaattgtatatttcaaaacattttgaagcatacaaatgactataaatttataaatagtaatttgacaaaatgttttacatataagtaattgaaaatatatcatttttgagataattcttttatgtgagtctagttaattagctcattttctctgttaaacatatataatgcaca

SEQ ID NO: 104036 - DNA, 432 bp, Homo sapiens
ttgagataaaagagacagaaatcagtcccttggacagctcccccaaaagccaaaacacctgtcctgttcttttctttgcaacctgagcaatagaccataaagtcattatcagcgtctgcctgctgtactgtggtccctctgaagcaacagcatgctattcagctctattgttcgtagtggcccccaggcagccagagyattctgggtcccatcagcattccaagaaagatcagacagaagctgatccccttggcagcttccactaaagtcagaacattgggcatgtatttccatcttctcttttactccctagggagaagccaggagctgagtgtttcttcctgatcatgtggcattgtgccagggaaaagtactgtggcaaaagagaataggatgctatgaatttttctactagctttgatacaattggtt

SEQ ID NO: 104037 - DNA, 634 bp, Homo sapiens
ctttgaggttggggaagccagagagtcaaattccaagaggtcaacaggtcacacagagtagaattatgacattggtgacttcactctggtccaacttcacaggcccagagactcaatcttgtcaataccctataattagtcagatgtgttggatgactcacactaactaaattcacaggagattgaagtgtataaatcataaaggcagcatgttatttgayaataaggaatgtaagagccaacataatccaacactcctgtcttcttgccagagtgcttttttcccacaaataaccagaaatagattttatgtacatgggatcaggataagttacatatttgatctgaggctttactagcatttctgcaatagaaataagtgtgggctagtaaacagtgtctacttatctctgcttggatggaccgctgccaacatttgtctttctggttatattgctcatgattaatacatttttctttgtgtttccaaatacattactctagttacaatctagtctttttttgagcatctttaaataacattctaatatgtggtggatataataatgaagtgccatttgaacactgtagggaaagatttgtactgatttagttttttacaactatatttacc

SEQ ID NO: 104038 - DNA, 548 bp, Homo sapiens
agaaaaatagacccttccctgcatgggatgagtggcaaagccacatagcaaaaggatgtccttgccaggatggcaggagtttgtggcggttaaacagtctgctacagggagattcttctccgaacaaaccgtttgaagatagtctttgtgtgcaaaacagccttttacagtttcacacactttttttttttttttttgcaaaatctaagatttttttttccaattgaagttagagttttggtgatcaaaactgacatttatgttggcccttactaggtgggaaaagccagctggctatttcagtcttatactaccctggccttaccacgctctatcctcagttcttaatttcagaaacgttaccattctttttctaacaaaaaagtagtattgtaaggactcaatgaactaatctgtatattatcctgaacagagtgccttgkgtgtatagtatacattcggttcaggcttgcttttttgtttcctcctagttctcccgagtggatcaagctctgggaatgttgtaaaaactgacttggctagaattc

SEQ ID NO: 104039 - DNA, 578 bp, Homo sapiens
gagccttgaagtatatatcattaacttttacttgtgtgtatattttctttatcttctagagttctaatttgagaacggcattcctctatcagacatttaggtggcttttctgttttctgctgtttstaatggtgtagtatgcattttccctgccaagagcagttgaaagtgccttggttggtctttctcttcttcaccccctgttccccctgggcaaatgtgaatgcagagacactggagaaaaggtatgccacgagagggggctgttccacccacaccaagcctgttccacccacaccaagcctctgccctaagagcaggagtgggtagaaggcaggctgaccaggagacagaatctggtgccaactcctaaggtagaaattcgagctcctgccccctggatgagtcccaagtctgacctagtggcacctctgggtttctggattccttggatggggaggtttccatttaaatgcatccttatttagaaagatgcccatttgagaattaatgctctttttcttcaacaactccagataaggccccattggaaataaaagtcaaaacactttatttat

SEQ ID NO: 104040 - DNA, 645 bp, Homo sapiens
tttagtgtcatctccctgtattggacaaaacaaatagataaataaaagcaaataagggtatcaagaattaaataaaacaaccacattgcaaatagaaagtcttaccctgaaaaataaagcaccataccctgcaaatggaaaataaacattcmttcaaatacacatgaaacatattctcatatatgatggcttaaaaaagagctcagtaaattataaccatattcttcaagtgcaggcagccaaaaaaatacaaattaaacataaattagactaccatagaatctattaacttgggaagttttacactgtcttttaaataactattgagttgaaaaggcaatataaaaagcaatctggttagaaagggagcttcaaaactctatttgtaaagcactttatttaagaaggagaaaaatctctgcctatgtcaaatagaaggtttgaagaccctgaaggggtttacgggaatctagatttctgctctctcttacactttccatcacatatgctctaaaaccaaacaaataaaacccccaaaactaacctatgataatcaactactgatcagctttgaagaaaggaacacttttatgcactaatgataagactttacattggtaattctttaagaaggtcaactctgta

SEQ ID NO: 104041 - DNA, 564 bp, Homo sapiens
tgcatacatttattgggtacatgagatgtgttgatacaggcatgcaatgtcacataatgaagaatggggtagccatcccctcaaacatttactcttttttgttacaaacaattcagttatactctttcagtcattttaaaatgtacaactgaattatcattgattatagtcaccctgctgtgctatcaaatagtaggtcttattaattctttctattttttttttttttttggtaaccattaacmagccactccttccctttagcctccactacctttcccagcctttgtttagcatccatgtactctctatgtccatgccttctgtgcaaacattgcagttgtttctgatgtattcaacttaacataataatctccaattctatccatatattgctgcaaatgacaggatctcattttttaatggctcaattgtactccattgtgtatatgtaccatattatctttatctattaatctgttgctggacactcaggttgcttccaaatcatggctattgtgaacagtgctacaacaaacatgggagtgtagatacctgtttgat

SEQ ID NO: 104042 - DNA, 382 bp, Homo sapiens
cccacacgcttggcttagcagaatacctatatcacttaagtttttctgcaagagaaaatcctccaaaactgcattagatatttgtgtctcatgtgtctttggatttcatttttgtcagctaggtttggtggatggctgtggtgattggagatgggccacattctgcatcttgaagctactttggctgatttaggctggataaagcagtggcattctgactccattagtttctcattcttcttctgggaacagtgtactcaccagatgatgttctcatggtgaatggaaaagagcaagaaactccaatatggaaaccgtcttaaatctctgtgtaaagtctactaatttsctgttcactgaagcaaattacatgagtgaattc

SEQ ID NO: 104043 - DNA, 590 bp, Homo sapiens
tccagcctgggtgaccgagtaaatcttaagtgacttygggttgggcagctatttcttagatatgacacctgaagcagacaacagaaaacaaattagatagaccagagtttatctaattaattagacaaattagataaaacagagttgcaaattttgtgcatcaaagcatgccatcaagaaagtacagcccacagaatgggagaaaatatttgcatatcatatgactgataagagattagcatctagaatacataaataattattacaacccagtaatgaaaaagacaacccttaaaaatgggcaatggatttgaatagacatttctccaaagaagacacacaaatgaccactaaacatatgaaaggatgctcaacatccttagttattaaggaaaggcgtatcaaaattataatgaaatacctcctcacaccaactaggatggatataataaaaaagaaaactacaagtgttggcaaagatttggataaatttgatcttcatacattgctggtgggaatgtagaatggtgcagccgcttttgcaaacattatggcagttcctcaaaatgtgaaaagtagaggtgccatgt

SEQ ID NO: 104044 - DNA, 570 bp, Homo sapiens
aataactattcttggcagaggtcacaacaaacttaggaaaaagccactgtaaatgtcctctgagtgctgtgtgttgtatttcctgctagtgcactgtcattagctctcatgcacagacagtcctactttgtgcaagatcccacttgactctcctgtcagcattaggctgttgaacagtaccctatcctcatgtcccgctgtcctgggcaatttccccagcatctcaaccaacaaaggaaacactgcctacaagatccaaattttcctcatgaataacatttatttaggatacaaagataccaaaagcaagaattctcaaaatgaaaatattttygcttgatgcagtggttgtttaagaaaacagacaaaaattcccatccaaaccaactcagaagtgtttccaaaatactcactggagtccaaaatatgactccagtcataacaccagatgggatggaagtagatgctattttacccactttccaagtagacaaagtaaatttgccttgcgccattgcatgtagactgatagagaagctgctcatgtgtatactgtgtggtccttttaaa

SEQ ID NO: 104045 - DNA, 533 bp, Homo sapiens
tcccagcaagaccaatgcagaaggtgggcgatttctgcatttccaactgaggtacccggttcatcccactggggctggttagacagtgggtgcagctcatggagggcaggcagaagccgggtggggtgtcagctcaaccaggaagcgcaaggggccrgggaactccttcccatagctaggggaggccatgagggactgtgctgtgaggacctgtgctatcggcccagatactagccttttcccacagtttttgcaacccgcagaccagtagattccctcaggtgcctacaccactagggacctgggtttcaagcacaaaactgggcagctgtttgggcagacaccgagctaactgcagaagtttttttcataccacatgggcacctggaaccccagtaagacagaaccattcactcccctggaaagggggctgaaaccagggagccaagtggtcttgctcagcaggtcccacccccatggtgcccagcaagctaaggtccactggcttgaaattctcactgccagtccagcag

SEQ ID NO: 104046 - DNA, 372 bp, Homo sapiens
ggcagctagccagcagtcattgcccacagttccattcctcagtttgagtctttctcaatgggctaaatgactccatttcttcatataastgagaatcaaatctcctctgtagctcaggattaactttggcaatgagttgcttcctctcttctctacatactctttgtgcaaagtgtgacatccagaatgacagcaatatcccagtagtcttctgatctagtgagcagtgatgttacctcctcttttattcatatttttaattcactaaaattttactgggcagctactatgtgctgtactccacacagggtgttggaggtacaaaatgaaccacaagacacagctcctgctgtggtgaacagctttgaataa

SEQ ID NO: 104047 - DNA, 668 bp, Homo sapiens
acataatgtctctcagtttcatttatgttgctgcagatgacaggatttcattctattttatggctgaatagtatttcattgtgtatatataccacatttgcttcatctattcattcattgatggacagttaggttgaatccaaatcttggctattgtgaatggtgctgcaataaacatgagagtgcagctgtctttctgacrgtgatttcatttcctttggtttatccaaaagaggaattgctggctcatgtgatggttctatttttaatttctttaggaacctccatacagttttccacagtggttgtaccaatctacattcccaccaacagtgttcaagggctcctttttctccatacccttgccaatgcttgctatttttttaataacagccatcctcacaggtgtgaggtgataacttattgtggttttaatttgcatttacttaatgattagtgacattgagcatttttttcagatacttgctagcaaattttacatcttctttgaagaaatcaggcactctgctttaagcccagtaatattccagcaggcagtcttaggttgaattccctcaaagaattctcctctaatccttacttagctacccgtgcctgcaaaataccttctatttctttcacctggtaaagctatgtctagtatgcta

SEQ ID NO: 104048 - DNA, 513 bp, Homo sapiens
attctttttaggataatgggtctgtaggttgactcagagcagatggattaatacagactgggctcagctgggtggctctgcttctagctgctgattgagttgcccttgcttccttcttacatgtggggctcagaattcttccaagtgtatttattctgggacccatagagaagggcattcagctacctggggaagttattcttatrgtgatgattgaagaaccagagatcaaaccatccttgcatgcacatttcaagcctctgcctgcatgtcctgtgctaatatcccattggtcaatgtggtagtcagaatgacctccaaagatgtccataccttaattcctgaaacctgtgagtatgtcacattttatggcacatgggactttacagatgtagttaatattatgtatttaatattataaaccttaaaatagggggattatctaggattgagtggactcaatttaatcatgtgtccttaaaagcagagaactttttccagcttgagtgagaa

SEQ ID NO: 104049 - DNA, 489 bp, Homo sapiens
taattcagtttcttacctagggatgggactcaggctgtagacagctctccaccatcctagaagtggaggaaaaaaaaaaaaaactcatcttccctgttggaagtgagctcaaactccataatggagttacctgtcttctttcttcatggaaacaggaaatcttgccttccttttggaaacaagtaaaactccaaaaaaaagaggaattgtacagcaaagtaaacattaggtctcaaccaaattttgggatttcatggattctctggagtgggtgctctcagaccttggcaaattgtcctattggtttgagccatatggctaactcatgctggtaccaagcactgataggagatttgtcaaaggtcagggrcatctccactcaggatcccttcatagttaccaaaatgtgaaccccaaaaatctgagacaggtctcagttaacttataaaatttattttgccaaggttgagaatgcatgcccatgacaca

SEQ ID NO: 104050 - DNA, 631 bp, Homo sapiens
tgtaaaaaacacagctcttgccttttgctactttctgtggtttttaaaatttctttttgattcccactaatttctgaggattctaatcattcacaagacttgccagcacatgtttgcacaaactccattttgtagcagcaaccttattttcctctgagaggcagaattgtttacccaaatactcatcgtaggccactttaaaaaatatgttgtctaggtgaatcagaagcttaaattgttccagttgcaatgttaactcttacttaaataaaagcactgtttttcaccaagtagaaatattttttttcctttggacatggaatctctaattaagattcccggagattaagaaatctttttcaagtgggaaagtatatgtaataaaagagaaatattgttcattgactttaagcatacacagcactcyatagggtagcctcccagtttcatatagttgaattgtccagatagctctgcacttgaatcttcttgggccatcccacttttctatatatcacgaactactttcatttaatgaattacattataagatcaatgaagagttgcatgggtatcagactttttcttattattttgtttgaaagtgagtttcttggctaatagcaagatt

SEQ ID NO: 104051 - DNA, 605 bp, Homo sapiens
tctaagagccttaagaaaaaagaaaattggtgtagacgagctgtgcttaagatggagtttaatagtagattcattcattcattggttcatttattaaatatcaatttactgagtgccaggcactactatgaaaaaaataaggtccctgtcctagtggagcatccattctagtaaagagaaacagaaaataaacaaatacctatataatgtcccaggtgacaatggttaaaaatgaaataggtcaaggggggatatagggttagggtacgatggggtrgtaaagtgtagctgttttgtaagggatgggaaaggaagggctctcacagttctggtctgagctgagatctggaggaggtgagagagtgggccatatgggggaagaatactccaggtggtggaatagcaaatagaaaggcccccaaacaggaacatgctgggccttttcgaggaaggtcctagaaattgagaaaagcagaactaggtgatggaggacctaggtaaggaatttggatttcattctatgagctgtgggcagcctttggacagccagtgctctagaagtctagggaaggagagagcatgggacatcagaggcctcacagctg

SEQ ID NO: 104052 - DNA, 437 bp, Homo sapiens
tcaggaattcgagaccagcctgacccacatagtgaaaccctgtctctactgaaaatacaaaaatttgccgggtgtggtggtrtggctgtaatcctagctactcaggaggctgaggcaggataatggcttgaatctgggaagtggaggttgcagtgagccaagggagtgccactgcactctagcctgggcaagaaggcaagattctgtctcaaaaaaataaaaataaaaaaacagggggaggagccaagatggccaaataggaacacctccagtctacagctcccagcatgagcaacgcagcagatgggtgatttctgcatttccaactgaggtaccgggttcatctcactggggagtgccagatagtaggtgcaggacagtgggtgcagcgcaccatgtgcaagccaaagcagggcgaggaatcacctcacccggga

SEQ ID NO: 104053 - DNA, 587 bp, Homo sapiens
tggacacacttcccaaaaagagaacagcctctgcaaaggctcrgggggtgagagaaatcatgaggtgtttagcctcagttttaagttgggagagaagccaatcatcatccaagcagcagataccatggacatcacaaagaagagccaggcatggttccctgtcttgttgagcttacatgccatcaggagagacagaccagtatgtaaataaacatcagactaaatttgaacaaaaaaatgtaggaacaaataaaatataacaaggatataaagtgtgaagaaattacttccagctagagaaaatctcagaaaacttgacaaaagaggaggcttcttcttgaggcctacaaagatgggtaggaattcaataagtgaaaacgttggcagtgggagttgggggaagaggggtgcaaccattccagatgaagaatagtgggagtaaagggacaggaatatagaggatatgttaggggaatggtaagttgggctggaacaatgggtctaagagtggaaaaagagagtcatggaaaataaggcacaggattttagatggagaccaactcatgtagggccttgcctgcctggct

SEQ ID NO: 104054 - DNA, 587 bp, Homo sapiens
tggacacacttcccaaaaagagaacagcctctgcaaaggctcagggggtgagagaaatcatgaggtgtttagcctcagttttaagttgggagagaagccaatcatcatccaagcagcagataccatggacatcacaaagaagagccaggcatggttccctgtcttgttgagcttacatgccatcaggagagacagaccagtatgtaaataaacatcagactaaatttgaacaaaaaaatgtaggaacaaataaaatataacaaggatataaagtgtgaagaaattacttccagctagagaaaatctcagaaaacttgacaaaagaggaggcttcttcttgargcctacaaagatgggtaggaattcaataagtgaaaacgttggcagtgggagttgggggaagaggggtgcaaccattccagatgaagaatagtgggagtaaagggacaggaatatagaggatatgttaggggaatggtaagttgggctggaacaatgggtctaagagtggaaaaagagagtcatggaaaataaggcacaggattttagatggagaccaactcatgtagggccttgcctgcctggct

SEQ ID NO: 104055 - DNA, 481 bp, Homo sapiens
aattctctgtctgaaacgtcacatgtctctgttactctgggaatagtcactggtgtcttatttagttcatttagtgaggccatattttactggattttttttttctttwtttttttgagatggagtctcgctctgttgcccaggctggagcgcagtggtgcaatcttggctcactgcagcctctgcctcccgggttcaagcaattctcttgccctagcctcctgagtagctgggattacaggcatgagccaccgcacgtggccagagataggtacttattgtagtcttttcagtctgggcttctttgtacccaaccttattgggaaggctttacaagtactcaaagatagttgaatgttatgatctacatctttggtcattgcagctgtatctgtacctgaagataaggctgtagtattagggagtacctgaagcccaataatactgtgactcctgtgtgttcatagacatattaacttgg

SEQ ID NO: 104056 - DNA, 605 bp, Homo sapiens
gcaatccatggctacaggccatgaatcagcatataatcacacatctggccatttctttttccatgcaaagtgcacaaccaggtgcactgctcgaagttctgtccactgggaaagttttccttcactgctgtccctcagggatatcctagaaaggggctgtagtgctgcagctgtccactttcgggtgatgcctgcatatcatgcagaaccatctgtgaaccccaggacctagccttctcttyctctgtcacctgatcatagggaaccccccatgaggccatcggtatgggctgggggagaaagggtggagtggcaggaatggagaccatgggcatttaagccacttcctcatgtaacttacttgtgccttcaagacctgctctagccctatcacatatataccactttcatttaatgatggaatgccactgtgcatgacccactttacagctagatgggtcacaaagcacccacttcgtgataggcctttcacgtcacatgggggcttgatggcccatattcaaatgttcagtttccaccaaagctctgtaacacgccaaaagctgtctctcaaaagtagagtagttatctgcagaagatggcag

SEQ ID NO: 104057 - DNA, 605 bp, Homo sapiens
gcaatccatggctacaggccatgaatcagcatataatcacacatctggccatttctttttccatgcaaagtgcacaaccaggtgcactgctcgaagttctgtccactgggaaagttttccttcactgctgtccctcagggatatcctagaaaggggctgtagtgctgcagctgtccactttcgggtgatgcctgcatatcatgcagaaccatctgtgaaccccaggacctagccttctctttctctgtcacctgatcatagggaaccccccatgaggccatcggtatgggctgggggagaaagggtggagtggcaggaatggagaccatgggcatttaagccacttcctcatgtaacttacttgtgccttcaagacctgctctagccctatcacatatataccacttycatttaatgatggaatgccactgtgcatgacccactttacagctagatgggtcacaaagcacccacttcgtgataggcctttcacgtcacatgggggcttgatggcccatattcaaatgttcagtttccaccaaagctctgtaacacgccaaaagctgtctctcaaaagtagagtagttatctgcagaagatggcag

SEQ ID NO: 104058 - DNA, 619 bp, Homo sapiens
ccccctgggaaaatttttattaccacttatctcaggaccccttctctgcagggctctgatgtgacaaaaatgtccagatgatcargaaccccttggaatgtattgtaacatagagcaggagagttaaaatagccctgattaagactggaatttatactattgtcttccctgactgtaaatacattcaccccaattggtaattcaggggctgggaaagaccacaagctgagtgtgtttcttctggtcttggaaatggattccatttattgcccagctttccactaaaacaagtaaccacatgggatttggggtcatctgtatcatgatagcttggatgatgtaacccacagctttttaaaaattctggatatttccctttccccaatgtacacagatctttctagagatattatctaggtcctgcagttacttttttgaataatctctgctctcacagatctttctagagaaagataagttgtattgttgatgtttacacttgcagtagcattgcagggaacttccgcaaatgcccctgtatcttcaatcaagctcagttctgaaaactggatctagatgtgggataatgattttccactggggttgttaatgtgaggcc

SEQ ID NO: 104059 - DNA, 619 bp, Homo sapiens
ccccctgggaaaatttttattaccacttatctcaggaccccttctctgcagggctctgatgtgacaaaaatgtccagatgatcaagaaccccttggaatgtattgtaacatagagcaggagagttaaaatagccctgattaagactggaatttatactattgtcttccctgactgtaaatacattcaccccaattggtaattcaggggctgggaaagaccacaagctgagtgtgtttcttctggtcttggaaatggattccatttattgcccagctttccactaaaacaagtaaccacatgggatttggggtcatctgtatcatgatagcttggatgaygtaacccacagctttttaaaaattctggatatttccctttccccaatgtacacagatctttctagagatattatctaggtcctgcagttacttttttgaataatctctgctctcacagatctttctagagaaagataagttgtattgttgatgtttacacttgcagtagcattgcagggaacttccgcaaatgcccctgtatcttcaatcaagctcagttctgaaaactggatctagatgtgggataatgattttccactggggttgttaatgtgaggcc

SEQ ID NO: 104060 - DNA, 415 bp, Homo sapiens
aaaactgtatattcccctgttaactactcctccattttttcccatctgagaaatatcacttccatttacttacttgcttacataaatcacccattacccattttttcccttactacacacttaatgtctgtccaccatcaagttctgtttattttgcctccaaaaacatttgttatcaatactgtgttttgttatmttaaccatcacatctatagttcaaaacatttggagtaatctcttgtcttatttttcttccccacctatattttctttcttttacgcagaatagccagtgtagtcattctgaaatttagtatatgttgttcatgcatagaaacatccagttccttcccattgctcttaggttaaacctacaatccttaatatcaaccacaaaacctcattctccatttac

SEQ ID NO: 104061 - DNA, 368 bp, Homo sapiens
tggaatattttttaaataacaaatacaatttaaaatcagatatttgtaaagattttcagctgtatcttcgacaaaatggaaaatttaaatgttactaggcctgacgcagtggctcaggactttttaaccccagctctttggaagtccgaggctggaggatcgcttgaacctaggaggttgaggctgcagtgagccatgattgtgccactgccctccagcctgggcaacagagaccctmcaaaaaaaaaaaaaaaaaaaaaaaaaaaaaaaaaaggaaagaaggaaggaaggaaagaaagaaatagaaaatgtaaaagttactataagattcttatggtgaataacatcttacgtccacccatttactt

SEQ ID NO: 104062 - DNA, 399 bp, Homo sapiens
gaattccctttttctttgcattgytgggttcagactttctgaccaccttaccagtggggagaatccgagactacagttcccatgagccctcagggcaccacgtggtgcctgcccgtgctaccaacgcgcagcgaggactccatttcccagcgtgcctcaggaagggcgccaggactgcattttgctccggagcgtccagagtcctggccctgagcgggaatcgcagtggccgaggctgagcggcaggtagaaggggcgtctccggggcttcacagggaacacaggggcttcggcccaaccacaagtacgcagttgcacatgccctacttttgcccattctttgcaaatcccctaaggaacgaacgcgcctcgcgtgcgggcctttctaatcttcgcttg

SEQ ID NO: 104063 - DNA, 470 bp, Homo sapiens
agatccgaggaattcttaccctgggacatatatgaaaactagcatttcattgcaagaagttttaattttcctgtggccactgcctaaggggattttaaagcactgccgggtactgcagacatctgcttttgatggattgccagtagcatttcccactctaagagtcctcagtacaacacagccagctgtgtagtctatttaaccacagtgtgaaaactttcagccttgaaactaccagcaggtaggtcaatgggtgcctagcttcattagttaaygcaactttctatgaatttattcagtgtccattgataagtattaacaggggtctgggtgcagggaatattgctgaaggtccccaaacctactcagttccacccatgattatcagagaagagccctgcacactgaataactccacccttccccaccagtcatcaagacagatgtgcatgcttacagactaattccac

SEQ ID NO: 104064 - DNA, 565 bp, Homo sapiens
tttggcctggggcaaggtgttggggactgctagctgtcctccttgtcttttacccttggttctcagatgattcattgcagtaactgttttgggcagtgtggtcattatatgatattgagtcttctgttgaagagcatgagttgtctttccacttgtgtcctcttcaatttctttcatcaatgttttctggttttccttgcgaagatctttcccctcctcaggtgaaatttattcctaggtatttttgtagccactagaaatgggaataactccttgatttctttttcaagtgttttattactgatgtatagaaatgctactgatttcatgcattgattttgtatcctgcatctttactgaatttaycagctcgaagagttttttggtggagtcttttaatctttctgaatataagagcatgtcatctgcaaagaggcacaatttgacttcctcttttctcatgtggatgccttttatttctttatcttgcctgattgctctggcaaggacttccagtactacaattaatgagagaaaggcacagcgagttttcatatgcccctgc

SEQ ID NO: 104065 - DNA, 560 bp, Homo sapiens
tcattcagacaccttgttgtctttgaaccccatctgaggaaacacagatgtgatttttatcacccaccatggtggcttaacctccctgacagcagcatataaaacaggagctggttacattattattgctagtcctgatttccattctcacctcaaaaaagaatgggcggtggragggggaaaacaccatacaaccaaacttaccataaggttatatttctttcttttcttttttttttttgagacaggcctcgctctgtcacccaggctggagtgcagtggtgcgatcatggctcactgcagccttgacctcccaggttcaactgatcctcctgccttagcctcctgagtagctgggactacaggcatgtgccaccactccagctaatttttaaacttttttatagagatagggactccttatgttgcccatgctgtccttgaattcctgggcttaagcaatcctgccctggcctcccaaaatgctggtattacatgtgtacaccattgcactggcctatatttacaatattacccttaaggaaaatcaggccacaagt

SEQ ID NO: 104066 - DNA, 510 bp, Homo sapiens
agaaaccttaggctgatatgatggtattcaagaccacaggcatccttcacagttaaaagaatacagagccctgagctcaggctggacaattcccattcagaggattaccagaataaagcttggatattagatatccgatctagcattgtagggatcttgggcgttktcatatttgtcttttatccacaacagctctgagcttggacactgctcccacccacccttaatctctatccccatgcatgaccattttccttgctggccatttcatgactgcattgacctcaagagctggaagggatatgggggtctatgcctctacaactttactttcagtgtgcaggcatctcggcatgtctcataatgccttcttttgcctcacaggccaaatagctacagtactgtagtatctgagagtgacacaaagggagtcctgagatggtctctaaaaagctttgctactagtttacccagttaaagattattagggtatgatatacagtggatttt

SEQ ID NO: 104067 - DNA, 510 bp, Homo sapiens
agaaaccttaggctgatatgatggtattcaagaccacaggcatccttcacagttaaaagaatacagagccctgagctcaggctggacaattcccattcagaggattaccagaataaagcttggatattagatatccgatctagcattgtagggatcttgggcgttgtcatatttgtcttttatccacaacagctctgagcttggacactgctcccacccacccttaatctctatcmccatgcatgaccattttccttgctggccatttcatgactgcattgacctcaagagctggaagggatatgggggtctatgcctctacaactttactttcagtgtgcaggcatctcggcatgtctcataatgccttcttttgcctcacaggccaaatagctacagtactgtagtatctgagagtgacacaaagggagtcctgagatggtctctaaaaagctttgctactagtttacccagttaaagattattagggtatgatatacagtggatttt

SEQ ID NO: 104068 - DNA, 554 bp, Homo sapiens
aaatgagttaaaaatgtatgtccacacaaaaacctgcagacagatatttatagcagctttattcataattgccaaaattggcaatcaagatgtccttcggtcagtgtatgcacaagtaaactgtagaaaaaaaaaagcaaaaatcaaataataacacctaaataaaagatattcaggtcagagaggaggatgtaaacctgtatttattaagagatgacatggctgcgtatgtaaaaaaaaaaaatcctaagaatctacacgacacttgggataaataratggatttagcaaggtcagggacaccaagtttaaaatacaaaaataaattatgctttatataaaaccagcaaataatttaaaataccattacaaacaattttatttatcataacactaaaacaaagcataaaatatctaaattttatggctgggcacaatgactctcgtgtgttatcccagcacttcaggaggccaaggcaggcagattgcttgcactcaggagttcaagactagcctgggcaacatggtgagccccatctctactaaaaacacaa

SEQ ID NO: 104069 - DNA, 554 bp, Homo sapiens
aaatgagttaaaaatgtatgtccacacaaaaacctgcagacagatatttatagcagctttattcataattgccaaaattggcaatcaagatgtccttcggtcagtgtatgcacaagtaaactgtagaaaaaaaaaagcaaaaatcaaataataacacctaaataaaagatattcaggtcagagaggaggatgtaaacctgtatttattaagagatgacatggctgcgtatgtaaaaaaaaaaaatcctaagaatctacacgacacttgggataaataaatggatttagcaaggtcagggacaccaagtttaaaatacaaaaatamattatgctttatataaaaccagcaaataatttaaaataccattacaaacaattttatttatcataacactaaaacaaagcataaaatatctaaattttatggctgggcacaatgactctcgtgtgttatcccagcacttcaggaggccaaggcaggcagattgcttgcactcaggagttcaagactagcctgggcaacatggtgagccccatctctactaaaaacacaa

SEQ ID NO: 104070 - DNA, 500 bp, Homo sapiens
aaaattgcattatgaataaatggaaacctgaacagaccaataatgtgcaaggagattgaatcaataataaaaggaagccatcaaaaaaagctcagtaccgcacagcttaattttgtcaaatatttacagaagatttactaccaattcttcacaaaatattccaaaaaactaaagaggagggaattattcccaactaattctacaaggtcggctgtacccagrcaccaaaaccagacaaggtcccaaaaacaaaagaagaaaaactacagaccaatatccctgaggaacatagatacagtaatcctcaataaaatgctatcaaactgatttcaacagtctgtggaaaagattgttcaccatgatcaagtgagatacatcctagaaatgcaaggatggttcaaaatatgaatatcaataaatgtgatacattaaattaacagaatgaaggaaaaatataatcattttaatagatgctgaaaaagtgtttgacaaaattcaac

SEQ ID NO: 104071 - DNA, 588 bp, Homo sapiens
aacaacttgacaaaaaccaagggcagaaataacaatataaaataaagaagatgygaggaatgtacagtaaaaaagtcattacaccaaatgtgtatagactaaattctagcattaaataaattttgaaatgtgggtgggtgaagggatcacaggaataagaaataaaatcaggatgaacataatccatgcccagagattttgattcatttgatctggggtaggtcccagacattggcatcttataaaagtttggtagaaaggtcttgaaatatccagccacagttaacaatcactgaactggaaaatcactcttagcagattccagaactggaactgttattgatgcctgtgtttcgaggtgcctagaagccagaatacctttgccatgttctccctcagaatcttgagatttattcatttctcttcaggtcctgtataacttgtgatatcgcaatagcagcggaaacatttttctctgtctcatcacgttgtttttctaatacacttctccaggttttgtcttgtgtgtgttcccctatacttggacttatgtaatcaagaagtctggtgctttgaaaagcaattagt

SEQ ID NO: 104072 - DNA, 588 bp, Homo sapiens
aacaacttgacaaaaaccaagggcagaaataacaatataaaataaagaagatgtgaggaatgtacagtaaaaaagtcattacaccaaatgtgtatagactaaattctagcattaaataaattttgaaatgtgggtgggtgaagggatcacaggaataagaaataaaatcaggatgaacataatccatgcccagagattttgattcatttgatctggggtaggtcccagacattggcatcttataaaagtttggtagaaaggtcttgaaatatccagccacagttaacaatcactgaactggaaaatcactcttagcagattccagaactggaactgttattgatgcctgtgtttcgaggtgcctagaagccagaatacctttgccatgttctccctcagaatcttgagatttattcatttctcttcaggtcctgtataacttgtgatatcgcaatagcagcggaaacatttttctctgtctcatcacrttgtttttctaatacacttctccaggttttgtcttgtgtgtgttcccctatacttggacttatgtaatcaagaagtctggtgctttgaaaagcaattagt

SEQ ID NO: 104073 - DNA, 463 bp, Homo sapiens
ttgttgaggatttttgcatctatgtttatatttgttgaggatgtttgtgtgtaatttttttgagacagtatctcgctctgctgcccaggctggaatgcagtggtgtgatcatggctcacttcagcctcaactcctgggctccagcaatcctcttacctcagcctcccaagtagctgggattacagrcatgcaccaccttgtctagctacctttttctattttttgtaaaaacacggtctcactatgttgcctaggttggtctcaaactgcggggctcaagtggtcctcctgcctcagcctctcaatgtaccgggattataggtgtgagccactgctctcagagtaattttcttttattgtatggtccttgtctgtctttcgtatcagatagtcctagcctcatgaaataagtttgggattttgccctcttcttcagttttttgaaagagtttgagaaggactg

SEQ ID NO: 104074 - DNA, 656 bp, Homo sapiens
ctttccctctgtgtctctgtgtccctgtgtcttctgtttcttataaggacgctcactggatttagagcccaccctaatcccagtacartctcatctcaaaccttaccttaattaattctgcaaagaccattattccaaataaggtcatattacgagattctaagtgaacatgaatttgggtaagacattattcaaccctctaaaatcaataatcttccatccccactaacaaagcctgactctattttgctacagtattgcaccaatttctttaatctagtaaatatgctccttaaactacttcaccaaccttactaatatgagaagaaagcaattaattagggtttaaattggttttgttatgactctgttcactgcatacattttccatctactcttagacattatcactaaatgggcaacattttgaaccagaacagttggggctgaagtcatctgaaggcttgagtggggctggagatgcagtgcagatgctcttgcagtttgggtaaatattggcaaaagtgtgtgagtaaacacaggggtgagcatatttttgaatttcatatgtgaaaactgcctattagcaaagtgatgtgcaaaaaactacagacatacattaaattcaagttctaggagatatgcccctgactaac

SEQ ID NO: 104075 - DNA, 581 bp, Homo sapiens
ataaggtttctatcactggaaataagcaaacaagaacaaactctcatcattcttttggcattttttttgttttgttttgagatggagtctcattctattgccctggctagagtgcaatggcacaatctcggctcactgcaacctccacctcccaggttcaagcgattctcctgcctcagcctccggagtagctgggattacaggcactcaccaccacactcagctagtttttgtattttagtagagatggggtttcaccatgttggccaggcyggtcttgaactcctgaccttgtgatccacccacctcggcctcccaaagtgctggaattaaaggtgtgagccaccctcacgcccagcctgttttggcaatttttattgcactgcttctatatgccaggttctaagctagagtcggcaatataaagataaaaacatacaaccttcactcaataagaaactcaaaattagcagtgtcataagttgagtggtggaagagtggtaaaaaaggagacagagaataaaaaggagaacaattctgcctggcccagcccatagaatcagagaatgtattgcaggaga

SEQ ID NO: 104076 - DNA, 525 bp, Homo sapiens
atcactacctcttcacctgatttgtcataaattattccttaaaacttgtttgtaatcagttgatatcagccgtattgttttggtttaagtttccctaaaagtcaagcatgaaacaaggacagtagtttatttgggaagtgatcccacaaagtgggaataaggaagtggtcaagagtgagacagggaagaaggaaatgccaatataagactatagtattgtagtggtagttttgacagcagaaactagattctgctgtgacatcctgaaaagtgttcagaaagcttcctaractttctatctgaaagataggcaacgagatttatctatcagctcttgttctttattggtcaaagattccctccatcccttaacctgggaaagttaactcacccatatttccaggctgcccttgctaacaggctgagtgggacattgtagtgccagtgaaaatcctgggacagaaagtggaaagatggtgaatgcatctttgaagtggcagtctgttaatgtgaggtaaatctttt

SEQ ID NO: 104077 - DNA, 571 bp, Homo sapiens
gggggtaaataagagcatgagggagatgtatacaaagaaaagagcagatgactaaggagaaatccctgaggcacttccttccctggaatcaagtacgaaagaggagctgccaaggtgccccggaagtgcagctagtgaggagaaaaccagctaagtgtggcatctcagaaaccaataggaaataagagtgtttctagcttagtaagatgagggttctgacaacataggaattcatggttccactctctagaaacagcagcactagaagagactttagacctcatgcttaaaggaagaaaccaataaaggaaaaattcctgaacayataaaactcttctgtgttagggcccagggcagactctaggctgctaactgccagccccagattctggacctgtctcacctgcctccatgccatggtcagcaaacacgcacgatgtctggggacttagcaatgttggttagttaggaatctttttgtgatatccccctgtagccataacattgagaaacagactagatctttatcctgctggtgtgaagtcaggcctctgtgaccaaataaaaatgt

SEQ ID NO: 104078 - DNA, 597 bp, Homo sapiens
agttcactttatttttatttattttattattatcattattttagacggattctcrctttgttgcccaggctgcttgttcatgatcccaacatttgtaaagtcatttaaaaaaagaataactgaaaccttatatcctttgactaataaatcctagagatctaataggcagagtgcctaaacttaaaaatactgtattgtatacttaaaaatactgtattgtatacttaaaaatttgctaagaaggcagatcttatgttaagtgcttttatcacaattaaaataataagaataaaaaaagagggcagaggaaacacagaggtgatgaatgggtaagagcacagattgtgatgatggtttcaaaggtgtacatttatctccaaatgcatcaagttgtgtacatgaaatatttatagcttttagtatgccaatcctacttcaatacagtagcttaaaaaataaaagaataaaatcactaaaacactgttttttagaataattcttttctgtacaaattcttgagatgtttaaagtgtgcaaaaaaatctgagcttttctttcattcccatttgtctaacaagatttggaaagtcacctaac

SEQ ID NO: 104079 - DNA, 597 bp, Homo sapiens
agttcactttatttttatttattttattattatcattattttagacggattctcgctttgttgcccaggctgcttgttcatgatcccaacatttgtaaagtcatttaaaaaaagaataactgaaaccttatatcctttgactaataaatcctagagatctaataggcagagtgcctaaacttaaaaatactgtattgtatacttaaaaatactgtattgtatacttaaaaatttgctaagaaggcagatcttatgttaagtgcttttatcacaattaaaataataagaataaawaaagagggcagaggaaacacagaggtgatgaatgggtaagagcacagattgtgatgatggtttcaaaggtgtacatttatctccaaatgcatcaagttgtgtacatgaaatatttatagcttttagtatgccaatcctacttcaatacagtagcttaaaaaataaaagaataaaatcactaaaacactgttttttagaataattcttttctgtacaaattcttgagatgtttaaagtgtgcaaaaaaatctgagcttttctttcattcccatttgtctaacaagatttggaaagtcacctaac

SEQ ID NO: 104080 - DNA, 597 bp, Homo sapiens
agttcactttatttttatttattttattattatcattattttagacggattctcgctttgttgcccaggctgcttgttcatgatcccaacatttgtaaagtcatttaaaaaaagaataactgaaaccttatatcctttgactaataaatcctagagatctaataggcagagtgcctaaacttaaaaatactgtattgtatacttaaaaatactgtattgtatacttaaaaatttgctaagaaggcagatcttatgttaagtgcttttatcacaattaaaataataagaataaaaaaagagggcagaggaaacacagaggtgatgaatgggtaagagcacagattgtgatgatggtttcaaaggtgtayatttatctccaaatgcatcaagttgtgtacatgaaatatttatagcttttagtatgccaatcctacttcaatacagtagcttaaaaaataaaagaataaaatcactaaaacactgttttttagaataattcttttctgtacaaattcttgagatgtttaaagtgtgcaaaaaaatctgagcttttctttcattcccatttgtctaacaagatttggaaagtcacctaac

SEQ ID NO: 104081 - DNA, 597 bp, Homo sapiens
agttcactttatttttatttattttattattatcattattttagacggattctcgctttgttgcccaggctgcttgttcatgatcccaacatttgtaaagtcatttaaaaaaagaataactgaaaccttatatcctttgactaataaatcctagagatctaataggcagagtgcctaaacttaaaaatactgtattgtatacttaaaaatactgtattgtatacttaaaaatttgctaagaaggcagatcttatgttaagtgcttttatcacaattaaaataataagaataaaaaaagagggcagaggaaacacagaggtgatgaatgggtaagagcacagattgtgatgatggtttcaaaggtgtacatttakctccaaatgcatcaagttgtgtacatgaaatatttatagcttttagtatgccaatcctacttcaatacagtagcttaaaaaataaaagaataaaatcactaaaacactgttttttagaataattcttttctgtacaaattcttgagatgtttaaagtgtgcaaaaaaatctgagcttttctttcattcccatttgtctaacaagatttggaaagtcacctaac

SEQ ID NO: 104082 - DNA, 584 bp, Homo sapiens
cctccattccatacttggctcaatttaccaatttaccagactatttttcctgacatactcatgtgagagtctgttaactggtctgataaagacaccctttttctcttctcaaattctcaacaaattaaaaaataagacaaaaacataaagcaaattggatgacaaaatatcaatataccaataaagacaatgttgaggaatctaattaaatatgactgatacccaaacccaagaatttggcaaacttatcaacctaaagcagaggaagttctaaactggcccagaccccagggaagtggcttcatccaggaggaccagggggaagttaaaggcaggcttattaatgtgggcgggaaacttaaatattatttttcagtttaccaatcagttaaactctgggactcctgggacaaaaagagtgagggacaagaagaggccttccgcrtagaagacaacatcaggagtggggaagaaatatttctactaacagctcctttcatgatgccactgccacttaataatttatatcgcttttatacttcctatcaagccctatagtcactgcatttcaagaaactttgtaa

SEQ ID NO: 104083 - DNA, 564 bp, Homo sapiens
gctactaatccctggagagtttaccagccttgttgttctctttaactctgcttacatctgtgtaaataaactcttcattaaactatccttagttaaacccctggagcatgccatctatgtcttgctaaaaccagtttgcacagtttttgatgtatgcattttcttaagtatttcttgatgccatgatttctcatgtgtatttcacttctctctttctaacgatttttaaaatagcagttatttttctgtgtgcaatgaaataattggatatgtattttttaaaaagaacactagaaatgacaatgactaaacaatgtctcctgggagtgataagaaaaaaaaatygtaaactatccttctaagaagaatactgctattgtcaaatgaattatttagaaaaatatattcagcagttttcacatgatttaaagcctctctaattccaggaaaaaagaaataaaggtggattttggtgtttatgtatatgggagaagcatgaatatataagtgggtgcagaaagatcttcactaataatttaatgaactgtgttaattttaatttca

SEQ ID NO: 104084 - DNA, 537 bp, Homo sapiens
aaaacagaaaaacaattcataaatttatcagagatatttaacaaagagataggaataatttaaaaaatcaaacagaaatcttggaattgagaaatacatttgctgaactgaaaaattcattagaggctctcaacagcagaatggattaagtggagaaaataacctgtgaaatcaaagacaggctttttgaaaatatacagtcagaggagcaaaaagaaacaagaatgagaggaatgaaggtcacctccaagatacagacaattaactcaaaagaccaaatcgaagacttattattattcaagagggaatcacacaagagcaaggagtggaaagtgctttttaaaaaatagtaacagaaaacttyccaaaacttgaggaagagctaaatatccaggtacaggaaggtcagagaacaccaaacacattcaactcaaataagactacccaaaagcatgtaacaaattctcaaacatcagggacaaagcaggattctaagaggagccagagagaagaagcaactaacatataaaggaattc

SEQ ID NO: 104085 - DNA, 458 bp, Homo sapiens
agctcacaaaattgagaagttgccgtgggactagggtgccaagactgctgagattctggcagaggcactgccattggcacccctggcccagacagtgtctgctgtgctgtccctggaagctggagctccaacagggaatattggtgtagctgtgcataggccataagccacacttgagccagtgggcagggagaaggaatgtcattctcccttcaccactggggaaggaaaggggaaagggctcaagttatcataggggcttacatgctgagcagctataacctaggtgttcagaacacctggaagatgcatttatttaggggtcmcaaatagtgaaattaatatttgaggaatatcagtcacgtgttgtgggcttttatccttaacgtttaatttttacaatcttgtgtaaaaatttatccatgataataacataacttctttaaggttggagtggc

SEQ ID NO: 104086 - DNA, 630 bp, Homo sapiens
cttgtttttaggaagaaaaggggtgattcgaatgcccttcctgtatctgctatttctcaagtgccttcagctcaagagaatccttctgccaaagtgacctattttggggtggcctgttccaccaccctccaagcacaggtcaggaattgtgttatacatttggctcctggtcagtggagggtgaggtaaaaaggcatgtcactaagtcatcatatggtgctgggacagtggttggtaagaagggctttagaaaaaacatacagaagacaggattgctttggaaaggagcaatttgtcagccgcgcttccgagaaatcagcaaaaggagagaggaggtagatgcggactaaacccaactagcctaggacgcaagtggaagcctgggatggtgacaggaaggccaaatggccatggtggtcagagcatggctgaggagatcgaggccaggctgcactcaaggcaggctgcaagcayctcttcagacctgtccccaggcaatgtagagggcattgcattgtttaatgggatcagattaatgtttgctacagagtgccttgtgcaggagggacaggagacgaagaggagggaacgccactatagaatacaggaaagaagctgaaatacttaggt

SEQ ID NO: 104087 - DNA, 613 bp, Homo sapiens
ttgaccaggtagcaaatctacgacaaggatccggatcttctagcctccacccttatgctacttctacaaaggagagaaggtgaggattctaactctggcctgagaatgggccatctctttaacctcattcaggagaacgctaccatggtttattccttcagaaaatgggccaaagggtgggttgacttacatctgagcctttttgcttccaagttcccaggctctcatgcctagcccatcctggtgcattcatgatttagcactgacattactcaatagccagccactctggccctgccctagctgagaagctcctcctctggcctctagctcctggagagatgccctccccccatatgagatgaggacaaaagaggaagctggaccctggacaggaaaaccagtctgatctggggaggtggcccaggctttgtctttggtttccctcctcagctcttgtcacggacccctactgacctcaccactaatgggtctacagtatatagaaggagtcttcagtgtgggcctgagcccccttcttcrtgtcacaaccttgaccatacctgtttagccaagacttcagcggcagcctcctaggttgtagccaccacct

SEQ ID NO: 104088 - DNA, 365 bp, Homo sapiens
tcaggggccccagtatccctctttccaagaatccctcggtgtcgtcctcttcacagctgttcaggtcaaagaggtctttaaattgcttcctgtcctcatccttcctgtcagccaccttccttcgtttgatctcaggraagttcaggtcttccagccgctctttgccactgatctccagctggatctcccggtcatgcagcttgcgccagtggctgtagtacaaggtcaggggggtcccctcttccagggtcagcttctgccaggcttccactgcctgcagagacaccaaaggaaaccctctggcggcggctgcagatgtgttccgagttctcctgaaccttccccagcagctgctgcacctgccg

SEQ ID NO: 104089 - DNA, 365 bp, Homo sapiens
tcaggggccccagtatccctctttccaagaatccctcggtgtcgtcctcttcacagctgttcaggtcaaagaggtctttaaattgcttcctgtcctcatccttcctgtcagccaccttccttcgtttgatctcagggaagttcaggtcttccagccgctctttgccactgatctccagctggatctcccrgtcatgcagcttgcgccagtggctgtagtacaaggtcaggggggtcccctcttccagggtcagcttctgccaggcttccactgcctgcagagacaccaaaggaaaccctctggcggcggctgcagatgtgttccgagttctcctgaaccttccccagcagctgctgcacctgccg

SEQ ID NO: 104090 - DNA, 365 bp, Homo sapiens
tcaggggccccagtatccctctttccaagaatccctcggtgtcgtcctcttcacagctgttcaggtcaaagaggtctttaaattgcttcctgtcctcatccttcctgtcagccaccttccttcgtttgatctcagggaagttcaggtcttccagccgctctttgccactgatctccagctggatctcccggtcaygcagcttgcgccagtggctgtagtacaaggtcaggggggtcccctcttccagggtcagcttctgccaggcttccactgcctgcagagacaccaaaggaaaccctctggcggcggctgcagatgtgttccgagttctcctgaaccttccccagcagctgctgcacctgccg

SEQ ID NO: 104091 - DNA, 365 bp, Homo sapiens
tcaggggccccagtatccctctttccaagaatccctcggtgtcgtcctcttcacagctgttcaggtcaaagaggtctttaaattgcttcctgtcctcatccttcctgtcagccaccttccttcgtttgatctcagggaagttcaggtcttccagccgctctttgccactgatctccagctggatctcccggtcatgcagcttgcrccagtggctgtagtacaaggtcaggggggtcccctcttccagggtcagcttctgccaggcttccactgcctgcagagacaccaaaggaaaccctctggcggcggctgcagatgtgttccgagttctcctgaaccttccccagcagctgctgcacctgccg

SEQ ID NO: 104092 - DNA, 580 bp, Homo sapiens
ggtaaatgcctctttcaagaaagcgtgcaattttctggtccgcaccggtgcaccactaggggtcgcttttcggggcgggcggggggaaggggggggcactaatcaacaatactgcttacgcgcacgcggattccttgctggggagaaagtaccttggggcgccggaggccgccayaacgcaggcgcattcagctaaggaccactccctcccccgcactcctgcctcgccatttctcttccccgcccggccggccttcgctttgcgcacgcgccttttgaggtaacggcccaaagaggtggaagcgcttttcccgcccggccgcggggcgtggctctgcgcgcagcttgatgacgactttcggcgccgtggcggaatggcggcttccatctctgaggcgagcgacgctatggatcccacaggtgagtggcgcgggatgcgcgcctgagacggtccggcgccctgggggcttccccgagcccctgcggaggccatctccgttcctccgcgagccccaggactcgggccggccagccggctctgcccaggcagggcaggctggggagtggagggccccggttg

SEQ ID NO: 104093 - DNA, 580 bp, Homo sapiens
ggtaaatgcctctttcaagaaagcgtgcaattttctggtccgcaccggtgcaccactaggggtcgcttttcggggcgggcggggggaaggggggggcactaatcaacaatactgcttacgcgcacgcggattccttgctggggagaaagtaccttggggcgccggaggccgccacaacgcaggcgcattcagctaaggaccactccctcccccgcactcctgcctcgccatttcycttccccgcccggccggccttcgctttgcgcacgcgccttttgaggtaacggcccaaagaggtggaagcgcttttcccgcccggccgcggggcgtggctctgcgcgcagcttgatgacgactttcggcgccgtggcggaatggcggcttccatctctgaggcgagcgacgctatggatcccacaggtgagtggcgcgggatgcgcgcctgagacggtccggcgccctgggggcttccccgagcccctgcggaggccatctccgttcctccgcgagccccaggactcgggccggccagccggctctgcccaggcagggcaggctggggagtggagggccccggttg

SEQ ID NO: 104094 - DNA, 675 bp, Homo sapiens
ttatttctggttcttgagatcttttctgcagatgtaaaaacagaaggttaatttgcttgttgtatttctgtgacatttcctcttttggagtgcatgtttttaaaataattttattctgaagtaatcaagtatggacaataaaaattagaaagtaattaaaattaaactgttwaaataaataataattaaaattaagaattaactttttaatctatgtttagctactgccacatcactggcttctaacatgtgaaaaataattcaccttagacaaagggagaagaaaaacatgaaccagcaaacttaactttctcactatttgtttggactaaatttaatttgttatgtgttaaatctaccaaaaatgaatcagcagatgatttgtagtgttccaaaatcttcctcacttgaaaagagtttacctcatgaaaccctaactagtgagcacctacagtgcactgaagtgcttttttaaaagattcctaactggattgtaggcaccctttaaactattaggagccgaaatcaacaccaaacagaaagaaatgcaaattctcacattttaattgaaattatatactgtcatatgatagtgttatgtatccagattatctgcgtaagtccagttctaatatattctaatgtgtactaatgacagcagataaaattttttaa

SEQ ID NO: 104095 - DNA, 548 bp, Homo sapiens
ggttctaatatgcaaatgttgtagttttcaggaaatgttattaagtcctaattttgcttcttagttgtcctactctttatggcttctaattcagggcatctcaactatgtcatagtttgtaactaaattttttcataaatatctcattaaagtagataatgtgattgtccactattacggagttgatcaatcacgccaagggcagaaaaaccaatggatgtcaagacctgacttggaccaatgatccttctctacagactcaaactctcagccagatgtttgttacgatgatgctttatatacatgttcatctccagctgacatgggagacgaaaaccctacttttatttttttttaggttccacgaagaagttgtaagttgccattctctaatttttaacatacatactaacartatatttggtacacaacaccccacacgttatttggctctggtgtcatctcacagaccaccttacatgactatttttattgcgcaaatcacaatttcaatgtttttgtggcacccattctgctttgattcacac

SEQ ID NO: 104096 - DNA, 565 bp, Homo sapiens
taagcctttttctaagcagtgaagatatggtagtgaaaaataaaaaccctattcatgacagtgagaaaaacacacaataacaacagacagataaggcaaaatatacggtatgttagaggagaaaaactaaagcaggaaaatgaaatgtttatgtgtttgatggggagggtggtgggaaagytgagatggccagaagagtccctgctgagaaagggttttttttttctaatacaaaaaaccttttatttgtatatcaaagactctaagaaatgatgacataaggttaacagcgttgatgtcaagatacaaataggtttgaagttagagatgataaatcactttgtttcattgaaccttgccttgattaccttagagagcattccttgtatgctgccaattgcatcttaagcatgatgcgtctgggtagtacacggttcttcctcagaaagtggatgttccttaatgtgtttctttttaccctttgtcttcttcttcttagaaaggcggttttaaataaagaactgaaggaatggaaagagttaagctaggaggatatctgggggaa

SEQ ID NO: 104097 - DNA, 565 bp, Homo sapiens
taagcctttttctaagcagtgaagatatggtagtgaaaaataaaaaccctattcatgacagtgagaaaaacacacaataacaacagacagataaggcaaaatatacggtatgttagaggagaaaaactaaagcaggaaaatgaaatgtttatgtgtttgatggggagggtggtgggaaagttgagatggccagaagagtccctgctgagaaagggttttttttttctaatacaaaaaaccttttatttgtatatcaaagactctaagaaaygatgacataaggttaacagcgttgatgtcaagatacaaataggtttgaagttagagatgataaatcactttgtttcattgaaccttgccttgattaccttagagagcattccttgtatgctgccaattgcatcttaagcatgatgcgtctgggtagtacacggttcttcctcagaaagtggatgttccttaatgtgtttctttttaccctttgtcttcttcttcttagaaaggcggttttaaataaagaactgaaggaatggaaagagttaagctaggaggatatctgggggaa

SEQ ID NO: 104098 - DNA, 626 bp, Homo sapiens
actcttcagaatcttatgtatgtatttaccccatttgattcatgggaacacacaaataaaaagacaaagatgcaaaatgtgtcctcttccgtctttaccacctagattttacattaaacagtcagatttagaggatgacacactgtgcggcttcaggaayagaaaggaagtttgcccttttctgcgctaagatattcttctaccccactgcctttgagcattcttttttcatttggttgctgggatatcaaaaacatgatggtgctcactgaaaatgggagccaaagtttgccacaacacaagaagcagagtgaaactgctgacgtgcaagcatggaattccagaaaatgagatgctccccaaatttcacattgaatagccatacaattttctagctggaagatacacagaataaaaagctatcttctttagccacattatctattgataatcagactaaaaccaagaaagataaaatgattggtccaaagctcctaaagtggcattacctagcattttatagcaccattcaggattgttccataataatcaaagaatatctctaggctttgtatctcttgaaaactcaatgtacagaattctttctgagttaaatattaactttt

SEQ ID NO: 104099 - DNA, 591 bp, Homo sapiens
tctataagaagtcagagaaattataataaatcacttaatacttggtttgggaaggtgctttctaaagttatagtgcctatgaatttaactaataattgtgaattcagagctgtgacaataaagcaaagaaaccacattgtgtttgagtcagcaatctttagatttctatccagtcttcctacccagtccgtaaattctaactataatcctggtactcactctcaagtttatgttaaatactagcctatacaaaaaacactctttctcttttttcattttgttatttatatattgctttgtttaaaggaagaacacaaaaatgccctgctaaagggattctgtttggttgcaggctgcaagcggggaaaaaatcaaagtgtatttcrcagaaaatgattttttagaagtcagaactatgacatgaagtcaagcagggcactctaggactgaatttgctgtgctgccttcatacgctccttgctcgctcttttctggcagctgtgactcacacaggtcatggagagtatcattccctaaaaggaacaactccgatattcatctttatccattaagttcatctgtcccattcta

SEQ ID NO: 104100 - DNA, 595 bp, Homo sapiens
cacaggataagacctactcatttctatagtattaaaaagtmtatcataaacttgccttagctaagtattcacctcattcccaacctctcgtatcacacacttttggtactagcaaaagtgaactgctcagaaaccctgccatgttcactcaagcatcttgtcttttgcacttgctgctcttcctcccaaacaggcaatctcattagatgttccttctggcaaacacacgacctcgctgcatgttccttctgccaaacattcttcttctgcttctttacctagaaaaattcttctctctctgcatgcttaccttaaatcatacctactttttcccaaaactttcattcctcatcacatatgtctggcacataatcaatatataataaatcataattataagcttccagtgggcatctagcacacagtaagcactgaataaagtagtaaaataatgaaaatgacaatgataacaaaaagctcctgtctgtatttttaattgtttgtggtctatagcattagaaaaatggttactatctaaaagacatttgatagttatatgttaagtggacaagtgaaaacataaatagaaatgttt

SEQ ID NO: 104101 - DNA, 595 bp, Homo sapiens
cacaggataagacctactcatttctatagtattaaaaagtctatcataaacttgccttagctaagtattcacctcaytcccaacctctcgtatcacacacttttggtactagcaaaagtgaactgctcagaaaccctgccatgttcactcaagcatcttgtcttttgcacttgctgctcttcctcccaaacaggcaatctcattagatgttccttctggcaaacacacgacctcgctgcatgttccttctgccaaacattcttcttctgcttctttacctagaaaaattcttctctctctgcatgcttaccttaaatcatacctactttttcccaaaactttcattcctcatcacatatgtctggcacataatcaatatataataaatcataattataagcttccagtgggcatctagcacacagtaagcactgaataaagtagtaaaataatgaaaatgacaatgataacaaaaagctcctgtctgtatttttaattgtttgtggtctatagcattagaaaaatggttactatctaaaagacatttgatagttatatgttaagtggacaagtgaaaacataaatagaaatgttt

SEQ ID NO: 104102 - DNA, 595 bp, Homo sapiens
cacaggataagacctactcatttctatagtattaaaaagtctatcataaacttgccttagctaagtattcacctcattcccaacctctcgtatcwcacacttttggtactagcaaaagtgaactgctcagaaaccctgccatgttcactcaagcatcttgtcttttgcacttgctgctcttcctcccaaacaggcaatctcattagatgttccttctggcaaacacacgacctcgctgcatgttccttctgccaaacattcttcttctgcttctttacctagaaaaattcttctctctctgcatgcttaccttaaatcatacctactttttcccaaaactttcattcctcatcacatatgtctggcacataatcaatatataataaatcataattataagcttccagtgggcatctagcacacagtaagcactgaataaagtagtaaaataatgaaaatgacaatgataacaaaaagctcctgtctgtatttttaattgtttgtggtctatagcattagaaaaatggttactatctaaaagacatttgatagttatatgttaagtggacaagtgaaaacataaatagaaatgttt

SEQ ID NO: 104103 - DNA, 595 bp, Homo sapiens
cacaggataagacctactcatttctatagtattaaaaagtctatcataaacttgccttagctaagtattcacctcattcccaacctctcgtatcacacacttttggtactagcaaaagtgaactgctcagaaaccctgccatgttcactcaagcatcttgtcttttgcacttgctgctcttcctcccaaacaggcaatctcattagatgttccttctggcaaacacacgacctcgctgcatgttccttctgccaaacattcttcttctgcttctttacctagaaaaattcttctctctctgcatgcttaccttaaatcatacctactttttyccaaaactttcattcctcatcacatatgtctggcacataatcaatatataataaatcataattataagcttccagtgggcatctagcacacagtaagcactgaataaagtagtaaaataatgaaaatgacaatgataacaaaaagctcctgtctgtatttttaattgtttgtggtctatagcattagaaaaatggttactatctaaaagacatttgatagttatatgttaagtggacaagtgaaaacataaatagaaatgttt

SEQ ID NO: 104104 - DNA, 593 bp, Homo sapiens
aacaaaaagctcctgtctgtatttttaattgtttgtggtctatagcattagaaaaatggttactatctaaaagacatttgatagttatatgttaagtggacaagtgaaaacataaatagaaatgttttctttgtaaattctgttgaaaaagcacagaaatgaaatggagacagctctattatgagcaccttaaagatcaaaactacatctattccatctttgtctcctgcaacttataaaacctaacttacaaaagctctttgataaatagatgrctaaattaaacggtgtcctcacacagtttggacaatataatgtattaggtgtccacaaccaggtagcatactagcatttttgttagcgtgaaagtttttctgcttttattataatctgctgagcctagagttgggcaatttgtatatttattatgacaatcttttggcaaatggtagcagagcatcttgttctaacaaaattactgttatgatgacaattaaccagcaggtagaagaacacatcttgttccaacaaagtaaatatatctctttccaacttcaaatgaggaggaatgaagtcagtaatagtgagaactt

SEQ ID NO: 104105 - DNA, 593 bp, Homo sapiens
aacaaaaagctcctgtctgtatttttaattgtttgtggtctatagcattagaaaaatggttactatctaaaagacatttgatagttatatgttaagtggacaagtgaaaacataaatagaaatgttttctttgtaaattctgttgaaaaagcacagaaatgaaatggagacagctctattatgagcaccttaaagatcaaaactacatctattccatctttgtctcctgcaacttataaaacctaacttacaaaagctctttgataaatagatgactaaattaaacggtgtcctcayacagtttggacaatataatgtattaggtgtccacaaccaggtagcatactagcatttttgttagcgtgaaagtttttctgcttttattataatctgctgagcctagagttgggcaatttgtatatttattatgacaatcttttggcaaatggtagcagagcatcttgttctaacaaaattactgttatgatgacaattaaccagcaggtagaagaacacatcttgttccaacaaagtaaatatatctctttccaacttcaaatgaggaggaatgaagtcagtaatagtgagaactt

SEQ ID NO: 104106 - DNA, 593 bp, Homo sapiens
aacaaaaagctcctgtctgtatttttaattgtttgtggtctatagcattagaaaaatggttactatctaaaagacatttgatagttatatgttaagtggacaagtgaaaacataaatagaaatgttttctttgtaaattctgttgaaaaagcacagaaatgaaatggagacagctctattatgagcaccttaaagatcaaaactacatctattccatctttgtctcctgcaacttataaaacctaacttacaaaagctctttgataaatagatgactaaattaaacggtgtcctcacacagtttggacwatataatgtattaggtgtccacaaccaggtagcatactagcatttttgttagcgtgaaagtttttctgcttttattataatctgctgagcctagagttgggcaatttgtatatttattatgacaatcttttggcaaatggtagcagagcatcttgttctaacaaaattactgttatgatgacaattaaccagcaggtagaagaacacatcttgttccaacaaagtaaatatatctctttccaacttcaaatgaggaggaatgaagtcagtaatagtgagaactt

SEQ ID NO: 104107 - DNA, 599 bp, Homo sapiens
aatcaacggaaacaacagaatgattgcaatgtctttttttctcctccttctgacttgataaaagggactgtcttccttggatgtagtgaacatcttcggtgcttgaaaaattcaaggagtatgtaggacatagtccccagaagacagtacaagactttccgctaaactggacatgtcaagacccaaataactaatcagatgaattaaagatgtgacactatttcttatccctgcataggtgttacacttggatcaaatgaacaatgctgtgatctctaaggataaagatcttaaaagtcctgagataaagaatcccgcacccattggtacttctaacttgtcttgctttttgtctgatttctggctgatgcaggggactaaaactcactgccacgcgaaaactacctgaaccaaactatgacatctcacctgatatgtgagatgcaactgttataattattttaaacctcaattcagcattaactagccttttaatgtraacacttacacatgatgatgactagaaacagcatactctctggccgtctgtccagatagatcttgagaagatacatcaatattttgctcaagtagaaggc

SEQ ID NO: 104108 - DNA, 561 bp, Homo sapiens
catatctatccagtgcatttaaattcgcttttttcttaattaaaaatttcacsacttgctgtttttgctcatgtacaccaagtaacagtggtgtgaggccatgctgtaaaacaatataaagcaaaaacctatgtaattcaaaaaagtacatattcctcaaccgaagtggaaactttatataagatcttatggacttacacgcatagaagtaataaaatgtagtcacttccttctcactcttctgtgctttcccacacgctgctccttcccttggaaacaccccttctctgcctcaccacagtaactctaatcatctcaaaaactcactttaaacatttactgcttccaaggctctttgcttctaaaccagcatttggcttggtgttattggatgataatatttttcccatctaaacaaaaagcttcttgagggcaggggctgtatcttttgtctctatatcctcaaccctaagacaaattgtgtataaagcaagaatctgcatgtaaaatatttctttagtttcatgttttaccaaaagttcaacctccaacatgcaacaa

SEQ ID NO: 104109 - DNA, 561 bp, Homo sapiens
catatctatccagtgcatttaaattcgcttttttcttaattaaaaatttcacgacttgctgtttttgctcatgtacaccaagtarcagtggtgtgaggccatgctgtaaaacaatataaagcaaaaacctatgtaattcaaaaaagtacatattcctcaaccgaagtggaaactttatataagatcttatggacttacacgcatagaagtaataaaatgtagtcacttccttctcactcttctgtgctttcccacacgctgctccttcccttggaaacaccccttctctgcctcaccacagtaactctaatcatctcaaaaactcactttaaacatttactgcttccaaggctctttgcttctaaaccagcatttggcttggtgttattggatgataatatttttcccatctaaacaaaaagcttcttgagggcaggggctgtatcttttgtctctatatcctcaaccctaagacaaattgtgtataaagcaagaatctgcatgtaaaatatttctttagtttcatgttttaccaaaagttcaacctccaacatgcaacaa

SEQ ID NO: 104110 - DNA, 561 bp, Homo sapiens
catatctatccagtgcatttaaattcgcttttttcttaattaaaaatttcacgacttgctgtttttgctcatgtacaccaagtaacagtggtgtgaggccatgctgtaaaacaatataaagcaaaaacctatgtaattcaaaaaagtacatattcctcaaccgaagtggaaactttatataagatcttatggacttacacgcatagaagtaataaaatgtagtcacttccttctcactcttctgtgctttcccacacgctgctccttcccttggaaacaccccttctctgcctcaccacagtaactctaatcatctcaaaaactcactttaaacatttactgcttccaaggctctttgcttctaaaccagcatttggcwtggtgttattggatgataatatttttcccatctaaacaaaaagcttcttgagggcaggggctgtatcttttgtctctatatcctcaaccctaagacaaattgtgtataaagcaagaatctgcatgtaaaatatttctttagtttcatgttttaccaaaagttcaacctccaacatgcaacaa

SEQ ID NO: 104111 - DNA, 562 bp, Homo sapiens
aagaatttacatattacatttatgtattgagtggttcttaagcaggagtgtatccagattttgagaaaattgttgttgttgtcgttgttgttgttgttgttgttagagacagggtctcattatgttgaccaggctagactcgaactcctgagctcaagcaatcctcccacctcagcctccctagcagctgggactacagccatgcaccaccatgcctggcttcaaggaaacattttcaaatatacatatccaggctttattagacttactgtatcaaaatattcagaaaaagcctagacttgttatttaaacattttcctcaggttactrggatgcacaattctagctgaaagctagtgcaacagacaattacttcagtctcatttctcacccacatgaccaattccctttctcatttgaagatttggccaaaaagagtaaggagtaggagagagacccatttgctgaaaacaccacatgattttccccggtaagagaagaacagggtctagtcaactcaaaatccaacttgatcttgttacttgtttatcttccaccttcc

SEQ ID NO: 104112 - DNA, 520 bp, Homo sapiens
aaataattagcaatttgttatcatagactctaaacagaccttcaaaatgcattacatagatttggtaaaacagattgtcagtctgccaaaagtaatcactttggtttgatttgcattgaatgaaaattttaaaatgtaaagctaaactcttcaggatcactgcactgggtttctataggacaacactgaacagggctgccactgaaacaccttggakgagagcctcaaactccctgaacacagcttccagcacactactgggagaatgattgggactcaaaaatatgtgcaatgaatgtacttacgaccttgttggaaaggaagtaaagaggttgtatgtaattacctcaaattaatactgctacagataaagtagtaattagcactgacaaagtaatagtagcgctaaagtagtattaatagccctacactagtagtagtaataaagtggcatcgctattgattctatccgtctacctacctacctgtctggataggagggcataggatttgactgtaa

SEQ ID NO: 104113 - DNA, 520 bp, Homo sapiens
aaataattagcaatttgttatcatagactctaaacagaccttcaaaatgcattacatagatttggtaaaacagattgtcagtctgccaaaagtaatcactttggtttgatttgcattgaatgaaaattttaaaatgtaaagctaaactcttcaggatcactgcactgggtttctataggacaacactgaacagggctgccactgaaacaccttggatgagagcctcaaactccctgaacacagcttccagcacactactgggagaatgattgggactcaaaaatatgtgcaatgaatgtacttacgaccttgttggaaaggaagtaaagaggttgtatgtaattacctcaaattaatactgctacagataaagtagtaattagcactgacaaagtaatagtagcrctaaagtagtattaatagccctacactagtagtagtaataaagtggcatcgctattgattctatccgtctacctacctacctgtctggataggagggcataggatttgactgtaa

SEQ ID NO: 104114 - DNA, 634 bp, Homo sapiens
cactcatcaaatatacgaagtaattgatcacagtaaaatactgagttctattaacaggaataaagtgggagaaatgcagaaaataatcttattttataaatgtagttttcaaaatcatatgaagtcactggaaaaatayggtgaggtaaatactgaaatatatccttttctcaaagggaggataatgtcacacatgcagggcacttttacaaataaaagtcactgcattagcagcaccttccttttagcacaagggtcagcaaataagcacctgtgggccaaatccagcccactgcccgtttttgtaagtcaagtatcttggaacacagccatgcttattcactttacagtccatagtgtcagttagctgggtgtgatgttgcacacccgtggtctcagctagtagagactgaggtcagaggatcactagagcccagaaagtcgaggctgcagtcagccatgatcacacaactgcactccagcctgggaaacagagtgagaccctgtctcaagaaaatcaatatatgtagtccacaaagcctaaaatatttactaactagctctttgcagaaaaagctggccaactcctggtttagtagatcaaagattctttgatgtattttaataaaagttt

SEQ ID NO: 104115 - DNA, 634 bp, Homo sapiens
cactcatcaaatatacgaagtaattgatcacagtaaaatactgagttctattaacaggaataaagtgggagaaatgcagaaaataatcttattttataaatgtagttttcaaaatcatatgaagtcactggaaaaatatggtgaggtraatactgaaatatatccttttctcaaagggaggataatgtcacacatgcagggcacttttacaaataaaagtcactgcattagcagcaccttccttttagcacaagggtcagcaaataagcacctgtgggccaaatccagcccactgcccgtttttgtaagtcaagtatcttggaacacagccatgcttattcactttacagtccatagtgtcagttagctgggtgtgatgttgcacacccgtggtctcagctagtagagactgaggtcagaggatcactagagcccagaaagtcgaggctgcagtcagccatgatcacacaactgcactccagcctgggaaacagagtgagaccctgtctcaagaaaatcaatatatgtagtccacaaagcctaaaatatttactaactagctctttgcagaaaaagctggccaactcctggtttagtagatcaaagattctttgatgtattttaataaaagttt

SEQ ID NO: 104116 - DNA, 634 bp, Homo sapiens
cactcatcaaatatacgaagtaattgatcacagtaaaatactgagttctattaacaggaataaagtgggagaaatgcagaaaataatcttattttataaatgtagttttcaaaatcatatgaagtcactggaaaaatatggtgaggtaaatactgaaatatatccttttctcaaagggaggataatgtcacacatgcagggcacttttacaaataaaagtcactgcattagcagcaccttccttttagcacaagggtcagcaaataagcacctgtgggccaaatccagcccactgcccgtttttgtaagtcaagtatcttggaacacagccatgcttattcactttacagtccatagtgtcagttagctgggtgtgatgttgcacaccygtggtctcagctagtagagactgaggtcagaggatcactagagcccagaaagtcgaggctgcagtcagccatgatcacacaactgcactccagcctgggaaacagagtgagaccctgtctcaagaaaatcaatatatgtagtccacaaagcctaaaatatttactaactagctctttgcagaaaaagctggccaactcctggtttagtagatcaaagattctttgatgtattttaataaaagttt

SEQ ID NO: 104117 - DNA, 634 bp, Homo sapiens
cactcatcaaatatacgaagtaattgatcacagtaaaatactgagttctattaacaggaataaagtgggagaaatgcagaaaataatcttattttataaatgtagttttcaaaatcatatgaagtcactggaaaaatatggtgaggtaaatactgaaatatatccttttctcaaagggaggataatgtcacacatgcagggcacttttacaaataaaagtcactgcattagcagcaccttccttttagcacaagggtcagcaaataagcacctgtgggccaaatccagcccactgcccgtttttgtaagtcaagtatcttggaacacagccatgcttattcactttacagtccatagtgtcagttagctgggtgtgatgttgcacacccgtggtctcagctagtagagactgaggtcagaggatcactagagcccagaaagtcgaggctgcagtsagccatgatcacacaactgcactccagcctgggaaacagagtgagaccctgtctcaagaaaatcaatatatgtagtccacaaagcctaaaatatttactaactagctctttgcagaaaaagctggccaactcctggtttagtagatcaaagattctttgatgtattttaataaaagttt

SEQ ID NO: 104118 - DNA, 612 bp, Homo sapiens
tttcctttccagtggtcactttcaaaggctttggacttcaatgattttaccttattcaaaccatttctggggctcctttgggaattattttcaaagtccctatatattttcttgaatattatcagttgtgacatatattcacacttggatgacacatttgctttttttcttagtagcaagacatttgatatgcagtgagatgaaatacagtgaagtaactgggtagttatattctgcactctggagtttgatcaaaatagaaattggtgagaagctaatgttattgtgtggtagaaacacacatttcctcccagcttttcatgaaatgtaataataagtattatcattatttttaggttaatcattccagatgtgtgatataatctttgtatacatttctatcttattgaagtatttaactagaattaattgattctgtcatgcaatttcaactctgttggccatttatcttgaagtaacctgtccattggcatgaatggaatatatgacattttcatttatgtcaacatttttatctggagaatgggtgaggggttggtggcacctgaaagttyttaatagaaatatttcctggacccatcccttatttca

SEQ ID NO: 104119 - DNA, 547 bp, Homo sapiens
tttacccaatgatagattacaaatggcaaaatacagcatccatgggataagataacctttggtatgtttgtggcatagaggggatctaaaagttcttaaatttttaacagataagttaaatatactggaaatatctgtatgctgggagaaattgtggatcaaaatgaaggttgtgtatactgcagaaatgtactttctaggtatcatgacaggaatgataggcacaataaaatgtgcagaaagagaaatgcaattagccactctcagcaaattttgtttaataagtgaccaggctggccaagctatatcaaagtggggcaagtgactaattctcccagagtgcggtaaaatatgaayggtctaagacaactagaacttagagaacaaaattgggctctataatgggaatgaagtcgtgtcttcacgctgagttaagcatatacatttcaattctgctattaagacagttgcatttagttgttgtgcaccataaaataatgttttagtttggcatttttcagttgttatactatcaattaacagtatg

SEQ ID NO: 104120 - DNA, 627 bp, Homo sapiens
ttttactggttgctgtagacctttgactgttgccagagctcctataatgttatttcagccagattttgttttgttttctatatcaccgtttttctgatgtacctccccagactatttattgaaagtttgatataacctgcttctaattctgccactgttgtagggggtgcaaatgatcatttaaatccaaaatgcttggtcattggtggccactggaggagtgctgccttcagttttggttgcttttgtaaaatcacactgtttcacatyttctgaacctaaaaatgatttttatctctggtacaactatgcctttaaaaaaagagtatgagcctggccaacatggtgaagccccgtctctactgaaaatacaaaaattaagtgggcgtggtggcacaagcctgtaatcccagttacttgagaggctgaggcacgagaattgcttgaacccaggaagcataggctgcagtgagctgagaccaagccactgcactccagcctgggcaacagagtgagaccctatctcaaaaaaaaaaagagtatgtacagattttatttcatttagcattttagttcctacataacaagaaggtttctgtaggaacctattccgcctagtgataataa

SEQ ID NO: 104121 - DNA, 518 bp, Homo sapiens
ttgcctttttgttgtgtgagtgtttgtataatatctgcaggagtttcttagaggcaatgaacaaatgaagtgaagctaagtgaagcaataaagagatgaatcaattaaatggagataaaaataatttcaayttttattttagatttagggcatacatatacaagtttgtcacctgggtatattgtgagatgctaaggtttcggatatgattgattctgtcacccaggtactgagcatagtacccactagttagtttttcaacccttcctccacccccggtagttcctggtttctagtgttaccatcttaatgtctaagtggacccaatgtttagctcccacttataagtgagaacacgcagtatttggttttctgttcctgagttaattcacttagaataatagtctctagctgcatccatgttgctgcaaaggctatgattctttttatggctgcatagtattccatggtttatatgtatcacattttctttatccgatccaccatttacggacact

SEQ ID NO: 104122 - DNA, 596 bp, Homo sapiens
gagggtgaagagaaaaggaaacacacacgattggtggggatgtaaattagttcagccactgtgaaaagcagtttggagatttctcaaagaacttaaaacaattaccatttgacccaaccatcccacttctgggtataygctcaaaggaaaattattcactctatcaaagagacacaagcatttgtatgttcattgtgaaactattcacaatagcaaagacatggatggaatcaaccttgaagcccatcaatagtagattggatttttaaaaatgtacaccatggaatactatgcagtcctaaaaaagaatgaaatcatgtcctttgcagaaacatgaatgaagctaaaggttattaccctaaggaaataatgcaagaaccagatgatatatatgcatctcttacacgcatatattaaatcactgcttaatgttttttcttgttttatatgaaacaagaaaagtttataaggtacaatgtaccttaaaatatgtaccatttgtgtatatcaattaatgtaattcactgcacgtatacaacgtataatgatcatatctaactagcaagctcatcacctgaaacttttaaaatacaaaa

SEQ ID NO: 104123 - DNA, 580 bp, Homo sapiens
catttgcccatgcatgttgtgcgtttagacgttcacctgcacatttatcagacaaaattcaaacgaagcaggcagaactgtttgctactccagctacaacaccctgacattttagggaggttgaaaaatctctagtcttagcagagaaaattctaactcaaaatgaatgtccaccagagggcaaacgtgttatctttattaggtttggaactctcattttgaactcttttgagtgagacttctgcaaatagctccttcctaggtgctgctttctttttggtttttattgtcttcagtataatgaaccctgtaactcatgccacgtggataacaggactgcacgattgtttctttacggttgttttggcactggtaagggtagttcagaagattaatattttcaaccaaaaaaaagtaaatataaaaacaataatgataatgagctgtcatttattaagcacttgctgtatgtaaagcctttcattcatcattttacattatcttgttccgtctacagggtaatcttgtcaggtgggtattaatactattactcccayttaaaaactgccaaagctgaggc

SEQ ID NO: 104124 - DNA, 619 bp, Homo sapiens
caaatggggtatttaatccctcggatttgatttcctggctgaagtggaaacgaaaatgcaagtaaacaccatattggaaatctgactgttcaatgaatcacagaattmttttctcatttgtcataggaaaaggatgaagttaaagttgttaataagacaatcagactaagctccttgagaagcaattattatggaagactatccccccattccttatagctttaccattttaatactgaaaggtatttaactggaaatcacttttttaaatagcagcctcataatccttcagaaaatctctccccggcagtatcagtaggaaggtttgtacatctcacaatacaatgggaggaaaatagcctaccaaccctttgccactgatctgtgagaacatcccacagagagcgagccaaggatggtaattgcattactctatttcctgcaaatcctgatcaaccagaaccatcaatccaggttagacacgcatttctgctgactgcagtcagctcccaaggccttttcaccctggattcagaacctacaatgaggctgcatctgctttgggtacacgattcccatgaatttaatccttgaccaatgagaagtgcactccaggcat

SEQ ID NO: 104125 - DNA, 647 bp, Homo sapiens
aggggttgcaggcaaaatcttatctcatctaaagaaaaggcatctgcacatgttaccagaggtgaattcctatgggtcaacccaattcttgtctctcctcagcaacaacctcaattcttgcctcctcggacgaaagaatttgaccaagggaacataaggcagagtgagagactgaggcaagttgtagagcaggagtgaaagtttattaaaatgttttagggcaggaatgaaaggaagtaaaatacacttggaagagggccaagtgtgtgacttgagagactgacatatgcagtttgacgttttacttggagttttctatgttggtattcttccggagtctgcctctctcctcccctgaatcttcctttggggtaagctgtctgcatgcacagcggctttccagcacctgagaggggccacatgtgcagtgtgtttcctagagttgtatgcatgctcacttgaggcattcttcccttascagccaaatgttcccagaaggtcatataccagttaaactccaccattgttcctcttaatgcccatgcttgagtccactcacctaattcctgagattttattgggaagctgctgatcccccgtttctgtttttttctagctattgggagactgcttttccctgatgctgt

SEQ ID NO: 104126 - DNA, 628 bp, Homo sapiens
gaaggttgcttaaaggcccagaaaactgaagttctgtatctttgcatctctgctcttaaggatactttcgattgccagcagcgaccagccaatccatgaaagagaagttcttggctcatcttattgggaagtctagagttggtaaaaagaaaggcactgtcacataatatatatcaggcacctcaaattggcatctttgatatttgctcttccttctcaactctgatgctcttagttttcatcattacatgaaggccctgtgatagacattcagtttagactagtgttattttcaaagagactatcgttggagatgaaggatctaaaggtaaaaggtgtcctggttccataaaaagattcctcaagctccaaaattcttatgtaaatttacacacacacacaaacacacacacacacacacagagagacagagagagagagagagagaaagttgaagtacatttctgcacatatgcataggatttttcagagagaaaatascctgtcataagtgggattatttagtctcactaacatacatggaaccttggaaaattttcaggatgactatcaggcctgcaatcctcctatatggcatggcttttataaaacggaatattagggtttt

SEQ ID NO: 104127 - DNA, 555 bp, Homo sapiens
ctctgcttcataatatatataactggtatctgaaaaccacacaaggatccatttcaatacccttatggatgtcagatatccagaccagacactgggcaaaatatcaaaagtgaggaaaaggaaataaggaaatgggcattcatctggcaagctatgaagtatcttccctttctatcgaaggctttctaaaactcagatgcaatgagacaaatttaaaaactgtagattgaaggcttttagaggtagtcactacaatcagttcatctgagaaattgcatcattatcacaagcatttattgagtacccatagaactcatggtacyttcacggtgtttacagaactttgcttatatgccgaccttgcccttaaggagcttacaatctagtggaaagaaagacggagaaactcagatgtgatagagcaatgagtgaacagatactatagactgaaaaataaccataaatgtaaaacacatactgaaaaatgagggttaatggggatggcaaggatgataggtaggcctggatatactcctgacttcttgaaggagtaaa

SEQ ID NO: 104128 - DNA, 555 bp, Homo sapiens
ctctgcttcataatatatataactggtatctgaaaaccacacaaggatccatttcaatacccttatggatgtcagatatccagaccagacactgggcaaaatatcaaaagtgaggaaaaggaaataaggaaatgggcattcatctggcaagctatgaagtatcttccctttctatcgaaggctttctaaaactcagatgcaatgagacaaatttaaaaactgtagattgaaggcttttagaggtagtcactacaatcagttcatctgagaaattgcatcattatcacaagcatttattgagtacccatagaactcatggtaccttcacggtgtttacagaactttgcttatatgccgaccttgccyttaaggagcttacaatctagtggaaagaaagacggagaaactcagatgtgatagagcaatgagtgaacagatactatagactgaaaaataaccataaatgtaaaacacatactgaaaaatgagggttaatggggatggcaaggatgataggtaggcctggatatactcctgacttcttgaaggagtaaa

SEQ ID NO: 104129 - DNA, 604 bp, Homo sapiens
tctcctcttcctgagcacacatgagactacatttcccaggatcccatgcagttgggtgtgacccagtgtctgagttcttgccactggagcttgagaagtgatgtgtgaaaactctatgtccccaacaaatacagcctcaccccaaacacacacataaatacacatgcacacttgtaatgaagaatamcccctgggcaaccatggaaaaatgtgttaatatttgcgaagacttctttagcctgagtcaatcaataattgcagagagaagggatacatggaacactattcagctgtaaaaagaaatgagaaagattgctatatagtactatgaagtgatacctaattattaaattattttaaaaggaaaaatgcagaacaatgtgtgtagtatgttctatattgtttaagaatggtattgtcaaaagctgactttaaaaaatggttacgtatagtgttcacttcagcagcacatatactaaagttggaacaattacagagaatattagcatggccccttccatatcttaaatttttaaaagcaattaaaaaaggaaaaaaaattggttacctataggaaaggaaacacagagcatatgacaggaaa

SEQ ID NO: 104130 - DNA, 604 bp, Homo sapiens
tctcctcttcctgagcacacatgagactacatttcccaggatcccatgcagttgggtgtgacccagtgtctgagttcttgccactggagcttgagaagtgatgtgtgaaaactctatgtccccaacaaatacagcctcaccccaaacacacacataaatacacatgcacacttgtaatgaagaataccccctgggcaaccatggaaaaatgtgttaatatttgcgaagacttctttagcctgagtcaatcaataattgcagagagaagggatacatggaacactattcagctgtaaaaagaaatgagaaagattgctatatagtactatgaagtgatacctaattattaaattattttaaaaggaaaaatgcagaacaatgtgtgtagtatgttctrtattgtttaagaatggtattgtcaaaagctgactttaaaaaatggttacgtatagtgttcacttcagcagcacatatactaaagttggaacaattacagagaatattagcatggccccttccatatcttaaatttttaaaagcaattaaaaaaggaaaaaaaattggttacctataggaaaggaaacacagagcatatgacaggaaa

SEQ ID NO: 104131 - DNA, 597 bp, Homo sapiens
ctggtatgctctgtaggagcttaaccagatcagtcctgttccccaacccagcttctggtctgctgctccagcagacagccctgtgcgtcccgctcctcccacctctcagctttcagggtcaggattggtgcagggaagcacatgctttataacatgtgattattcagacatagggtatataagacaccatttgtattcttgtactgagtcctgcaaatgttaaatttgggcttttggatattaattgggccctttcaaaatggtgattatcctttagttctgggacatgtattttattgtttcattgctaatgtctttctcaacatattctcagatttcttggtttgaaattcatgatagttgatatttaaaaaaaaaatttgcatctatggaacatctttttgccttttttcctactttacatgagagtttcttaactttatattttattgaatttgtcagctatgtttacaattccacatatttcatttgttttctggtcarttttttaatttaattgcttcctattctatatgagcatggtgtctatttttatctctcaggatatattaattatcatctcttaaaggtttccat

SEQ ID NO: 104132 - DNA, 605 bp, Homo sapiens
aaaaaaaaaaaaaaagtttagctttgaagctatgaggctatatttttcctgctgtgactttagtttttaattagattttctatccacattgtatatatcttttacccattcaagtttgtaatctatcttgcttttaaagacacacacctttttctccacaagttgcaattacctatcgtttgcatataaaattaaataatttagattttttgaaataatatgtgaggttaaaatattgcttgccaatgctccaaacaaaaatgattacttttaaaatggtatcgaccggcaatgtgtgaattaccatcaaaagcaacctggtaggatttcatttatgttccaaaatacttagagaaacccagtagaaaaaaaaaaaaaaaacagtggaagtgatccccaaatgctccttgttgagttattctcttaraaaagcttctggaaagtctgtctacaaaggtaaagggtttggtgtttttgtatagttcctaagatgccacagtagcctcacagctgtctgttgcagcttgctgtttcccagaatgagaataaatgagtggcacgagggaaaggcatttaaggctaacatgacaaactttatgcacttg

SEQ ID NO: 104133 - DNA, 605 bp, Homo sapiens
aaaaaaaaaaaaaaagtttagctttgaagctatgaggctatatttttcctgctgtgactttagtttttaattagattttctatccacattgtatatatcttttacccattcaagtttgtaatctatcttgcttttaaagacacacacctttttctccacaagttgcaattacctatcgtttgcatataaaattaaataatttagattttttgaaataatatgtgaggttaaaatattgcttgccaatgctccaaacaaaaatgattacttttaaaatggtatcgaccggcaatgtgtgaattaccatcaaaagcaacctggtaggatttcatttatgttccaaaatacttagagaaacccagtagaaaaaaaaaaaaaaaacagtggaagtgatccccaaatgctccttgttgagttattctcttagaaaagcttctgkaaagtctgtctacaaaggtaaagggtttggtgtttttgtatagttcctaagatgccacagtagcctcacagctgtctgttgcagcttgctgtttcccagaatgagaataaatgagtggcacgagggaaaggcatttaaggctaacatgacaaactttatgcacttg

SEQ ID NO: 104134 - DNA, 567 bp, Homo sapiens
gcattcactttttatactcccattcgaaattctttacattttatgtatatccattttaagtgtatccagaaataagaacaacttgaccacccaggactacaatattctctcataagcaccacaagacaggcaaatgcttagatgtttttctctcttccagaagtagccctctgaccatgaaaatccattatattggtctcttgttctttacccaacattggtaaatggccctagaaaaccatcaactgacatyttcatggttctcttcttacagaatttcagttccttcatcctcattatttcagcagtcctatgttgtctttgtattttatttaggttgctagttattctcagaagaaaagttggtcattcataagctatttaatggtactgggaaatggaaattaatgtatggaagtttaatggacattgacattactgtatgtcaaatgcacttgagcatatatatgtgaagttcctttcaaactaaactgggaaagaaaacataaataacatttgaaaaagcaaaacaaagaattcttagactaaaaaataggaccacaattt

SEQ ID NO: 104135 - DNA, 583 bp, Homo sapiens
acaaatgtctggtatgtggtttccaacgacatgtaccagagatttaccccaaactgccaagagaccctgtcattctttagtaatcaagaatcacatcctagaccaattctgttatttcactaaagaaactagggggtacccaaaagataccatgcagatttgaagaattatttctcaattcagtgaaaaacagtaagccctgattacaaattcttaggccattggaaggccttgaaattgacactcatccgtaacatttatatttgtttccagggagtgataccacrataaacgatattttctatcattattttaggccactcctattattgatttggggataattcttgattgtacttagaccttttagggattagatcttcatctagagaattatcgttttatttaaggcaatattgtgcaggtttcctttttacctttttttccttttgtaagctgtaccaaccaatattttgtttcacagtaaaatgcaggcaacctcaccatgctctttattttatgtcattgttaacattcaagtatgagatacttgaatacttactttagatgcatttttttcctg

SEQ ID NO: 104136 - DNA, 204 bp, Homo sapiens
catgggtactgtcaattatgaagcaaggaggaatgccattttagaatagaaatataaacaacgatctttgggaggactgtggaaataaagataaacttagtaaagagaaaagagaggaaaaratttctgaaccagtacagcggtgtgagccatgaacattgtgatgagtgaggaaggaaatattttctcccctacatactttta

SEQ ID NO: 104137 - DNA, 533 bp, Homo sapiens
tggtgcctagtggtgacaatggtaacatggactgtcaaactgggagtcacaacatttcacaccacccataatctctctttgaaaagaaggaacaggctaagcgacatggaggtagtgtttcctctcagccatcagtgtggttttctagagtggcagccatgaccaacagatgttaaagaccttgcttttctgcccttcctcctgccttcactgtattacaggcttgatcaaatgagtcaatgtatttaggataatgaaagccaggtttctcaatgttagtgaagcgtgttacagataagaaaagagactacamtatacccggggtggtgctggcttgggattgaattaacacacagtttataattaataaagatatttactagctctgttgctgagtggatctagaagcaatgatacactgttagcaacgagtatacctagtgccaggactccttggataaaaggctgcttcccagggtaaggcagcatatgtaaaagatgaacctggagacattctgtcaagccagtgcatg

SEQ ID NO: 104138 - DNA, 533 bp, Homo sapiens
tggtgcctagtggtgacaatggtaacatggactgtcaaactgggagtcacaacatttcacaccacccataatctctctttgaaaagaaggaacaggctaagcgacatggaggtagtgtttcctctcagccatcagtgtggttttctagagtggcagccatgaccaacagatgttaaagaccttgcttttctgcccttcctcctgccttcactgtattacaggcttgatcaaatgagtcaatgtatttaggataatgaaagccaggtttctcaatgttagtgaagcgtgttacagataagaaaagagactacactatacccggggtggtgctggcttgggattgaattaacacamagtttataattaataaagatatttactagctctgttgctgagtggatctagaagcaatgatacactgttagcaacgagtatacctagtgccaggactccttggataaaaggctgcttcccagggtaaggcagcatatgtaaaagatgaacctggagacattctgtcaagccagtgcatg

SEQ ID NO: 104139 - DNA, 409 bp, Homo sapiens
atgattttgagtggaagtgatctgtatgacttctaggtcagaacatttaatgcccaagtgagactttccagaattctctttccttctgtaatgcctggaaattttccagaaagtggtggttttataagcctgggtgcaagagtgaggacaatgaggagcaagctcccagctgacccacagagagcatgcactakgagcaggaaaccttggttgttttaagccactgagatttttatgggttatttgttaacaatagaataagcaagcttattcttgattgacatagtctctaaagagtgtaatggtgatgaatgagggaaagtttcatacttacagaagatcttttttcttaaattaaaattttacagacctttctatagatagatgttaaaactacttttaggggaag

SEQ ID NO: 104140 - DNA, 555 bp, Homo sapiens
gttgtgggtggagatggggcaattctcaggccccaggcagagtgttcaggtgaggggtggtagcagttgtgctaagactctgccactggaagggatgaagtcttcctcagtggccacagcctaagtctgttgggtgggaaacacatgtttctctaatgctgcagtcccagcagggctcacccactagcccttgcagtggtagcctgtgtctagcttgtgtccccactctggctgcaggaacctccaccctactcatgtcccagtctccatcctggctgtgctcacttctcagcaccagcagctgcagtgcatgccttgcctgcttcttacccttggctgcagcagcattcccagctcactcctcagttctagcagtgacagcccaagtttccctaatgcctcggatctggcactactgggtcctaggacascatgcagtctgcccaaggctaggtttgaaaatggctccttactatagccagttagatatcagaaagggtgtgaggacccagtcccagtgtgagctccctccctggagtagttccatcccgtgtt

SEQ ID NO: 104141 - DNA, 564 bp, Homo sapiens
aatatttcatactcacgtgcatttgttctcttttactcctgattctccaaatctttcttaaaactttcaaactttaagtccttttatgctatcatacccaattttcaattatttgtatcaaaggaaaaggatatcataggggaaaacccttctatattattttaccagtctaatttctagacaaaagctttgaagtggtaacagaagaaatgtatgtccaaataagccataagctaggaacacagaccaacaattagcaatgaaggtcaaatccgagtacaacaaaagccatggagaatactgatatcctttgttggagtgacatttcacagacattggtaccttgttaaagattacatttccaagatcaaaatggacaacgatgaaacatgctcaggaatagaaagcaagagggttttactaacagtagccctctagaatttataaatggtactgaatgactgacaggaagataagtagcatattaccgttcagggaattctgttactttcaaaccacgtggggtagcagggaggyagtgggggtgtctgccacgattagtct

SEQ ID NO: 104142 - DNA, 576 bp, Homo sapiens
taattatcaagggatgcaaataaaaaccacaatgcaataccaccttactcctgcaagaatggccataattacaaaattaaaaaattataaaataacagatgttggtgtggatgtggtgaaaagggaacacttatacactgctagtgggaatgtaaactggtacaaccattatgaaaatcattatggagattccttaaagaactaaaagtagaacttccaattgatccagcaatcctacttgtgggtatctacccagagaaaaagaagtcattatatgaaaaagatacttgcatacacatgcatatagtagcacaatttgcaattggatatatatacatacaatttgcaactaggatatatatatatatatatatattatatatacatacatatatataatatatatatcacaagttatttttacatatacacaccatagaatactactcagccataaaaaggaatgaaataatggcattcgcgcaacctagatggagttggagaccattattctaagygaagtcacttaggaatggaaaaccaaacattgtatgttccacttgtaagtgggaaatc

SEQ ID NO: 104143 - DNA, 458 bp, Homo sapiens
atgccaatagtttatacgtaataggtgcacaataaatatatgattggattttgggtggataatcaaataatatcttgcaaaagtcctgctattaatttatttggtaatttataaagaaatactgtaagtgcctattattaaacaggttcattaggcatcatgatggttgcattgtgtaaaatatagcctttgtttataaactgcttataatctaattgaggaaggcaatccacagagcaaatgttatctaaccaatacacaaaatgatcaaagactagggcagtatgtattatgtgcaatcaatggagatgatgtaaaggaagtactggggtgaatgttttctactttttctccttgaatcctccagaggcttcgaggaggatgtacaaatattctgaacsctctttgccacatagccaaagccacacaaaattgggactcccattctctttcccaaa

SEQ ID NO: 104144 - DNA, 605 bp, Homo sapiens
tgttttttcaatcttattcctttgaaacccatgttcaattaatcaagccatttcccaccacccaataatttatgcatatctatagtgaaggacacttctatrtaaactaggtgaccaaatttacagcccacaaccatgtcacctgagagcatttccctttcctactatgttttaggaggggagctgtcatgtgtcagcagtcaacttttagctagcaccaacatatcatcaatgagccaggccagagttctcttttccctatcattttgttgtaggaaatctcttatgagtcacgtgtgtgagaagagggtaaataaagtaggcattatgaaatttacctgttcatgtaatttactcatgctttctggacctactcaggcccagatctaaatatataatttcaccaaacaatggactactgctattctcacttaaactcatgcctcagcagatctgattgtactcaacttaaagggtgattccaattacatagtcaattagtattccacagccaagcattcattttttaaaatgtaattggtatttccgtgttacacatttttaagtatcagaataatgagtcctagggttcaccaagattcttt

SEQ ID NO: 104145 - DNA, 605 bp, Homo sapiens
tgttttttcaatcttattcctttgaaacccatgttcaattaatcaagccatttcccaccacccaataatttatgcatatctatagtgaaggacacttctatataaactaggtgaccaaatttacagcccacaaccatgtcacctgagagcatttccctttcctactatgttttaggaggggagctgtcatgtgtcagcagtcaacttttagctagcaccaacatatcatcaatgagccaggccagagttctcttttccctatcattttgttgtaggaaatctcttatgagtcacrtgtgtgagaagagggtaaataaagtaggcattatgaaatttacctgttcatgtaatttactcatgctttctggacctactcaggcccagatctaaatatataatttcaccaaacaatggactactgctattctcacttaaactcatgcctcagcagatctgattgtactcaacttaaagggtgattccaattacatagtcaattagtattccacagccaagcattcattttttaaaatgtaattggtatttccgtgttacacatttttaagtatcagaataatgagtcctagggttcaccaagattcttt

SEQ ID NO: 104146 - DNA, 426 bp, Homo sapiens
gggcacagtggctcatgcctgtaatcccagcactttgggaggctgagktgggcagattatttgaggccaggactttgagaacagactggccatcatggtgaaacccctggtctactaaaaatacaaaaattagccaggcatggtgactcatacctgtattcccagctgctttggaggctgaggcaggagaatcacttaaacctgggaggcagaggttgcagtgagtcaagattgcaacactgtactccagtctgggcagtagagtgagactgtctgaaaaaaaaaaaaagcctacttcagtaacccaagacttatttgaaatggcctaggaaataccaatttagctaatatgaatgatatttagagcttttaaatcacactttaaggaaagagttgattcttcatgattatgaaatatttatcaca

SEQ ID NO: 104147 - DNA, 624 bp, Homo sapiens
aataagcataataaaggagaaattatccaatgaaacagagaaaaacttttaaaaatcactattgtgcaactatataataatactaaaaacttagataaaattaaaactgtttaggaacatataatgacccaacctaaccccagtggtaaaggaagtctaaacaaatcagttattgcagacaaaacagaatcttgagggttttcctcaatgaaaagacagggactactagatgatttcatagggaattctaccaagcttttaaagtttagataccaacttttcttaaagtgctccagatagaaaaagaagggaaacttccagatttctagttctataaacatgatattcatatcaacctctgataatgattgtaaaaaaataaaccaatatatcatacttactaatgttgatcaaaaaatctcaaaagcaataataaatagaatctatcagcatattaaaaaagtacataatatccaagtgtagttcactgaaaaatataaagatggttaatataatcatctccatgaatatggwaaatacattagacaatattaaacacctatttctcattttaaaaaattcaataaaataagaattaatagtttatcagtccattcttgcatt

SEQ ID NO: 104148 - DNA, 575 bp, Homo sapiens
aaggtcctgccttaaggccaatggatttattcctggggggactgaatctgtgaattgaatcaagcctacctagggattagttgaaaagccatgattttctatcgcgatgactccagtcaaatccaaagaaaccttagtagactacctatctacttcagtctttaggttcctaaacccaaacagccataaccaagatccccgtgggtcagaccgttatcactccagcccgactctctgtgatggttccatctgatgttctctgctgctgtctctggtggtcacacaccattgcttgtctctgcccttctaggatcttccgtcttgaaatcaggagcctgtttccaccacactctctccgacctgcatctccggccctcrgagaaaggccattatcctacttcccaatggggccagcactctcctcaccattgtagttctagtgaaggttgtgtcctcttggagaacaaaattagagagaggtttacgcataataatctcacttcagagctataattttataaagaatttctggcgtttcagtgtaggccatgctcgagtccgggtttccatcaccc

SEQ ID NO: 104149 - DNA, 516 bp, Homo sapiens
tgatctttttggtatagccagcccctatgctgaggttattaggggtccaccatgagtcaccttgttagcatacacttaggtgtgatctgagaggcccaccaaaaataacaaagacactcttatcatttggaaaattctaaagatttagaggctctctcccaatacttggagaaaaaagacaagtaaaattttttattatacaacatggaaattttagagtttatagtttttcttgtrtatatattaggcaatatattaaacaaaaatgcatgtaaaacgtccttcttataggaacacctatgcaaaatcttgctggcgtgaatcctatatggcttgcttaattctagctgatgatgtctctgcatgtagaatgtccttgtaccactcttccataaagatgtatcccatcactccctaaacaaactcgaggaacatctcttccaggaactctttcttgtttagtgcacattgtgttgatggttttcttttttacaatcttaactttacaatactatg

SEQ ID NO: 104150 - DNA, 609 bp, Homo sapiens
tttgtttttatctttacaaagacatgtacataaattaaaattttatatgatcttgtggtattttaaaaataatcagaacattctatttcaattctgactaaattattgttatgattattgctttttactaagactgaagctaaatcagttctactgtgattatgattcaggttgtgctgaggaatccctaatctgcgtttctttttttctcctcccccttgctaagtgatattatacctagcacaatattcctacctcaactrtgggacctgtaagggtttaatgatcttaatttatgtatcctcatttattacgtagtacttgtaaacaaagacctttacattgatgcctgtgaatgagacatccagaagaacttttcacatacctagaaattagtgcatgctctactttcactgatgcaaatatttactaacaagagagaaaaagaaaataatctttctctctcgtttttttcccttttctgaaacctaaaagcattttgttttctagagctctgtaaaagttaagcacataaaaggttaggagcctgacttttttctgtcgtgtatatctttgaaaaattggtttatgaagagtcatacatcatgt

SEQ ID NO: 104151 - DNA, 573 bp, Homo sapiens
catccttcacattctctttccaagctgcacctgttgctttattccttagccttcatttcttgggtggatattttttactacattgttttgtactgrtttgtgtattttgcttagcagttttatgctgattgcatgtgttttgtatctttccaagtagattgttatatcatggaaagcatagactgcctttgatttctgtttttctcaaagtacccaccaaagtgttttggatgtatgaatattatattgaactatttaaaataagttttaatgaggggcttttaatttaaatgcttaaaattatatgatgactccacataaccatcaataccaacatcagaaataccagtacttagaatggtacacctgtttaatccagtttaattctcattttgcagatagaaaaactgaatggataaatgatgcaggacgggtgcggtggctcatgcctgtaatcccagcacttttggagccaaggcaggcagatcacaaggtcaggagatcgagagcaatctggccaacatggtgaaaccatctctactaataatacagaaattagctgggcatggtggc

SEQ ID NO: 104152 - DNA, 547 bp, Homo sapiens
ttttgtagtttgctcataatctgtatgaaaaaatgaataaatttcaggtgcaactttctaatttcaaagccatccagcaagaaaatgaactctttaataaagcagagttttccccactgcaagaattgttcaagcaaagactatcaactttttttattttctgggatattattataggaacctttttacattaagggaaattattcatactttcagaaattaggtttccattatctaaatttttttatacatgaattgattagcttttatgctgctatattgtggctattgtttttctttargactttattttgttttttagccatatagagtggtgtcagggtgagaaaggagaaaaggagatataattcaccccaaagagacactccttatcaatgagagagaaaattaagaatgtttggctttcaataaataaccaaaattctttgatgacgttgagaatgcatggaaaagcggttaatgtatttagataattcaagacactataagaaatgtgtgaaataaaagaaagattgagagaaaggaa

SEQ ID NO: 104153 - DNA, 588 bp, Homo sapiens
tataaacaatagaaacttatatctcacagttttgtaggcagggaaacccagatcaaaacaccaagttcctgaagattcagtgtgtggtgagtgccaattcctcctagatggttctttctccaaagtcctcacatagcaggagggatagaaagggcaaacagcttccttwcacctcttttatagatcacaaattccactgaagaggggagagcactcctaaaggccccacctcttaatacaatcgcatttggggattacatttcaacatatgaaattggtgggacacaacactcacaccatagcagaggaaacagaggccttcactactatgtgtgactgcaatgatctatttacatagtgagaggggctggcacagtggagctgaggttataagccattgggcacaaccacactagcactatattaatttttaaaaactataccttagcatacaagtgatatttaaaggagctgggttttttgaaccccaaccctgatctcagagtagtatctaaggacataatcattaagtatttctggacttgtgtggctggttttcatcatttgtagggataggattatgtgtgt

SEQ ID NO: 104154 - DNA, 588 bp, Homo sapiens
tataaacaatagaaacttatatctcacagttttgtaggcagggaaacccagatcaaaacaccaagttcctgaagattcagtgtgtggtgagtgccaattcctcctagatggttctttctccaaagtcctcacatagcaggagggatagaaagggcaaacagcttccttacacctcttttatagatcacaaattccactgaagaggggagagcactcctaaaggccccacctcttaatacaatcgcatttggggattacatttcaacatatgaaattggtgggacacaacactcacaccatagcagaggaaacagaggccttcactactatgtgtgactgcaatgatctatttacakagtgagaggggctggcacagtggagctgaggttataagccattgggcacaaccacactagcactatattaatttttaaaaactataccttagcatacaagtgatatttaaaggagctgggttttttgaaccccaaccctgatctcagagtagtatctaaggacataatcattaagtatttctggacttgtgtggctggttttcatcatttgtagggataggattatgtgtgt

SEQ ID NO: 104155 - DNA, 629 bp, Homo sapiens
ggatcatcagtatgttatggctcaaatacctttgtagtcttggaaaacgtagttaatacttttggtcttcattacacttgtcttcaaaaactcattacaagatgtctaagaatcttaactaatgtcaataatttaattaaagaaattatttgaagtcttaaatgccaaataattaaggtagtacatatatagagtcaataatatagaagtatatagattcttttatctaaaaaactgatgtatttgatatgacatgatttatgacagcaaatttaggctaaatgcagctttatagtatttaaaaatcaaatttctgrcatttatagatatgttttctaagtattactcatttaattcagcaaatagctttgttaacaaaaatggggctttcttttcctagtattttttcttcataccaagttggaaatgttaccttgagggtacattgattagttatgcatgttttaagtgtaaaatgctctgggaattaaaatgaagagctaactaatttacgtaatagtttctccatctctagccccacatcatctgtcttcaaaaatttgactttcattggatacttcttgaagaattactaaaatatgtccattaaaatataattattaatgata

SEQ ID NO: 104156 - DNA, 525 bp, Homo sapiens
aatatgattaatagttgaaaactatcatgtttaggaaggtattaaaaccctccaatatgaaaactgctattttaatttcaacatattttaaaagctggtataaaaaatgtagctatacagatggtatcttaaaataaaaaaattaactccaaactttattggctgaggcatttaaaatacttttccaaaagggtaaaacaaattattattagccaaactcaatacatacagcattttctacctcaaacttttgtgaaaaatgaaaaataatttttttctctgactagttatttaaaatggcctacacataactccttttaggcaacatttttaacttccagagcmaattgttttttctgccagttactgtaattggtaacagtctcgtctaattttaatgatttttatacagctattgcctataccgtatatttaaatcagtaaaatgttttaaaaattggaaaataatgaattttaggttatacatttattaatttaaacccagctgttgtgaggaaaacacac

SEQ ID NO: 104157 - DNA, 576 bp, Homo sapiens
actgaaaaacaactattgattttgctctaggggccaagcttatatacattaaccaggatccaatcacagccctggatttatttttgctgaggcaagaaagggaatagttcatattttacgttgcatcaatataaatgtcactggtcaggtgaaacaacgtacayataaacttaaagaaaagtcatctgtcttcctataattaagcttaattgatcatagacatattatgttctaaacttagcaatttagatatatatatacactcattattttagaggaattaataatgactctgcttctgatcatttcttttatttcatttggaaatgtattctttccagagtcttaaatgcctgtatgtatccattttacattggattattcctgagttcatgctacaataataaaaaacgacaaaaatattcagcacttattttagtctacctaaaaccaataatatctgtacaaattttgacagtcagactgtgactttctattgatgtgtaatttacatataataatatttaccctttcaagtaaaaatcagtgtttttagtgtattcacaaagatgtgca

SEQ ID NO: 104158 - DNA, 573 bp, Homo sapiens
ggatcacataaaaaatccccctgtaatagctggtatgttatcattcccattattaccttatattacatagcacagtgaatgtaaatattgggagtttatgtaggtatatttaatttaatcamcagcacatcagactaatttttgtacttttttgtagagatggaattttgccgtgttgcccaggctggtctccaactcctgggctcaagcgatctgctcacatcagcctcccaatgtgttgggattataggctgagccactgctcccagccatggataccattaataacacagagttttctctagctggtaacagtagaagaaatcacaaaattcagagagaaaaagtagatgcacccatcctaatttaaaagaaggagaagagcaggggagaaaaaattgagaggcccctggaagctgagagcagccctttgctgatgagggccatgaaataaggattttcaatccataaaagcagataattggattcttccagtaaaatgaatgagcttagaatcagatttttttaaagcctccagatgagaatttagcccgactaaaaccttgaatttgg

SEQ ID NO: 104159 - DNA, 573 bp, Homo sapiens
ggatcacataaaaaatccccctgtaatagctggtatgttatcattcccattattaccttatattacatagcacagtgaatgtaaatattgggagtttatgtaggtatatttaatttaatcaacagcacatcagactaatttttgtacttttttgtagagatgraattttgccgtgttgcccaggctggtctccaactcctgggctcaagcgatctgctcacatcagcctcccaatgtgttgggattataggctgagccactgctcccagccatggataccattaataacacagagttttctctagctggtaacagtagaagaaatcacaaaattcagagagaaaaagtagatgcacccatcctaatttaaaagaaggagaagagcaggggagaaaaaattgagaggcccctggaagctgagagcagccctttgctgatgagggccatgaaataaggattttcaatccataaaagcagataattggattcttccagtaaaatgaatgagcttagaatcagatttttttaaagcctccagatgagaatttagcccgactaaaaccttgaatttgg

SEQ ID NO: 104160 - DNA, 573 bp, Homo sapiens
ggatcacataaaaaatccccctgtaatagctggtatgttatcattcccattattaccttatattacatagcacagtgaatgtaaatattgggagtttatgtaggtatatttaatttaatcaacagcacatcagactaatttttgtacttttttgtagagatggaattttgccgtgttgcccaggctggtctccaactcctgggctcaagcgatctgctcacatcagcctcccaatgtgttrggattataggctgagccactgctcccagccatggataccattaataacacagagttttctctagctggtaacagtagaagaaatcacaaaattcagagagaaaaagtagatgcacccatcctaatttaaaagaaggagaagagcaggggagaaaaaattgagaggcccctggaagctgagagcagccctttgctgatgagggccatgaaataaggattttcaatccataaaagcagataattggattcttccagtaaaatgaatgagcttagaatcagatttttttaaagcctccagatgagaatttagcccgactaaaaccttgaatttgg

SEQ ID NO: 104161 - DNA, 573 bp, Homo sapiens
ggatcacataaaaaatccccctgtaatagctggtatgttatcattcccattattaccttatattacatagcacagtgaatgtaaatattgggagtttatgtaggtatatttaatttaatcaacagcacatcagactaatttttgtacttttttgtagagatggaattttgccgtgttgcccaggctggtctccaactcctgggctcaagcgatctgctcacatcagcctcccaatgtgttgggattataggctgagccactgctcccagccatggataccattaataacacagagttttctctagctggtaacagtagaagaaatcacaaaattcagagagaaaaagtagatgcacccatcctaatttaaaagaaggagaagagcaggggagaaaaaattgagaggcccctggaagctgagagcagccctttgctgatgagggccatgaaataaggattttcaatccataaaagcagataattggattcttccagtaaaatgaatgagcttagaatcagattttttwaaagcctccagatgagaatttagcccgactaaaaccttgaatttgg

SEQ ID NO: 104162 - DNA, 651 bp, Homo sapiens
ttgataatttttgtaaaattgatttacttcttcctggggcattcattttcagcctcagccacctgtatttatataagcagctaagtatgtagaacttatctaatcaaacttttgctagtataaggattaagttttgtcttttgaaatttgccctttgcagaatgtagttcctgcctttaagaaaccagaatgtaaatttcaactttgtagccatcatgaaatgcaaactctttcaatgctgaatattttcagttacatgaagaataaacagtcaaatactttaccaaaaacatgtcagttgtttktaatagtcccttatgtgtatgccatgaaaatcattcatattctaaagtgccttacatacagaaactcctcatggtaaaataaaaggctataaggaaaataataaaacattgatcagtttatagtttatttcttgatttacttttctgattatggatgccaagaggcaagtgtggaatgattctagaacagtaaaacagaacaatctaaatcagtagttgctctaacgtatggcaaaagtataagcttaaaaataatttctattttgagccaaaaggtgttattatgcatgatgccctctataaaaaggtaactttctggaaattatgtgtattcctatgaaaaaat

SEQ ID NO: 104163 - DNA, 601 bp, Homo sapiens
ttttctctcataactagtaaaattcaattttgattcagtaagttctgaatatattatctatattgcctgttctgtaaaactatttcctgggagtggaatttcataggacttgtctatcaaatatattatgtgcatataagccagctcctctggatgtgttaactggatatgtgaaacataagagcctttataatatgtaataaaatttagttgaaatatacttaacattatattccatttgccacatgaattaataatatgtaaggtagaaaatcaagtttaaaaaatttggttgaagttgttmtttttttttttgagatggagtctcactctgtcgcccaggctggagggcagtggcgctatctcagctcactgcaacctccagctcctgggttcaaatgattctcctgcctcagcctcccgagtagctggggctacaggcatgaataaactgtaacacactctatcaaggccctgtatatatattttatatgacagtaatcacaatagctggattatcactttcgagacatccaaagtatatagtctttcatgagaaagagaggttttaagaatgagtgcataaactgcctactgttga

SEQ ID NO: 104164 - DNA, 555 bp, Homo sapiens
tactcaatatattatctgcaagcaaacttcaggtcatcattctatactatcaaatagaccttaatataagattattttcagggccaggtgccgtggtgcacaccgataatcctagcactttaggaggcctaggtgggcagatcgcttgagcccaggagtttgagaccagcctggacaacatggtgagaccttgttgtatcaaaaaaacacaaaaattagctgagcatggtggcggtgcctgtagtcctagctactcgggatgctgaggcacgagaatcgcttgaacctgggaggcagaaattgcattgagtggagaatctctgcactgcactccagcctggatgacaaagaaagatcctgtgtcaaaataataaataaaaaagattagtttcaaaggatataaatttgtaagatcagctrtactagtgttcattgtaaccctttgaaatttctgggtggatttttgtctttattacacttttgtactggataaaatccattgtcttttttataagtagtgtagtgttattcataaaatatcagtcacagaataca

SEQ ID NO: 104165 - DNA, 583 bp, Homo sapiens
tgcaggctagaaaatcaatatgtgtaaaccaattgtatttatacttgtagcaacaaaaatcaaattttaaaatgtcatttataatagccttaaataatataaattgcttgaaaaaagatgtggaaaaactagtaaaatttacaaatcattgctgagaagaactaaaaaataggttaaataaatgtagctatataccatattaatggattggaatgcaaaatattatttttaaaaaccttattctacacaaattatagattcaaatcaattaaatcaaaatgcaaacaatgttatgtagaaattgtcaaaatgattctaaatatatatggaaaagtaaaagtcrtaaaattgtcaaaaagaagaaatttgaaggatttataatacctgattttaagatttattacacagctacagcaataaagatagtttaatattgacatgaaggtagctatatattgatggaacataatagaaaatctagaaataaacttatacatacaaggtcaatatatgtacaacaaagaaagtaaggcaatttaacagataaataattattttcttattaaaggattctgataaacaa

SEQ ID NO: 104166 - DNA, 577 bp, Homo sapiens
gtgaacatttttttaaatgaatataacagtttaattgaacatgcaaggctgacccttaatgctactctgtctaacataacagtgttaagaagaggaattggtacagtctgcactctttagtatttttaataatgctattttaattgacaaattataattgtatacatttataggataaaatgtctggattatttcacttaacataatgtcctccagggtcattcacatggcctccagtaacagaattttgttctttttatggctgaataatattgcattgtgtgtatatataccacattcactttcttcattcatccattgatagacacttgggtttattctgcatcttggctattgtaaatagtgctgcaatgaacatggaggtaaatataactctttgacatactgatttcctttcctttggatacatactcaatagtgggattattggatcatatgatagttctaatttagttttttaaggaacctccacacaattttgcatactrtatgtgctaatttacattcccatgaacagtgtgcaatgattcccttttgtttacatcctcaccagtac

SEQ ID NO: 104167 - DNA, 571 bp, Homo sapiens
gaggctttagaaactgtcagaagtactgttaattttaatcatgctggttgcaaacttttgttgaaagaagatggtgcattttggcagccatctctgaaatcaaagctgtcctagatatttaatttttttttttttttggtgggctgtgggttgtgggtaagggaggaaaaggcagaactttaagaccaggaacttccaaaacatgcattatgaactcatacacatctgaagggattcaaaattacaatttgaaaaatatgtatctttttactagtaatctagtaatgctttatttcataattaattaaagtatgttccacaattccaaaaaaaataagttcacatatatatataatttggttagatggcctttctcaaattcatcctccatagaacatatcagatctatctatctatctatctatctatctatctatctatctatctatctatctatttatctatctatctwttcatccatctatcttcatcacaaggcagtctttatattttacacagaatggcagaaaaatacagcagaaaaatttgtcatttaatacagagaacagtt

SEQ ID NO: 104168 - DNA, 644 bp, Homo sapiens
taccttctcctctcaatttttcttaaccttcttctactctgcacaattattcaataatcactgaaaatggattagcaatcccaatggcaaatctttttagcagttgtgtggtataattagaccaaagctaattggaatagctaaaagtgctttttcaattttgacaataatttggggctttatttccctcttaccattgtttcttctaatgttttcaattcaaaggtgattaccttttttcaccaatggcaagttctcttcccttcggggcacatggaaaactgtatttctcaatcccattccaattaagcaggactatgtggctagttctagccaaggaacagtggaagccctcaggtgattttccagcctctctgctcctgaccaagaaaagaaagagaaaaaaaaacccacacacaaaggaaagaaaaaaagaaaacacctgttctttataatggagcctgtctgaattatcctaagtccctgaataatcatataatgctgaatctgcggctgacctgcactaaaaacaaagcatgaacaataaacaaacctttgttgttttaaktacttgaaatttcagaattaataaactgcctatcctgaccaatagtgtcttttcagaaaggaggaaaaatagtcat

SEQ ID NO: 104169 - DNA, 585 bp, Homo sapiens
aatgaaaaaaataataagaaatcacattatgcaaagatggcttttactcaaagtcctcaagagtctttccatatttcatatgaattgcagtttaaacagataaatagacaggttctgccttaacttgaaaacctataattttctcttgtttagagaagttmacttaagcaaaaacattttccatcaccattttattctcaccgtattcactcatcaataatgtgagagattgaggagagtagaaaggtaaatgcatatttgacaatggagtggatattataccttttaagaataggtcatttgtgtctttccaaagtctattgaatggtcaatggtgaacttaaatgagtattgttgccttatataatagaggtcaataatttaaggtcatatttatccagaactaagtgtgactttaaagtctaaagatccaggcattcctgtaagtgcaaagaaagagaacatcttacttcatttttcatcctgagttacacatgaaacttagggcagaaagaattttaaggatgcttcttattttgcaccaggactatagagagaactgtcttatcacaagtaaattttggc

SEQ ID NO: 104170 - DNA, 635 bp, Homo sapiens
tttacctaccacaatttttttcatcaaaaactttaacaaaatatatctggtcattatttcctagtagtcaggctattgcagaggagccaggatgcctacgtttaatttttactttgccatctcctcactgcatactttgtatacatttgttaaattgactctatttaactaaaaaattatgccgcactaaaaaactagtaataatatttatgctgtaggattattttacagagaaaaagttgtaatacatgtaaaaacacaaaattgtgcatggcacatggtaagaattcaatgtatattagcaaaaaayggcaggtatgcctcattgagtttacttttaagtaccattcatttttcctataaaatcattactttttttctctttgtttaagccctcccttccttcaagacgtatttcatcctttagtgaaggatgtaatatcttttatccttcagcaatatctcttcttctgaacttgtgtgtttcttctctgtgtcattgatgcagggcttaggtagggtgaccacattatttttattgttcaggttgggactgtggatatggaaagtgagtactattgattattaaactgagataacaggcatagattggatgtgaccagggcaaagggaca

SEQ ID NO: 104171 - DNA, 635 bp, Homo sapiens
tttacctaccacaatttttttcatcaaaaactttaacaaaatatatctggtcattatttcctagtagtcaggctattgcagaggagccaggatgcctacgtttaatttttactttgccatctcctcactgcatactttgtatacatttgttaaattgactctatttaactaaaaaattatgccgcactaaaaaactagtaataatatttatgctgtaggattattttacagagaaaaagttgtaatacatgtaaaaacacaaaattgtgcatggcacatggtaagaattcaatgtatattagcaaaaaatggcaggtatgcctcattgagtttacttttaagtaccattcatttttcctataaaatcattactttttttctctttgtttaagccctcccttccttcaagacgtatttcatcctttagtgaaggatgtaatatcttttatccttcagcaatatctcytcttctgaacttgtgtgtttcttctctgtgtcattgatgcagggcttaggtagggtgaccacattatttttattgttcaggttgggactgtggatatggaaagtgagtactattgattattaaactgagataacaggcatagattggatgtgaccagggcaaagggaca

SEQ ID NO: 104172 - DNA, 609 bp, Homo sapiens
tgaatacagatgccagtgaaagggtaagaagatcttaattgagaaagaattattcaaagctatcccaacctttctctaaaagctgcacatctgttacctattatttgggataccgaatttttctgcctcttacctagggtttacatagatcctcactattgatcgcctctcattaggtcattaactttccttggaggaaacattattgattgtttttcaacattcatgttctattctcccttcctaacagctttcaggttttaatttggatatccatattcgtgcccatgtaacctacatattttatgtaaagctgattcagattctcagacctcaggggtagaccttggttgacctaagacagcaaacatgwtctattcccctgaccaaagtcactggtacattgttgggcatgtgacttaaacagtttagtcagtatgaatctcagggctcttggttggcatatttagacaaaagttctttctcactggactaaccagagaaacacataagcttgattactactagcagccattctacatccatgaggctaattaacctaacaccacagaaaggagaacagaaagtctcgcaatcatccaaacctga

SEQ ID NO: 104173 - DNA, 578 bp, Homo sapiens
cccctccttttgagagtctttactaccttgattctacaattctacaatctcctggctcccttcatttctcaggacttactcctctcacttcatcttatgcttttgtgccttaaatgttagtgttgttttatctcagctctcttatgattctatatattcttcctgaataatactatttcctatatagtttcaactaatatttatatgctgcttactcttgattttatctctccacccaagatctttcccaaaatatacagacttgaaactcaagtttgtatattcaactcttcataagttatttctgtttgggtgttccaaagatgccttgagggcaatatggacaaaactgaaatggccacaatactagatcttcttctgtatataaatttttaacactcagacacccaaacttgaattcttagagctatctctggctccttttttctcttcattttttatattcaataagtcatctagagttcatgtcctttgcagggacatggatgaagctggaaaccatcattctcagcaaactatgataaggacasacaaccaaacaccgcatgttctcactc

SEQ ID NO: 104174 - DNA, 552 bp, Homo sapiens
tccaactggctgcattagttgtacttttggttttaagcaaaagaaccaactccagctagatttaagcaaagctaacctattgaaagaacattagattatctcatggagtccaaggaaaagtccagaagcrggaggaaccagatcaacttcagggaccttagcagtagaacttcatggaccttctcgccacagattttcctttagtttgactttagttcctgtgacttcccacctgtatctctcctcctgtccccaaattgtaatttctaggaaaaagcatatgttgaacacaacttgggtcaaatgtcctgctcaagcacaaccaactatgacaaaaacatatgtcaaaagagtgatatattacaaacatggccaccagagaccctgccttgtagaagagaccaatgtttgcaaaagggagaaatgttggtatccagcaagccacctcaagagaagtctgcccattgcacaggcttttttctgctgtgatttttacctccttcctcccttccccagttatccatatttatatatcactgtataaaattatac

SEQ ID NO: 104175 - DNA, 572 bp, Homo sapiens
gataggtacattgttaacattctatgtggtatatttttcttacctcatgcttcccttgaagaaaaatagtgttaactctgaaatatttgtgggggttgtaaaatgggcagaatttaaggatttcaatgtgatctattagattgaatgagagcagccagaaaattagttaaatgtactcaatttggtaaatgatctgtcataggactcaatttaaaaaatccttttaagcagaatttaggttttgtggatttggcaaggtatcaaatcttatgaaatatttggaggtcttaattcagcagtggactcaaaatagattctccttaatgagagttaaaagataaacrgcaaaaatcgaaatacagcttgctgtaatgtttcatgaaattgccagattgccagatgatacttaattggaagctcagaaaataatgatgagcaacctaatcagaaaaaatgtttttggtctaaattcctgaagaaggagattgcacacacagtagaccataaactggagacatctaaaaatgagtttgtgaaaaactaaacactagtccctctaaacaaaaacaggc

SEQ ID NO: 104176 - DNA, 563 bp, Homo sapiens
ggtcgcttccctaatcaatttagtatgagaactgtgttagtccattttcctgctgctgataaagacatacccgagattggaagacaaaaaggtttaattggatgtactgttttacatggctagggaggcctcggaatcatggcaagaggcaagaggcacttcttacctggtggcagcaagagaagatgaggaagatgcaaaatcggaaacccctgataaacccatcatgagaatagagttggggaaaccgtccccatgattcaaattatctcccactgggtccctcccataacacatgggrattatgggagtacaattcaagatgagatttgggtggggacaaacagccaaaccatatcaagaactttgcagttataactcaaatctaatttgaaccaaatcataaaaggttatataaggtggtattatgcaggaaaaatagaaacagagaatacaattactggtaatctgatgttattccactaatgcatttaagagtattcatagagttcagcctctcagaacataataagctgtaaagcgattatatctgacatttctca

SEQ ID NO: 104177 - DNA, 530 bp, Homo sapiens
attaaatcaagattctaatagacaataggttataaaatgctgcatactgatgaaaaaaaattcaagccaaaaactactagcaaattctgctaataaacattttagataaaatatagttacatttttgttttgagctcatctgaatcaattgtgttagagttctgattactagtttttctcattgctatttcayaataaaaaggctatgcaaatgaggttcattaattattaactacagttttaaatcatttacttatttacatctgcaacattcttctacagatttcaataaatttttgagtgtttttataaccagaatggtcttgaggggattcccatagaattatagataatttgataaagcaatataaacatcataaaattattcctattgtcatttaattttgaaatacataacataatacaaattgagcaacatatctagttaatgtcaaaatcatatgtctcaaaagcacactatactttaaattaccatgtaattatatatcaaattactcattaaaaatagc

SEQ ID NO: 104178 - DNA, 470 bp, Homo sapiens
gggtaatgtacaaaaaaaaaaaaaagaggtttattggacttaccrttcctcttggctatcgatgcctcacaactgtggcagaagatgaaaggcatgtctcacatggtggcagacaagagaagagagcttgtgcagggaaactcccctttttaaaaccatcagatctcccgagacttattcactatcatgagaacggcatgggaaagatctgcccccgtgattcaattacctcccactgagtccctcccacaacacatggaaattcaagataagatttgggtggcaacacagtcaaaccacatcaccataatagagttctcatgatatctggttgtttgaaagtgcgtggccgctcccacctctcttcctcctgctccaggcatgtaagatgtccctgcttcccctccaccttctaccataattgtaagtttcctgaggcctccccagaatctgctgtgcttcctgtacag

SEQ ID NO: 104179 - DNA, 470 bp, Homo sapiens
gggtaatgtacaaaaaaaaaaaaaagaggtttattggacttaccgttcctcttggctatcgatgcctcacaactgtggcagaagatgaaaggcatgtctcacatggtggcagacaagagaagagagcttgtgcagggaaactcccctttttaaaaccatcagatctcccgagacttattcactatcatgagaacggcatgggaaagatctgcccccgtgattcaattacctcccrctgagtccctcccacaacacatggaaattcaagataagatttgggtggcaacacagtcaaaccacatcaccataatagagttctcatgatatctggttgtttgaaagtgcgtggccgctcccacctctcttcctcctgctccaggcatgtaagatgtccctgcttcccctccaccttctaccataattgtaagtttcctgaggcctccccagaatctgctgtgcttcctgtacag

SEQ ID NO: 104180 - DNA, 553 bp, Homo sapiens
tatgtcatgacctgtgttggcatgggtgatagatttgtttctatcttcaaagactaaaatctaatactataacagaaaagcttaaatatttttcatgcgtacaacctggccttcattcttttaatccaaaacattagggctacaaatactgtttatttcaccaaggattatagagttatgtcatgttctgttgactgttattatttatgacataattttgaacaataaattatgatttgagaagaagaaattaggtaaaaatgatgaggaatacttagagctaagcaatacaaaagaaaagctttggaggtgaattcaaaacctaaaggatgacactgaagtacaacttgattgtaaaactagttttgtaactagataaatatccttattcatttaacttttatttgtatttataaataataattgggccaggagtggtggctcattcctgtaatcccagcactttgggaggctgaggcaggtggatcacttgagcyaaagagttcaagaccagcctgggcaacatggcaaacccccctctctaaaaacaaac

SEQ ID NO: 104181 - DNA, 587 bp, Homo sapiens
tctcattttaccaacagctgtgtagggatttgaaattaaatggccaacagttgtggatactgaaaattaaatgggatggggaaagttggcagcaaatatcctttaaagttattgcttattttcttgtttatttgttttacaaattagcatcattattttacatttgagaaaattacagcaggagagggtaaatgtatttgcccacaacaacacaaatagcatcagagttagaatttgaattcagtcctctggcttcaaatctcacttttgaacccccaagcaacactagccctctgctgcttcctctctccctccctcccctctttccttccttccttctttttttattcttatgacagtaattttaaatttctctgacaagaccatcacaagactaaaatacaaaaacaaaaaatagctaactagaatttttaaataatggaaaaaaacacaaacacttacttccaaaattttaccatggttggaagatattatttttaatactatctttaacaccttaaaaataatttcattcccttgatggaataggaatttctcaaatayggtatattatccagaagaaaggg

SEQ ID NO: 104182 - DNA, 591 bp, Homo sapiens
attctcccttcctctgcctttttgctctattcatgccctcaatggattgggtgaggcccatctacatttgctttactcagttcagagattcaaatgccaatcctctctggaaacaccctcacagacacacctagtataatgtttggccaaatgtctgggcatctcgcaacccagtaaagttggcacatgaaattaaccaccacagaaccttgctgctgaactatgcttattcttccatcctggtgacttttctttcctcaatcccagtttcagaagtgctctgttcttgttctctgagccctctctgcctgccatgcagatgcatttcaggtgggcatctcctctgccaagcctgtggggtttcccttcctgcagggcaacccctgtcctcttggtccccctaatattttactgttttatggtacttttgcatttcaaccttatgttatcatgatccatgtgcagccttctctctcctccgaggccaggagctcgttgaggacttcatctctgygttttctacaggactctgggagagggtaagaactcagcatctggaggttgaagacatgcgtagggaaaaagccgtat

SEQ ID NO: 104183 - DNA, 304 bp, Homo sapiens
tcttttgttctctaattagatttatttagattccctaataagattttattggaaaaaaaaaaaaaaacctttttaatcatcttttttggaccaggatgtacagggttgcatccacagatgtgtagttggttttcccagtgcaaattcataagtgctgggcaaaatggcctcgtgtagggctcagaactccggccctgtgagcaccattgttctagaaagatctgtgttctaggaagaacacttaaccatttctagaacgtttcttctagaaagaacaaaraaccattgttctgtggttctagaa

SEQ ID NO: 104184 - DNA, 563 bp, Homo sapiens
caaactgctgggctcaagggatcttcctgcctcagcctcctgagcagctgggactacaagtgcatgacaccatacccagctaatttttaaatttttattttgtagagacaggatcttgctttgttgcccaggctgatcttgaactcctagctcaagtgatcctccgcctcagtctctcaaagtattgggattacaggcatgagccactgtgcctggcccagatttgaattttagaaaaattgtactcactgcttggtagaggatgagtttgaaagaaactagaacagagacagggcraatagtgaggaaactgttgtaacccaggcaagagatgtagaagcctgaactgctttggcatagaggtatcgccctcagaaatcagatcaggcttgtgcagaggagggagcagggctatggagcctgggctgccaggaggctcaggtagacttcattctggatagtctcctttcagggaggacactctgctaccccagctgagaaaggcatcctgtaaggaagggctgctcttcagctgcaggaagagagtcagaacctggttccta

SEQ ID NO: 104185 - DNA, 457 bp, Homo sapiens
tggaaaactgaagtcaccatacagtatagaaatggttattgcatgtcacaaaaacattacacgtacatgcacttgtgttagaaaaagattcaccaaaatactgaattcacattacagtatgtgtccatacttctatttgtattcttagatacagttcaggttgtttttcagtgagcatgtattatttttaagtatcattaagtgctggcagagagatagcactgagatcagagaaagatgagcatacttccagctgtagtctccaagattggtgtccttggggacatggggccaagggataggaaggattagacctatcaggaaagatggtagagcactctgagcaggtcggagaaagcagcrtgggacaaggaactcaccctggagtgggggtgtgggagagggccaggcaggaacttcaaggacaggcaaagcaatctgcacagaatcctatcaa

SEQ ID NO: 104186 - DNA, 598 bp, Homo sapiens
aattggcacttctctgtgtccctgggcagcgcatggcctggttgttctgcygtgacctttggcctatgacaccaggatgaggataaacaggtatacacagtccctgcggcctttgtgaacagagggcgtttgcaaaagacagttgtgtgctgtttctttctgagtaacttccgtggagtcccactgccctggagaaagaggacaggatgtgagggtctgtgcagcaagtgggcagaaggcagcacctgctcctcattgtcaaaatctgagaaggacttggaactggaagaaaaacaaacccctggggacggattggaaccagggctaggaaggagctgcagctggtgggcgggagaggtggcaggatgggtagccagggcctggattgttgctccctcagcacgtgctggcctcagtgcagggaggacttgttgcaggctcagagacagatttccacctgcaggatcttggcagacccgctcaaggcctgctctgctcctttcccacctgcctggacgaggcgtctcaaagctgctggaatctccgagatgggcagaagcccatgggctggggcaatgcgtttctactgcgctttgtc

SEQ ID NO: 104187 - DNA, 598 bp, Homo sapiens
aattggcacttctctgtgtccctgggcagcgcatggcctggttgttctgctgtgacctttggcctatgacaccaggatgaggataaacaggtatacacagtccctgcggcctttgtgaacagagggcgtttgcaaaagacagttgtgtgctgtttctttctgagtaacttccgtggagtcccactgccctggagaaagaggacaggatgtgagggtctgtgcagcaagtgggcagaaggcagcacctgctcctcattgtcaaaatctgagaaggacttggarctggaagaaaaacaaacccctggggacggattggaaccagggctaggaaggagctgcagctggtgggcgggagaggtggcaggatgggtagccagggcctggattgttgctccctcagcacgtgctggcctcagtgcagggaggacttgttgcaggctcagagacagatttccacctgcaggatcttggcagacccgctcaaggcctgctctgctcctttcccacctgcctggacgaggcgtctcaaagctgctggaatctccgagatgggcagaagcccatgggctggggcaatgcgtttctactgcgctttgtc

SEQ ID NO: 104188 - DNA, 562 bp, Homo sapiens
tgtaaacacattttttcctaatgagctgacgcaattgggtaacccaatctgggatttagtagccattatttctacatgtgcctagaagtttgatgcagccatttattcatacctttcaactctgcgtctgttgaactttttttatcatttctctttcccagcactgtccaacattagtagtaattggactattatcttcatactttaccatcctgtagatgtggtcaccccctgatgtatagccctcaccaaaattttctcagtgtctttagaaggagaagacttgtctacaatttatgatattcaccattttgaggaaaaagggagaagtataaaatgttgtttaaaaaagccagtattttaaatgccaagaaataaccctaatataacagtaaaactatgagggtagaatggaatgttaggcatttttaaagagagagtgaacatttgtattcrcaaaaatgagtggaaagatacaagatcagacaagggtgatctctgaggtgaagtgggaaatagggatgagaatattgtctttgcagagaacataatgagtagaaaa

SEQ ID NO: 104189 - DNA, 562 bp, Homo sapiens
tgtaaacacattttttcctaatgagctgacgcaattgggtaacccaatctgggatttagtagccattatttctacatgtgcctagaagtttgatgcagccatttattcatacctttcaactctgcgtctgttgaactttttttatcatttctctttcccagcactgtccaacattagtagtaattggactattatcttcatactttaccatcctgtagatgtggtcaccccctgatgtatagccctcaccaaaattttctcagtgtctttagaaggagaagacttgtctacaatttatgatattcaccattttgaggaaaaagggagaagtataaaatgttgtttaaaaaagccagtattttaaatgccaagaaataaccctaatataacagtaaaactatgagggtagaatggaatgttaggcatttttaaagagagagtgaacatttgtattcgcaaaaatgagtggaaagatmcaagatcagacaagggtgatctctgaggtgaagtgggaaatagggatgagaatattgtctttgcagagaacataatgagtagaaaa

SEQ ID NO: 104190 - DNA, 633 bp, Homo sapiens
ccagagtgacctacagattccaagcagtacctatcaaaatcccaatgacatttttcacagcaatagaaaaaaaaaaaatcctaaaatttgcatgaaatcacaaaagaccttcaatggccaatacaatctttggcaaaatgaacaaagctgaaagcgtaaccctatctaatttcaacatatactacaaagctatagtaaccaaaacagcatggtcctggcataaaacagacataggccattgaaatggaatagagaacaaagaaataaactatgcatttatagacaattgatctttaacatgtgccaagaacacacaatgggacagtcttttcaataaatggcacagagaaaacaggatagccatatgcagaataatgaaattgaactcatgcwatatacaaaaatcaattcaaaatgaattaaagccttaaatgtaatatatgtaactgtaaaaagcataggcaacaaaagcaaaaatagacaataggattacattaaacaaacaaaaaagctactttttgcacagcaatggaaacagtcaacagagtaaagagataacctatggaataagagaaatatttgcaacccatatatctgataaggggctaatattcaaaatatataaggaactca

SEQ ID NO: 104191 - DNA, 589 bp, Homo sapiens
gtatgtattactagtgctgttgactttgatgatggtcaaggtcatatctacccattttcacttcaataaagttactatttttttttgtcatctcaccacttttgacatattctgtttgttacaaataagttactaggtccagtcatcacacacaaggggagaggatgacacagggcatgagtgccaggaggcatgtttcattgacagccattttagaagctgtttgccacatcatggaaggtgtggggtgaaggttaggacacaataacatgctaagataaaggacttagcatgttactgttgaaataaacggtagctatcataatgattcgtacaatgatacctattttgtggatcactttcacactgattcattttatttaacacatgtttatygcaccctaactgtgctagaactggaagtataaagctattctggtttaggaaagagataatgataaataagtaaaaaaatatctaaattattttaaaagatacaagaaaagtaagcaggacaagatgacagagaatgtgtgtgtgtgtgtgtgtgtctgtatgggtatgaccatttcaatcaagtcagagaaag

SEQ ID NO: 104192 - DNA, 589 bp, Homo sapiens
gtatgtattactagtgctgttgactttgatgatggtcaaggtcatatctacccattttcacttcaataaagttactatttttttttgtcatctcaccacttttgacatattctgtttgttacaaataagttactaggtccagtcatcacacacaaggggagaggatgacacagggcatgagtgccaggaggcatgtttcattgacagccattttagaagctgtttgccacatcatggaaggtgtggggtgaaggttaggacacaataacatgctaagataaaggacttagcatgttactgttgaaataaacggtagctatcataatgattcgtacaatgatacctattttgtggatcactttcacactgattcattttatttaacacatgtttattgcaccctaactgtgctagaactggaagtataaagctattctggtttaggaaagagataatgataaataagtaaaaaaatatctaaattattttaaaagatacaagaaaagtaagcaggacaagatgacagagaatgtgtgtgtgtgtgtgtgtgtstgtatgggtatgaccatttcaatcaagtcagagaaag

SEQ ID NO: 104193 - DNA, 562 bp, Homo sapiens
gacgtttggagctccttctgcagggaacagaatcaatctagaatttactaacatkgtttttactgaagttatttttatggctactttatatttacaatcagacagaacaagatgccttttaaaatctaagttaaaaagtgaaaatagatttaaagaaaaatataaaacaaataatagtatcaatgatatgctgatatgttgtgaggggtagacagaaatgactgaagttttagaaaaatgtagctagtaccttaccttgtatatttaattgcagtgaatgttaaagatatgtgtcagatttgaaaaagggagggtgtcttacaagtagatatatgtcctaattcttttcaaagccatatttggaatagattttcctatgaaacctcatcattaatatgtgtatatgaggatttattcttaatcttaagttcttaactcctctgaatcatttccatgttacattttactttccagttgtgtgtgtgtgtgtgtgtatcctgagttaacagaagagcaaacattaattgtcatattctgattctgagaaattatgcaaacctcc

SEQ ID NO: 104194 - DNA, 562 bp, Homo sapiens
gacgtttggagctccttctgcagggaacagaatcaatctagaatttactaacattgtttttactgaagttatttttatggctactytatatttacaatcagacagaacaagatgccttttaaaatctaagttaaaaagtgaaaatagatttaaagaaaaatataaaacaaataatagtatcaatgatatgctgatatgttgtgaggggtagacagaaatgactgaagttttagaaaaatgtagctagtaccttaccttgtatatttaattgcagtgaatgttaaagatatgtgtcagatttgaaaaagggagggtgtcttacaagtagatatatgtcctaattcttttcaaagccatatttggaatagattttcctatgaaacctcatcattaatatgtgtatatgaggatttattcttaatcttaagttcttaactcctctgaatcatttccatgttacattttactttccagttgtgtgtgtgtgtgtgtgtatcctgagttaacagaagagcaaacattaattgtcatattctgattctgagaaattatgcaaacctcc

SEQ ID NO: 104195 - DNA, 541 bp, Homo sapiens
catccgtggatggtttagaaacattctcatctactcactcttacatggatgaatgtcacagatgtgtgcacgtctcatcatttctatggatagaaatgagtggaggtgaagtcattcctgcttctagaattgactctaatcaagacactgactccatgcagaagggatagagttgtrcctttctcaaagattttggctttagatttatggatggggttgtatttaagatacaaaatggccttctacttttatgaatcagttgttgcatgcatatatgtagcacatcttgtcttttcttagtgctttgagcactgaagcctctgtcagtgtttgttcttaggtctaatccctactttggggcaggggcattctctaatatcttcctagaatctagagcagtattttacaatcttttactcattatcaccctgccccacaacttccttctccatgaaaatttaatacaacagatatatagaatatctgtttatgtattatatgtagatctgtgctatatatataaaaagagtaagacgttttt

SEQ ID NO: 104196 - DNA, 541 bp, Homo sapiens
catccgtggatggtttagaaacattctcatctactcactcttacatggatgaatgtcacagatgtgtgcacgtctcatcatttctatggatagaaatgagtggaggtgaagtcattcctgcttctagaattgactctaatcaagacactgactccatgcagaagggatagagttgtacctttctcaaagattttggctttagatttatggatggggttgtayttaagatacaaaatggccttctacttttatgaatcagttgttgcatgcatatatgtagcacatcttgtcttttcttagtgctttgagcactgaagcctctgtcagtgtttgttcttaggtctaatccctactttggggcaggggcattctctaatatcttcctagaatctagagcagtattttacaatcttttactcattatcaccctgccccacaacttccttctccatgaaaatttaatacaacagatatatagaatatctgtttatgtattatatgtagatctgtgctatatatataaaaagagtaagacgttttt

SEQ ID NO: 104197 - DNA, 589 bp, Homo sapiens
aagtgggtgatatcatcaaatgtctttaaagaaaagcacctggttagtaagtggctttattaaggccccatttgcctgatgcatctttttggcattgttcmctgtcaagttctggagatcatacagccaccaggaaagcattactttaagaggaatttgtagcagttttctaacagtgcataggaggaccacacagctagttagctcaggaaaggatgccagcttgctaacacaccctgagtgcatgcagagaagccaagtataatttctaaggttgggagcccagttcttaagaaaaaaaaaaaaaaaaaaaaaaaaaaaccacctaaaaatcccaaacccttaaaacacccctatatattatatgatcatgttaaagataaatgtatcttggcttctgaagattcagtgcactcaagtagctttctaatcatgatgatcattttaagctacgctgaaaatacatcatttgccggttttgtgaaaaggaggcctgatgaggactgagttggacaggtccctgtgctgatcttctgaggcttgtgtgccagttccggcccaatttgagaaatggaaatgctaaattgct

SEQ ID NO: 104198 - DNA, 457 bp, Homo sapiens
atgcaatgtgagccttgagagcttccaaagaagccatcctcttttggccattcatattaccccagtttagctaaagggaccacgaagcaattaagttgtttctcaattaagtggtccatttgtgcctctgggcagcaggcatgtgaggaccagtcttttgcttgctgtgcagagctcaggcagggcacaacatcccctggttacttgactattccaaggaaagctcttctagaaaaatccataaacaaccagctgccatcartcattgtcatttctttatttcatgtcttctgatgaggctgactactgtcattgttcgttattgtccaaaccatacattcactcttgtactgtcaagcagatatgacaagcacacattttccgtataagagaaatacaaagtcaccttttaatttgcagtttgggttcacagatgactttagagttgcattagcta

SEQ ID NO: 104199 - DNA, 589 bp, Homo sapiens
aagtgggtgatatcatcaaatgtctttaaagaaaagcacctggttagtaagtggctttattaaggccccatttgcctgatgcatctttttggcattgttcactgtcaagttctggagatcatacagccaccaggaaagcattactttaagaggaatttgtagcagttttctaacagtgcataggaggaccacacagctagttagctcaggaaaggatgccagcttgctaacacaccctgagtgcatgcagagaagccaagtataatttytaaggttgggagcccagttcttaagaaaaaaaaaaaaaaaaaaaaaaaaaaaccacctaaaaatcccaaacccttaaaacacccctatatattatatgatcatgttaaagataaatgtatcttggcttctgaagattcagtgcactcaagtagctttctaatcatgatgatcattttaagctacgctgaaaatacatcatttgccggttttgtgaaaaggaggcctgatgaggactgagttggacaggtccctgtgctgatcttctgaggcttgtgtgccagttccggcccaatttgagaaatggaaatgctaaattgct

SEQ ID NO: 104200 - DNA, 632 bp, Homo sapiens
atagtgtattttagttacacatgttgagattaattagttagcccttaggaggttttgcctacagccttcaccccgtaaggaaaagtgtgaatacattgagactattaattcacaataaatggcagatcatagcccttgctgagtaaatttgtttgtctctttcctaagctttgctaactgagtaagcacactataaggaaatgtcctttattttcacaaactaaattcccatttaacttaatctccaggtttcaatgaaaatcgttttttttatttttaattttgcagggtggggactcaaaccttttatgaaaccaaattggcaatggggatttggaagaagacgatrtaaatattgtcactttgctgaaaatcagcataaccctttttccagataatcccaataattgcagagaaattgctgtagacataaccactggaatggcagaatctattaaaaaccagcaaagctaaataggctatcttaagcaaagatccgatctgctttcagtgtttggtgaaatgcaggcgaagttacggtcttatgcttagtttttaaagaacaacataaatgcactggaaatgtgatcatttgataaacatgttgatgccaatatcttcttgcctaaatg

SEQ ID NO: 104201 - DNA, 645 bp, Homo sapiens
acacagtcttttcttttaagtgtcaacttattgtactgctacctatttctctcaagttctcttaacatttgttttgtatatttaagtgctccatgaatgggtgcacatatatttacaattgttatatgctcttgagatgagctgacccctttatcattatataatgactttctttgtctcttgtgacagtttccactaaaagtctattttgtttcaaataagcatagcaattagtgctcccttttagttagcatgtgaatggaatatttttcctttccttcgctttcagcttatgtacacccttaaagatacagtgagtctcttgtatggtacatatagttagatactgtcttttcattcattttagtcactcggtatcttctggttagaaaatataatccatttacatttaaatcagttatttatttcacttactattgccactttttaaattgttttctgattgctttttagtttcytttcttctttcctcctctcttgctctccttgtaatttgaattttttttgttgttgtttgcagtggtatgctttgattcttctttatctttcgcgtacctactacacataattttttctttgtggttaccttgttgcttatgtaaaactttttttagttataacagt

SEQ ID NO: 104202 - DNA, 615 bp, Homo sapiens
atgattcctgcttatgtgattccactgactttttatttcctcctttattctacccatgcttcctcctgccttttctccctttcttatttctttgtactctgcttctttatttttcttcatctccctttctctttcattcatccagtcttttaaaatatataaaatgtcagcaaatatggtattattaaacatattcttccacagaatcagaggccatttttggcttacagtcgaaatgatcaaatatacacctctgacaacagccaaaaatattcatgtgttacttaaatttatctgaaatttatttctacagaatgattttagaaaaatatccccttctttaaagaatctaaaacagagcctgttctatttgatccataatgcyctatgtgtcctattcaaacccttgtattttgactttctcttctagtctcagtggttaattaccattccatcccaagaggaaaataattttcttatgatccagttttaataacatattttactccatggaatgccaacatttatgcttgagatatttttgtaacaaaagaaaatagctaaaggtgttgtcatcacttgaacctaatggaatttgcgttttttttttttttt

SEQ ID NO: 104203 - DNA, 655 bp, Homo sapiens
aatcctgcagttgtgccagtgtttattttggtggttggcaatcaagtaaaatacatttaacaaggaaaatgaaaagtgagttttgcattattggctcaactattcaatcttgcaaagatgcattatatttttctttgaacagccttgaatgctttggtttggtttggaaaagtgggagaaaaaataggaagccccaactattagtaaggagttttatttcaaaatcctaaaatttagagattgaacaagctatgaaacatataggaagaaaaaataataattagttgaaatcttagttctatacgtagtggattaattgtaaaagtgtctccaattatttcgtttctggtacacataccctttgaatgtgagttttcataaggcagcctctcacacctgcaagtgtgtggtggagtcttgatccagttctcagaaatgtactggccttgtgacttgctctgtcctatagaatgcagcagatgtgatgctagcccagtttcaagttaagaactgaamaggtctcatctaattctgcccattcttttagaaccttaccagtgccaatttcatgtgcaaaagttcatactagcatgacagagaataagaaacctagtagcaggcgagcttattgtcctcagccaaccaaagccacctt

SEQ ID NO: 104204 - DNA, 655 bp, Homo sapiens
aatcctgcagttgtgccagtgtttattttggtggttggcaatcaagtaaaatacatttaacaaggaaaatgaaaagtgagttttgcattattggctcaactattcaatcttgcaaagatgcattatatttttctttgaacagccttgaatgctttggtttggtttggaaaagtgggagaaaaaataggaagccccaactattagtaaggagttttatttcaaaatcctaaaatttagagattgaacaagctatgaaacatataggaagaaaaaataataattagttgaaatcttagttctatacgtagtggattaattgtaaaagtgtctccaattatttcgtttctggtacacataccctttgaatgtgagttttcataaggcagcctctcacacctgcaagtgtgtggtggagtcttgatccagttctcagaaatgtactggccttgtgacttgctctgtcctatagaatgcagcagatgtgatgctagcccagtttcaagttaagaactgaaaaggtctcatctaattctgcccattcttttaraaccttaccagtgccaatttcatgtgcaaaagttcatactagcatgacagagaataagaaacctagtagcaggcgagcttattgtcctcagccaaccaaagccacctt

SEQ ID NO: 104205 - DNA, 446 bp, Homo sapiens
gattctcctgcctcagcctcctgagtagctgagattacacgcatgcaccaccacgttcagctaatttttgtatttttggtagagacagggtttcagcatgttggccaggctggtcttgagctcctgacctcaagtgatccrcctgcctacgcctcccaaagtgctgggattgtaggtgtgagtcaggattccccatcctgagacaatgaccctgatggcatggagcccaaaggcatcatcgagagtaactagaatgagatggttgacagctttgatgacatgaaactgtaggagtttcttctccgtggcatctatgcctatggttttgagaaaccctctgccatccagcagcgagccattctacctgtgtcaagggttatgatgtgatcactcaagcccaacctgggactggggaaatggccacacttgtcatatcgattctgcca

SEQ ID NO: 104206 - DNA, 628 bp, Homo sapiens
aacacctggagactacatgagtacctcttgtaatgcctgtattgggggcaccaatgtgtgtactgaggtgcagaaattgcagatggaagctccccatgtcatcatgcatacccctggatgcatgtttgatatggttcactggagatacctgtctcccaaatacatcaaaatgcttgtactggacaaagctgatgaaatgttaagccatggattcaaggaccagatctatgtcatattccaaagtttaacagcaacacccaggtagtttgctgtcagctacaatgctttcttatgtgcttgaggtgaccaagaagttcatgagggaccccatttggattctggtcaagaaggaagagttgatyctggagagtatccaccaattctgcatcaatgtggaacaagagaagtggaagctggacacactgcgtgacttgtatgaaactctgaccatcacccaggcaagtcatcttcaccaacactcgaaggaaggtgggctgactcactgagaagatgcatgcttgggttttcactgtctctgctgtgcatggagatacggaccaacagaaatgagatgtggtaattagcttttatctgctgtttatttgccttcccacaagttgctgcttct

SEQ ID NO: 104207 - DNA, 547 bp, Homo sapiens
ttccagacaaatacattcaatttttaactacaattttccttttttcaagttactctgttaatcttcttccactggaactctttctccacttccctgaaacttatatctcattggctctctctactttttctacacccactattcttttctccttatttttcaacccatcaagcttagatttcatgacccaatctttaattacttggagaatatttgatctctctgaattctgctcttccaagaactctggcaaaaccccaaaycagttcatacccactttctttttgccagcacctgtaaagctaagcattgagcataggtatcaatatgaagctacctatttcaaactcaacagagttcaagtaagttgattatattacataatttttctactaggtagcctagagcccattcaaattcatcttgttcaaaaataacactctccctgggagaacatttccccctgtaagtttctcgttttatgtcaaccccatctacctaattacctaagccagaaatctatgtgtcactcttgattgcattgtct

SEQ ID NO: 104208 - DNA, 547 bp, Homo sapiens
ttccagacaaatacattcaatttttaactacaattttccttttttcaagttactctgttaatcttcttccactggaactctttctccacttccctgaaacttatatctcattggctctctctactttttctacacccactattcttttctccttatttttcaacccatcaagcttagatttcatgacccaatctttaattacttggagaatatttgatctctctgaattctgctcttccaagaactctggcaaaaccccaaaccagttcatacccactttctttttgccagcacctgtaaagctaagcattgagcataggtatcaatatgaagctacctatttcaaactcaacagagttcaagtaagttgattatattacataatttttctackaggtagcctagagcccattcaaattcatcttgttcaaaaataacactctccctgggagaacatttccccctgtaagtttctcgttttatgtcaaccccatctacctaattacctaagccagaaatctatgtgtcactcttgattgcattgtct

SEQ ID NO: 104209 - DNA, 568 bp, Homo sapiens
ataatatgtaatatgaataaaattaaaatcctgaaattgggttaaaatgcctaatgtatcatttaagtcaggagaaattaggcctcacttgaatttatgcagttttatttccctgaaatttaatatggtttaatatcayagttctaaaagcaaatgcatccttaggctttatttatataattgcagacattttggacataacattttcagaagttccttaagttaccagccaaagatgtaaatggagaaaaggtgaaataaatgaaatttctgtcatattttttaaagatgtggaagtgtctcacctaaagagaattattgagtgtaacatgattattgtcttcaaaatctcaaatgatgccataaagggtcagacaagagttaggaataagaacgtggaaatacagatttcatgattttctcattaaagggcattagattaggggaaaaaggtgactttgttttgttttgtttttaatttaaaaatatttgaattgccaaaaaaatacctgcatggtcctctgtaagttaaataatttaatgtgaactttaaaaactcccttgaaat

SEQ ID NO: 104210 - DNA, 539 bp, Homo sapiens
gatttcatgattttctcattaaagggcattagattaggggaaaaaggtgactttgttttgttttgtttttaatttaraaatatttgaattgccaaaaaaatacctgcatggtcctctgtaagttaaataatttaatgtgaactttaaaaactcccttgaaatgggaatttatatactatctcaggatctttgtaagaattagtggctgttaagcaaatgaactactagatttaatatatgaacattcgattaacattaacttactatcttatagaaaataaaaataggatactcactgaaggccatagaaaatatttcataagagaataattattaatgagaaatgaaaaaaggatagaaaataattagaatagtgattcacaaaagaggtgttacacttaactgagtagaaactggaagcaattatgataaacactgatcagaggccaggcgctgtggctcacacctgtaatcctagcactttggaaggccaaggctggtggatcactaggtcaggagttcaagaccggcctggccaa

SEQ ID NO: 104211 - DNA, 574 bp, Homo sapiens
aacccgggaagcggagcttgcagtgagccgagattgctccactgcagtccgcagtccggcctgggcgacagagcgagactctgtctcaaaaaaaaaaaaaaaaaaaaaaaaaaaaaacaaaaaaagaaataaatacaccaaaaaatctgttaatacagttactttgagtgagcattcaaatacactgtgagctttctggtcactttggcaaaaaaggaaaagtggtgggttctgtaatttgaaatacctgaggaaagaatgcaaactcattcaacaaggrggacttttttttttggtagaagatctctaaaatccctctgcctgtaggttttataagagctcaaagcacatgaaattaattcatctcgcttgtttaaacttcttcatattgctcactgttattgactacaaacttcacctaacgcgaatattaaacccacccatgtggaaataacaattggctttagcaataactaagaaactagtgaagcaactctgagccaccactgcatagtgtaaggtactggttaaaattatgggctttgtagtcagaaagattggaattgctgtgaat

SEQ ID NO: 104212 - DNA, 479 bp, Homo sapiens
atccaaactaaaacatgggattcttacttctcaggaagaagagggccatggagactggggggcacttataattctctgccagaccatgtatgtataattatgacccaactagtgttgaattcagctccatgtcttacaacttatcaaataattcctaggaatgttataaatatattcttgctagacaytggagtctccaacatatgtaaaagacacaactactagcaaagtggtgaaatggaggtctactttagtgccatggtaaattgttagtgtaagtgaatacatgttcctttgttatctcataaaattactactgccaaaaggatttcctgattgcactgatattgattaacatgtttatcaaatttattcatttcatactatttgcaaggatttgtgctaggccctgtggagaatagaaagcttccttgaaggagtttataaagagtagaatagaatagtaaagcttattttgg

SEQ ID NO: 104213 - DNA, 479 bp, Homo sapiens
atccaaactaaaacatgggattcttacttctcaggaagaagagggccatggagactggggggcacttataattctctgccagaccatgtatgtataattatgacccaactagtgttgaattcagctccatgtcttacaacttatcaaataattcctaggaatgttataaatatattcttgctagacattggagtctccracatatgtaaaagacacaactactagcaaagtggtgaaatggaggtctactttagtgccatggtaaattgttagtgtaagtgaatacatgttcctttgttatctcataaaattactactgccaaaaggatttcctgattgcactgatattgattaacatgtttatcaaatttattcatttcatactatttgcaaggatttgtgctaggccctgtggagaatagaaagcttccttgaaggagtttataaagagtagaatagaatagtaaagcttattttgg

SEQ ID NO: 104214 - DNA, 479 bp, Homo sapiens
atccaaactaaaacatgggattcttacttctcaggaagaagagggccatggagactggggggcacttataattctctgccagaccatgtatgtataattatgacccaactagtgttgaattcagctccatgtcttacaacttatcaaataattcctaggaatgttataaatatattcttgctagacattggagtctccaacatatgtaaaagacacaactactagcaaagtggtgaaatggaggtctactttagtgccatggtaaattgttagtgtaagtgaatamatgttcctttgttatctcataaaattactactgccaaaaggatttcctgattgcactgatattgattaacatgtttatcaaatttattcatttcatactatttgcaaggatttgtgctaggccctgtggagaatagaaagcttccttgaaggagtttataaagagtagaatagaatagtaaagcttattttgg

SEQ ID NO: 104215 - DNA, 231 bp, Homo sapiens
ttgaatagaatggaatgcagkgaaatggaacggagtggaatcgagtggaatggaatcgaatggagtgaaatggaatggaatggacttgaaaggaatagactggagcaaaatgaaatcgaacggtaggaatcatacagaacagaaagaaatggaacggaatggaatgcactcgaatggaaaggagtccaatggaagggaatcgaatggaatgaaatagaaagaatggaattg

SEQ ID NO: 104216 - DNA, 231 bp, Homo sapiens
ttgaatagaatggaatgcagggaaatggaacggagtggaatcgagtggaatggaatcgaatggagtgaaatggaatggaatgsacttgaaaggaatagactggagcaaaatgaaatcgaacggtaggaatcatacagaacagaaagaaatggaacggaatggaatgcactcgaatggaaaggagtccaatggaagggaatcgaatggaatgaaatagaaagaatggaattg

SEQ ID NO: 104217 - DNA, 608 bp, Homo sapiens
ttaatgctttggttagttgaagtgaatttcactacatagattccatgattggtttccaccaatgactacatttatttgggagatggtagaaatctagaggattataatgctatagcattacagcatgtggcggagcaaaccacatggaagaaatgcgctagtaagagaaataagttcttgccaaagggaggccagactgtcagacctttttagtttttttttttttccttaagaaacccaccaggaaaccttgttattttcttggttcaaaatccaagaattagataaaggtatacatcaactttgtaggctatgctctgggaatctcatgggtcaagggaaggagtaagagtgtttctgaatgtcacaatccattttattatgggcaaacttttatcagacatggctgtaagatcccccytcggaaacagcaggtatctacaacaaataagattttttaaaccatgcagacataagtctaatgttcagaagtcagtttgggaaatggcagaataagcagggctttttaaaaaaaagattaggtcagttttgaatgtttatctatttttttgaacctattgtaaggctgcactgtccaatatagtagc

SEQ ID NO: 104218 - DNA, 543 bp, Homo sapiens
agaaagaaaatagaagaaaagcaaaaaaatgtatttaatatgttatttaatatgtatttaatatgttaaatgtagttaacatgaagttggtggttacacttatctgcagagggtcattccccttattctctgaatactttggttttttacttactgttcccatctccagacctactcctattattattactgccatttcaatttctatttaggtgctctttctcataacctaagcttttctcctcagatgactttgtccttcaccttgacttggtcactagttctcatgggtatactactgatctgcttattaccacctgaaacccctttgtaaactcaagtgtgaatctcattctttgctcatcacctgttgtttttccatctccgtgcctgtaaaaaccatcgtcttataaccattaagccgygcaagtattttagttctactcatctcacctacccactttagtgtaccattgctcacaacctcatttctctccttacctaacttggagtcagatcttatcattataatcatttactcat

SEQ ID NO: 104219 - DNA, 521 bp, Homo sapiens
gatttctccactatcataatactcttatctttccgtttttacccttgcttatgcctctatgaacaataggaatgaaaggagctctgttgtgcagacttataaggtatacttttatttgtaaagattcttacagccagccttatacatggataactctatgacttaatagatggaagatgaaggcctaatggaggtgagatattttgttggtacrcacactgtctcataatcagtaagaaatagacatttgtctgttaaagagacatgggttaaagagaacgtttccaggaggtctttactcttctaaaagggaaccgttttttaggtcttttctttctcatagtttggagtaaaggagacaatgattaaaaatttagcctcgtaataggctctgtagcagattttactataaaggctatgggtgcacaacagactttaaattgtcttgtgaaagttattctaaataatagaattgctctagattacttactagctaaacagagaagtatctgtgcagctac

SEQ ID NO: 104220 - DNA, 624 bp, Homo sapiens
tgtttgcttgattgtctattggaagggaacatacacactttgaatgtagataaattgattccatttatacagttktaattgctgatatgcttttttaaatgtcccaaatagaatttagcaattttacttatgcattatgaaatatccatacctcaaatttatattcttgcaggtaaaattggaattacaatgaatatatatggtaattttggccaagagataattgtgggcccttctttcaccttggcaaaatgtgagcctagagtttagaattggagacacccaggacaagtactgcgtacatggtgggtacaggaaaacttagttcttaaagatatttaaaactctgatgtagataggaattttaatttaggcctacaagagcccacacagacagaaaaaagactttttagctcaatctaacttttaatattttactattgaattttatcactttatgtttataatcataataaatatttaaattcatgtcatcttaaaatatgcctttcaatattttcaagttttcttcttcctttgttaacctattggtattttcccacatgcatgattttttttgtttacatatattttgtgacatttataaaataatacaatctcttg

SEQ ID NO: 104221 - DNA, 530 bp, Homo sapiens
ctccctgcacctgattttatattgctcctatgtgacttacagggaaatagtaaccaaagctaatgcactgtctgctgtgctgtgagtaataaagttttgtctctaattcaggagtctcatgtattctggcagcatctgtgaaactatagcaggcttccttatcaggtaaaatcttagtcccttcacatttcttgatattcttaagattaagtctcactaggtcccaagtggaatttggcatagttagtagaggccttcctttttgacaggtcctgaactccattttttttcctacttttattttagatacaggaagtgcatgtgtagatttgttacaagggaatactgcatgatgctgaggtttggaatatggatcccacactcacrtagtgagcatagtagctaatggaagatttcttaacccagcctctccctccaccatttggtagtccacagcgtctattgtttccacatttatgttcgtatgtgctccatgtttagctcccccttataaatgacaacatgcaaag

SEQ ID NO: 104222 - DNA, 579 bp, Homo sapiens
aaggtagaacccagcaatctatattctagcaagctctccaggtaattcygatacacagtgaaatttgagaaacactgacctaagattaaatatctatgcctataactaaatattctattttaatgcatatcaaataagcatttatgttgataaatggtggcatagtggcacataaaatactgattcaacctacaaagaaaggtatagatttgaggatatgtggtagtgaagaagtgtaaatggtttaacagaaattgtattactaaagatataatgagtctggtctcagaaagctttgaaatttgtgaaacaggcaataaaccttgagtcacaaacttacaacagcagaaagcagggctgttaaagatgtacactgctcatggaggacatacttgccataatcctatatagttgtggccatggaagataatcgataagaaagacctttccattggatagagccaaaggagtctttgtagtgcttattcaatagctgtaagagatttaaaatacctccaacacaaagaagaaataatacatgttcaaggtgatgttctaaatacactgatttaatcattg

SEQ ID NO: 104223 - DNA, 579 bp, Homo sapiens
aaggtagaacccagcaatctatattctagcaagctctccaggtaattctgatacacagtgaaatttgagaaacactgacctaagattaaatatctatgcctataactaaatattctattttaatgcatatcaaataagcatttatgttgataaatggtggcatagtggcacataaaatactgattcaacctacaaagaaaggtatagatttgaggatatgtggtagtgaagaagtgtaaatggtttawcagaaattgtattactaaagatataatgagtctggtctcagaaagctttgaaatttgtgaaacaggcaataaaccttgagtcacaaacttacaacagcagaaagcagggctgttaaagatgtacactgctcatggaggacatacttgccataatcctatatagttgtggccatggaagataatcgataagaaagacctttccattggatagagccaaaggagtctttgtagtgcttattcaatagctgtaagagatttaaaatacctccaacacaaagaagaaataatacatgttcaaggtgatgttctaaatacactgatttaatcattg

SEQ ID NO: 104224 - DNA, 550 bp, Homo sapiens
aggacagactatttactggtcttttattttacttctagagataataggttaaagaaaatagtacttaggtatataactctcaatatatcttcattaaaagaatggaattacagtaccaaaataacaatgccactaaacccttttagtgctctgctaacaaaaatacgttcagcaaaaaaggtggaatttgttcttacttattaattatactattcatccatgatttccaaatctatttttggttgtgaaaaacctttaaattaaacagtagtacagagatttgccacttggctakaactcacttcttattactccaccattgaaccggtagagcagaacatcttcgaacccagattgaaaacattatatagatacaaatattaatgtagaactcttgaacattagaaattctaatgaatcactgagtttatatttagtttactgacacattatatctaatacaaatgtgtaaaaatagtcgtatattcttaggccatgcatttgaatattttaaaaatatattttaaaattttatgttgaataggttgga

SEQ ID NO: 104225 - DNA, 486 bp, Homo sapiens
acctcgaagttaagcatagctatataacttacttttgtcaatggaaaataatctaataaaaagtgaaccaattactcatggaaatacatacgaattaataggagattctccattctctcttatcttgtcatgttgactgtggaaaaaaaagaattctacatagtggagaccctatcaatatggattgctgatacgtcacatagaggagaactgccctgaaaagacactcatattcacagctgatgtggtgaatgaaaagtaaacattcattattcaactacagagttggggacaggaaaagttgtttgtcagcaaagtgcracatagcttatcctgattaattgaactttcttttccttaattcccacaactggatgatatgactttctgcccactccactgactaatgtcacacatttgaagtaattctatgtatgtagagaggaggtattagggaaactactttgaaaactttcagaaatatcc

SEQ ID NO: 104226 - DNA, 507 bp, Homo sapiens
gtttttgcttttaaaaattttttaattctcacctctgctaaatgaatgactattattttgcagtgacctgtgatcccattttgaccaagtgttcaagctaggaggacataagcaggcaacaaatgtccctccaccaggagtgtcaggtgagcaccaggtgatggtcaggaggttgttaaactgtttctgtaaaataataattggttacagctggcaccagggcacagcaatcttccaatagatagaaaacatatgaagctgatgarcaacgacttcttgataagatctcaggagctgggtgagcaggctgaagcacgtgcactaagaggcaaaatggtggagtttaactggtatatgaccattgttaaatcaagcttagcctaaagcagtctccttacatattttaagtttgacttaaatgtttttctgcacattgtgaactataacaagtggaggtacaaacagactgtgcctacatttgtgccaattaccgagtttaggccagtt

SEQ ID NO: 104227 - DNA, 674 bp, Homo sapiens
ctcttctttataaattacccagcctcaggtattcctttacaacactaaatgtctctstctttctcagatcagtcatgtggaggaaagtaagttgccatgttataagcaataatatgaagagggctgtaaggcttagcaaggcactgaggtttcagtcctacagcccacgaggaactgaagcttgccaacaatcacatgactgggtttggaattaaatcatctgaagcctgccaacagtaatgtgagcaaacctggaagcaggtccttttcatcctttgcccaacccactccccacttgaaccttcagaagagaccaaagttgtggacaacaacttaactgcagcctctttgcaaaccttgagccagagatactcagagaaacttggcccacagaaactttgaaataatacattcttgttgttttaagccaccaagtgttggagtaatttgttacatagcaatagataactaaaacaacccttgaccagggaagtgtcagcctgggagctctaggagaccatgttttactgtgtcccagaaagcagacacaataagtctgcagtgacagagaaggtgaagtcaatgtgaagtaattccttgtggccttcagcgccttggttccagtttacttctgagacatagttcacccttgcctttgaaaattctgttactca

SEQ ID NO: 104228 - DNA, 662 bp, Homo sapiens
gtattagacctgcacagtggtctactttatagatgatttctcaaagcttttgctgtattgtttatgttcaaatatatgcgtgtgaaggttgagggtaagcccaggagtttataaataatgttttgggatggatttccgcagcttcctcagctgaatacttttcctggaactttccagcttcaaagattttcctttctcatcttctgctgagaaaactgaggctttgaattgtctactctgctgtttatattttgttattagttctgccagccagttcaaatggtgaaagaattcagaaaggggaaagaaaggcaatgaggatttctcctgtgctcttggctcagagttttgggcatctgttctactagtgttgccaccacatccgccattggctctgctattactgccactgctgctacaatgggtttgccttggggctgagagaggatggaaaaacaaacaaacaaacaaacaaataarcaaaacaagcaacaaaactacaaaattcaagggaattttgacactctttttgttctttaggggcccaatttcctgctccttcaaccagaaagagagggcctctctaagagctctttctgtctgcacctagtgtgtacttctgggtttgaggatttaaagatactgccagttcagtgatactt

SEQ ID NO: 104229 - DNA, 346 bp, Homo sapiens
gaaataaaacgacctcctgaaaaacataacattgcccccacaacacacagtcactgccctcacaagctaatattaatgaagagccaggcaatcatcattcattcaatgagagagtcatagagtatacactaggttctaccgagtcacagggtcaggagtgattaattctggctaggtgagtccaacaaagcattattgaaaggtcgactttaacytgagccttgaaggatgcctgggaggccacctagcagaaaaggcaaggaagaaaatttctaatggagagaggagcattagccaagacagagaactttggaagaacatggcattcttttatatacagcgggta

SEQ ID NO: 104230 - DNA, 498 bp, Homo sapiens
ggcctgccacctgcaattgccttcatagaactgtctaacctttccatcccagtctcaagggatactcccagggtcagcccctgtcttttatcatgtcacttttgagacatgaaaacaaagaagagtgagtgaagacgcctataattagcacaagcaagaaatgaaggacacaaggagaaatgccacattaaccactcattcaacatatacaaagtgccaggatacagtgactgttctgaggggggaatatgacccaatcagggccaaagtcctyccttaaaatccacactgggacatttagggagagaagcactttctccctaaggctgtcaggccacaaaaatgagtctggacttcaggaggccacttttaccagccatgtggaggaagcatgtctgcaaatgaacaaaataaagctgacagaagagggcaaaagggctgagagttggacagagataagacaagtgcctgagaatggtgccttgcatcaagagtagc

SEQ ID NO: 104231 - DNA, 584 bp, Homo sapiens
gtgcatgaccttgggcaagttactggattttctctaatactcagtttcctcatggatgtcacagctatttcatcgcgtagagaggttgggataaatatatggactgacacacagcatacaatcatcattgaaatgtatccttatgactgtttttgctctttaatgattattagtgttcccgacagcacattaaagaaggcagtctggcagaatgccttccctgcctctttgttctgtgctctgacattggctagcattaatacactgtcactgggtctaattgaataattttcatttagcaaaaatccactattggccaggtaggacacacagagaatccctgccttcacggagcttatgttctagtgcatgcattctcaatgagggtgacgtcatgcctagaggatttggggaacrgcaagtttcccagggttgttggagtggaaagaatgctgaggagaatgctgagagatgagatccaagaggtaagggctgcagagggggcagaatgtattagcccatatataaagatatatataaaaatatctttatattcttataaagatatttgtcatacacagaag

SEQ ID NO: 104232 - DNA, 477 bp, Homo sapiens
atgtgcaaagctcaaatgattagctgagaacaaattgcactctgtaattcacaaagatgaacatttccaaaataaagtctcatgctctgaagacaactctaaaggtttaaatttctagtaatagatattgcacaattggccaaggttttaagtgatcaacaggtacctttacacatgacttcttcttcttcttcttctttatttttttttcttttgctaaaactcaattagtattttgaagtctcacctaatttttgtatctgtattcatttttaaatctatatttcatcaaaaatcctcctgaaatttccatgtgtattttttgtttattttgtgtagtatggggcttaatatggtaggaagaggaggggaaaaaaacaagagaaaaggagagttaakggggagagaaggtgagtataaaggaagaaaattctggtatctcagggaccatctcctaacctagaatttattatttat

SEQ ID NO: 104233 - DNA, 504 bp, Homo sapiens
taatatttgttggataagctgaatgaataaaattcatgtatatcaatatttctaagatgtgagctacaaattcaatcttggaagacactatgtgataaacagagttccctggtcaaattctatggtagtttgattacaatattggttcccatacaccattctgttctgtataaatgtcctttgtaatgtaacttccatcaagaggtaaaatctttttctctttcccttccatctgtgctgcacttgtgacttactttgstcaacagaatacagcggaagtgatgtattgcgattttgaagtataattccagagggcttaatatgcctttattttctcttttggaatcctgcttctgctcggggaacaatcccaggctagcctgctagaaaacagaagaccatcacattgccccagctgaggatattagattgttcggtctctggctgatctgccagctgacaagagaagcatggacaagtccagagatcaatggtacttggtcc

SEQ ID NO: 104234 - DNA, 662 bp, Homo sapiens
ataacttatttcaatgaatgctttgtttttctttccctttaaatccaagttctcttactggtattttttttttcctacgggtgtatgagtgtgcgtgtgtgtgtgtgtgtgcaggcaggcctgtgcattggcaccagaaggattgttatctttcccttttgggcaaaacagctctagtccactgtggtctagatagctactttttgttctccagttgtgctagccagctaaagtggaatttcctctgagcatagaggcatgtggcccaccctcagtctgtgactgaattccaaatgccacccayctgatacgcatctctctgtgtctttccatttaggaaactcataaatttattcaaccaccatcaaagagataacacagattgagctcttctgtaccaggcaatatgctagggcttgggtatacaaagataaatgagatatggcttctgagcttaagcagttcatagtagttagtaaaacagatgaacaaataaaaaactattccatacagtccctaaataactttaatgtgctattacttttcaattatgaatgtacacacctaccctgctccatttccttattacttccttaatcttatttacttattgttattattctcttatttacttatttttcttgcactttaaatgcaaagga

SEQ ID NO: 104235 - DNA, 605 bp, Homo sapiens
gtcttatatatttacttggtctgtgtctgagtggggaaaaggataggagacgtaacatacaaataaagaaaggaaaaaaaaaatcccaaagggattacagtgtttttcctgagctgttaagagactgatcacatatataatgtacattttgagcatttcttgtctcatttatacttttccttatgattgggtatgacctcactccatttatgctcaactctaattttatccaacattcctgatctttcctgttgtaataatgttgggtcatttaaattctgcactacagaattgttatttgatgtacctttctctctattaaatataagatccttaaaaacatgctttgtacgtttcattgattattgtatcccataaagcctcatcacaataaatatcaaatgggttgggtgagatcrcttatgcaatataatcccagcactttgggaggccaaggcgggatcccttgaacccagaagttcgagatctgcctaggcaacatagtgagacttcatctctacaaagaaaagaaaaataaaattagctgggtgtggtggtacacacctgtagtcccagctacttctgggactgaggcaagaggatct

SEQ ID NO: 104236 - DNA, 560 bp, Homo sapiens
attcaaaatacaataaaaactatctgtaatattaccaattaaagataactgctatcttattcatgagtaagatgcatatttacatgctggagtaatattttattcataattttgatcctacctcgtttacatgatatttatcgcaagcatttttccatgacattcagaattttccgaagcattttaagaagctgtatagcattccattttatgcacgtgctataatttatttaatcactgtctcatcactgtacatttagatcatttyctgtgctctagcagcttaatgctgagacagtatagataaaactagactttaaaatacttcatgttgttgactaaagcactgaagctactagaaggacagacttcgtaccaagcctttttatagtgttggaacctgcctctaagaagtagcaggatgatatgttctgccacagaaaactataagtagctgtggcagctctgttcgtatagagattgttttccttttaggtaccccatatcatgtctcctatcaccatataaatcttttaaaaaaaaggtttgtgtgtgaatgt

SEQ ID NO: 104237 - DNA, 605 bp, Homo sapiens
tatgggattaattagggaactcgagcagacactgtcactttcaaaactgtcattaatgatgcactctctgtggtatatattatggtagaatttcttaaataaaaaaaaaaaagtctaaggatactgtattagtcagggttctccagaaaaacagaacaaacaggatgtgtgtgtgtgtgtgtgtgtgtgtgtgtgtttgtatgtgtgttgtatattatatacatatgtgagatttattattataaggaattggctcacatgattatggagkttgtcaggtctcaaaatctggagtgggtaagctggagactcaggagagccagtggtatagtttcagtctgagtccaaaggcccgagatttggagactcaatgatataagttccagtccgaggttaggagaagaccaacgttctaattcaaggactcaggcagatgaaatttccctcttactcagtctttttgttctattcaagtcttcaattgattgtatgaggcctgcccacgttagggagggataatctgctttactcagtctacagattcaaatgttaatttcatccagaaacaccctcacaaacacacccagaataatgctttaccaaaa

SEQ ID NO: 104238 - DNA, 537 bp, Homo sapiens
aaaataaatttccatggtttataagcagaaagggactgagagagctgatcttctggcagatgaccagcggatacataataataaaaataataagacagtcattaattgagtacatctaccacactccagaactgcacatagcctttatgaaaattacctaatttaatcctcataacaactctacagaggttttgagtgacttgtccaagataagacagatctgaacctcagaaagtttggctctaagcctgtgctcctccttctgtgactaagaagaatcctctgtccatctttcttatttcactgcaataacacaatagattatcttgattccaacatcttttgtgaaaaactttttaaaaatctctgtaattgacatgcatgtctatggttttgtttccttgcattcccggaaaatctgttttgacactcgggctgtatttttaaattttmttttgtgagacagggtctcactctgtcacccaggctagagtgcagtggtacaatcatggttcactgaagccttgacctgcccag

SEQ ID NO: 104239 - DNA, 482 bp, Homo sapiens
taggtagtgagtcatctaaaataaaaacgatttaaactttgaaaagtagctcccatgaagcagaataaaggtacttaaaggatttytatttcccaagaccctagaaataccatgaattggagtatctctgtttaactgctgttatggatggtcccttgggtaaacactgtgctttataaaaagctaatactcagaaagagtttttaaaaattaatattcatgcatgggctcatctggtggaaaaatgcatggttgacattttgtgaccacgttgcacaaaaggcctgcattaacagtaagaagcacgccttcccctgtcccatccctcctgaaatatttccctgtgaaccttgatttcttagctctctcttcttcaacattcagggcaggagcatctattctagacctgtgatcttactgggaaacagtagacttgaggaggcagagatgaacggggtgagaaagatctgggtttagaggtt

SEQ ID NO: 104240 - DNA, 541 bp, Homo sapiens
tcacgtgccccataaatatatacacttactataagcccacaaaaaataaaaataaaaaaatttaacaaacgagagctttgtgagcatttaattgatgtcagcaatgtgcttagcacggtatctggacttactaaatgctagattcactgcccaatatgcttagtccacctggtgccagcacactgtactcctccaaggagcaggtcaagatggaccaataccaggaagctcgtgtgyttcatgaggaaaacagaactatacacagacttcattttagccaggattctaatagctgttccatcacatgagagtagtgacagcctttcattcattttatgcttttctttgttgcctttactcttggagtaaattaaccctccatttgattccctccccatggggaggcacagagaggaatgatgctgactgatgacagttttattataccacatgattcctggaaacaggatgaaagaagaaaaagctgatcccttccaggagtcctacactctccaaatggaaacacagcccagaaggggaa

SEQ ID NO: 104241 - DNA, 541 bp, Homo sapiens
tcacgtgccccataaatatatacacttactataagcccacaaaaaataaaaataaaaaaatttaacaaacgagagctttgtgagcatttaattgatgtcagcaatgtgcttagcacggtatctggacttactaaatgctagattcactgcccaatatgcttagtccacctggtgccagcacactgtactcctccaaggagcaggtcaagatggaccaataccaggaagctcgtgtgcttcatgaggaaaacagaactatacacagacttcattttagccaggattctaatagctgttccatcacatgagagtagtgacagcctttcattcattttatgcttttctttgttgcctttactcttggagtaaattaaccctccatttgattccctccccatggggaggcacagasaggaatgatgctgactgatgacagttttattataccacatgattcctggaaacaggatgaaagaagaaaaagctgatcccttccaggagtcctacactctccaaatggaaacacagcccagaaggggaa

SEQ ID NO: 104242 - DNA, 597 bp, Homo sapiens
acaattcaaaaagtaaagtgtgtgaatctgacttgctagagaaaggggtagactcagtacaacaaggtcacaaaaaggtgcagccttcgatgagacaaataccggctgaagcyggctgataaatatttcctgtaggatctgaagcaggttgtcaccagcaaaacaaaaatccctagggggcagtacataattaacaatttgaagatgtggccgcgtgtcattgtctcaaaaggagccagggaatcctgcccccaaaagcacaacccgagttcccatattaatcttactgtttccctataaacgaatatcagtgtttccccagaggctcagaagacgcctttgctctgggctggcaaatgtctcctggctcatggtgtcattttcctgtgattttaaatcagcatcaccaaacctgttcctctagtctgagcaaaatcacacagcatgtttaggaaagcaaacaagtatttttttctattatcaaagacatgaataaaatcgggactgagagaagaaatctatttacacagggtgcctgaacgagtgtttaaagacttttagaacagtgactctctgaaaacaactgaccttcaacta

SEQ ID NO: 104243 - DNA, 634 bp, Homo sapiens
actttggcattgcatccatcggagcgtcaccgcactgcactgtggttgckccaatgaaggtcagacctgcaaggtttgggcagcacatctgtatcctaagacccacagccaaagccggcacatggtagatggccaccaagcacatgggtccgagcatgcctgaggtgcatgacacttgggcgaggggtgccaggcagcagaaggaagatgggaaggctctgcatcaagtgcctgtaccatttccaaaagtgctgaccatactccccagtaatgttctcccctatttccccaagggaggagggagggaaccagtcactccctgggaggagatgctttgtccagacagaaagcgacacactgtggagaaaacttggattgactagattttggaaggccttatgaagaaaaatgccctgaccagaaacaagggcctgagcccgaatttgacggttggagtggtaagggagcgggaggtgtgagggacccccgacccacccaggatgtcgctggtcttaactgcgacggtgtaggaggtccactccatcatttcttcctcatcgataacggcacacatttcacacaccagggtcttcttgcccttccgctgggacagccagtctccatagtagaacat

SEQ ID NO: 104244 - DNA, 538 bp, Homo sapiens
aaaccattgactacaatatttctgtggaaaaaaaaaatctcttgaccaggtgcaggggctcacacctataatcccagcactttgggaggccaaggtgggcgggtcacttgagctcaggagtttgagacaagcctgggaaacacagggagaccccatctctacaaaaaattacaaaaaattagctaggcctggtagcatgcacctgtggtcctagctactcgtgaggctgaggtgagaggactgcttgagcccaggaggtggaggttgcagtgagccatgatcatgccactgcactccagcatgggtgatggagggagaacatgtctcaaaaaaaaagaaaagaaaaaaaaaagacattcagccgcttcaaagtttcatcagataataattagtaattttcaagcacagaygatccacaggaatcaaagaatcaggagggtgaaaacaataagttacaaaggccatttgcctcaacacataaatgagaaaataaacagagataaattaggaggctgccccagtgtaagttttgactaga

SEQ ID NO: 104245 - DNA, 353 bp, Homo sapiens
taaagttatagagcaataacacagataatggagcaggggtgtgtgaagggcatttgaagcatgctaacagcagtgtcatatttggaatgaagacagatatactgaataattttggatactgcttgaaaatataaatgtgattttgtaaagtgaaaatcctagaggacaatccattccacccaattgtaatagaatctccaacttccaaagcaaataataggaaaaaggaagacatctagcattattaatccagcagaaggaagaaaagaargtagaaaaaggcagcaaaaaaagaaaaaagcacaagaaatggaacacattaaaaagcagaaataatagtaaacctaaatgaa

SEQ ID NO: 104246 - DNA, 612 bp, Homo sapiens
ttcattccttgtagaaaggacatgattttgatactctactgctttgttctagatggagtccagtttgtcattgctcctctgaattgagcaaaatattccaaatgtgttctgattgcgaggtagaagtttcctgtaactacactcactgtatttctacgagtgtaggccgaaagaacattcactttttctattctgccagctgaattgcccaattgtttaaagggaaacttgaagtcatgtaaagaacgtggcttaaygaacctcatatactgtacaatttaatttttgattgtaggttcaggactttttcctgatctccattttttttaatactcccttattaggtgttttaagaagggattattactcaacagatgttagtatccttactctcaaatagtagactacttattctttgtttatatttttgttgttcatatagatgtttttatgataagagcactaatatttttaacaaatccttctaattggcctctgcaaattctagactaaagtctcagttcaatttcataatggtaacaggagtacgaggcacccttgtgttgttacttcctttttatctgtactttgctcaggtagctgcactagtaa

SEQ ID NO: 104247 - DNA, 587 bp, Homo sapiens
gaggtagaagtttcctgtaactacactcactgtatttctacgagtgtaggccgaaagaacattcactttttctattctgccagctgaattgcccaattgtttaaagggaaacttgaagtcatgtaaagaacgtggcttaatgaacctcatatactgtacaatttaatttttgattgtaggttcaggactttttcctgatctccattttttttaatactcccttattaggtgttttaagaagggattattactcaacagatgttagtatccttactctcaaatagtagactacttattctttgtttatatttttgttgttcatatagatgtttttatgataagagcactaatatttttaacaaatccttctaattggcctctgcaaattctagactaaagtctcagttcaatttcataatggtaacagragtacgaggcacccttgtgttgttacttcctttttatctgtactttgctcaggtagctgcactagtaaactgaatagaaactccaattgcatttggctggtgcagctgtggcatcactgtgctagctatcatgaagctttctgcatgtctcaggcatct

SEQ ID NO: 104248 - DNA, 638 bp, Homo sapiens
tctttgcttaaacctcatgaatgaatctctgccagcttaccgcttttcttctccatcttcctcccctgtctcagtcttcacagaattgagcagagttatcctttctgtggattaggtttttgcctaaggagatgttgtggttggttwgatcttctattcagaccactaaaactttctccttatcagccataaggcatttttgctttcttatcattcatgtcttcactgaagtagcactttaattttctaaaaaacttttcctttgcattaataacttgcctgtttgttgcaagaggcatagttttcagcttactttgacttttgatgtgtctttctcactaagcttaatcatttctagtcactgatttatagcaaaacatgtgactcctcctttcacttgaacacttaaaagacactctaaagttattaattgacctaatttcagtgttattgtgtgtcaaacaataggggcttctgagaagatggagagagagctggttggtggagcagtcagaacatatacatttagtgactaagtttgctgtcttatataggcatgattcatggcgccccaaaacaattataattgtaacatcgaagattgctgattatatagatcaccatagcagatataggag

SEQ ID NO: 104249 - DNA, 638 bp, Homo sapiens
tctttgcttaaacctcatgaatgaatctctgccagcttaccgcttttcttctccatcttcctcccctgtctcagtcttcacagaattgagcagagttatcctttctgtggattaggtttttgcctaaggagatgttgtggttggtttgatcttctattcagaccactaaaactttctcyttatcagccataaggcatttttgctttcttatcattcatgtcttcactgaagtagcactttaattttctaaaaaacttttcctttgcattaataacttgcctgtttgttgcaagaggcatagttttcagcttactttgacttttgatgtgtctttctcactaagcttaatcatttctagtcactgatttatagcaaaacatgtgactcctcctttcacttgaacacttaaaagacactctaaagttattaattgacctaatttcagtgttattgtgtgtcaaacaataggggcttctgagaagatggagagagagctggttggtggagcagtcagaacatatacatttagtgactaagtttgctgtcttatataggcatgattcatggcgccccaaaacaattataattgtaacatcgaagattgctgattatatagatcaccatagcagatataggag

SEQ ID NO: 104250 - DNA, 638 bp, Homo sapiens
tctttgcttaaacctcatgaatgaatctctgccagcttaccgcttttcttctccatcttcctcccctgtctcagtcttcacagaattgagcagagttatcctttctgtggattaggtttttgcctaaggagatgttgtggttggtttgatcttctattcagaccactaaaactttctccttatcagccataaggcatttttgctttcttatcattcatgtcttcactgaagtagcactttaattttctaaaaaacttttcctttgcattaataacttgcctgtttgttgcaagaggcatagttttcagcttactttgactkttgatgtgtctttctcactaagcttaatcatttctagtcactgatttatagcaaaacatgtgactcctcctttcacttgaacacttaaaagacactctaaagttattaattgacctaatttcagtgttattgtgtgtcaaacaataggggcttctgagaagatggagagagagctggttggtggagcagtcagaacatatacatttagtgactaagtttgctgtcttatataggcatgattcatggcgccccaaaacaattataattgtaacatcgaagattgctgattatatagatcaccatagcagatataggag

SEQ ID NO: 104251 - DNA, 598 bp, Homo sapiens
tttagcaacctatcatttataaatacatgttcttcccttttgggatcactaaaaatatatttcttttcttcagtcttttggaactgatttcacagagattaccaagagcttctcaccagcaccccccttccccactrtctttggaatgtgatccataggaataaaaaatactcaaattcattaagggagttgagagcaattttaaaatctctacacgcatcttgagttttcatactacttcaggtgtttttttcctgctccttttgttctccttggtagaaaaaataaaatcacaatacaggtgaaaaatttaaaaatgtatgtgattcgtgtatgttgcaccattggcatagaacaggagtgctaggccttttttttgatattttcattataaacataattagggtaacctttctgtggtcctgaatcattttcacacacctcagccccttttgatgctattttaagaggtctgtgactgcctttaactgaaattgttaataattacataattcgaatcatgttttcttgagcacttttaactcttgaaacattcattcacctcttttagcttcttgtgtcctattattttaacatg

SEQ ID NO: 104252 - DNA, 582 bp, Homo sapiens
aaatcaaacacattgagaaatacatataaaaagtggatcccctagactgaagaggaagatacaagaaagtaggcaggaaaaaaaataactacctccctcagaacaactagattataaaatacaattacctgaatacaacttttgagcagtgatttttcactgatacattcttagaaaccaattcagtagttttaaataaaatatttgaaagttctctctrtgtaactgtaccactaataatctacaatgcatgatgcttatcattactataaaaattacaattttaaaaatgcctttcatcattttcattcacccactcttattaaataaagttaatggtcattaggaaattttcctatactactgaatgccttaaagccttcatttggagaatacatgttggcctagaaggaatgcattccaaaattttcctttccatcatggcgtgtgtctgtttatgtgttgtgccctatatgtaactacaagtttattttgtcctgtccagaagacggggaggacggtcccagctgcaggctgttctgtgtgggaagagaaaaaggctgatgcttaaaggccctccaa

SEQ ID NO: 104253 - DNA, 635 bp, Homo sapiens
gtcggggggtgggggcaggggcgagcagggaaacccactaaagaagctcacgtggtagtatagaccaagaagcatatcctgcaggaggcagaagaacgggaactctttgactgaaggtgtgatcacctggcgttagggaagagtgccagcgggaggaggagtagcaggatgcctagagccctccagagggtctctcctgcctccttaggagtcagaactcacaaagcagagctggaacttcagatgtggctggaagcaggcttccccttcccctccaccgagggaaggtagtgagaaggcttctaagtaggaaaaaatcccaactcttcaaagcwtgctctctgcatcatggtcattttgcggggcagagaagggaagggaaaccagtaacattttctaatcttagctgggctgtagacacatctgggtttggagcatttatgtggtaggaggagagtctccacagctgaagtgtcaccacgatatcactcctaccttcaagcctgggaaggggacaccacaaatgaaaaagaatgggaattcctcttattgaggaaagagagggggagcctaaatgaaaactttcatttgactgtgtccttggagtaagagaggtggctaaaaaggtacagtga

SEQ ID NO: 104254 - DNA, 635 bp, Homo sapiens
gtcggggggtgggggcaggggcgagcagggaaacccactaaagaagctcacgtggtagtatagaccaagaagcatatcctgcaggaggcagaagaacgggaactctttgactgaaggtgtgatcacctggcgttagggaagagtgccagcgggaggaggagtagcaggatgcctagagccctccagagggtctctcctgcctccttaggagtcagaactcacaaagcagagctggaacttcagatgtggctggaagcaggcttccccttcccctccaccgagggaaggtagtgagaaggcttctaagtaggaaaaaatcccaactcttcaaagcttgctctctgcatcatggtcattttgcggggcagagaagggaagggaaaccagtaacattttctaatcttagctgggctgtagacacatctgggtttggagcatttatgtggtaggaggagagtctccacagctgaagtgtcaccacgatatcactcctaccttcaagcctgggaaggggacaccacaaatgaaaaagaatgggaattcctcttattgaggaaaragagggggagcctaaatgaaaactttcatttgactgtgtccttggagtaagagaggtggctaaaaaggtacagtga

SEQ ID NO: 104255 - DNA, 551 bp, Homo sapiens
cctgtgggccagaggacctgattgtctcgtaggtataatctgggcatgagctacttggggcctaaattagggtgatgttttagcagargtgtcatagtagaaatgactattgaaagtcgatggacattctttcccctttactatcacaaaacttgtcaaaagacagaaatgaaaatcaaaaagcaaaactcgaatccagtgctattgtacactcagggtaacctaaatgtacaaccgccctgttaaatgattggcttgggaaattgaatttggtctctagatccccttaaagctctatttcttgcaaaatgctaaggaacgtaatttgttggcatcgctgtttccattaagtggccctatttctgtcatacacactttacttttaagtccccttcctaaattatgtcacatgttgttctatttactttttgaaaagaatgtgagcaataagatgcatgagacactagtgtttgtgtgtgtgtgtgtgtgtgtgtgtgtgtgtgtgtgtgagatggtggaaatgcgatgagagtgggcattgagcagacatg

SEQ ID NO: 104256 - DNA, 516 bp, Homo sapiens
tctattctagtctgactctatccttgaatttgtgggtgactcctgtatattctccagtctgcttagtgcaccaacacctagaggatgctcctttgggcagatggagaaggggtgacatcgcttcatagtctccctgatagaacccacatggcaattactgaaaatgggtaaaaagagcatatcttgaggcagggtcatgtagtggtcaagcctgtaractctgaaccagacctttggggcatggcctcctggtgctgtgacttgctagctctgaaacttcgggcaagtctcttaaacctccttggcccagtttactcacctgtaaaagctaatagtaataggaccaatgcaattacgtgaattaaatgcaatactatgtaaagccactcaaaatgtgccccaaacatagaataagcatgagttattataatagacagtaggaaagcacaggacaaatcattcattgttatcaatacctcttaaaattttttgacattttgattctggatacttccc

SEQ ID NO: 104257 - DNA, 398 bp, Homo sapiens
gtgcctgacacatagtaggacctcaaaatgtattaattaartgaatgaatgaatgtaagtggctgttggtggaagatgcccagccagtaaaataacaacaggttaagtaaaaaaaaaaaaaaattgtatttcttgttggcaaaacactgagcccagattcagggatgtggtagaaggacaggtttctccatcccttattatatgggacttgctgctggcagtgctagagattctttcacaaaaggcttttctttttcccatagcatttcttctatttctcatgttttgtattgaggattcagactgctacatgtttggttcagggcagattttactggtcgaaatgtaaacttttaaaataagtgtctaagttggggagggaagggcaatggactcag

SEQ ID NO: 104258 - DNA, 584 bp, Homo sapiens
gaactcattaagaaaacaacccaacttaaaatgggcaaaattattgaacattttaccaaaaagcatatatgtggatagcaaataaacacatgaaaatgtattcagcatcattagccattagggaaatgcaatttaaaaccatgatgagctattatcacatacctattaaaatggctaacaataaaatatattgataataccaagggctcgcaaagatatagaacaactggaactcttatacattactagcacaaaattgaacagccatcttggaaacagtttggcacttttttacaaagctaaacatatacttaccatataacccagtgatcctattcctacwtatttagcctagagaaataaaaacttacattcccacaaaaacctgtactggaatgtttatagtagctctattcgcgattgctccaaactggagacaacccaaacttccttgaaggagtgaatgggtgaacaaatggtcatacatccaagtaataaaatattctgtaataaaaaggaatgcaccattgatatatgcagcaattggttaagtctcaaaggcgtactgtcagtctgtctatatg

SEQ ID NO: 104259 - DNA, 478 bp, Homo sapiens
tacatctagtaaaggacaaaatactaatagacaataaatatcctgcaagatagaaaatgatccttgccatgaataatgcaacaaagaagtctgkgggtttaatagcaaaagagccctcttctgacatcttatatagaagttgatgctacatatttatcataagggcttggaaattaattgtataatttacctgtggtccctggatcattgctagagcctgggttaaatataattttcgttaaaacattttacctttggcagtcaagtaaaaaaaaaatgtgtttttaaaaaagaagctcactacttctcttagactgctataatggaagtgcacagtgtgaataaattctagcaaaatctgagtctcgaaaaggcatcataggtgggtcaatggattttagcatgtaggtcagtaaccagcaaacccaataaccttgtgagggttcccaacctagaaacctcagcctcctgagtagct

SEQ ID NO: 104260 - DNA, 546 bp, Homo sapiens
gattctccctctatgatctcatattttgtatgaggcgcaaacctaattctcattcctccttcagacctcccaatatagagcacactaaggacactacctctaatgaccattttgtttacatgttttttttcaattacaattccatgatcctaagatggaacaccctgactctccattattgtggtgaaaataatgtcaatccttttgtatttctgtatgttttttactaactctttctactaaaacttacacatttcttctcaaatttgccataatttaaatccgattctcccttgttaacactgatgtgctttcttctttgataatgccagtcttatcaataatcatgcaaaagaaatcaaagaaatattgttctatttttattttagaaatatttataatgagaagataaatacagtatgggaaaaatataaggtagaatccgscccccaccgacccacacacacacaaatgaatgtgctaacaagagagtttcactgctgggctcactatataacagatcacgtttccatttaaacattgatc

SEQ ID NO: 104261 - DNA, 570 bp, Homo sapiens
gattaacatttgaactggtaaagtgagtaaagcagattgctctccccagtgtgggtggccctcattccatctgctgaagtcctgaatgaacaaaaaggctgagtaagggagaattagatttttccgcctaatggttttggagattgggatgttggtcttctcctgccttcagacatggactcggactggaatttatgccttcatctctcctgtttcttaggttttcagacttgatctggcactataccactggctgccctgggtctccagcttgccaactgcaggggagttgggacatctcagcctttataatcttgtgagccaataccttatgataaatatttttatatattcatacatatatagaaaatccctgacacacacacacacacacacacacacacaaattggttttctctagagaaccctggcaaatatatacatttaacacaatgtaaaatgattgtatacaagttgaatgtcagttgtaatatctaattaaatatttattaatttaacttcttgttaagacttaattctktgcagcaagagtgcttgacagttaaagta

SEQ ID NO: 104262 - DNA, 612 bp, Homo sapiens
gtaacaagactggcagatgctagtggcatttagtagtcagaagctagggacgctcagtgttcagcaatgcttgggaagcctcacataaaaaagaaatgtttacctaaaaccataatagcacctcattgcttatacccaataatttaagggattcaagaatcatcttgtattgatttttattactaacttctgcagcctgggttacactttggaaaacattacagtctcctcattagtctatgcctgtaatggaatttcactattaaacacaaattcttggctgggtgcggtggctcatgcatgtaatcccagcactttgggaggctgaggcgggcggatcacgaggtcaggagttcaagaccagcttgggcaacatcatgaaacmccgtctctagtgagatacaaaaaaattagctggggtgacccatgcctgtaatcccagctactcaggaagctgaggcaggagaatcacttgaacccgggaagcggagggtgcagtgagccgagatcgcgccattgcactccagcctgggtgacagggcgagactccatctcaaaaaacacaaaattcttagctagaattgttaactaaatggaactcatgttggaaaa

SEQ ID NO: 104263 - DNA, 647 bp, Homo sapiens
gtgtcatgagggcttaataaccctaccaaatataagatatactaatattgattaataaagtatagaactggcaaaagaataggcagattaatagatgctatagtttggatatttaaccttcaaatcccatgttgaaatttgatccccagtgttggagttgggacctagttgtttgggtcatgggagtggatccctcattaatagattcatgccctctctgggttcagggttyggggaggcagtgagggatttctcactgtgttagctcctaagaaagctagttgttaaaaagagcctggcaactcttgtctctctctctctctcttgctttctttctcgccatgtgacctctgcacacattggctcctcttccgtttctgcctgagaggaagcacactgaggctctcctcagttgcagatgccagcgcgccatggttctttcacagacagcagaactgtggggcagccaacaaacctcttttctttataaattacccagtctcaattatttctttatagcaacacaaacaggataagcccaagtggaatgaaacaaaaagagagaacctcacaataaactcaaatatatacaagaatgcaacatgtataaaaatgacattttggattagtggaaaaatagctatttg

SEQ ID NO: 104264 - DNA, 647 bp, Homo sapiens
gtgtcatgagggcttaataaccctaccaaatataagatatactaatattgattaataaagtatagaactggcaaaagaataggcagattaatagatgctatagtttggatatttaaccttcaaatcccatgttgaaatttgatccccagtgttggagttgggacctagttgtttgggtcatgggagtggatccctcattaatagattcatgccctctctgggttcagggtttggggaggcagtgagggatttctcactgtgttagctcctaagaaagctagttgttaaaaagagcctggcaactcttgtctctctctctctctcttgctttctttctcgccatgtgacctctgcacacattggctcctcttccgtttctgcctgagaggaagcacactgaggctctcctcagttgcagatgccagcrcgccatggttctttcacagacagcagaactgtggggcagccaacaaacctcttttctttataaattacccagtctcaattatttctttatagcaacacaaacaggataagcccaagtggaatgaaacaaaaagagagaacctcacaataaactcaaatatatacaagaatgcaacatgtataaaaatgacattttggattagtggaaaaatagctatttg

SEQ ID NO: 104265 - DNA, 616 bp, Homo sapiens
tacaatgcaacaaggtactatgaaggatacaaatctattcatttattcattcatgcaaaattttgacagagagtataccatgtgcttactataatcactgcagatacagcagtgaacaaaacacacagaatcatgctgccctttcggagcttatattctagatattgtatcctccagaaacatgcaatttggaagaacatgtgcacaaaaaactagagtacagagaagcrgaagataaaaagccatctgagcatcaaaagcaagaaaatgctataggatttcaaaggacgtgcagagtgtttttggtataataaattcaggaaaatattcactgagagagaagcccttgaggtgaagtttggagggcaggtgaaatgaggatgtaagcaagaaagaaaaagagagattaagggttcgataggctgtcagttccctgaggtagagtttgttttgttttatttatctcttttaataagggcctagaatagatactggcatatagtcagtgctcattatttattgaattagcaatagatcactccaagcatagacatactatgaatgacaccctgaaggaggcaagagaaaggtttgtctatggagctattatgggaag

SEQ ID NO: 104266 - DNA, 590 bp, Homo sapiens
cattctcgtgaacaaaacagataggaggatactgacagagacaacatacacattagataatttatatgtctaatatcttagaaagtgacaggtactgtgaaggaaagtaaagctgagaagggcatagagaatcctggaaacagggagtgagaccacaggttttatccaaacctactgaatcagaacatccaaggatgtgaggagcaggtatctaaattacaaatgagctccccaagggattatgacaccttccaaagtttgagaatcactgatmtaaataaaattccttgtgctgcactgcatctcagaagtagagaaagagcattcttctccaaaagcttcatatttttttttgttcattgaggctgtttttttctgtttgagtttcctttgagcatatattgaaggcttcttagaatccacatgctcatttccatggctcccgtgctgatagctgaagggtgcttttcagaggagatggggaagtcaagaataccagaaatctcagtctgtaggaaagacacactggttggtttcagtaaaataaatcagagaagatacttaaacaatgagttataacaaaataatta

SEQ ID NO: 104267 - DNA, 547 bp, Homo sapiens
ttgctgttaccagttttttgcaggcactcttttttgtatgtgtatatgtatagttctagaagtttatcacatccatattgccaccactacaatcaaggcatagaatgactgatcaccacatrggagttccctctagagcacatttttttgtttgtttgttttttgaaacagggtcttgctctgctgcccaggctggagtgcagtagcacagtcacaacttgcttcagcctcaaccttctggactcaagcgatcctcccacctcagcctcccaagtagctgggactagagactaccaccatgcccagttaaatgtttgtattttttgtagagacagagttttgccatgtttcccaggctggtctcgaactcttgggctcaagcaatccacctgcctcggcctctcaaagtgctggaattacaggtgtgagccaccaccccacattgaatttaaattgcccacattatgccctgcacaggcactaaggatgtgtgcctgctcatcactctaggaaagcctacctatcccatcttgctctgcacaaagag

SEQ ID NO: 104268 - DNA, 547 bp, Homo sapiens
ttgctgttaccagttttttgcaggcactcttttttgtatgtgtatatgtatagttctagaagtttatcacatccatattgccaccactacaatcaaggcatagaatgactgatcaccacataggagttccctctagagcacatttttttgtttgtttgttttttgaaacagggtcttgctctgctgcccaggctggagtgcagtagcacagtcacaacttgcttcagcctcaaccttctggactcaagcgatcctcccrcctcagcctcccaagtagctgggactagagactaccaccatgcccagttaaatgtttgtattttttgtagagacagagttttgccatgtttcccaggctggtctcgaactcttgggctcaagcaatccacctgcctcggcctctcaaagtgctggaattacaggtgtgagccaccaccccacattgaatttaaattgcccacattatgccctgcacaggcactaaggatgtgtgcctgctcatcactctaggaaagcctacctatcccatcttgctctgcacaaagag

SEQ ID NO: 104269 - DNA, 604 bp, Homo sapiens
agatggaaagtttgttcatctttattcattgccccctccccaggatacttttgggtacccggctagtgctgaggcttggggagacccaggattacgtgagagccactctctcagttgggccttcctccctacttagtgttcaggagccacggcatgggttggtaactatgaaaggggatgtgctgcaataaagctaccagcagagcaaagggggatacaggaagacaggagacagaaggggagggattttactcacttataccttacttcattcccaaaagattgatggtggcagagaggctgtgaacctacaaaggtttcagggtatgagctggtcttaaagagtgaacaggattcagaggacaagatgaggatgggtcttccaggaggaaggaacaggttgtgyaaagacacaggacatgtgtgaggtctcgtagagcccaaggtggctgaggcagagggggcagtggaaatgctgaaggagtgatggtcctgttcagatggccagcccatcgtgggaaccattgtggatgagcctgcccttcaaaaggctggtcaccttggcctcagtcactgttgttgtataacaaagtccccaaaattc

SEQ ID NO: 104270 - DNA, 238 bp, Homo sapiens
agtcaacctgagaagaagctaaccacgctcagccatcaaaacaagacttcagaggaaaggatcttggagaggtgtctgggtaactgggcctccactttgctccttggctgcactactagtgagtctgctgccatgtgtctgggtgtgggctyggggccactgtaggtgacacagtcaatgatcaggagaaagagctggggacatatcacaagagagcaagaaaaaggtggaacctaca

SEQ ID NO: 104271 - DNA, 238 bp, Homo sapiens
agtcaacctgagaagaagctaaccacgctcagccatcaaaacaagacttcagaggaaaggatcttggagaggtgtctgggtaactgggcctccactttgctccttggctgcactactagtgagtctgctgccatgtgtctgggtgtgggctcggggccactgtaggtgacasagtcaatgatcaggagaaagagctggggacatatcacaagagagcaagaaaaaggtggaacctaca

SEQ ID NO: 104272 - DNA, 238 bp, Homo sapiens
agtcaacctgagaagaagctaaccacgctcagccatcaaaacaagacttcagaggaaaggatcttggagaggtgtctgggtaactgggcctccactttgctccttggctgcactactagtgagtctgctgccatgtgtctgggtgtgggctcggggccactgtaggtgacacagtcaatgatcaggagaaagagctggggacatakcacaagagagcaagaaaaaggtggaacctaca

SEQ ID NO: 104273 - DNA, 238 bp, Homo sapiens
agtcaacctgagaagaagctaaccacgctcagccatcaaaacaagacttcagaggaaaggatcttggagaggtgtctgggtaactgggcctccactttgctccttggctgcactactagtgagtctgctgccatgtgtctgggtgtgggctcggggccactgtaggtgacacagtcaatgatcaggagaaagagctggggacatatcasaagagagcaagaaaaaggtggaacctaca

SEQ ID NO: 104274 - DNA, 538 bp, Homo sapiens
ccattgtcttgagtttcagatggtgttatggactgaatgcttgtgtttccctccaaattcgtatgttgaagccctaacacccagtatggctatacagttgacccttgaagaacatgagtttgaaccacctgggtccatttacatgcagatttttttcaataaatatttttaaaggtttttgggagattttcaaaaatttgaaaaaaaagcagataaatcccatagcctaaaactattaaaaatttaagaaaaaaatgtgtcatgaatgtgtatagtctatatagatagtagtatattttattatttattaccatawagtaccccaagacagcaagaccaactcctcctctttctcttttttctcagcctactcaatgtgaagatgacaaaaatgaatacttttataattcactttcacttaataaacagtaaatatatttgcactttcttatatttttcttagaaacattttgtgttctctagctcactctactgtgacacatatagtgtataatgtgtataacatacacaatacaaa

SEQ ID NO: 104275 - DNA, 538 bp, Homo sapiens
ccattgtcttgagtttcagatggtgttatggactgaatgcttgtgtttccctccaaattcgtatgttgaagccctaacacccagtatggctatacagttgacccttgaagaacatgagtttgaaccacctgggtccatttacatgcagatttttttcaataaatatttttaaaggtttttgggagattttcaaaaatttgaaaaaaaagcagataaatcccatagcctaaaactattaaaaatttaagaaaaaaatgtgtcatgaatgtgtatagtctatatagatagtagtatattttattatttattaccatatagtaccccaagacagcaagaccaactcctcctctttctcttytttctcagcctactcaatgtgaagatgacaaaaatgaatacttttataattcactttcacttaataaacagtaaatatatttgcactttcttatatttttcttagaaacattttgtgttctctagctcactctactgtgacacatatagtgtataatgtgtataacatacacaatacaaa

SEQ ID NO: 104276 - DNA, 556 bp, Homo sapiens
agctccacaaggctttcacccaattcaaatgccaaatgcaagtagtaggttgtcacctatacttctgactgaccagctataaactggggctccaattgccttctccttgggttcaattaatttgctgggaaagctcacagaattcacagggaaacacttagctttgtttcctagtttattayataggacattacagtgtatacagatggtcatccagatgaagagatacacagggcaaggtatgcgatggggtgtgcaaagcttccataccctctctgggtgcaccactctccaggaacttccacatattcagctatctggaagctctccaaatctagttatttaggtttttatgaagcattcatttcttaggcatgatggagtaaatcattggtcattggtgattaatttaaacctcagctcctttctcttccctggaggctggagagtggaggtggaagtctcaactcccaaatcatgccttggtttttctgactatgagccccatcctgaagctaccagccataaaccatctcactagcataaaagaggcact

SEQ ID NO: 104277 - DNA, 586 bp, Homo sapiens
gtctcactacaatgaatctcttaaaccaatatctcactaaaatcagagaatatttctagaactctcaaataaatagcaataagactatgcataattgcatagaagtcagtctaaaatgcaacaaaaatgaacaccatagttgacattgaaccaatataatgagttgttggccaataagcctgaaactcttctgtgagctgagatggaacagccacaagttgcttgaacattgtttgaaaatgagattgtcatgttttctgagtctccaaaaggaaaatagacacatatgacaaatactgaagagaagactcatccaattattctctaatagttgatgtatggcygcatccttgctctgtgcctcatcagctgaagattccaggcatgtagtccagttgctaagaatgtgggttctgtagtcagacacattggggttccaaacctttggaagtatattgcttagtttttctgaaaggggaataatacctacttaacttgattgttgtgaaattcagtaagaccatatatatatatttagcatcatgcttcaaacaaagatatattacgttgaaaaatattaggttta

SEQ ID NO: 104278 - DNA, 558 bp, Homo sapiens
tctgacttcctaacccaccctgtttctcttctagccctgggtggaatcatagtgttaagaatcagatatggaaactttcttacccatgtattaatttagctgatctgaatgctctcctttaggaagattttcagcatttctctagacttgaaggcttttataagggtaagaaactcaaaagtaataaagtagactcctttcacactaaaaatgatttctgacaccatctagyattcctgtcatatttctcaatgtgtcctgagaagtgaccagcaggtaagttaatgcttatatgtttcatagggaagttggtagcaaccaagtaaattgaatccaagtgaaagcctgtttattcattattcacaaattcaaatggtatcttttatggttggcagcctatgaaactcattctggtctcatttcttttttatttttgtttattttcatttcccaaaataaatccataactttggaattatcagatacacaatagcttagctaatgatgaactgatctgtaaactacaactgtcctcatcctaagtaattatttcacttg

SEQ ID NO: 104279 - DNA, 517 bp, Homo sapiens
ttagggagaccctccttttcacttccataataccccctgtgcttacttgatttgtgggtatatgtatctgtctcttccattagactcgagcttctccaggatgtaattatgcattctacccataatgcttagcatggtgccaggcacttagtaggttcatgctaaataattttcaaatccattaatattcatatatttaaattagcttggcatggcatggctaggaaacaagtgctaggaaaagggatttagaggctgtgaatttgctcttcatcctgyagtttctctgaaagtgcttttggccctgtcacttttcagtccctacctacaatcagcacgtgcaggacagtcaccttttggcaaggaaggcaagttgtccctcacctgggatccctgccccctctgcacctagagcacacagctgcagctgtgtttctgcacctgcggaatccaaagctgtgtgcacagtcccagagcaatgcaggcaaagttgcacaggaaagaaacattaacacat

SEQ ID NO: 104280 - DNA, 562 bp, Homo sapiens
tctttatggtggagattactgaaaaagtatgggagaaaattatacattttgatagaaaatcgtaagagttgaatggtgtttgcccaaaaggtttgtccacccagaatctcacagtctgacctcaatygtaataagcatctttgaagatgtaataaggtaataaagtgtgctcatcctctattacaataaattctaaatctaatgagtgtccttataagagatagaataacagaaagacacagaaaaagcggggaggcatgtgaagacagagtcagagagactggaaagacaaaaaccgctaagaattgctgacagcatggaatgggttttttctgggtctccagtggaaaccaatactgccaacacattcatttgtcttctggcctccagacctgtgagagaatcaatttctgttgctttaagtcatcaagtttgttgtaatttgttatgacaaccctggaaacctaatacaacaatgtgatgctttagaaccagttgtgttcgaacaaatttaagccttaactcatattcttaccaaacagtccccaatgaattatggatg

SEQ ID NO: 104281 - DNA, 562 bp, Homo sapiens
tctttatggtggagattactgaaaaagtatgggagaaaattatacattttgatagaaaatcgtaagagttgaatggtgtttgcccaaaaggtttgtccacccagaatctcacagtctgacctcaatcgtaataagcatctttgaagatgtaataaggtaataaagtgtgctcatcctctattacaataaattctaaatctaatgagtgtccttataagagatagaataacagaaagacacagaaaaagcggggaggcatgtgaagacagagtcagagagactggaaagacaaaaaccgctaagaattgctgacagcatggaatgggttttttctgggtctccagtggaaaccaatactgccaacacattcatttgtcttctggcctccagacctgtgagagaatcaatttctgttgytttaagtcatcaagtttgttgtaatttgttatgacaaccctggaaacctaatacaacaatgtgatgctttagaaccagttgtgttcgaacaaatttaagccttaactcatattcttaccaaacagtccccaatgaattatggatg

SEQ ID NO: 104282 - DNA, 521 bp, Homo sapiens
ctccctgtcctcttctccctgttgctctccccagcctgtaataaccagaattctactctccacttccatgagctcagttcrtttttttttagctcccacatatgagtgagaacatgcaagatttataattctgtgcctaggttatttcacttaatgtagtgttccaggctgatccatgttgcagccaaggacaggatttcattatttttacggctaaatagtactccactgtgaatagatactacatttttaatctattatgtttttggacatttaggttgattctaatcttggctactgtgaatagtggctgctataaacatgagggtgcaggtatctcctaaatatgctgatttcctttcctgtagataaatgccccatagtgggactgctggaaaaagaaaaaattctttttctttaaacctgatcatgtctgtcctcataaatgcatgttacacccatctctcgccatcaatgcaacccgaccccgagcagttgttcactcttctcttccctcgttc

SEQ ID NO: 104283 - DNA, 606 bp, Homo sapiens
gaatgattttaaaattatacttgcttacaacaggtatgctctcacacatcttcagtgtgaaaacactgtttagtggataatttggtttgctctcagggcaagtttttaaaaactgcaagtcattaagaatcattagaggaaaaatgaaatactaagcgtgtgtctttgctatctttacagatcaaataagaaaatagcagtgatcagcatgaagctccttatggagaaagagcagatgaaatattttctcagtgctcttcctacaaggcgagacccagagtcaccttgtgttgaaaatcttactagtataggactcaacagaaaatatattccccaaacacccataagaattcctatttcaagcccacagacttcaaataactgcaagaactcytagactgtggttagttacatgaccatttctcttttgggtttcatttctctaatataattcttgtttttaatttggtgaaatactgaattctgttgacttatgcatgttttgtaaagatcataattagctgtgttaacacagaaaggaaatgggaactttacattttttaattccctggagctctcattttcaagagatacccgtttactaac

SEQ ID NO: 104284 - DNA, 484 bp, Homo sapiens
gctaatttcattacacatgatcataggcataaatttaaatttgtggaggattgttttgtacatcccacatgaaggggtgacctgcccctccacacctgtgggtktttctcattgggtgggatgagagactgagaaaagaaagagacacagagacaaagtatagagaaagaaacatgggcccagggtaccggcactcagcatatggaggatccacgctggcaccagtctctgagttccctcagtatttattgatcattatctctaccatctcagagagggggatgtggcagggcaatagggtaatagtggggagagggtcagcaggaaaacatgtgaacaaatgtctgtgtgccataaacaaggttagaaaaggtgctgtgctttgaggtgcacatacataaacatctcggtgcattaaagggcagtattgcagccagcatgtctcacctccagccttaaggcagttttctccttatctcagttg

SEQ ID NO: 104285 - DNA, 484 bp, Homo sapiens
gctaatttcattacacatgatcataggcataaatttaaatttgtggaggattgttttgtacatcccacatgaaggggtgacctgcccctccacacctgtgggtttttctcattgggtgggatgagagactgagaaaagaaagagacacagagacaaagtatagagaaagaaacatgggcccagggtaccggcactcagcatatggaggatccacgctggcaccrgtctctgagttccctcagtatttattgatcattatctctaccatctcagagagggggatgtggcagggcaatagggtaatagtggggagagggtcagcaggaaaacatgtgaacaaatgtctgtgtgccataaacaaggttagaaaaggtgctgtgctttgaggtgcacatacataaacatctcggtgcattaaagggcagtattgcagccagcatgtctcacctccagccttaaggcagttttctccttatctcagttg

SEQ ID NO: 104286 - DNA, 484 bp, Homo sapiens
gctaatttcattacacatgatcataggcataaatttaaatttgtggaggattgttttgtacatcccacatgaaggggtgacctgcccctccacacctgtgggtttttctcattgggtgggatgagagactgagaaaagaaagagacacagagacaaagtatagagaaagaaacatgggcccagggtaccggcactcagcatatggaggatccacgctggcaccagtctctgagttccctcagtatttattgatcattatctctaccatctcagagagggggatgtggcagggcaatagggtaatagtggggagagggtcagcaggaaaacatgtgaacaaatgtctgtgtgccataaacaaggttagaaaaggtgctgtgctttgaggtgcacatacataaacatctcggtgcattaaagggcagtaytgcagccagcatgtctcacctccagccttaaggcagttttctccttatctcagttg

SEQ ID NO: 104287 - DNA, 618 bp, Homo sapiens
tgaactcactgagaagaactcactcaagtggattgtgctaaaccaagcttgtctaacccacagcttgtgggctgaatgcaggtcaggacagctttgaatgtggcccaaatttgtcaactttgttaaaagagagtttgtgtatgtgtgtgtgtgtgtgtgtttgtgtgtgtgtgtggtttttttatttttatttatttatgtatttatttattttagctcatcagctatttttagtgtattttatgtgtggctcaagaaaattcttcttccaatgctgtccagggaagccaaaaggttggacattcctgtgctaagctattcataaggcatccaccccatgatccaatacctctcactgggccccacctccaacattggggatcatattttagcatgagatttggaggggacacacatccaaattatatcagggatatgtacccatcatcgagacaggttgtagagtatgcatactttcaaatgggtcctgtcatgttattttctgaaatggttaaaaccatttaatttyccatccattgcccataaagcttgttttcctcatatcctcatcactcaatgttatctaggattcttatattttctaagcaagtggtgaaa

SEQ ID NO: 104288 - DNA, 573 bp, Homo sapiens
tatgcatactttcaaatgggtcctgtcatgttattttctgaaatggttaaaaccatttaattttccatccattgcccataaagsttgttttcctcatatcctcatcactcaatgttatctaggattcttatattttctaagcaagtggtgaaaatacagatctcattttatttgtgtacatttgcatttgtcagattgttaacaatgtattgaattttttggcccatttttctattgagtttactatcttctttgttcatctgaatatcaatcatattcactttgccctaagcagtgtcaacattttctattactctgtcatacatctgataactttgtatgccaacctttactgaaatgagcctttatgatttttatacttctagagtttatgtatttaattaaatttattggtttagtatatattttattaaactgtaacaacagtcccaaatctatgttttgctgggttcattcagatttagaactcagataactttttggaggataaattctttttatcataatgaagaatggctatcataatgcaatatgattacttctgccaatgct

SEQ ID NO: 104289 - DNA, 550 bp, Homo sapiens
tagcaccccttgaccgggtcaccagtgacccagcccattctgacaaggctaccactaagccacagctgaccaggtctccactcaccaagccctgcagcccaggtttgcactgaccagacaccaaacatttgtctgccactaggtccccactcaccaagacctgcactactcgatccctctaatgagaccctctctaagcagaccctggctgaccattcccccagtaaataggcctcactgaccaagtcccaactgactagttcactgaccaggcccacactgaccaggcccttcctaatcataccagaaggccaagtggcaatgagatgtttcatatggcaggggtaggagcaagacagagagaggaaagaggtaccacaccctgttagacaaccagatcacatgaggtctcactatcaggagatcagcatcaagaagatcctgcacccacaccaccrcccactgtttccaggcagaagcctcctgcagaggccaagcctcttgagaaacttccactatggcagtgcagaaggaaaatatgggcttggag

SEQ ID NO: 104290 - DNA, 567 bp, Homo sapiens
atgagtctaatttgacagttgaattatttgtaccatctcaccgatgataaaattagcagttatattgtgtagaatatacagataggtaggttataatttttctatgttaagtttatatagagaagaacaaatgccactkgtaactggtgatgaagcatagaacaatgacttttctacatatctaattcaataaaagagtttacatgtggaaattcaacaaagtaactatactctggcaatgcacatcaacttaactggtgggaatatttcctgaggtggaaatacttcagttttatggtataatctaccaaggatgagtatagtataatccaccaactaagataaattgtctccagttttattaatcaaatgaatattatattggaagtgagcatttaatatttatatagttgtctacttcaagagtttctgattatatacatcagaaaaataaaatttttgataataaaatatattcaaaggatcctcccaaacatcccacagtaacacagcacatgatctaacaaccctaatagtcacaacagtccacataatgtctcattgtat

SEQ ID NO: 104291 - DNA, 584 bp, Homo sapiens
aattgaaagttttataagtaattttcagctgacgtttagcactgtaggtttgattgtagagaactggtactttatttcatgggagtacttgaattatatattctcttgtaagcataaaattgtgaatgtccatattttaaaaaagcattataataataaaaactcttgtgttttaatttgtctaatacatttggtaactaatataaattatagatactctggttagactagaatatagatgaaaatatttttaaatatgttctcttttttctttaatgtgaatatttcttatttttcaaaaaataaagcaaggggaagaaataaagttgagatttaaacacggctacatttttttccctgaggcttgtacttaatatgcaaatgctaagtatttggtaaatattcattaagtaaatatcagacctttcacatttatatttcacttttcatttttgatacatgayaaaatttgtgattttattattttctaacaaaaatagaatgggggcccacttttcaaatccattctgcaaaagacaatgtttgagtttttataccacagctgtcctaagtaacgaattatc

SEQ ID NO: 104292 - DNA, 530 bp, Homo sapiens
tatcagacctttcacatttatatttcacttttcatttttgatacatgacaaaatttgtgattttattattttctaacaaaaatagaatgggggcccacttttcaaatccattctgcaaaagacaatgtttgagtttttataccacagctgtcctaagtaacgaattatctcaccagagaagagaagaaatgctaaccacataatccaacaggagacttgattcattttgtgtctggaacagtcagtgcaatgttacaaactgaaatgagtttccttttcaatcttcaggtgaaaaaagtagtgagaatgtcccgctttaaaaaaaagaaaatcaatgtgaccttttttttttttcatcttccttgagaaataatgtgtgtttgtgtgggggkgtgtgttttattttgcagtgttagttttgacctcattatgctcattatgctgttgtaaggctaagtatgtcatgggtcaaaatgaaggcaaaatagacctttctcagcattaaagcacaacctaatttatggtaaaag

SEQ ID NO: 104293 - DNA, 573 bp, Homo sapiens
agaaaaatgtgtgtcttagtctgaatttcctggaagtagatcctgaggcaaagattcaaatacaaaaattttgtttggagataacgctaggatattaattcgactgccagttcttccttagggtgctaatcccaggaaacatcagtggaggagtggggaactgagacaggaaaggaatgcagcagttaaagggaccttcatcaagaaagtttccactgtggcagccaggactcagccctgccaggtacctctgagagacagcacagaacatgtgcttcagagtcatcatacccagagcaagggaccaggggtatttatccaccaatacccaccagtcactcctcagggatcctcccaagggcatgattcctccagaatgtcctgcctgcgctgcaagggtcagacctggggttgagggcaggacccctgacagcgcttccagcaatgggcagaaccacagcctgatgtgtacagtttcagtcacccagtaactccaacacacacacacacacacaytcacacaccacactccaacaccaacaaagtatatacgtacatacacatacatgcata

SEQ ID NO: 104294 - DNA, 573 bp, Homo sapiens
agaaaaatgtgtgtcttagtctgaatttcctggaagtagatcctgaggcaaagattcaaatacaaaaattttgtttggagataacgctaggatattaattcgactgccagttcttccttagggtgctaatcccaggaaacatcagtggaggagtggggaactgagacaggaaaggaatgcagcagttaaagggaccttcatcaagaaagtttccactgtggcagccaggactcagccctgccaggtacctctgagagacagcacagaacatgtgcttcagagtcatcatacccagagcaagggaccaggggtatttatccaccaatacccaccagtcactcctcagggatcctcccaagggcatgattcctccagaatgtcctgcctgcgctgcaagggtcagacctggggttgagggcaggacccctgacagcgcttccagcaatgggcagaaccacagcctgatgtgtacagtttcagtcacccagtaactccaacacacacacacacacacatwcacacaccacactccaacaccaacaaagtatatacgtacatacacatacatgcata

SEQ ID NO: 104295 - DNA, 644 bp, Homo sapiens
ttgagggcaggacccctgacagcgcttccagcaatgggcagaaccacagcctgatgtgtacagtttcagtcacccagtaactccaacacacacacacacacacattcacacaccacactccaacaccaacaaagtatatacgtacatacacatacatgcatacatgactgttacccacttagatcctagtgactccatgggatagacgataaggtgggaatcagaggaaagagtaaaattaaggcgagtgaaagtcttaagaacaaaatgcaaatttaggctgaaaatgaagggggaggaggtgtggtctcgacaccaaatgcctgctgggtggcacatgctctacacacactgtcactaattctccaagcagcctcgtggagtaaaagaaattcctctcaatgtacagatgacagaaacatagttcagaaaagaaaactgattttactaatgtctcagcaagttagtgggtgacatggagtcccagatctttctgtccacaaagcctacaaattctcccttgttaggcaggctgggtaccaggccctgcttctgggctctgcttcttttcctkctaggctaaaacagcagaactgacagagacatcatcccccttctccacctggagcagagccaatgagagg

SEQ ID NO: 104296 - DNA, 514 bp, Homo sapiens
aagtactctgttctaatgcttaagggacagctgtacatagtatatggtattgaaagttaggacaggcctacttcagaataagtgtgggcactggagttagatatagaatcatacaatgttaaacttataaaatcaaatatatgttgaggcaaggaattgtgttagaaactacataaaacaggccggtgcagtggctcatgcctgtaatcccagagcattaggaggccraagtgggcagatcacttgaggccaggagttcaagaccagcctggccaacatggcaaaaccctgtctctactaacaataaaaaattagccaggtgtggtggcacacacctttaatcccagctactccagaggctaaggcatgagaattgcttgaacctgggaagcgggggttgtggtgagccaagattacaccactgcactccagtctggatgacagagcaagactctgtctcaaaatatatatatatatatatatataaaaaacaaggaaagatgagttcagaatt

SEQ ID NO: 104297 - DNA, 514 bp, Homo sapiens
aagtactctgttctaatgcttaagggacagctgtacatagtatatggtattgaaagttaggacaggcctacttcagaataagtgtgggcactggagttagatatagaatcatacaatgttaaacttataaaatcaaatatatgttgaggcaaggaattgtgttagaaactacataaaacaggccggtgcagtggctcatgcctgtaatcccagagcattaggaggccgaagtgggcagatcacttgaggccaggagttcaagaccagcctggccaacatggcaaaaccctgtctctactaacaataaaaaattagccaggtgtggtggcacacacctttaatcccagctactccagaggctaaggcaygagaattgcttgaacctgggaagcgggggttgtggtgagccaagattacaccactgcactccagtctggatgacagagcaagactctgtctcaaaatatatatatatatatatatataaaaaacaaggaaagatgagttcagaatt

SEQ ID NO: 104298 - DNA, 632 bp, Homo sapiens
taatcaaaacttgcaattttcatctggtgaaaattaggaccaaaaaatagaattgatccactaaagatacaggcaaggatttttgctgccttgtgttttattctgtgcctcaagtaatactaacttttctttttctgtgcttccctgttctcagagaagtttcttcatgagatctagtttattaccaagatacctgataycatgaaagttgatattcgagtgtagtttaaatcaattcatccaagtgaaaatgttagtgtttggcctggtgttcatgtgtgtctccacaaacaaccccaagagacagtcagagtcagccggatcaggaaccatgtgaaatgctgtgaatctgagcatcctccccagtcgtgctgagggaataaagtgctgagggttgctccagagctgtgtcctgtgctcattccctggatgaattccaggtgcacattaacagtttaactttgttaagaaggtgtcagcctcggatcatttgcattccattatccacagtgctttttaattttgtgcctgctttggaaagtaaatgatgacattctgctgggagaatttcagcctgtgtgctctttataaagtaaggaaatggagtaattatcacagagaaggagacaaga

SEQ ID NO: 104299 - DNA, 469 bp, Homo sapiens
tttgaacttgagagagatgatttagggcatctggtggaagaaatttctaagcagcaaagcattcaagaggtgactagggtactgttaatagtattcagttttatgtattcacaaagctatgatggttggaattggaacttatgttaaaagggaagcaaaaaatataaaagttcagaaaatttgcagcctgatgatggagtagaaaagaaaaacccattttctgagaagaaattcaagccggctgcagaaatttgcataagtaacgaagagccaaatgttaatcaccaaaacaatggaaaaatgtctccagggcatctgagaggtctttacagcagcccyttccatcacagacctgggggcctaggaggaaaatatggtttcatgggcctggcccagtgccctgctgctttgtgcagtctcggacttagtgctctgcatcccagccatggttaaaaggggccgacataga

SEQ ID NO: 104300 - DNA, 574 bp, Homo sapiens
  misc_feature (1)...(574): n = A,T,C or G
ggctctgttgagattatcttctactctctggccacatgtaatacccaggacatcaataatatttgccatttcctactcactaggtccagtcaacatcatgtcatcaatttaaggacaataatatattcaattatatacatactatatatataatatttattataccatataaatacacagtatatatatatatatatatatatatatacttttgaactttatgaccatatgaattatatatgactgtatatgtaattttaaactttatcacagccttggtgcaggcagtgagtaatttgcactgtgttaatcctttttgctgatactaatggcatattcctttcttatggctattgcaacaaattaccacaaatttggtttcttaaaacaatacaaatgtattctgtyatatttctgaagacaagatgtctgtaactaatttcactgggctaaaggcaaggtgtcagaagcgctggtcccttctggggttttagaggaaaactcgtttctttgcctttctagatcttctactttctacttctagagacccctggtgttattcagcttgtannnn

SEQ ID NO: 104301 - DNA, 661 bp, Homo sapiens
catgtcacattgcagatccataaggattacatgtgtggttttccatatttgaagatgatacagacccggaagcagagaagcccctgacttgtatttttatgacagtggaaattccctatgttcagtttctttgccttcttccccttgcaaaaaatatgctttttccaacaaataatcattgtgctcctaataagtgcaaccatgacagtcactggagacacagagctatgctagacccagatatgtttgttaaggccctcacagtctagtgaggaaaggaagcaagtcaacagacaactacaatcccaactgacaggctctgctatgagacatttagtgtattatagcgagggcaggaaagggcacccactttgcagctggtgtttcagaagacacatcgtggagaaaggagcatttgcagaggagcagccattgctaagtgaaacagatggggaacacattccacatggtagggacagcatttacgattccctggagctttaagggggagagacgtgacaaaaaaattccaagtacaggcgaaagtctcagtgttctgttgaagtatcttgaggtgaagaatgactagacttcggctttttttwaaaaatttttaaaaacatctctgtcatggcagtgtagatgttatcttattggagta

SEQ ID NO: 104302 - DNA, 621 bp, Homo sapiens
ttgcttttgtaaataaaacattattagaacatagctacacccatctatttacatatcatctgtagctgcttttgctctacaaggcagagttgactatttgcatcagagactgtttagtccacaaagcgatactgtctggctctttatatraaaatgttttcaagccctgttttatgaattaggaagaaagggctttctaagtctttctcactacaaagtttatttctcagaatcaaccagaatgaactgtccagggctgaggtagctgtgctgactccaagaggtggtgcagttgtacagaacatggactctgaacattagacaaacctgagttcaaattttaacaactatctggctgtgcactcagaaaagtcacttaactactctgagtttcctcgtctgtgaagtgcccattagaattctgaccttgcaggacctctgaagattaaattgcatgggatatttgtagcaccttgcccagtgtcaggcacatagtagtattcactccgtgatattttatatataattctcaaaggactgcatgcccacataatgaagacctcagttaaactgacattttgtgggtatgcacgctggagctcactatccctgggctgttcc

SEQ ID NO: 104303 - DNA, 649 bp, Homo sapiens
aatctttctgattttctgtgtatccatcttttcagtctcattggaactagcatttgtagcctgtgggtttgtgatgtgctgggtcctgaagcaaaacagatgtgtttctgaaatgtgtcttaatccatccagattttaaagacaaagccattcatcttttatctggtacaaaagggatttctaggttcttccygaggtaatgagtttgagtctagtgatgtggtgataggagatgcaggcagattcttccatgtctgtcatcaccttcccagatccatgctttagggagaatgcaggagcacaggaactcagccctgtttctgctccaggctctaccccattgccaggggccagaggctgggcaggaaggctccctgtactctttttactgttatctatatttttcagactgacattaaggatgacagccttctcccacctccaaagaatagatacctttgaagccatattctgggagaaaaagttgttaagagaggaaaccaaactctctgtgaccaaacctttttgttttttgttgcttataaaaggagtagctatttatttagtaaatgcattttctgaaccaaaaatcaaggacccttgattagatgagggacattaattgctaaattaatggaccagaatattg

SEQ ID NO: 104304 - DNA, 588 bp, Homo sapiens
tcttaaaaactgatattttggtctcatcttactaagaggaatccacaagaagtctaaattacatatatatcaaatgaaaaygttgaataaatctttatttttcagtaatgatcttaaccttcacaacctacaaccttcacaatataccttcaaaatccatttcattaatggcagcaggatctcagaatggcatttcacgtcttgttccagaaccactgtctcaaattcctactgtcttttttaggcatcccagaaaaactgcagcactagataggcagagtaggatagtgggattgagcttccttgcctgagagtactgatcagtcacctccataaatcctgttggtctctttttaaaaaaaaaaaaaaacaatgatcagcactatatacagatggaattccaataaaaaaggagcggatgcaacaatatattgttttacttccatggattatctcccctaaagaacatcattggaaacactgtgtatgggggtgcaggtgggtatgcagcatggtatagggaagggaaagaacgtggaaattgaagtcagacaaatccttattcgtactgaggcaaagtgtttaatc

SEQ ID NO: 104305 - DNA, 568 bp, Homo sapiens
ctttgtcagacaacagtggaatcaaattggaaatcaactccaaaaggaaccttcataaccatgcaaatacatgaaaattaaataacctgctcaagaatgatcattgggtcaataatgaaatcaagatggaaattaaaaagttatttgaactgaacaataatagtgacacaacccattaaaacctctgagatacagcaaagatggtgctaagaggaacattcataatcttaaatgcctacatcaaaaagtctaagaaagcacaaataggcaatctaaggtcatgcctcaaggaactagagaaacaagaacaaaccaaacccaaacccagcagaagaaaagaaataaccaagaccagagcagaactaaatgaattgaaacaaaaaaatacaatacaaaaataaatgaaacamaaagctggttctttgaaaagatacataaaattgatagaccattagcaagatcaaccaagaaaagaagagagaaaatccaagtgaactcaattagaaacgaaatgggagatattacaactgacaccacagaaatacaaaagatcattcagggctactac

SEQ ID NO: 104306 - DNA, 534 bp, Homo sapiens
ttaatttaaatgttaatgtaaatttaaaacatgttgtattgatttggaactatttttatatgaatattgcataactgagcttctaacagcagagtccaaatggacattccttcacattaacttattataattaagaaaacaagtgaactttcaccttttttgtcatgtaaaatcatttgttttagttacaacgtttagctatgagaagctatgagaacttctgcctttgagtgcaattgctttaggctgctctgagcaaaaagatccatttccaagttgattattttagggtattgaacatttaatttcaaatatgtatagagatttgtgwctttctcatttcattggtgagtcaaataaagttaccatgacaatgctggttactttagtctctttcgttagtacttcagtcataatctctttttattgagatttatatttccaagggaaaatgtaatttacagaagatattccattttattagtcccacatgaaataaattatgatgatgaggatgctgacaatacctggata

SEQ ID NO: 104307 - DNA, 537 bp, Homo sapiens
tataatcccagcactttgtgaggctgaggcaggtggatcacttgaggtcaggagttcaagaccagcctggcaaacatggtgaaaccctgtctttactaaaaatacaaaaattagctgggtgtggtggcacgtgcctgtagtcccagctacttgggaagctgaggcacaagaatcactttaacccaggaggcagaggttacagtgagctgagatcacaccgctgcactctagtctcaccaacagggcaagactctgtctcaaaaaagaaaatgtcatcttattagtctgttctcacattgctatatggaaatacccacccaagactgagtaatttataaagaaaagaggtttaattgactcagttcaatatggctggggagtcctcaggaaacttacaatcatggtggaaggggaagcaaacatatccttcatatggtggcagcaaggagaagtgccaagcaaaaggggggaaagcacctwataaaactatcagatctcatggtgaactcacttactatcacaagaacaacagcaggg

SEQ ID NO: 104308 - DNA, 537 bp, Homo sapiens
tataatcccagcactttgtgaggctgaggcaggtggatcacttgaggtcaggagttcaagaccagcctggcaaacatggtgaaaccctgtctttactaaaaatacaaaaattagctgggtgtggtggcacgtgcctgtagtcccagctacttgggaagctgaggcacaagaatcactttaacccaggaggcagaggttacagtgagctgagatcacaccgctgcactctagtctcaccaacagggcaagactctgtctcaaaaaagaaaatgtcatcttattagtctgttctcacattgctatatggaaatacccacccaagactgagtaatttataaagaaaagaggtttaattgactcagttcaatatggctggggagtcctcaggaaacttacaatcatggtggaaggggaagcaaacatatccttcatatggtggcagcaaggagaagtgccaagcaaaaggggggaaagcacctaataaarctatcagatctcatggtgaactcacttactatcacaagaacaacagcaggg

SEQ ID NO: 104309 - DNA, 532 bp, Homo sapiens
tttcatttgaaataaaacttttgaattttatcttctacctaaataacatattttgttttatgtttcaagatgaagctcacactgagttggaaaaaaggaaaaagcaaaggatcaaagctgggggaaaatactggaccatgtgcttcacctcatggtgccaaataaagagaaaatggggagaagatagggacagataaagatctatttgctcggattgtgctctcatccttggcaacatgttgacaatgccctggaaataacttgtttttcttgcaacatttctccagtctgattggtcagcctccggaagatgtggcattttgtaactactagttttctcrtatgggtttagaagaaattaaaaatgaagccaatacccaaggaagaaatgaaagctggccattggaggcagatcattccagcagagtgagggcagccactgggataatgcgtggtccaggattacacaggctgactttgccaggcccttgtttctctgactctatgttagtcagcaaaacacaatccgtat

SEQ ID NO: 104310 - DNA, 510 bp, Homo sapiens
gtgtcataataaaggccttagaggaaaggccaacatatgactcatcctagtgatacaaaatccttacaaatctgggataatgtgtgagccctatctattcatgcaggtgttccagcagatgctgacattttctccattctcttcagtagaaaaatttgagctgatttgctgactattgaatttagaagtccactgacaatgagaatctttaaaaagttcctttctggaaaaccagtgtgtgtgattgtgtatatgtgtgtgtattttatttgtgtrtgtggatgtgaatgtgtgcgtgtgtgtgagagagagagagggagactgtgtgggtgtgtatgtatgtttgagagaaaaaaaacagccaccaaaaaaatgcaattaatgaagattttctgtgcacactttgtttgaattccacagtctactttaaacactctgaatgattataattaaaaactcttccgtggaaagatagagattgctgagtctttagaaagcatcttctcggag

SEQ ID NO: 104311 - DNA, 510 bp, Homo sapiens
gtgtcataataaaggccttagaggaaaggccaacatatgactcatcctagtgatacaaaatccttacaaatctgggataatgtgtgagccctatctattcatgcaggtgttccagcagatgctgacattttctccattctcttcagtagaaaaatttgagctgatttgctgactattgaatttagaagtccactgacaatgagaatctttaaaaagttcctttctggaaaaccagtgtgtgtgattgtgtatatgtgtgtgtattttatttgtgtgtgtggrtgtgaatgtgtgcgtgtgtgtgagagagagagagggagactgtgtgggtgtgtatgtatgtttgagagaaaaaaaacagccaccaaaaaaatgcaattaatgaagattttctgtgcacactttgtttgaattccacagtctactttaaacactctgaatgattataattaaaaactcttccgtggaaagatagagattgctgagtctttagaaagcatcttctcggag

SEQ ID NO: 104312 - DNA, 510 bp, Homo sapiens
gtgtcataataaaggccttagaggaaaggccaacatatgactcatcctagtgatacaaaatccttacaaatctgggataatgtgtgagccctatctattcatgcaggtgttccagcagatgctgacattttctccattctcttcagtagaaaaatttgagctgatttgctgactattgaatttagaagtccactgacaatgagaatctttaaaaagttcctttctggaaaaccagtgtgtgtgattgtgtatatgtgtgtgtattttatttgtgtgtgtggatgtgaatgtgtgcgtgtgtgtgagagrgagagagggagactgtgtgggtgtgtatgtatgtttgagagaaaaaaaacagccaccaaaaaaatgcaattaatgaagattttctgtgcacactttgtttgaattccacagtctactttaaacactctgaatgattataattaaaaactcttccgtggaaagatagagattgctgagtctttagaaagcatcttctcggag

SEQ ID NO: 104313 - DNA, 572 bp, Homo sapiens
attctcccgcctcagcctcctgaatagctgggattacaggcgcctgccaccatgcttggctaattttttgtatttttagtagagacagtgtttcactatgttgaccaggctggtcttgaacgcctgacctcgtgatccacctgcctcagcctcccaaagtgctgggattacaggcgtgagccaccgcgcctggyggggcattctttgaggaaaatttatagccctaaatttgaggtgatgatgatctcgattacccatatttggtaattatacattgcataattttaacagaatgtcacatgtaccccacaaatatgtactattatatatctatcaaaaattaaaaaataaaaataaaaaaacttaatctaaaaaaagaatacccaaaaccaactaactaaattaccattctgatgatttagttaaattaaacttcaaaaaaagtagaatgatgcaaagttaaggacaacagcagaatgaattaaataggacgtatgcacatatatacaatattgtacagaatatcaacaaactgaaaatcagttctttggaaggagtaatacaacagctaa

SEQ ID NO: 104314 - DNA, 619 bp, Homo sapiens
ttccctcactgctgtctttagggtgactcctgagtgagctattctgcagcagcattctattttgggcttgtacccaaatgccatgccaatttattagtgtatcaagctcagccttcccccactctatcagctggtcagaagggacccctgcaggcagttgtaagtgtgagctgagagagagctaytgcaataatggtgacttcatcccatcccgcagggaaggctagggctagagttgtcaggaacttaggcaagtggaccgggaatctgtgcctctgcattgccccgtaatttgatgtgggctgctgccatggagaagtgtaactttgggcaaggcagcttcctccagcagaagaaaattcttggagacaaactcagctttaagctgtcagcatctgggagaaggagtgcttcagtccacagtggaagtccaggcagcaccagagcgtccactacaagaagaaaataaagctgagataactgcagttaacattttggtgtttcatcatcccagcttttttatatgtcaaacccatgtgtggttgtacagtgttatttatactgtgtagcattctcttgttttcttctaagtcacctttcaaataaagtgattagtaat

SEQ ID NO: 104315 - DNA, 220 bp, Homo sapiens
ggaaaacccttcctgttgtgggaaaacaggcttccatatgtgtcttattgggaaacacataggcaatttctatgtttttacygcatctatttcagggatatgggaactgaatagtgcccatcaaaggctcacctgatgttggaaattgatctgagagcgcggaaggacataattctttctttgttcctgggcagcggtggttgagggttcactttgtggc

SEQ ID NO: 104316 - DNA, 220 bp, Homo sapiens
ggaaaacccttcctgttgtgggaaaacaggcttccatatgtgtcttattgggaaacacataggcaatttctatgtttttactgcatctatttcagggatatgggaactgaatagtgcccatcaaagkctcacctgatgttggaaattgatctgagagcgcggaaggacataattctttctttgttcctgggcagcggtggttgagggttcactttgtggc

SEQ ID NO: 104317 - DNA, 626 bp, Homo sapiens
ctactaacactattttcagtgatattttaagtagttgtcctagttaaatttctattttttaaaaatgtatatttaaaaatacattaaatgtgtatatacatcaatcatatgtatygatttctgtttttcttgaattgcaaatgaaatttgtatttttgtgttcctggaataaaataaacttgaatggattgtaatattttattcatgctgtaattcaatgtatttgaattctttaagaatgttacatttacagttaacagatactgacctataaattttctgtcatataatgatgctgtgagacaatctaagaagaattaaaatttaaattcatgtattcttacttttttctctgttctctaactgtaatatattttaattacagatggaggaacagacagatgttagataaatagatatataatatatagatcatccaaaattcttattcttatggttttatgtagtcagtatttacctctatttttctacatgtttatccttccaatttagttcattatttcctgcacctttgatttcatatatataaacaggaaataacacatggtggccgttatgtagagagagccacaggacttgtgaataaaatccacaggcaaggacgt

SEQ ID NO: 104318 - DNA, 626 bp, Homo sapiens
ctactaacactattttcagtgatattttaagtagttgtcctagttaaatttctattttttaaaaatgtatatttaaaaatacattaaatgtgtatatacatcaatcatatgtatcgatttctgtttttcttgaattgcaaatgaaatttgtatttttgtgttcctggaataaaataaacttgaatggattgtaatattttattcatgctgtaattcaatgtatttgaattctttaagaatgttacatttayagttaacagatactgacctataaattttctgtcatataatgatgctgtgagacaatctaagaagaattaaaatttaaattcatgtattcttacttttttctctgttctctaactgtaatatattttaattacagatggaggaacagacagatgttagataaatagatatataatatatagatcatccaaaattcttattcttatggttttatgtagtcagtatttacctctatttttctacatgtttatccttccaatttagttcattatttcctgcacctttgatttcatatatataaacaggaaataacacatggtggccgttatgtagagagagccacaggacttgtgaataaaatccacaggcaaggacgt

SEQ ID NO: 104319 - DNA, 626 bp, Homo sapiens
ctactaacactattttcagtgatattttaagtagttgtcctagttaaatttctattttttaaaaatgtatatttaaaaatacattaaatgtgtatatacatcaatcatatgtatcgatttctgtttttcttgaattgcaaatgaaatttgtatttttgtgttcctggaataaaataaacttgaatggattgtaatattttattcatgctgtaattcaatgtatttgaattctttaagaatgttacatttacagttaacagatactgacctataaattttctgtcatataatgatgctgtgagacaatctaagaagaattaaaatttaaattcatgtattcytacttttttctctgttctctaactgtaatatattttaattacagatggaggaacagacagatgttagataaatagatatataatatatagatcatccaaaattcttattcttatggttttatgtagtcagtatttacctctatttttctacatgtttatccttccaatttagttcattatttcctgcacctttgatttcatatatataaacaggaaataacacatggtggccgttatgtagagagagccacaggacttgtgaataaaatccacaggcaaggacgt

SEQ ID NO: 104320 - DNA, 632 bp, Homo sapiens
tgggaccacttttgtatatgtaatccatctttgaaatgttattatacatgacatgactctatgacaaaataatacattttaaaaaatgtacacatgtatcaaacatattattataaaaataaaaatcttcagtgtaagaatttgtaatgatcacaaaatgttcacagcttatatttaagtacagtttcaaatgcctagtgcaattactatttatttctttgtgtattttaaccatgtatataataaatatttttcaggttcaacaatatatatcaatcctacaggctcttataaatattagctaaaatcaattggtaaattcatgtatatatatgcttacctgtatcagtgagcgtgtgtgcatgtatgtttgtgtaaatgtaattttatgtgtgtgtaaatgtaattggatgcatccttatatttacccttaccttcaagatttccaagattcatttattatctttagatgatgggcatttaaagatttaccaaatacaactgtawtagtggaaaatatcaagatgttattaaattcatcttgtgcacataattgtttctataattttatgtttcttgcaaaacttgcagtaatgctcatgcacaaaataattttctaaataaaaaaacgt

SEQ ID NO: 104321 - DNA, 541 bp, Homo sapiens
atatgattgatttttcttagaaaaagcattcatatattgataggtaataatatgaaaatcttctaaaggcattacaggaacacgaaaatgtaattaaatactcactaatttgtaatgttttatgtaagcggaacacatttaactgaaaattgcttttatataatactcaaacgmgactaaaaactttttaaccagcggagtaagtcttcaaattgataatctggactatattggaggagaaatttcaggcactcaaatatttgaaatgctacaaaatatttatataaactattatttaacaatttctgtttgtagagtgctatacagtaatcaatataaatgacatctcaagtctttctatagctttgaccacatttacctcctaattttaattattaatatgttggagcagtgcatacaactagattctgatcttcctttttaatgagtacaaatatgtgctttgagacagcattaaagaaagagcaccttgtaaaaattcaatgccaagagacaaaatattcttgattctgaagtcttg

SEQ ID NO: 104322 - DNA, 541 bp, Homo sapiens
atatgattgatttttcttagaaaaagcattcatatattgataggtaataatatgaaaatcttctaaaggcattacaggaacacgaaaatgtaattaaatactcactaatttgtaatgttttatgtaagcggaacacatttaactgaaaattgcttttatataatactcaaacgcgactaaaaactttttaaccagcggagtaagtcttcaaattgataatctgractatattggaggagaaatttcaggcactcaaatatttgaaatgctacaaaatatttatataaactattatttaacaatttctgtttgtagagtgctatacagtaatcaatataaatgacatctcaagtctttctatagctttgaccacatttacctcctaattttaattattaatatgttggagcagtgcatacaactagattctgatcttcctttttaatgagtacaaatatgtgctttgagacagcattaaagaaagagcaccttgtaaaaattcaatgccaagagacaaaatattcttgattctgaagtcttg

SEQ ID NO: 104323 - DNA, 541 bp, Homo sapiens
atatgattgatttttcttagaaaaagcattcatatattgataggtaataatatgaaaatcttctaaaggcattacaggaacacgaaaatgtaattaaatactcactaatttgtaatgttttatgtaagcggaacacatttaactgaaaattgcttttatataatactcaaacgcgactaaaaactttttaaccagcggagtaagtcttcaaattgataatctggactatattggaggagaaatttcaggcactcaaatatttgaaatgctacaaaatatttatataaactattatttaacaatttctgtttgtagagtgctatacagtaatcaatataaatgacatctcaagtctttctatagctttgaccacatttacctcctaattttaattattaatatgttggagcagtgcatacaactagattctgatcttcctttttaatgagtamaaatatgtgctttgagacagcattaaagaaagagcaccttgtaaaaattcaatgccaagagacaaaatattcttgattctgaagtcttg

SEQ ID NO: 104324 - DNA, 541 bp, Homo sapiens
atatgattgatttttcttagaaaaagcattcatatattgataggtaataatatgaaaatcttctaaaggcattacaggaacacgaaaatgtaattaaatactcactaatttgtaatgttttatgtaagcggaacacatttaactgaaaattgcttttatataatactcaaacgcgactaaaaactttttaaccagcggagtaagtcttcaaattgataatctggactatattggaggagaaatttcaggcactcaaatatttgaaatgctacaaaatatttatataaactattatttaacaatttctgtttgtagagtgctatacagtaatcaatataaatgacatctcaagtctttctatagctttgaccacatttacctcctaattttaattattaatatgttggagcagtgcatacaactagattctgatcttcctttttaatgagtacaaatatgtgctttgagacagcattaaagaaagagcaccttgtaaaaattcaatgccaagagacaaratattcttgattctgaagtcttg

SEQ ID NO: 104325 - DNA, 661 bp, Homo sapiens
tgatcatctaatattttcaaatacattgtygatcaccaaaaggagcataaggggtatattgatttgtagcagatgtattaatagcccagcccctattccttacctgtagctgctgggaagaaaaccactcttaacactctacaaggtctcatctccagaatttgcagctgtttctagctgaggactttctctagcagcatgggagcttgatactgggcaagtgggaagaaaaggtgagggtaactaaaaagaatctccctggattcagtgatgtaattctgaggcatgttccacatagcttcccatagaattaagcccagatatctaacacaggaacttgcctcttaacacgtgtggtactggcttttctatctttcctgttttattttgttctctcttccttgtctcactttcgctgtgtcctcactcctgttttaagaatacccaaacaaaaacactcaattttttaagagtctcagaatacagttgatagtgtaacttgtaatctatgataatcagcttggatgctgtactgacaggaagatggtgaactcacaatgtctaattaagataaaattaaaaagtatattgattcatgtcaaaagatttaaaaaacctaagtggcagtgtcacaatttcttctttttagtttacatggttt

SEQ ID NO: 104326 - DNA, 661 bp, Homo sapiens
tgatcatctaatattttcaaatacattgtcgatcaccaaaaggagcataaggggtatattgatttgtagcagatgtattaatagcccagcccctattccttacctgtagctgctgggaagaaaaccactcttaacactctacaaggtctcatctccagaatttgcagctgtttctagctgaggactttctctagcagcatgggagcttgatactgggcaagtgggaagaaaaggtgaggrtaactaaaaagaatctccctggattcagtgatgtaattctgaggcatgttccacatagcttcccatagaattaagcccagatatctaacacaggaacttgcctcttaacacgtgtggtactggcttttctatctttcctgttttattttgttctctcttccttgtctcactttcgctgtgtcctcactcctgttttaagaatacccaaacaaaaacactcaattttttaagagtctcagaatacagttgatagtgtaacttgtaatctatgataatcagcttggatgctgtactgacaggaagatggtgaactcacaatgtctaattaagataaaattaaaaagtatattgattcatgtcaaaagatttaaaaaacctaagtggcagtgtcacaatttcttctttttagtttacatggttt

SEQ ID NO: 104327 - DNA, 661 bp, Homo sapiens
tgatcatctaatattttcaaatacattgtcgatcaccaaaaggagcataaggggtatattgatttgtagcagatgtattaatagcccagcccctattccttacctgtagctgctgggaagaaaaccactcttaacactctacaaggtctcatctccagaatttgcagctgtttctagctgaggactttctctagcagcatgggagcttgatactgggcaagtgggaagaaaaggtgagggtaactaaraagaatctccctggattcagtgatgtaattctgaggcatgttccacatagcttcccatagaattaagcccagatatctaacacaggaacttgcctcttaacacgtgtggtactggcttttctatctttcctgttttattttgttctctcttccttgtctcactttcgctgtgtcctcactcctgttttaagaatacccaaacaaaaacactcaattttttaagagtctcagaatacagttgatagtgtaacttgtaatctatgataatcagcttggatgctgtactgacaggaagatggtgaactcacaatgtctaattaagataaaattaaaaagtatattgattcatgtcaaaagatttaaaaaacctaagtggcagtgtcacaatttcttctttttagtttacatggttt

SEQ ID NO: 104328 - DNA, 661 bp, Homo sapiens
tgatcatctaatattttcaaatacattgtcgatcaccaaaaggagcataaggggtatattgatttgtagcagatgtattaatagcccagcccctattccttacctgtagctgctgggaagaaaaccactcttaacactctacaaggtctcatctccagaatttgcagctgtttctagctgaggactttctctagcagcatgggagcttgatactgggcaagtgggaagaaaaggtgagggtaactaaaaagaatctccctggattcagtgatgtaattctgaggcatgttccacatagcttcccatagaattaagcccagatatctaacacaggaacttgcctcttaacacgtgtggtactggcttttctatctttcctgttttattttgttctctcttccttgtctcactttcgctgtgtcctcactcctgytttaagaatacccaaacaaaaacactcaattttttaagagtctcagaatacagttgatagtgtaacttgtaatctatgataatcagcttggatgctgtactgacaggaagatggtgaactcacaatgtctaattaagataaaattaaaaagtatattgattcatgtcaaaagatttaaaaaacctaagtggcagtgtcacaatttcttctttttagtttacatggttt

SEQ ID NO: 104329 - DNA, 644 bp, Homo sapiens
actatctgtcagttgagtcattctttaactttcagtgagggcagagaccatgtttgctaatgagattcctttgctttaatgactttttcagtgtctccccaaggagcatacaaaattttgtcaattcttcaaaatgatctacaaattgataaacctcatgaataattgyggttgtagttagattcaacttccttttgattgtgtacaataaattttttgcatacatctttaaaattttttcccttaatttagcagcaggctttgaggataggaaacatattatagctgaccttttttaactgatcattgcccttttcctcagagttcctactgactaaactctgtgctaggtgtctgctctctctgcccttgtcaaccctctaatagtcaaacatctgaaattcctcttttccagtgaagatgctgcagagtacttggaagagaaaacgagatatttctggcttgtctggacaaggttagacccccgatagcagcagaaaagggatacaggatgtcagtgataaatgggttgtctctgttcaaacaatagaatgcatgcattctcccaaagtgcttggaaaatccccagtagctgtgtactccaagccatcctggttggatgtagatacatttcaccagtctca

SEQ ID NO: 104330 - DNA, 644 bp, Homo sapiens
actatctgtcagttgagtcattctttaactttcagtgagggcagagaccatgtttgctaatgagattcctttgctttaatgactttttcagtgtctccccaaggagcatacaaaattttgtcaattcttcaaaatgatctacaaattgataaacctcatgaataattgcggttgtagttagattcaacttccttttgattgtgtacaataaattttttgcatacatctttaaaattttttcccttaatttagcagcaggctttgaggataggaaacatattatagctgaccttttttaactgatcattgcccttttcctcagagttcctactgactaaactctgtgctaggtgtctgctctctctgcccttgtcaaccctctaatagtcaaacatctgaaattcctcttttccagtgaagatgctgcagagtacttggaagagaaaacgagatatttctggcttgtctggacaaggttagacccccgatagcagcagaaaagggatacaggatgtcagtgataaatgggttgtctctgttcaaacaatagaatgcatgcattctcccaaagtgcttggraaatccccagtagctgtgtactccaagccatcctggttggatgtagatacatttcaccagtctca

SEQ ID NO: 104331 - DNA, 644 bp, Homo sapiens
actatctgtcagttgagtcattctttaactttcagtgagggcagagaccatgtttgctaatgagattcctttgctttaatgactttttcagtgtctccccaaggagcatacaaaattttgtcaattcttcaaaatgatctacaaattgataaacctcatgaataattgcggttgtagttagattcaacttccttttgattgtgtacaataaattttttgcatacatctttaaaattttttcccttaatttagcagcaggctttgaggataggaaacatattatagctgaccttttttaactgatcattgcccttttcctcagagttcctactgactaaactctgtgctaggtgtctgctctctctgcccttgtcaaccctctaatagtcaaacatctgaaattcctcttttccagtgaagatgctgcagagtacttggaagagaaaacgagatatttctggcttgtctggacaaggttagacccccgatagcagcagaaaagggatacaggatgtcagtgataaatgggttgtctctgttcaaacaatagaatgcatgcattctcccaaagtgcttggaaaatccccagtagctgtgtactccaagccatcctggtkggatgtagatacatttcaccagtctca

SEQ ID NO: 104332 - DNA, 645 bp, Homo sapiens
attggccaaaccctaaaatgaaacagagaccaaggaaacccatatgatacaataatccatgaaggtcagcctcccaggccactgggtcagcagagcagaggagggtggagagggctctggagggccacacaccaaaaaccttcagctccaaggaagaggatcatgttaatgcmctagggatagacagtaccagaagattgtgttgaaatctgctttaagtctttattcatattaaagtcactattaattaattaaaatattataatgacatatattgagtgtgcagcttcaactttatatatcccttggtgcttgaaaattctgaaatgcctgttttggaagggtccatctccctcaagtccctatggaaaatcactcctaagaggcaagacaagggtagctgtgttaaagttgaatgtgtatggaaagcttagttaaaaagccattgcatagttataataataaagagggggtcacagtttgcacctacacatattaatattttcccactttatacttagatttagcttaagtttatccatttattcattcaacaaacacatactatgctcctgctttgtgattgtaaaaggatctacaaaatctgtctctaaaaaccctccctgactcctggcccctggcccc

SEQ ID NO: 104333 - DNA, 645 bp, Homo sapiens
attggccaaaccctaaaatgaaacagagaccaaggaaacccatatgatacaataatccatgaaggtcagcctcccaggccactgggtcagcagagcagaggagggtggagagggctctggagggccacacaccaaaaaccttcagctccaaggaagaggatcatgttaatgccctagggatagacagtaccagaagattgtgttgaaatctgctttaagtctttattcatattaaagtcactattaattaattaaaatattataatgacatatattgagtgtgcagcttcaactttatatatcccttggtgcttgaaaattctgaaatgcctgttttggaagggtccatctccctcaagtccctatggaaaatcactcctaagaggcaagacaagggtagctgtgttaaagttgaatgtgtatggaaagcttagttaaaaagccattgcatagttataataataaagagggggtcacagtttgcacctacacatattaatattttcccactttatacttagatttagcttaagtttatccatttattcattcaacaaacacatactatgctcctgctttgtgattgtaaaaggatctacaaaatctgtctctaawaaccctccctgactcctggcccctggcccc

SEQ ID NO: 104334 - DNA, 405 bp, Homo sapiens
cagagctttattgagaatctaccatgtaccaggcactatgctacatgctgaacatgcaaatataggaaataccactggcctcayggttatagtcttgtaggggactgggctatgcagaaacaagctgtattgtgatatatgcaataatgcaagtttgtacatattaccttctgagcaaagcagcaaagactgttctttttccataagttgttgactttctgtcatgtgaccctggtaagtaaccatgatcgaactgatcaagaatctgtaacttggtcaaaggtaaccacaaaattgtgcaaaactacaggatacataaatatttttggggtttcattattacagatgacgttgaggagagaaaagttttacatttttacaatcttaggtttaccaatgggccct

SEQ ID NO: 104335 - DNA, 609 bp, Homo sapiens
tgtttagttcgccacatgtttattgatggtctactatgttctggcactaacattaggcatacaatatatcgctgcaatagttgaggacattgttcctaatataaaccctaagaggggccgggcacagtgtcttacacctgtaatcccaacactttgggaggctgaggtgggcagatcacttgaggccaggggttcaagaccatggtggccaacatggtgaaactccatctctactaaaaatacaaaaattagccaggtgtggtggcacacacctgcaatcccagctactcaggagctgaggcagaagaatcacttgaacccaggaggtggaggttgcagtgagccaagatcacgtcactgcactccagcctgggtgatggagtaagactctatcrcaaaaaataaataaataataaataaataaataaaataaaccctcaggaatctgagttatgcagcaataaagtagggggtactttgagcccctaaggatggagatgcctcttccttttctggaaaactgaccactaactccaccatgttttacggagcacatacaatgtcatttaaaacaataataaaacgaataatcctggagacagatgtgag

SEQ ID NO: 104336 - DNA, 544 bp, Homo sapiens
ccctggcaggggctgttgcatgagaagaagaaagggctctttctctgcaaatgggttcatgagggcccttgtgccgggctgccccttcccaatgccccttctatttcaggtgggagaggtctaccaacagctgcacgcagccatgagccaggcgccggtgaaagagaacatcccctactcctgggccagcttggcctgcgtgaaggcccaccactacacggcgctggcccactacttcactgccatcctcctcattgaccaccagggtaaggcctgtggggttcaggggtttggccagggctgtggtccagctgccccaggggtgattctgagctgagcgagagctaactgccttccctggagatgctcacaggctgaaggcagaggatgagaatgacccatgactgaggcagctgctgcacaggccatggtggggttaggggttataagcttctttagagrgaggaagaggaggcacctttaattctgcctgtgtgcaagaggatgaattttcacctggaatctagaatctaagggaatgcca

SEQ ID NO: 104337 - DNA, 572 bp, Homo sapiens
ttttagtagagacagattttcaccatcctggccaggctggtcttgaactcctgacctcaggtgatctgcccaccttggccttccaaagtrctgggattacaggtgtcagccaccacgcagtcatctctttctctctctctcttttttttttcttttttaagagatggggtctcctcactatgatgcccaggctggtcttgaactcctggccataagcgatcttcctgcttccacctccagcaaaagtgctgagatcatagatgtgagccaccacacccagccccatctctatttttatttaaaatatatgtgtgtatatataaatgcaaaaatagatgtgacttgccactggtctgtgggactcaaaacaatccacgtgtctggaaatgtctgttgctattgtagaagtttctttacgatttaatttgtctgttgcatggtgctgggctacaagaatgtaagcattttttttttttgagatggagtttcactcttgttgcccaggctggagtccaatggcatgatctcagctcactgcaacctctgcctcctgggttcaagtgattctcctg

SEQ ID NO: 104338 - DNA, 572 bp, Homo sapiens
ttttagtagagacagattttcaccatcctggccaggctggtcttgaactcctgacctcaggtgatctgcccaccttggccttccaaagtactgggattacaggtgtcagccaccacgcagtcatctctttctctctctctcttttttttttcttttttaagagatggggtctcctcactatgatgcccaggctggtcttgaactcctggccataagcgatcttcctgcttccacctccagcaaaagtgctgagatyatagatgtgagccaccacacccagccccatctctatttttatttaaaatatatgtgtgtatatataaatgcaaaaatagatgtgacttgccactggtctgtgggactcaaaacaatccacgtgtctggaaatgtctgttgctattgtagaagtttctttacgatttaatttgtctgttgcatggtgctgggctacaagaatgtaagcattttttttttttgagatggagtttcactcttgttgcccaggctggagtccaatggcatgatctcagctcactgcaacctctgcctcctgggttcaagtgattctcctg

SEQ ID NO: 104339 - DNA, 572 bp, Homo sapiens
ttttagtagagacagattttcaccatcctggccaggctggtcttgaactcctgacctcaggtgatctgcccaccttggccttccaaagtactgggattacaggtgtcagccaccacgcagtcatctctttctctctctctcttttttttttcttttttaagagatggggtctcctcactatgatgcccaggctggtcttgaactcctggccataagcgatcttcctgcttccacctccagcaaaagtgctgagatcatagatgtgagccaccacacccagccccatctctatttttatttaaaatatatgtgtgtatatataaatgcaaaaatagatgtgacttgccactggtctgtgggactcaaaacaatccacgtgtctggaaatgtctgttgctattgtagaagtttctttacgatttaatttgtctgttgcwtggtgctgggctacaagaatgtaagcattttttttttttgagatggagtttcactcttgttgcccaggctggagtccaatggcatgatctcagctcactgcaacctctgcctcctgggttcaagtgattctcctg

SEQ ID NO: 104340 - DNA, 477 bp, Homo sapiens
gatgtctacaattattccaaaatattaaattagctaggaacagtggctcatgcctattatccaagcactttatgaggctgaggcgggaggatcccttaaggccaggaggtcgaggctgcagtgagctataattgcaccagtgcactccagtttagggaacagaagaagaccttgtctccaacaataaataaaataaaaattaaattataatatcccttgaaagcaaacagaagaaatcctctatttcaggcagtaaatatgaagcagagagtagatgtaagggatgctcccaaaactggccaytctgttaatgacaaaacagagaccagaatccacattcccaacactcagtccagcgccagacccacaaaaccatttggtttttgcaaaaacactgaattttcccaaaataaaacccaaactatcactaacagatgttttagatggtcagtcttcatccttgtcttcattcaatgc

SEQ ID NO: 104341 - DNA, 585 bp, Homo sapiens
gtcagcatttaataatggcagccccaacccctagcaggagtacagcagtaacacagatgaaaggtgcaggtgacagccttcactaaggacacatttactcacctgaatgaacaagcagtgggaccctttatacmgagtcacttgggcttgagaaatagctggattctccccagggaggctgccctcctccccctcccccacttccctgatttaaggttgaagatggctagaatgcaccccacctatgaagagcagtggacatggctgggagtagagccagaacaagccctcaaaagaacacaggccaaactggagactcggggcagccaagtggaaccagaacaggacataaagtgagcttgtacatccaacagccatgagtaatatcaaaaaggttgtagcctggccaacacagcgaaaccccatctctacaaaaaatacaaaaagtagctgggcgtggtagcatgcacctttaatcccagctacttgggaggctgaggcaggagaatcacttgaacccagggtgcagaggttgcagtgagctgagattgtgccactgcactccagccagggtgacagaatgac

SEQ ID NO: 104342 - DNA, 585 bp, Homo sapiens
gtcagcatttaataatggcagccccaacccctagcaggagtacagcagtaacacagatgaaaggtgcaggtgacagccttcactaaggacacatttactcacctgaatgaacaagcagtgggaccctttataccgagtcacttgggcttgagaaatagctggattctccccagggaggctgccctcctccccctcccccacttccctgatttaaggttgaagatggctagaatgcaccccacctatgaagagcagtsgacatggctgggagtagagccagaacaagccctcaaaagaacacaggccaaactggagactcggggcagccaagtggaaccagaacaggacataaagtgagcttgtacatccaacagccatgagtaatatcaaaaaggttgtagcctggccaacacagcgaaaccccatctctacaaaaaatacaaaaagtagctgggcgtggtagcatgcacctttaatcccagctacttgggaggctgaggcaggagaatcacttgaacccagggtgcagaggttgcagtgagctgagattgtgccactgcactccagccagggtgacagaatgac

SEQ ID NO: 104343 - DNA, 522 bp, Homo sapiens
tgatgtgcatgtacaggtatttytgtatgtacataagtatattaccattcattttcttaaaaggaatatactgcactattctacacctgattttcttttttctttttttttctttttctttttttttttttttaagatggagtctcgctctgtcgcccaggctggagtgccattttcatcattttcaagtgtagagttcagtggcattaactacattcacatcattatgctccactgccaccatccatctctaaaactttttcatcttcctcagctgaaactttgtaccattaaacactctctactgttaactttccaagaatcatgtaggattcaaactggaaatctaaggaagcttgctttctgaagacttccacatgggctatcaccagcttctaaggtttgcctaacattgagattgtttagttcgccacatgtttattgatggtctactatgttctggcactaacattaggcatacaatatatcgctgcaatagttgaggacattgttcctaatata

SEQ ID NO: 104344 - DNA, 522 bp, Homo sapiens
tgatgtgcatgtacaggtatttctgtatgtacataagtatattaccattcattttcttaaaaggaatawactgcactattctacacctgattttcttttttctttttttttctttttctttttttttttttttaagatggagtctcgctctgtcgcccaggctggagtgccattttcatcattttcaagtgtagagttcagtggcattaactacattcacatcattatgctccactgccaccatccatctctaaaactttttcatcttcctcagctgaaactttgtaccattaaacactctctactgttaactttccaagaatcatgtaggattcaaactggaaatctaaggaagcttgctttctgaagacttccacatgggctatcaccagcttctaaggtttgcctaacattgagattgtttagttcgccacatgtttattgatggtctactatgttctggcactaacattaggcatacaatatatcgctgcaatagttgaggacattgttcctaatata

SEQ ID NO: 104345 - DNA, 522 bp, Homo sapiens
tgatgtgcatgtacaggtatttctgtatgtacataagtatattaccattcattttcttaaaaggaatatactrcactattctacacctgattttcttttttctttttttttctttttctttttttttttttttaagatggagtctcgctctgtcgcccaggctggagtgccattttcatcattttcaagtgtagagttcagtggcattaactacattcacatcattatgctccactgccaccatccatctctaaaactttttcatcttcctcagctgaaactttgtaccattaaacactctctactgttaactttccaagaatcatgtaggattcaaactggaaatctaaggaagcttgctttctgaagacttccacatgggctatcaccagcttctaaggtttgcctaacattgagattgtttagttcgccacatgtttattgatggtctactatgttctggcactaacattaggcatacaatatatcgctgcaatagttgaggacattgttcctaatata

SEQ ID NO: 104346 - DNA, 391 bp, Homo sapiens
agaagggaggatcttttgagccctagaactcgaggctatagtgaactatgattgcactattgcactccagyctgggcaactgagtgagaccctgtctcaaaacaaacaagacaaaacaaaaaacaacaacaaaagaaattatttggccgggcatgctggctcatgcctgtaatcccagcactttgggaggcaaggtaggcggattgcttgagcttagaagttagagaacagctagggcaacacggtgaagccccatctctacaaaaaatatgaaaaattagctgagtatggtgttgcatgcctgtagtcctagctactcaggaagcggaggtggggggatcacttaagcccaagagtaaaggccacagtgagccaagatcacaccagggca

SEQ ID NO: 104347 - DNA, 424 bp, Homo sapiens
agaagggaggatcttttgagccctagaactcgaggctatagtgaactatgattgcactattgcactccagcctgggcaactgagtgasaccctgtctcaaaacaaacaagacaaaacaaaaaacaacaacaaaagaaattatttggccgggcatgctggctcatgcctgtaatcccagcactttgggaggcaaggtaggcggattgcttgagcttagaagttagagaacagctagggcaacacggtgaagccccatctctacaaaaaatatgaaaaattagctgagtatggtgttgcatgcctgtagtcctagctactcaggaagcggaggtggggggatcacttaagcccaagagtaaaggccacagtgagccaagatcacaccagggcaatgagagcgagactgtgtctcaaaacaaaaaac

SEQ ID NO: 104348 - DNA, 401 bp, Homo sapiens
gaactcgaggctatagtgaactatgattgcactattgcactccagcctgggcaactgagtgagaccctgtctcaaaacaaacaagacaaaacaaaaaacaacaacaaaagaaattatttggccgggcatgctggctcatgcctgtaatcccagcactttgggaggcaaggtaggcggattgcttgagcttagaagttagagaacagctagggcaacacggtgaagccccatctctacaaaaaatatgaaaaattagctgagtatggtgttgcatgcctgtagtcctagctactcaggaagcggaggtggggggatcacttaagcccaagagtaaaggccacagtgagccaagatcacaccagggcaatgagagcgagacygtgtctcaaaacaaaaaacaa

SEQ ID NO: 104349 - DNA, 555 bp, Homo sapiens
tttgtcatttttgttgtcaaaatcttttacttccttggttaaatttataagtacatttttgtagctattgtaaaaggatttgctttcttaatttcttgtttcagctagtttactatcaatatatagaaatgctactgatttaaacagggacaatttgactgtctcctttccaattcasatgtcctttatttctttctctcacctaattgtcctggctaagactttcactatgtgaaatatgattggtgagaacaggcatccttttcttgttctagtaaaatctttttcttgttcacagtaaaatctttcaccttttccacactcagtatgatcttagttgtagatttgtcctttatgtccttctgtgttaaggcatatattttctatactaaattgttgagaggttttttgtcattcaagaatatttaattttgccaaatgcttttattgtgtttattaatttaatcatatggttttcagtatatatccaaagaaaagaaaatcagtatatcaaagagttagctgcacccccatgtttattacagcactattcac

SEQ ID NO: 104350 - DNA, 555 bp, Homo sapiens
tttgtcatttttgttgtcaaaatcttttacttccttggttaaatttataagtacatttttgtagctattgtaaaaggatttgctttcttaatttcttgtttcagctagtttactatcaatatatagaaatgctactgatttaaacagggacaatttgactgtctcctttccaattcacatgtcctttatttctttctctcacctaattgtcctggytaagactttcactatgtgaaatatgattggtgagaacaggcatccttttcttgttctagtaaaatctttttcttgttcacagtaaaatctttcaccttttccacactcagtatgatcttagttgtagatttgtcctttatgtccttctgtgttaaggcatatattttctatactaaattgttgagaggttttttgtcattcaagaatatttaattttgccaaatgcttttattgtgtttattaatttaatcatatggttttcagtatatatccaaagaaaagaaaatcagtatatcaaagagttagctgcacccccatgtttattacagcactattcac

SEQ ID NO: 104351 - DNA, 555 bp, Homo sapiens
tttgtcatttttgttgtcaaaatcttttacttccttggttaaatttataagtacatttttgtagctattgtaaaaggatttgctttcttaatttcttgtttcagctagtttactatcaatatatagaaatgctactgatttaaacagggacaatttgactgtctcctttccaattcacatgtcctttatttctttctctcacctaattgtcctggctaagactttcactatgtgaaatatgattggtgagaayaggcatccttttcttgttctagtaaaatctttttcttgttcacagtaaaatctttcaccttttccacactcagtatgatcttagttgtagatttgtcctttatgtccttctgtgttaaggcatatattttctatactaaattgttgagaggttttttgtcattcaagaatatttaattttgccaaatgcttttattgtgtttattaatttaatcatatggttttcagtatatatccaaagaaaagaaaatcagtatatcaaagagttagctgcacccccatgtttattacagcactattcac

SEQ ID NO: 104352 - DNA, 542 bp, Homo sapiens
gacatacatatataatggaatattatttagtcataataaagaagaaaatcctgttatttgtggcaacaagaatgcaagtggagggcattatgttaggtgaaataagcctggcatagaaacataaacaccacataactacgtgtactcacttatgtatggaagctaaaatttttaatctcatagaagtagatagtagagttttggttaccatatcctkgaaagagtaggagaaagaagagtataagaaaaatgtggttaatacatacaaaattacagctggagagaaggaagaagttctaattctctacagcactgttgggtgactgtagttaatgggaatttattgtgtgttttcaaataactaaaataaaagattttgaatattctcactgcaaagaaataatacatgatttaggtaatggatatgataatgactctgacttgatctttacgcattgcataaatatatcaaaatatcactctgtaccccataacatgtacatttattatatgtcaattaaaataaatttaaaagacaaaaa

SEQ ID NO: 104353 - DNA, 542 bp, Homo sapiens
gacatacatatataatggaatattatttagtcataataaagaagaaaatcctgttatttgtggcaacaagaatgcaagtggagggcattatgttaggtgaaataagcctggcatagaaacataaacaccacataactacgtgtactcacttatgtatggaagctaaaatttttaatctcatagaagtagatagtagagttttggttaccatatccttgaaagagtaggagaaagaagagtataagaaaamtgtggttaatacatacaaaattacagctggagagaaggaagaagttctaattctctacagcactgttgggtgactgtagttaatgggaatttattgtgtgttttcaaataactaaaataaaagattttgaatattctcactgcaaagaaataatacatgatttaggtaatggatatgataatgactctgacttgatctttacgcattgcataaatatatcaaaatatcactctgtaccccataacatgtacatttattatatgtcaattaaaataaatttaaaagacaaaaa

SEQ ID NO: 104354 - DNA, 585 bp, Homo sapiens
aatgaacatgggagtgcagatatatcttcaatacactaatctcatttctcttggacatacatgcaataatgggattgcaacacagtggtagaaatgtaaattagtacagtcattataagaaataatatggaggttcctcaaaaagttaaaagtagtactaccatatgctccagcttaataaagtgttaaattgctacaaaaaggttctaaaataattgttatcatttattttgaaattttcattgacatacaattaaaattatatgtatttgacatgtacartgtgttgatttatatacatatatacacattgtgtaatgattataacagtcaaaacattcattatcactcatagatattgtgtgttgaaggtggggaaaaggagacttaaaatcttctctatcaaaattcaagcaaacaatacaatattattaactatagtcactatgctgcaccttagatgtccagaacttattcttataactgaaagtgtgtaccctttgaccaatatctccccatgtccctcaccccctagacactagcaactaccctttttctgtcttttgagttcaaaatttttaaatt

SEQ ID NO: 104355 - DNA, 594 bp, Homo sapiens
tatgtttacaaagcatttagctaaacaaataatagtgttagtaataataataattttgtcccattttcttaaaagaaaaacttcagattctctttttaatttatttagaaaggaaagtatgcatgtaggtaatatttcagtcatacacacaaacacaaaattaatctggaaattgtccccttcattccagaacacaagttgtacatatcaaatagaacaatagacagaaagcttctctgtttcatccccaaagattttttttttttttgagatggagctttgcccaggctggagtgcaatggtgcgatctcagctcaccacaacctccacctcctgggttcaagcgattctcctgcctcagcctcccaagtagctggtcatccccaaagactttttaacagaacagaaaataaaaatactaccaccataataaatacaaactaaatataattagagacactgaagaaatacaaaatgactttccatttggtaaagaaatataaaatgtaacactttaatragaacatgtagatattcttttatacaaacctaacattggaaaatatcaataaggactatttatattagcattta

SEQ ID NO: 104356 - DNA, 615 bp, Homo sapiens
tctgcctgctataagttattttgggcatatttcttaatatctctaaagctaaattttaaaaaataaatcttagttactgcatggaatttctgagaagattaagctaatttataaaagcacttgattttattttctggaactcaacatatgaaaaaattaatattaactagcattgcaactccaatttcttctatccctatcatcattactttttacatcatcatcaccgttgcatcataattgtcactatcatgcccatcatcatcaccastattcataaaataaatattatcatataccctcaaaatttacatttgtatgcctgtcagataagatacaatgacattcattcaaaaattagacaataatgtgaattataaaggagtacatataaaaatgaatctattaatgtgtagaaaaataaatagtaaaaatttgtattatttatataagtataaagctactgagagacaaaaaagccaagtaattgattactagaagaaattatggacatttgtactaaatttgcactaatattagaggttttaatcttattagtcatatctaatagtctattatctaatatagagtattatctaatcatctctatatatg

SEQ ID NO: 104357 - DNA, 615 bp, Homo sapiens
tctgcctgctataagttattttgggcatatttcttaatatctctaaagctaaattttaaaaaataaatcttagttactgcatggaatttctgagaagattaagctaatttataaaagcacttgattttattttctggaactcaacatatgaaaaaattaatattaactagcattgcaactccaatttcttctatccctatcatcattactttttacatcatcatcaccgttgcatcataattgtcactatcatgcccatcatcatcaccagtattcataaaataaatattatcrtataccctcaaaatttacatttgtatgcctgtcagataagatacaatgacattcattcaaaaattagacaataatgtgaattataaaggagtacatataaaaatgaatctattaatgtgtagaaaaataaatagtaaaaatttgtattatttatataagtataaagctactgagagacaaaaaagccaagtaattgattactagaagaaattatggacatttgtactaaatttgcactaatattagaggttttaatcttattagtcatatctaatagtctattatctaatatagagtattatctaatcatctctatatatg

SEQ ID NO: 104358 - DNA, 583 bp, Homo sapiens
aaatgttatatcctattgctgaattaacccctttgtattttatggtgatcttgtctcttcttagagtttttgtctgaaaatctattttgtctgatatatgtatagctactcctgctcttttttggtttccattggcatggaatatttttgttcatctctttttttcagtctatatgcaccttcatatatgatgtgtgtttcttaaaggcaaagagattaatgggtcttgttttttcatccattcagccagtctgtatcttttgatgggagagtttagttggtaatatggtttagtttcttgctttttatctttatgaatctgttgtgtgttttttggtttgaggttactatgtggcttgcaaatactattttataacacccttagtttaacctgataacaacttaacagtttgcacaaacaaacgaacaagcaaaaagaaatctaataaaaactctatsccttaacttggttaagtgcattcctaagtattttatttattttttgcagctgttgtaaaagggattaagttcttgatttaaatcttagcttggttgttgttggtgtctagcagtgctactgatt

SEQ ID NO: 104359 - DNA, 600 bp, Homo sapiens
gcaacaaatctgcctcatgcactggaaaaattcttccttatttctctttcatgccatatcttgaaaaagaagcagattttttttctcctccttctcttccttctctttttccaccctctttctccccttttctccttcctttattcattctttcattcaacaaatattaggagaccacagtgcatcagatactgtcctgggtactaagttatcaaaggtgcataaaatcaatcccagcattcawggggcttttggttaatggatatattgttaatatgcaagtgatgagatggctggcataattatacagaatactgtgattagaactatacaggaagtaaagagagaactctgttagagaatgagagttctaatttgaatagtttggtgatggtctgtctgatgtgttggtatttaggctgagatttgaagaaagagacagaggcagtcttggaaacaacttagaaataagaaatgaaatcttccaggcagaagaaaaggtatatgcaaaggtactgaggttggaaaaaaattggaatgtttaagaacctgaaagaggaaaaagaatgaagtatagtggccaaacaggcagtttcagaa

SEQ ID NO: 104360 - DNA, 613 bp, Homo sapiens
agtatgccagaaccagcccagaggtgcttttctgatacctaggatgctacttctaccgcaactgtttctctcttttgtcacacactcagagaaaagtggccaaggaattagaaagcaattattgtagcaaggggaagtaacctgaagaaaaaggagtgtatacaagggaagaaaaaaagaagagcaaatctgatrttttcttgacgtctgggcctgaggacatgaacatgagtaaacagcgttcttaaaataggagctggagtacaattatctcatggcattataaatgggtcaaaaaattaaaacaacttatcaaaatttatgggatgtagtgaaagcagtgcttagaaaaaatttataacattgaatgaatatattagaaaataatgatcaaaatcaatcacctgagagtctaccttaagaaactggaaaaagaaaagcaaattaaactccaagtaagcggaagaaaaaaaagtaatagaaattagagcagaaatcataaaattaaaaacagaaaattaatagacaaactcaatgaaatccaatgcttttttttaaaaaaaagaaaaatacataaataaaatcaataagcctttagccagtctaagagaaa

SEQ ID NO: 104361 - DNA, 613 bp, Homo sapiens
agtatgccagaaccagcccagaggtgcttttctgatacctaggatgctacttctaccgcaactgtttctctcttttgtcacacactcagagaaaagtggccaaggaattagaaagcaattattgtagcaaggggaagtaacctgaagaaaaaggagtgtatacaagggaagaaaaaaagaagagcaaatctgatgttttcttgacgtctgggcctgaggacatgaacatgagtaaacagcgttcttaaaataggagctggagtacaattatctcatggcattataaatgggtcaaaaaattaaaacaacttatcaaaatttatgggatgtagtgaaagcagtgcttagaaaaaatttataacattgaatgaatatattagaaaataatgatcaaaatcaatcacctgagagtctaccttaagaaactggaaaaagaaaagcaaattaaactccaagtaagcggaagaaaaaaaagtaatagaaattagagcagaaatcataaaattaaaaacagaaaattaatagacaaactcaatgaaatccaatgctttttttwaaaaaaaagaaaaatacataaataaaatcaataagcctttagccagtctaagagaaa

SEQ ID NO: 104362 - DNA, 508 bp, Homo sapiens
ttttttcagtctctataattttatttcagatacaggtaaatactgatgctagagagaacttggtattttgaataacttccctttttaaactgcgttcttgacattgctatttacattcattgtaaaatcttgtttgttttcatttgtactatcacatctcaattctgtatgtttccttaattgctataagttggggacagttttgccaaaatgaaaaagttctctttgctgactaaacataaatatttttatgtttaaaataaacataaactttctagctacccaagaaccctcttaatgtacatttaaaaagagctaacagtgtgattagttgaaaaggtctgggagcaaaaaaacaatatcaactaaattttctgagtttttccatgcttawaaaaggaacttataagagctagctgtgccagctttttgaatgactcctgttttgaggagatttaaagtggactgacatatctgatcattttggctctttactcaagtaaagatg

SEQ ID NO: 104363 - DNA, 555 bp, Homo sapiens
gcctggcatatagtatttaccctagaaaaaagcaaactatttttgcccaaaaacctgtacacaattgtttataactastttattctttaccctccaatccacatattcttcaaccagtaaaaggaaaagcaaatagtggtatatccatacaatgatacaccattacataataaaaaaggagcaagcacttgatgcttacaatacatgggtgaatctcaaaggcatgttgccaaataaaagaagccagtaaaaaagttacatactttatgatttcacttataaggcattctcttaaaagcaaatatatgatgatagaaggaaatcagtggttgccaggggttagaggttaggtttgtggttcatgacaaaggaacagcagaagagaattttgggggtgacaattattttgtatcttgattgtggcagtggttacataaatctatatggatgttagaataattagaatagtatacccaaaatttaaaaagttaactttattgtatgctagcttaaaattatattttaaaaagataaaaattctattgcaactgtaaa

SEQ ID NO: 104364 - DNA, 612 bp, Homo sapiens
ccagcgtggcacatgtatacatatgtaactaacctgcacaatgtgcacatgtaccctaaaacttaaagtataataataaaagaaaaaaaagaaagaaagtggtttgtaaacagaaatacaytgtggaaataaaagagaataccaaatgataaagtttgtgggtgtttactgaccatctactatattgcctgaactatattcttttgatcacagtcaacattatcagaatcattggctcccatacaagttacaagacaattagaaaaataaactaaatggattttggatacatccatgagcagaaacattattgtcagaagttctgatctggctcttaaattaatgaatcttgtatttttaacatgacttttcttcataatatacttatacatgctccattaccctcacccctcagtgtagggggaatattttcaagaagcacattttggaaaataatgactcgtttgtaacttgttttatttgtaggaagaaagagggaggtggatagttaatctgaatcatcactttgctttatgcttgacgtggaaccattagaaccttgaaacgtagatgaatttttcacctttccaaactgctcagtctctcagtaca

SEQ ID NO: 104365 - DNA, 612 bp, Homo sapiens
ccagcgtggcacatgtatacatatgtaactaacctgcacaatgtgcacatgtaccctaaaacttaaagtataataataaaagaaaaaaaagaaagaaagtggtttgtaaacagaaatacattgtggaaataaaagagaataccaaatgataaagtttgtgggtgtttactgaccatctaytatattgcctgaactatattcttttgatcacagtcaacattatcagaatcattggctcccatacaagttacaagacaattagaaaaataaactaaatggattttggatacatccatgagcagaaacattattgtcagaagttctgatctggctcttaaattaatgaatcttgtatttttaacatgacttttcttcataatatacttatacatgctccattaccctcacccctcagtgtagggggaatattttcaagaagcacattttggaaaataatgactcgtttgtaacttgttttatttgtaggaagaaagagggaggtggatagttaatctgaatcatcactttgctttatgcttgacgtggaaccattagaaccttgaaacgtagatgaatttttcacctttccaaactgctcagtctctcagtaca

SEQ ID NO: 104366 - DNA, 612 bp, Homo sapiens
ccagcgtggcacatgtatacatatgtaactaacctgcacaatgtgcacatgtaccctaaaacttaaagtataataataaaagaaaaaaaagaaagaaagtggtttgtaaacagaaatacattgtggaaataaaagagaataccaaatgataaagtttgtgggtgtttactgaccatctactatattgcctgaactatattctttygatcacagtcaacattatcagaatcattggctcccatacaagttacaagacaattagaaaaataaactaaatggattttggatacatccatgagcagaaacattattgtcagaagttctgatctggctcttaaattaatgaatcttgtatttttaacatgacttttcttcataatatacttatacatgctccattaccctcacccctcagtgtagggggaatattttcaagaagcacattttggaaaataatgactcgtttgtaacttgttttatttgtaggaagaaagagggaggtggatagttaatctgaatcatcactttgctttatgcttgacgtggaaccattagaaccttgaaacgtagatgaatttttcacctttccaaactgctcagtctctcagtaca

SEQ ID NO: 104367 - DNA, 619 bp, Homo sapiens
gcctgtaaggagtatgatttcaaatggcaaagttgactggagaacctcctaggcattaagtggttttcaagaagactttctttggctttctctttgttcatgaaacagaaaactgtgtttgggttgcattccaatacagagagacttagtccctataagattgaaatgtgctggttcttaggtaattaggactccttcccagcccaatcgagaaaattggctttgccttatgcttggaaagaaagtggaaygtaaatggaagccagtagatatttcacctgccactcaactcattaaggttaatagcaaatgaataaacagaaattctgttgagggatgtggcatgtgtacccagtcattggtgacatggctatgtgcacacggagacttgctctgtcagatcagtaggataattttagcttttacttttgccccttagatctgaggtttctcattctgtcctcagtgattaatgatgttctgttacttcagatgcccaaaacctggctctggcaattggatgttcatttggttgccctgatgtaatcattgaagggaatggcgttaatggaccgtggaatagttggcctccatatgtggatggactgacttatgtgga

SEQ ID NO: 104368 - DNA, 535 bp, Homo sapiens
ttaaacttaactagtttaaagctcctttccaatttctctcttatctctagtgtctcagatgtgaattctctgttttttggggcctgagtctttggaatttcttttctatattggactccctcatattgtatccttaaattcctcactttgctaggaaaaatttcctctctagtccattgtgtgcactgactgtggttacctctctatggagtgatttttggtaaccccagatcatatctgactgaattagcaggttctaagccatttttcttgtcaactttttagctcgagatttctgaaccacataaaattgaggcttccacaaaaaccatacaggctctggggtctttggygggtaactctttatccattcatgacctgagatggataattaatttctagatgagcccatggttagcaggtggacattttttcttctctgttaaaaatctcagtgacagagacgtgtgctcccagcatcattttgcccatggagcttcaattctttgttatcacctttgactccctctcagtt

SEQ ID NO: 104369 - DNA, 535 bp, Homo sapiens
ttaaacttaactagtttaaagctcctttccaatttctctcttatctctagtgtctcagatgtgaattctctgttttttggggcctgagtctttggaatttcttttctatattggactccctcatattgtatccttaaattcctcactttgctaggaaaaatttcctctctagtccattgtgtgcactgactgtggttacctctctatggagtgatttttggtaaccccagatcatatctgactgaattagcaggttctaagccatttttcttgtcaactttttagctcgagatttctgaaccacataaaattgaggcttccacaaaaaccatacaggctctggggtctttggtgggtaactctttatccattcatgacctgagatggataattaatttctagatgagcccatggttagcaggtggacattttttcttctctgttaaaaatctcagtgacagagacstgtgctcccagcatcattttgcccatggagcttcaattctttgttatcacctttgactccctctcagtt

SEQ ID NO: 104370 - DNA, 501 bp, Homo sapiens
gggaatatttgttgttcatggagcttcaactcaagtagcatggatgtcttggtctgtttggagctgctattacagaataccgcagactgagtaatttacaaagaaaagaaatgtatttgccaccgttctggaggctgggaagtctcatatcaagtgctggcatctggtgagggccttcttkcagtgtcatctcatggtggaaggcaagaggttgagagagtgagagaggggtagcaagaggaaggcaaactcacttttttttaaatctcagtttttgtttacgcttcgccaccggcaagctcacttttataacaaacctgctcttaggataacaacattaatccattcacgaggacagagctctcatggcctaatcacttcttaaagtttccacctgtcaacattgttgcatggggactaagtttccaacacttgaactttagggaacacattcaaaccacagcagtagatgtgcctggctcaagtggcttctcttgcctg

SEQ ID NO: 104371 - DNA, 597 bp, Homo sapiens
gagtgtgaatctggtggctgyggggctgtttttggtgtggctctttggaccagcctgcctggtaattcaagcctgcctctcatttctgattcctggctctaaactcgggattttttgcttccatgcaatagtcagtagagagggctgaccaaggtagtctgatagtgtgaaaatgtgtgaaaaggactctgcccctttttctttgcctcggaatcttcttttattttttataacttcaggccaggtagtagattttggaggataaggatttttactctaaatttgattagggaaaatgtatcattcagaaaaagctctgcatgtctcaacatgcgtcaatcttgacaacatacattttcaataaaaaaataaagttgaaaaaattcatatgatataatttttgtaaattttaaaacactttatatttttatggtcacatacatacatcagaaaaatacatttattcccacaagaaagatgaacaccaactccaggagagtggttattttgtggagaggggaaagaaaaaaacgaacggggtgggctgggctgaactgggactatggctgtaactgtttttcctcaaaaggaggaaat

SEQ ID NO: 104372 - DNA, 526 bp, Homo sapiens
aaaataaagtcaatacaatttaatggacagtttcagatagcagcagtacaaatgtactcagggaaatctgagtatgtccattgtaaagaaggtggcatcctcacatctttaacagtgaggatagatgcgtagacacccagtgtagccttgtgaacacccctactgtctccctttctaactgaattggctctcacctatctgcsctttgttggccgcatcctggtaaggacttttcccacatcagggtgtctagcaaaagctccctgccctaggaaggagctgcctaagttggagggtcctctcctttctggaacagaggggctggaatttgactccttcttttgcaacctgaattacctgattacttcctgaattgcaattgctcatttgattcctaaaagccagcttccagtgttttctgggccaagccccagaggataattggcctcctcctttttgtgttctcttcccagacccatcttccttccctctttccatggttcagtgctgacagtggtaatactag

SEQ ID NO: 104373 - DNA, 501 bp, Homo sapiens
tgaaataactgcttttaaattcattgcacaagcttataagttttatgtttcatctttaatttcaactgtttctcaaaaatcttgtttatgagttgataactctagagctgtggtgattttagtttaaataaaaattaattcaaattaaattaaaatttcatttccttggtcacgtcacactagttacattgcaagtactygttagctgcatggaacgtttccttcactgcagaaagttttattgaacttagctatgcaagagcaattagtgtttcctctcaatactcatattccaaataaaaaagcaatctgtaatcgattttgcaagggaatcattgagtcacatattcttagaacttaatatgacctcagagcattgtcaatattagtactagtattacactttatataatattgtattatatcatatcagtattatgctaactttattagtattctttaaacagttatggaaactgagggatgttcaattaacttacc

SEQ ID NO: 104374 - DNA, 544 bp, Homo sapiens
gagagaaagcaaatgcagagactgaagagttctagagtgggcaaaataggatgtacagagaacakgagacaggtcaagtagaacccacagggtgtcaatcaaaggttttagttcccaagaatgggctggctggagctggtggtataaattctgtctctagaacatccaaactgtgtttttggcccttaatttaatttagttcatttaattttaaaactcagaccaagcagaatatgttgacttatgggtactatccctggaacagactgcctacatttgtgaccctttctagttggtggctttagataaactatttacatgtctgtgcctcaatttcctcatctgaaaatggacatgacagatgtaccaactgcatggagttgttgtgagcattacttttgagaatgagtacaggtactcagggtaaagctcttaactacagtgagggctcgttaattagctgttaaaatctgaaagaatataaacttgcagtctgcaaccatactttccatcacaaggagaaagtcattctgtagtaggaaag

SEQ ID NO: 104375 - DNA, 580 bp, Homo sapiens
tttatggcaagcaattgaaatatccagaatttaaaccagggtctgcatgatttcaaaactcatccttgttctgccatatcatgccaccataaatctcctttattcattttgtattaatgcatacatttgtaattttgctttttactcatcacattctgtggttatttatttgactgtctttcctaccagaaaaaaaaaagtgccttgaaaatagaatgtatttcttatttattttggtacccccacagatctcagaacattacctgacatataacagatgctgaataaaggtttccagggttggattgcatctgattaaaattaagttgaactgaacaacrtattaccttgaatttcagaattttgcatttctgatgatatctggggctcagatgccatttacctcatgccagatgacacatggcctcagttttcttcacaggtgtccatgtctagccctgtaccaatttcatcctaaacaactgcccatattcccattaatgtgacataatcattagcatatataagttcctagagaactgctttctatctcatgtctttattgtagtcaatggagtat

SEQ ID NO: 104376 - DNA, 515 bp, Homo sapiens
gcctctatctccccaggctcaggggatcctcccacctcagcctcccaagtagatgagactacaggcacacaccaccacacctggctaattttttgtattttttgtaaagacagggttttgccatgttgcccaggctggtctcacactcctggcctcaagcgatctgcccacctcagcctcctaaagtgctaggattacaagtgtgagccactgcaaccggcrcataaaacaagatgattatcttctttgtgtatatgttagtgtaaatcactttttgccaggcatgatcttccctctcccccatcaagcagttctggaagaatctgcagaaagacacctttgagtttaacacaaaacaaagctttgttgatgctttaacctagtatggacaagaaaagacatcctggaaggctgtcatgtggacagcaagttctaagaaacaggttacacaagaacattgcctggtttattatttttaatttaatgaacattgttcctgtaaaaattgcagggca

SEQ ID NO: 104377 - DNA, 528 bp, Homo sapiens
gtatatttgggggtcaaatattttcttgtctcataaagttatgccagagtcagattgaaaagcaagtcacaatatacagggtcaaataaaacccatctgatgagaatccatggtttgctgggcatgactccccagatcccttaggtagaaatttgggcaagataaaaaatcagagcttagtcctcagatggtatttgttttcagctatttgaggtatcaccacattgtcttccacactgattgaactaatttacacttccacccacagtgtataagcgttcctctttctccacaaccttgccagcatctgttacttttggcctttttcataatagccattttgactggtgtgagaaggtatctcactgcrgttttaatttgcatttttctaataatcagtgatgttgaactttttatcatatgatgattggccacatgtatgtcttcttttgaaaagtgttcattcatgccttttgcccactttttaatgaggtttttctcttgtaaatttgtttgaattcttcatag

SEQ ID NO: 104378 - DNA, 594 bp, Homo sapiens
gctgtgtccccacccaaacctcatcttgaattgtaggtttcataattcccacatgttgtgggagggacccagtgggagataattgaatcattggcgtggtttcatcaatactattctcatggtagtaaataagtctcatgagaactggtggtcttataaggagaaatcccttttgcttggctctctcattctctcttgccactgccctgtaagaagtgcctttcacctttgcaatgatagtgaggcctccccagccacatggaactatgagtccattaaacctatttttttaaattaattacccattttggggtatgtctytatgagcagcatgaaaacagactaatataagggataatgtaaatctattatttctacccatttcaatgaatcttgttcagacttcacccttttcttgttccatcgtcgtctccttcctgcaacccagggtttatttcctatgaagtagcaagagtgattcaaaccctgaaatgacttcccatctcactcaaagtgaaagtcaagttctgtattacaacctataaggtcctaaattatgacaatcagtttactcattggtttcattttcttctc

SEQ ID NO: 104379 - DNA, 631 bp, Homo sapiens
actgtatatttggatgttattaattgatatttcttgcttgccatgtagtcatatctcatctaaatgctttgcctctccagcatcttaattttgtactcgcccagaggtcattggtctagaagtgggtggggtatttcaggtgtgctatactgggaagaagatcacatcacttacatgcattctatacttttgggttaagaagagaacaagggakaaaagctcctctttgtcagaattagtgtagcttgcatgatgaagatggtctccacctgtcctttgcctttgtctagaccgcgaggacatcctggcagattaaaataagccctgaaagacaaggtccccctttcagggagcatacgtgatgaagacttatgttctaatctcaatcttgccaggctgtatcaccttgagcagattatggaccctctctgatcctttatttactcaactgggtaactcaccttacagtgctgtgataacttaatgaggtatgcttataaaacacttagcaaaatatctggtgcagctgttgataaatgtcagaagacagctgttattgttgctatgtgatacttggttctgaacagaaaaattctataactcatcctcaaccctgcttgaaagaaggttc

SEQ ID NO: 104380 - DNA, 562 bp, Homo sapiens
aaaagtcaacaaatacaaattgagagaagatttagaaggcaaacatttgatattcaaatagataacaacatgtgtactgtacaaaggtgcagagggatcggaaaaaaatcatggtcctcagtttcactggcttgctttaaaccacatattaatcatcgtaggcttcctgctcttactcctgttctccatggastaattcaaacctctctactttctttaaattcctccctgatcacttattaggtgatattccatctaccaccaagcaggtgatattacaccatactttatataaaacatatctttagtaaaaggtcacaacacatcttcccttagtttgagaactagttagcatgccacagacaagctctgtggattgttttgcccatcatgcacattaataaaattcagaagtcccagtgagttttgttgttcttgcagcttttgttatttcttttctttttttcttccaagagaaataaccgtttatttactaaaaaatattaattgagaactcactgagttgggttcctgcttagttttaccatgtggtggaggagac

SEQ ID NO: 104381 - DNA, 591 bp, Homo sapiens
agaatatgattgatgtttacagtaggacaaaaacatgttttctactattacatataccctcaatactgcacttccgacaccagatgtgagggctaggggttgttctataccaacaattctctgtggataccaatcgggcgccctacattcaactcagttctggcagtagcaggagttagcatakatgccacaagctgagagctcagtctcacaagactgcccccagtttcaggtaccaatcacaagttctagattgttacctgtgcttctgaccaaccagctagaaactggaggttcccacaacctccttgagtttgatcatttgctaaagcagctcacggaattcaggacaattcttactattacccacttgctataaaactacataactcaagaacagccagatggaagagatgcataaggcaaggtatgtggggagtggtgcagagcttctgtgccctctctgggtgacaaggtttagaagtttgatccctacaaatctcatgttgaaatgtgatccccagtgttggaggtggggcccagtgggaggtgttggatcacgggggtggattcctcatgagttacttagtg

SEQ ID NO: 104382 - DNA, 433 bp, Homo sapiens
tttatcttgagtaccaactgggtgtgatgacatatgatccaccgataggaactgagacactgtgcccacttaagataagcttcaataaactgaaagtgagcgatgaactactatttaaatggaaaggacaatctttttcaaagtcttaagtaaaacattaccaaaatgtagcacctttagacaaagttrgagttggagaatatagcagaagggaaaaacacgaaggtggggagggggcaggagacctgggattgagtcttggtggtttattaattgtgggaccttgagcaagtcccccttgttccatgggtttccatgaccttatctgagaaaagatgacctggatcactgcccactggaatattgtgccaactcatgctcgcactgagctctcaatgttttgcccaagattctatatctcattttgtttcaa

SEQ ID NO: 104383 - DNA, 433 bp, Homo sapiens
tttatcttgagtaccaactgggtgtgatgacatatgatccaccgataggaactgagacactgtgcccacttaagataagcttcaataaactgaaagtgagcgatgaactactatttaaatggaaaggacaatctttttcaaagtcttaagtaaaacattaccaaaatgtagcacctttagacaaagttggagttggagaatatagcagaagggaaaaacacgaaggtggggagggggcaggagacctgggattgagtcttggtggtttattaattgtgggaccttgagcaagtcccccttgttccatgggtttccatgaccttatctgagaaaagatgacctggatcactgcccactggaatattgtgccaactcatgctcrcactgagctctcaatgttttgcccaagattctatatctcattttgtttcaa

SEQ ID NO: 104384 - DNA, 554 bp, Homo sapiens
gagggtggggcccttgtgaataggattagtgctcttatagaagggtttgactgagggagttcttcccttctgtcatacaagaagaggtgargacacagcatttgtcccctttggaggacacagcaacaaggcatcatcttggaagcagagagcggccctcatcagacaactgaacatgccagggcttgatcctggactttcagcctttggaactgtaagaaaataaatttctgtttcttatacattactcagtctcagatattttgttatagcagtaaaaaaataaagaattaagagagtttccaaactttagaaatatgtattataaaagttggcgagctaagagaatcacagtcttcaacttttttaccctcccattgaagacctgattgtgatgtgagtatcagaggtggaaatcggggctgctggtgagggaagggcctttgctgccttttaggaaggcaggaagaatccaaaatggctgctgaccatacaaggaacaaaccatgaagaccaccataggggaccactcacactcaagtctgggctgctgg

SEQ ID NO: 104385 - DNA, 624 bp, Homo sapiens
ttttgtgttactatcttyttttgtgtttagatgatttttgatgtgaaatgttttaattcacttttcttctttggggtgtacattctatacctcatttttgtggttaccacagggattatacttaacatcctaaagttataacattttaacttgaatttattggaccttaacttccataaaacacaaaacattgtttctgtacagctctgtccccacccttttcagttattgatatcatgtagttataattttatacattgcatatcctgaaacataatctagtaattattttttaatgcacaatttcttaaattatataaaaaacaagatgcagtattataaaccaaaattacagtttttggcttttagactaacacttaaaaaaaattttattggtctcttaaatcatgtagaaaacaaaaagtggagatacagactgttgttacaataatactagcttttctaattgccagggtatttacctttactgagatctttatttctttatatagctgtcggttattgtctactgtctagtgtcttttcatttaaagctgcaggacatttttggctttttagcatttcttgcagagcaggtttagtagtaacagatttcctcagctt

SEQ ID NO: 104386 - DNA, 607 bp, Homo sapiens
attgttaattcaacaagtatgtatccatttttaattacatattgaaattgaaaatctattacaccaagctgaacatgattaaataatggtgcaaaagtatgaacaatgcatagtgaatctaactcagaccctcaaatcctccatctgcagggacatcagaaatatgctttacatatcaaatgatatgtgtaaatatttttcttacaaaaatagggcattatatactttgctcttccccttgattttatcacttataaatatatctttgagattactccttgttagtacagtgttccattgtatgagtgcamcatggtttatttaatcagaccccagctaaagacttggctttaagtcttttgtcaagataagcaataccactacagacacccttgtacatgccccttttgcacgtgggcaatgcacagttatatctggaggacaaactagaagcagagcggctggatcaaagggcacctgtgttctatcacctgactgatagaacaaatccccctgcagggcggggcagaacctcctccctctactctagtcaccccgtgtcctcatcaaacgttgtgatctttgccagcctactgaatgaaaaata

SEQ ID NO: 104387 - DNA, 472 bp, Homo sapiens
catatagtgcctggtgggagtgtaaatttgtgcaaactctctggagtacagcctgacagtacgtgtcaaaatccctacaacatgtgcatatcatctgacttagcagtttcacatctaggaatttatcttcggaatttcttctaaccagagctgtgaacaaaagtctacccataagatatttatcccaacacgctttttgatttttaaaaatggaaaaagactgaatgtctgaaaaaaagtatattgggtgaattaattgtggtgtatccaaagaataagccactgtgtgttataaatattaatgatgttgatgcamaaaatatatttaatagcctggggaaattattaagatatattgaaataaatcaggggataaaaccacacatttagcatattctcaattttttttaagtagttatatcattggaaaaaggctgagaagatatcaactagtatgtttctccgaataact

SEQ ID NO: 104388 - DNA, 478 bp, Homo sapiens
catgagagatcaaaaggcagttgaccataaaccgttaccctgtaagccacatttctgaaacttttcataaaagctcttacactccaatttggcaagcttacaaatgcgattacacctttaccatgattgtctcttagaatggctttaatatcctgtaaatgtcagattttaatgaatctacaaataccatattctaaaacgtatgtgcttgtgtgttctgtgataaacctaaaaccagagccccatccacrtgggaggcagtgtcagcaaagcggtggtgagcaaggaagccggcggcgctgcctggatggggagcccgaccccaccgctcatgagctgtgcatccttcgcggctgaattcagcctctttctgccaccgtctcctcatctcccacatggggctaataatcttctcccctcctggagtcattgtgaggatgaaatgaattgttatttgtaaggtgctggaccatggtga

SEQ ID NO: 104389 - DNA, 478 bp, Homo sapiens
catgagagatcaaaaggcagttgaccataaaccgttaccctgtaagccacatttctgaaacttttcataaaagctcttacactccaatttggcaagcttacaaatgcgattacacctttaccatgattgtctcttagaatggctttaatatcctgtaaatgtcagattttaatgaatctacaaataccatattctaaaacgtatgtgcttgtgtgttctgtgataaacctaaaaccagagccccatccacgtgggaggcagtgtcagcaaagcggtggtgagcaaggaagccggcggcgctgcctggatggggagcccgaccccaccgctcatgagctgtgcatccttcgcggctgaattcarcctctttctgccaccgtctcctcatctcccacatggggctaataatcttctcccctcctggagtcattgtgaggatgaaatgaattgttatttgtaaggtgctggaccatggtga

SEQ ID NO: 104390 - DNA, 560 bp, Homo sapiens
tatattatcttcttttctaatgcctataccaccttttgtttttcttttcttctaactttgcctaggccttccagtgctrtggcaggcagtagcagtgagagtgggcatcttcatcttgttccccttctggaagggaatacatctacagtttctccactgagcataatacctgctgttatgactttggcttataccttttactaaatctggaaagttccttcttttcctatttttctaaaagtatttatcaaataccttttcttgcataaatttaaaaaaccaacctgaagacatataccaccatattgctagaaacagaaattcaaaacatgctttctttcagagcactgtgccatcattcaatgcactgtggctgcattgtaggctctgagaaactggtaaggcattggtaaggctgcaaaacccttgggaatattagaagaaaaagctttaacatatccaaaaaactacaaagacatattaatcgtttttatgtgccaagcctcacaataactctgtgaagtaagtacattttttttttttttttgagacagagtctc

SEQ ID NO: 104391 - DNA, 527 bp, Homo sapiens
ccgggctgttgttggccccatgcttccttcctgtgcacgtctcacagctggtgacacacggtttttccctcatgcagtgttctctctgtggcctggcatctgtggccattgttcacaaggacgtcagccaccacttcttcacgtcacaggatgtaatgtctctgcttctaaaccacaaggtttccccacttttctatttttgtaagtcartacagatgctgcctttctgggagttgtttttctgggaatttggaccttcttttttcctaggctgtactcacatactgttgtcattcatcttccagccacatctagtatctagtgcagctggatgaatgagttttccaactagtggctaattgtgccctagggcagcattttataaaaatagggagtgtgtgtatgtgtgtgtgcgtgcacacacgcatgcatgcattctccaaataaagctactatagaagctgctatagtgtataaaaacatgagctttggaatccaacagttctaggctataatctcagcttcat

SEQ ID NO: 104392 - DNA, 577 bp, Homo sapiens
taggatagtctgtgggtctcagaaaccatatctgcaccaatagagagaggcaaaggagatttctggaaaggctgggaaaatagaaaaaaaawgttgaaattggaattctaaacatactgcattaaataagaaataaatccagacttactaaggagagactttattcacctgaatcattgcaagaggagggagaagaattattccaatgtgggaaaggaaatatcacaatagggagaatactccagatcaaaatatctgcaaggattaggcaaaaaagatttctgtactatagggaggagtgaacaaagaaaaaaatcagatgtcttgctgtactagcagatcagagaatgatcatgaagccagcctattcttgggagggactgctaaggaggggatgtattttgtctctagcagggtgaagaccaaaatgcaaggacctaggggaaaagaagatacttaaccaaagtttcattgacaagtattttgttctgattaaacaatgaggacaagtagtgcagctaatcatatatgaggcaaagaatggcaatttggagagtctgcttttggccttgtcaca

SEQ ID NO: 104393 - DNA, 577 bp, Homo sapiens
taggatagtctgtgggtctcagaaaccatatctgcaccaatagagagaggcaaaggagatttctggaaaggctgggaaaatagaaaaaaaatgttgaaattggaattctaaacatactgcattaaataagaaataaatccagacttactaaggagagactttattcacctgaatcattgcaagaggagggagaagaattattccaatgtgggaaaggaaatatcacaatagggagaatactccagatcaaaatatctgcaaggattaggcaaaaaagatttctgtactatagggaggagtgaacaaagaaaaaaatcagatgtcttgctgtactagcagatcagagaatgatcatgaagccagcctattcttgggagggactgctaaggaggggatgtattttgtctctagcagggtgaagaccaaaatgcaaggacctaggggaaaagaagatacttaaccaaagtttcattgacaagtattttgttctgattaawcaatgaggacaagtagtgcagctaatcatatatgaggcaaagaatggcaatttggagagtctgcttttggccttgtcaca

SEQ ID NO: 104394 - DNA, 546 bp, Homo sapiens
atgttcttttatgacttcttctaagtgtaacaaaataaataatttgaatgagagagagggagagagggagacagagaggattttacagatgatgaatgtttttccttggggtccattctcccctgcccctctgcagcagcaggagtgaggtgtgggcacccacagcctggygctggagtcattttgtgcacctggggttgaacaagacccctgagctcaagtcccttcacttgtctccggctgacagcaggatatcacttgagggtggagatctcggggcattgggagaactcctgatccagctctcacggtgcctgaaatcctaccagcccagctctgggcttgaagggtttttctcttctatctaaagatacttatcaaagtgtgaatattctggggagagagaaaccccctctgctgcctactccatcttctgcctggccactggctggattcaagagccacaaggtcatctgtgggcagacaggtcttagcagagtctgagaggagaaggggcaaaggtgagcccagcggagtggccccgtt

SEQ ID NO: 104395 - DNA, 570 bp, Homo sapiens
gacaatgctgtattcaaaccatattattagaactatcacaagacagatttccaaagactgccgatagaaacaataaatacattcaacaaacaaatgttttaaaatttctgaggagtaaacattatgagtttcattgccagtaaaactgaataaatttgctcaaagaacaaattttgtatgtatgtatattacaaagtatgtatcttccatcatacttttaaaagtacttccagtttctggccgggtgtggtggctcacgcctgtaatcccagcactttgggaggccgaggmgggcagatcacgaggtcaggagatcgagaacatcctggctaacatggtgaaaccccatctctactaaaaatacagaaaattagccgggtgtggtggcgggcgcctgtagtcccagctactggagaggctgaggcaggagaatggcatgaacctgggaggcagagctggcagtgagcaaagatcacaccactgcactccagcctgggcaacagagcgagactccgtctcggaaaaaaaaaaaaaaaaaaagtacttgcagtttccaactggaaaggcttt

SEQ ID NO: 104396 - DNA, 590 bp, Homo sapiens
gatccatgctttttgttgaaagaaaaaaaaaattcttgtctgttctctgtatagtctacaatgaatcatgagcataatctaaaagtctcgatgacatactaatggcattctaaaaatagcttccagaattaaaaactttggttctaaagatcaaacaacacccttaaaggtggtttgttatttcttacagcattgtttaaaatgattcctttatttttctgaattagccccactttttttcttactgacgttttgtcagcaggattttttcttgtcatttctatttgcactatacagcatataccagcttcatgacctttgctctcttactstagcataagagttcaacaaatgcaaactctaagattagacaggcagctgatagataattattagcagtcatagaagtttcttaatttcatacttatttttaagcagtcatagtgttgaataatgagaatttcataccaaatgaactgggtttaagaatcaacactggcacatcctagtgttaatttaatctttctaaatctcagtttctttatctgtcaaatagatgtttcacagagtctaattaaatacaatggtgt

SEQ ID NO: 104397 - DNA, 598 bp, Homo sapiens
ataagactgcatccttgttcctgcaatctgttctgtgtccaaaaaccttcctttgacttctgccttatatagcttaaacatcaaagycttcaccatggctacaagacactacagcattacttctataatgcctttctgaccccacgatctttccttttgctggtcccctctgctccagccgcactggactcctggcaattcacagagtatgccaggtattctccagcctcagggccctcgcacttctttcctctgctggggattctcttgtcccagatatccagaacttgctcttcttttttgcttcatgttcctgttcacaagtcaccttctcagagaggccttccattgattaccacatatgaaattacaataccccacctacaccaatgtttatatcccctaaatttattatctcactctattttcttggcagacgcttattaccatctgatacactatgtatttacaagcctacttgactggctgtctgtgtctttcactaggatagaagcttcttaaggacaggaattgtatctgtcttgttaactgctgtatccttagcacctaccaatagtcactggcaggcagtataaag

SEQ ID NO: 104398 - DNA, 585 bp, Homo sapiens
gaccttgcctaacctggcatggaattctgcagaaggggcaggcttcccttatgtgggtgccacctttgggttccctctgcaggtagctggcctgaggagggggctgggtgggcacagcaggctcagttttgcagcccccaaagagggcttgcatgagtcggacagggctctacccaaggcagctcttggtgaagagtgagacagaaagccagagtcctcaaagtccaagggggaggggacactgaggggctgsgaactgccaagctgcttgactcttgtcccccttccgtgtcccggctacgacatggggacctttgtccctgcctcctgatggaccatggagagaggtcagaagggtaacaggtgggaccccaggaatgcctgtccagaggggcgggggctggatggctgaggcagggccatctcatatcccacctccctttcccaccaaaccctcaaatcacctcccaagagtgacccagacagttttatctttctgagtattgactattaaggttgaaaatgatctgttgttcagccacagaaacaaggaagataaacactaattgcttggtgaatgtgcca

SEQ ID NO: 104399 - DNA, 585 bp, Homo sapiens
gaccttgcctaacctggcatggaattctgcagaaggggcaggcttcccttatgtgggtgccacctttgggttccctctgcaggtagctggcctgaggagggggctgggtgggcacagcaggctcagttttgcagcccccaaagagggcttgcatgagtcggacagggctctacccaaggcagctcttggtgaagagtgagacagaaagccagagtcctcaaagtccaagggggaggggacactgaggggctgcgaactgccaagctgcttgactcttgtcccccttccgtgtcccggctacgacatggggacctttgtccctgcctcctgatggaccatggagagaggtcagaagggtaacaggtgggaccccaggaatgcctgtccagaggggcgggggctggatggctgaggcagggccatctcatatcccacctccctttcccaccaaaccctcaaatcacctcccaagagtgacccagacagttttatctttctgagtattgactattaaggttgaaaatgawctgttgttcagccacagaaacaaggaagataaacactaattgcttggtgaatgtgcca

SEQ ID NO: 104400 - DNA, 616 bp, Homo sapiens
gcatggtggtgtatgcctgcagtcccagttacttggaaggctgaggcaggagaatggcttgaacccaggaggcggaggttgcagtgagccaagcttacgccattgaactccagcctgggtgacagagcaagactccatctaaaaaaaaaaaaaacaaaaaaaaaaaaacctcaaacaactcaatagcaagaaaacaagtaacctgatttttaaaatgggcaaagaatctgaatagacatttctcaaaagaagacacaaatgacaaaygggtatatgaaagaagtgctgaaaatcactaatcatcagagaaacgctgtttaaacccacaaagagatatcacctgatacatgttaggacagctattatcaaaaagatgaaagataacaagtgttggagagaatataaagaaacaggaatccttgcactttgttggtgggaatgtaaattatgacagccattatggaaaacaggatggaagtttctttaaaagttaaaaattgagttaccatatgattcaacaagcccactactatgtatatatacaaaggaattgaaatcaatatgttaaagagatatctgcactcccatgttcactgcagcattattcacaatagtc

SEQ ID NO: 104401 - DNA, 616 bp, Homo sapiens
gcatggtggtgtatgcctgcagtcccagttacttggaaggctgaggcaggagaatggcttgaacccaggaggcggaggttgcagtgagccaagcttacgccattgaactccagcctgggtgacagagcaagactccatctaaaaaaaaaaaaaacaaaaaaaaaaaaacctcaaacaactcaatagcaagaaaacaagtaacctgatttttaaaatgggcaaagaatctgaatagacatttctcaaaagaagacacaaatgacaaatgggtatatgaaagaagtgctgaaaatcactaatcatcagagaaacgctgtttaaacccacaawgagatatcacctgatacatgttaggacagctattatcaaaaagatgaaagataacaagtgttggagagaatataaagaaacaggaatccttgcactttgttggtgggaatgtaaattatgacagccattatggaaaacaggatggaagtttctttaaaagttaaaaattgagttaccatatgattcaacaagcccactactatgtatatatacaaaggaattgaaatcaatatgttaaagagatatctgcactcccatgttcactgcagcattattcacaatagtc

SEQ ID NO: 104402 - DNA, 407 bp, Homo sapiens
gttctttatgtccctctgattcctgagtgttcttgaaatctgaaatttagccaaagctaccctaagagtggccatgagaaaggacactggtgccgaattaaagttctgacagttgggctgggactgtgatgtttagaagtatagtagaatattcagcgctgtagggagtgggagcaggaaaggaagactctagtgatgaggtggtagcaaggtgtgctagtcatttccatttctaatttgcatatgtcagttgggcactgcttacatgttcacagtggctatgccgtaattatgagtagtctttgtatctccsttcacccttgtgaaactcaacagaatcacggcaacagccttctggcagcataatgcagatgtgtcattctcctcccgcagtgaaaaaaagagga

SEQ ID NO: 104403 - DNA, 427 bp, Homo sapiens
tatgtccctctgattcctgagtgttcttgaaatctgaaatttagccaaagctaccctaagagtggccatgagaaaggacactggtgccgaattaaagttctgacagttgggctgggactgtgatgtttagaagtatagtagaatattcagcgctgtagggagtgggagcaggaaaggaagactctagtgatgaggtggtagcaaggtgtgctagtcatttccatttctaatttgcatatgtcagttgggcactgcttacatgttcacagtggctatgccgtaattatgagtagtctttgtatctccgttcacccttgtgaaactcaayagaatcacggcaacagccttctggcagcataatgcagatgtgtcattctcctcccgcagtgaaaaaaagaggagagggagctgtgcactctctgaattc

SEQ ID NO: 104404 - DNA, 505 bp, Homo sapiens
cacagatgtatgactggtgatgtgacattcacaggttcttaatcctgactacaccttataaacatgtagaaatcttttgaaatataccccatactgggcctactttcactgaagttctgatttaattcattcatgagggaagaagcaatgtttggtcaagtaccagtatttttattagctcctcaggtgattgaatatgcagtcaacatagaaacaaatgttcaccataggtgataggttagaaacagtaaaaatgcataatgagtaatcgttgaggtcttttttaaactctgaggttcttccagattaccattttcattcataaggtacttacatattattactgacacttaaatcattttggcaaaaattstacatgctctgtgctctaacatgcactacatttcctgggtgtaaggtctttgatctaatattttgggtacagtagtaattgccctaatcctgctgatttaaaaacttcaatgtgagtactgtggattactgg

SEQ ID NO: 104405 - DNA, 582 bp, Homo sapiens
tctgtccttaaacatagttgtttaaatagttttactggtttcttttcactctaataagatcaataatttgttctgctgctatgatgttattgctttttaatttgatacttttaacaataaaagtctttgagtatttttatgtatcaatgggttacaaagacttgaaatggatttgtatgaagcagtgtaattacagttattgtaaatcatttraaagaaaagtgatacatccattcagcagttttttgcttaaaatatttgacatttggagtataactaacaaataataccctgttttttcttttgtttttcagggaagaactgcagattttcctccttcaaaattaaagtcaggttatggagaacatgtatgctatgttcttgattgcttcgctgaagaagcattgaaatatattggtttcacctggaaaaggtaaaaattacccaccctgatgatagtaattttatgggcatagcatttgcctctgagggtacagagctgttcaattgaacataaaagaattattccttttgactattctaaattgaaaatgccacagataattaagaaaagccagtata

SEQ ID NO: 104406 - DNA, 582 bp, Homo sapiens
tctgtccttaaacatagttgtttaaatagttttactggtttcttttcactctaataagatcaataatttgttctgctgctatgatgttattgctttttaatttgatacttttaacaataaaagtctttgagtatttttatgtatcaatgggttacaaagacttgaaatggatttgtatgaagcagtgtaattacagttattgtaaatcatttaaaagaaaagtgatacatccattcagcagttytttgcttaaaatatttgacatttggagtataactaacaaataataccctgttttttcttttgtttttcagggaagaactgcagattttcctccttcaaaattaaagtcaggttatggagaacatgtatgctatgttcttgattgcttcgctgaagaagcattgaaatatattggtttcacctggaaaaggtaaaaattacccaccctgatgatagtaattttatgggcatagcatttgcctctgagggtacagagctgttcaattgaacataaaagaattattccttttgactattctaaattgaaaatgccacagataattaagaaaagccagtata

SEQ ID NO: 104407 - DNA, 505 bp, Homo sapiens
atgttttttaaattctcaaaacaactaataagtaagagagctagatgttcaattcataccttccaaatacaaatctccattggtcattgggcaatacracattacaagatgctctacttttatgtaaagcattgaggacaagttctgcatgtttctgagtactgtattaaagttatttaatattgttttggtttgggttttttattttttagggataaagtttcgaagatccagactatcatctttacaagttcaaaatgtttgtaatctctttatcccatgagtttacttatcaggtggaagcattggtgaatgagtttgcctggttagctgagtcttctaaacaaataaaagaactgaactccccaagtattaaaatcttcgttacttgggaaaagatactggataaaaacttcatgagcaaaaaacatgaacaagtactttacgaaaaagtgtagacaataatcatatgaaaagatagacaaggtactctgagaaatgcaaa

SEQ ID NO: 104408 - DNA, 505 bp, Homo sapiens
atgttttttaaattctcaaaacaactaataagtaagagagctagatgttcaattcataccttccaaatacaaatctccattggtcattgggcaatacgacattacaagatgctctacttttatgtaaagcattgaggacaagttctgcatgtttctgagtactgtattaaagttatttaatattgttttggtttgggttttttattttttagggataaagtttcgaagatccagactatcatctttacaagttcaaaatgtttgtaatctctttatcccatgagtttacttatcaggtggaagcattggtgaatgagtttgcctggttagctgagtcttctaaacaaataaaagaactgaactccccaagtattaaaatcttcgttacttgggaaaakatactggataaaaacttcatgagcaaaaaacatgaacaagtactttacgaaaaagtgtagacaataatcatatgaaaagatagacaaggtactctgagaaatgcaaa

SEQ ID NO: 104409 - DNA, 552 bp, Homo sapiens
gactaaataattcatcaggcttatttttcygctcataatgttattattcagtgaataattattcataaattgataaaacagaagggcttattttttaataattcctaaatttgaaagtgaaaacagagttcattactagcctccatgttaaatttcccaagtcagcccatttagaacactctaactcatttatattaaaaagtattttcctggccaggcacagtggcttacccctgtaatcccagcactttgggaggccgaggctggtgaatcacttgagctcatgagttcaaggccagcttgggaaacatcacaaaaccccatctctacaaaaaatacaaaaattagccaggcatgatggcacgcacctgtagtcccagctactcgggaggctgaggtgggagaatggcttgagcctgggaagcagaggttgcagtgagccaagatggtgccactgcactccagcctgggtgatagagccagaccttgtctcaaaaaaaaagtattttgttttctcagggtaatcataaaatcttatttaaaaataaaaca

SEQ ID NO: 104410 - DNA, 632 bp, Homo sapiens
ggggtgaatacagaggcagggatggaagygacacacctacaagccaaggaatgctgaggcttgccagtgacccctagaagctggaagggaggcgtggggtgcagtctccctcagggccccagaaaaagccaacgaccctgttgacaccttgattttgtactcctggcctccagaactgtgagagaagaaatgtgcattgctctaagtcacccagtttgtggtaatttgtaatagcagcacaggaaacgaatcctccccagatagtggctgctctgcagtttggtttccagaataagaagacacatggagcggggctgggccggtgagtccagtcaacaccagcagagctactatttcccaggcctcatgtgacgggagcaagaaacaaatgtttgctgttgtaagccactaaggtttgagagcattttttctttttacaaagagaaaggtaattaatatttataaatattaagtgagagttaaactaaagaaaaaaatttggttacatcaagaaataaaaatttctgttcaaaaaaagccaccatctacaaagggaaaagagaagccaagagaacattttcaatgtttaaaacacagaattagaatctagactattggcagaacatggtggc

SEQ ID NO: 104411 - DNA, 363 bp, Homo sapiens
tcaacaagaaagtccctaaagtgttttcagttctaacaatccatawgtcttggagttttgactttagctttgcatcatctcacacaggctttaggaaagaagcatagagttgcacacaacagtctgaatcagctagcatcacccgcacactcagcatgtggaatgtacttgtagaaagtttctgggtgggcccacgtaaactgtgtttgctatactgaacagagtccctgtgctcagctggttacaagtttgactcaaggtacgagccttgcattgtcatcaaatagatgcctgtgcagaatcaataatacctgtgtggataagcaagccatcctcctgtagagccattctgaaagttttgct

SEQ ID NO: 104412 - DNA, 544 bp, Homo sapiens
tttttattttttaagattaaaaagcaaatagaggttccaatataccttttctacatatactcttggataaatgctccccactcttgagcccactggcctaatcacagaccatgaagtatgtcaagagcaaagctctcttcactgtcattaatcaatcttctgtcaatatgctttgtggaggtatagatctctttcagctgcctgtcacaacagaatgacagttgtctgcctctccttaaaatkcagggagaacacttgatggtctctggtatgatctactagttttttgttgagtaaagttattaatgttctggccttaattttccttcagacccttctggtagatataatcttctgccttttttccttttcctttttttttttttttaaataatcaaaggagtctttgtgttccagtatgacactaggcaaagtttttatacagcccatcaggaattcacatatgacctcactggacaatattcagcttatacttcatcacatcatgtaatttatgtgaaaaaatttaaatgaataaggcttt

SEQ ID NO: 104413 - DNA, 544 bp, Homo sapiens
tttttattttttaagattaaaaagcaaatagaggttccaatataccttttctacatatactcttggataaatgctccccactcttgagcccactggcctaatcacagaccatgaagtatgtcaagagcaaagctctcttcactgtcattaatcaatcttctgtcaatatgctttgtggaggtatagatctctttcagctgcctgtcacaacagaatgacagttgtctgcctctccttaaaatgcagggagaacacttgatggtctctggtatgatctactagttttttgttgagtaaagttattaatgttctggccttaattttccttcagayccttctggtagatataatcttctgccttttttccttttcctttttttttttttttaaataatcaaaggagtctttgtgttccagtatgacactaggcaaagtttttatacagcccatcaggaattcacatatgacctcactggacaatattcagcttatacttcatcacatcatgtaatttatgtgaaaaaatttaaatgaataaggcttt

SEQ ID NO: 104414 - DNA, 557 bp, Homo sapiens
taattctaaattaattatccttggaaagaactgctaacatgtactgaaacttatcttcagttttcccagaaggctccacgtttgcatgaacttaaaaaaaaaaagtttggttctttaaaattcttaatggtgtctgcccacagcaggcttaagagtagttagctactggcaatagagcccaccttaatgagctcactgccccatcctagatatatactgtggcaggaaggtcccggtgagaaagaacaaatgaataagtaaaattccatcactatttcaggaaaaagcagctcatgaggcagcagcattttcttcattcataaaggatagtgattgatgttgagtataatttgtacctttctttgaaaggtttaatgraagtaacctaacagccttgagtttttattttcattatcgagacaatcatgtgagcacctactaagtgagatgcattctcactggattctcactggatcagagagaaaactgcattctcattggatcacacatgcaatacggtgcttgactatgagcactgggagcacagagtgcttata

SEQ ID NO: 104415 - DNA, 600 bp, Homo sapiens
tgagccacgttatgtaagatgcttttgctaacagctaacttggagtgatgagtagggtgaaattcctatagaaatcagagtttggggaatttgattctagctattgttagtatcagaggcacctgttctgtagacagttgattagtgccaattttttttttttttttttgagatggagtttcgctcttcttgcccaggctggactgcagtggcgggatctcggcttacygcaatctctgcctcccaggttcaagcgattcttctgcctcagcctcctgagtagctgggattacaggtgccctccaccatgcccagcgaattttttgtatttttagtagagatggggttttgccatgttggtcaggctggtctcgaatgcctgaccttgggtgatccacctgccatggcctccgaaagtgctgggattacaggtgtgagccaccatgcctggcagggccaatatatatatatatatttttaacctgaggcttactttataatcagttatcaccagttaaccatagttggatttggaatgaaagtgtgtactcagttcagatcagtatacttagacatttgaccaagagtccaggtgttgta

SEQ ID NO: 104416 - DNA, 605 bp, Homo sapiens
tatgaaaatcccagcaggcttctgtagaaattcataagctaatcctaaaatgcatgcaaaaatgcaatggacccagaatagccaaaacaatcttggaaaagaacagagttggcgtctcacactaccaaatttcmaacttactacaaagctaccataatcaagacagtgtggcactggcaaaaggatacacataaagattattgaaacagagttgaaagtccataaatggacacttatacttacagtcagttgattttcaacagaagggaagggacaactcgatggaggaaagaatagatttttcaacaaatgatgctgcgacacttggatatccatatatactatatagaaagactaactcaaaactgatgatagacctaaatgcaagagctaaaactataaaacttttaaaagaaaatgtagaaggaaatctttgtgaccttgggttatgccaagcctttttagatataacatcaaaaatacaggtgaccaaaaaaagataaattagactttatcaaaatgtaaacattttatgcttcaaatgccattaccaaaaagtaaaaagataacccacagaacaggagaaaatatctgcagatcacata

SEQ ID NO: 104417 - DNA, 545 bp, Homo sapiens
catgtgatcttacaggagtacagcatgtttcagggttgattaggagcctggaagagaacagtcagcctatgggttrtaagagttctcaggtggttggtattgaagcctggaaggccagatgctgagacagcctggtgccagaaacctagtccttagagtaacaaaaaaggaaaaggataatttcttatgctttgataagagtagaaattatgtacctagttttctgcagcattgcaccaacaaagcattctctctctatgattataaataaggtaataaacatattgataataaacatgtcagctagcatatatacatactggcccataataaatagcatataatatcatttttacttatttgcagcaaaaccaaggcagatgcccagcccagaattgttcagtggaagcccctgcttggatgcctgtccaccactgtactgtaagtttgattattccaagattagcagattgaaggataaatgtttttatattttggaataatcttagtggaatgagccagaatgctctctgaaattctggagt

SEQ ID NO: 104418 - DNA, 545 bp, Homo sapiens
catgtgatcttacaggagtacagcatgtttcagggttgattaggagcctggaagagaacagtcagcctatgggttataagagttctcaggtggttggtattgaagcctggaaggccagatgctgagacagcctggtgccagaaacctagtccttagagtaacaaaaaaggaaaaggataatttcttatgctttgataagagtagaaattatgtacctagttttctgcagcattgcaccaacaaagcattctctctctatgattataaataaggtaataaacatattgataataaacatgtcagctagcatatatacatactggcccataataaatagmatataatatcatttttacttatttgcagcaaaaccaaggcagatgcccagcccagaattgttcagtggaagcccctgcttggatgcctgtccaccactgtactgtaagtttgattattccaagattagcagattgaaggataaatgtttttatattttggaataatcttagtggaatgagccagaatgctctctgaaattctggagt

SEQ ID NO: 104419 - DNA, 545 bp, Homo sapiens
catgtgatcttacaggagtacagcatgtttcagggttgattaggagcctggaagagaacagtcagcctatgggttataagagttctcaggtggttggtattgaagcctggaaggccagatgctgagacagcctggtgccagaaacctagtccttagagtaacaaaaaaggaaaaggataatttcttatgctttgataagagtagaaattatgtacctagttttctgcagcattgcaccaacaaagcattctctctctatgattataaataaggtaataaacatattgataataaacatgtcagctagcatatatacatactggcccataataaatagcatataatatmatttttacttatttgcagcaaaaccaaggcagatgcccagcccagaattgttcagtggaagcccctgcttggatgcctgtccaccactgtactgtaagtttgattattccaagattagcagattgaaggataaatgtttttatattttggaataatcttagtggaatgagccagaatgctctctgaaattctggagt

SEQ ID NO: 104420 - DNA, 558 bp, Homo sapiens
gtcttcatccctgtcatattcacattgttttgagctgaggagaagaaaaggaaggtcggtcttgctatctcagaggtggccaagcagaagagatagaggaggtgaaaggggaggcaggagaagcggcacactcagtgtaacttttattaaaacaaaatccccatgtaagtggacctctgcaggtcaaatccatgttgttcaagggtcgactgtagtactatttggcacccatctggttgtaaacacaaataccaatgtggacactaaaatctcaaggccacattcacttaaaagttggtcatccaggtaaaccagcacatggttctaccagtacttttagatgatgataaaaaaggaaaaggccaaattaaagatcaattatcatggagagattgtagacctccamagacttatgatagtccaagggccctactttgagaaacactagactagcatatcatctttaaagcattatcattgtttccattttctctttcaactggctaagcttggttcctcatttcttctaaataggagactgttgtagccattgacatt

SEQ ID NO: 104421 - DNA, 558 bp, Homo sapiens
gtcttcatccctgtcatattcacattgttttgagctgaggagaagaaaaggaaggtcggtcttgctatctcagaggtggccaagcagaagagatagaggaggtgaaaggggaggcaggagaagcggcacactcagtgtaacttttattaaaacaaaatccccatgtaagtggacctctgcaggtcaaatccatgttgttcaagggtcgactgtagtactatttggcacccatctggttgtaaacacaaataccaatgtggacactaaaatctcaaggccacattcacttaaaagttggtcatccaggtaaaccagcacatggttctaccagtacttttagatgatgataaaaaaggaaaaggccaaattaaagatcaattatcatggagagattgtagacctccaaagacttmtgatagtccaagggccctactttgagaaacactagactagcatatcatctttaaagcattatcattgtttccattttctctttcaactggctaagcttggttcctcatttcttctaaataggagactgttgtagccattgacatt

SEQ ID NO: 104422 - DNA, 410 bp, Homo sapiens
aataatctatctgattatggtctaatatccataatatataaggaactctcacactttaacataaaagaaacaacccaattttcaaatgggcaaagtacttgaatagacatttttctccaaaagatgctcaacattatcagtcaataaggaaacacaaataagaaccacaatgagaactcactttatatctactaggatggayataatcaaaaagagaaaaattaatatgttagggaaaatgtggagaaattcgaacccttgtgtactgttgcacaagcgttgtaaagaaatgtaaaatgatgcagctgctgtgaagaacagtttagagattcttcaaaacgttcaacaggattactgtatgacccagaagttttattcctaggtatatactcaaaagaatatactcaaac

SEQ ID NO: 104423 - DNA, 595 bp, Homo sapiens
tgttggtggagaggcttaatttagttttaattttttttactkatttttaagtttcattttgtaaacattataatagacttatgacctttattttaattccaacttttatcttggatttggggtatacatatgcaggtttgtaacatgagtatattgcatgatgctgaggtgtggaatatggatgatcccatcagccaggtagtaagcattgtacccaaggggtagtttttcaacccgtttcctttccttcctttctagccttctagtagtcctcagtgcttattgttcccatcattatgtccgtgagaaccccagatttagctcctacttataagtgagaatgtgtggtgtctggttttctgttccttcattaatttgcttgggataatggcctccagctacatccatgttgctgcaaaggacatgatttatttctttatatggccatgtggtattccgtggtgtttatgtaccacattttctttttccagtccataatttatgaacacctgggttgattccatgtatttgctattgtgaataatgctaagataaacatatgtgtgcatgtgtctttttggtagaacaatttatt

SEQ ID NO: 104424 - DNA, 595 bp, Homo sapiens
tgttggtggagaggcttaatttagttttaattttttttacttatttttaagtttcattttgtaaacattataatagacttatgacctttattttaattccaacttttatcttggatttggggtatacatatgcaggtttgtaacatgagtatattgcatgatgctgaggtgtggaatatggatgatcccatcagccaggtagtaagcattgtacccaaggggtagtttttcaacccgtttcctttccttcctttctagccttctagtagtcctcagtgcttattgttcccatcattatgtccgtgagaaccccagatttagctcctacttataagtgagaatgtgtggtgtctggttttctgttccttcattaatttgcttgggataatggcctccagctacatccatgttgctgcaaaggacatgatttatttctttatatggccatgtggtattccgtggtgtttatgtaccacattttctttttccagtccataatttatgaacacctgggttrattccatgtatttgctattgtgaataatgctaagataaacatatgtgtgcatgtgtctttttggtagaacaatttatt

SEQ ID NO: 104425 - DNA, 595 bp, Homo sapiens
tgttggtggagaggcttaatttagttttaattttttttacttatttttaagtttcattttgtaaacattataatagacttatgacctttattttaattccaacttttatcttggatttggggtatacatatgcaggtttgtaacatgagtatattgcatgatgctgaggtgtggaatatggatgatcccatcagccaggtagtaagcattgtacccaaggggtagtttttcaacccgtttcctttccttcctttctagccttctagtagtcctcagtgcttattgttcccatcattatgtccgtgagaaccccagatttagctcctacttataagtgagaatgtgtggtgtctggttttctgttccttcattaatttgcttgggataatggcctccagctacatccatgttgctgcaaaggacatgatttatttctttatatggccatgtggtattccgtggtgtttatgtaccacattttctttttccagtccataatttatgaacacctgggttgattccatgtatttgctattgtgaataatgctaagataaacatatgtrtgcatgtgtctttttggtagaacaatttatt

SEQ ID NO: 104426 - DNA, 627 bp, Homo sapiens
atttcattggatattagcatttctcaaaagcaaagaagtattagtgatggaaagtaggttaaaacattgctggcttgctaataaggaaaatatatatatatttttcaaaaatgacaagktattgaatgaaacttcaacatatgcaaagtaccaaaattatttgcttttatgagtctcttgatttctgagtaatagattcgttaggggatgagagaagcataaaaatgattatagatcttacaaagactgattagtaaaagagtaaatagcagcagagttaaaaggggagaaaaaggaggtggtattgttattctctttggggaaggaaaaggaaggagagaaagtgagcctaagcacagtttaagtgggtaatagggcatgttcagaagtgctgtgcagtggcatttaatgaaattctaaactctatattctctcattaagttgattcatggagtcagtaataggggaataactggcaagtgcggcctcctgtgaaaatgaccacatgttccacatccatcagttaacatctgataaaagggcctaggtaatgcaatctcttacagttaattcctcactctttttgctcttatttactctgagcatctttgtgagcttggcacctgc

SEQ ID NO: 104427 - DNA, 627 bp, Homo sapiens
atttcattggatattagcatttctcaaaagcaaagaagtattagtgatggaaagtaggttaaaacattgctggcttgctaataaggaaaatatatatatatttttcaaaaatgacaagttattgaatgaaacttcaacatatgcaaagtaccaaaattatttgcttttatgagtctcttgatttctgagtaatagattcgttaggggatgagagaagcataaaaatgattatagatcttacaaagactgattagtaaaagagtaaatagcagcagagttaaaaggggagaaaaaggaggtggtattgttattctctttggggaaggaaaaggaaggagagaaagtgagcctaagcacagtttaagtgggtaatagggcatgttcagaagtgctgtgcagtggcatttaatgaaattctaaactctrtattctctcattaagttgattcatggagtcagtaataggggaataactggcaagtgcggcctcctgtgaaaatgaccacatgttccacatccatcagttaacatctgataaaagggcctaggtaatgcaatctcttacagttaattcctcactctttttgctcttatttactctgagcatctttgtgagcttggcacctgc

SEQ ID NO: 104428 - DNA, 538 bp, Homo sapiens
gaatatatcttacatcagaaaacaggactattttcaaatacatatasctatgacgaataacaaaaaacttacctaaattattacttaatttataaaacttcaacattatgtattttaatgtatatttaaagatcaactataatcatacaggggctataaacagtttccaaaaatagaagagtacacactcaaaatatttggaatgacttatgagaattacagttagttccaaagtgagctctttaccatttctgtattacaattcctaaattgataacaagcaaaagtttagcaactgtaaagtgaataaataaactgtggtatacttatataattgaatactattcagcaatgagaatgaactccatgcacaacataggtggatatcacaaatataatactgagcaaaagatggagacacagcataattttgcaagatcccaactccctggaggtttggatagtggtcaccttgatagaaaacagggctaggagaaagcaaagagagagtttctagagtgctgataatattttaacc

SEQ ID NO: 104429 - DNA, 538 bp, Homo sapiens
gaatatatcttacatcagaaaacaggactattttcaaatacatatacctatgacgaataacaaaaaacttacctaaattattacttaatttataaaacttcaacattatgtattttaatgtatatttaaagatcaactataatcatacaggggctataaacagtttccaaaaatagaagagtacacactcaaaatatttggaatgacttatgagaattacagttagttccaaagtgagctctttaccatttctgtattacaattcctaaattgataacaagcaaaagtttagcaactgtaaagtgaataaataaactgtggtatacttatataattgaatactattcagcaatgagaatgaactccatgcacaacataggtggatatcacaaatataatactgagcaaaagatggagacacagcataattttgcaagatcccaactccctggaggtttggatagwggtcaccttgatagaaaacagggctaggagaaagcaaagagagagtttctagagtgctgataatattttaacc

SEQ ID NO: 104430 - DNA, 557 bp, Homo sapiens
tgcaatctatccatctgacaaagggctaatatccagaatctacaaataacctaaacaaatttacaagaataaagcaaacaaccccatcaaaaactgggcaaaggatatgaacaggtaattctcaaaagaagacatttatgcagccaacagacatacgaaaaaatgctcatcatcactggtcattagagttatgtaaatcaaaaccacaatgagatatcatctcacaccagttagaatggcaaccattaaaaattcaggaaacaacagatactggagaggttgtggaaaaataggaacgcttttacaatgttggtgggagtgtaaattagttcaaccattgtggaagacagtgtggcaattcctcaaggatctagaactggaaayaccatttcacccagcaatcccattactgggcatatacccaaaggattataaatcattctgtgataaagacacatgcacacatatgtttattgcggcactattcacaatagcaaagacttggatcaaacccaaatgtccatcaataatcgactggataaagaaaatgtggcaca

SEQ ID NO: 104431 - DNA, 538 bp, Homo sapiens
aatcggcttgaatccgggaggcagagcttgcagtgagctgagatcgcaccactgcactccagcctgggcgagaccctgtctaaaaaaaaaaaaagaaaaagaaaaaaaaaaagatatggcattatcaatatatgctttgtggctgagagggtgtccttagattctgagattcaataatctatgcttctacttatatggtgttcatctaagttgctacgacagcctaagaaagctgcagsaaatggcagggcatttgttttagttaaaaaaacataaagttaattaatatttaccgtaataaaaattctctatgtctggattagttttacacatttataattttttattcaataaaattcatttttcttatatattttcttattcaaaaaatttgatccttaatttattagttttattaattttctttttacctaattatgcctcatggtatgaagagaagcagtagagaaagatatttagatcacaatccctatccatcttttttctgtttttttgctccatctccatttaaatgact

SEQ ID NO: 104432 - DNA, 538 bp, Homo sapiens
aatcggcttgaatccgggaggcagagcttgcagtgagctgagatcgcaccactgcactccagcctgggcgagaccctgtctaaaaaaaaaaaaagaaaaagaaaaaaaaaaagatatggcattatcaatatatgctttgtggctgagagggtgtccttagattctgagattcaataatctatgcttctacttatatggtgttcatctaagttgctacgacagcctaagaaagctgcaggaartggcagggcatttgttttagttaaaaaaacataaagttaattaatatttaccgtaataaaaattctctatgtctggattagttttacacatttataattttttattcaataaaattcatttttcttatatattttcttattcaaaaaatttgatccttaatttattagttttattaattttctttttacctaattatgcctcatggtatgaagagaagcagtagagaaagatatttagatcacaatccctatccatcttttttctgtttttttgctccatctccatttaaatgact

SEQ ID NO: 104433 - DNA, 538 bp, Homo sapiens
aatcggcttgaatccgggaggcagagcttgcagtgagctgagatcgcaccactgcactccagcctgggcgagaccctgtctaaaaaaaaaaaaagaaaaagaaaaaaaaaaagatatggcattatcaatatatgctttgtggctgagagggtgtccttagattctgagattcaataatctatgcttctacttatatggtgttcatctaagttgctacgacagcctaagaaagctgcaggaaatggcagggcatttgttttagttaaaaaaacataaagttaattaatatttaccgtaataaaaattctctatgtctggattagttttacacatttataattttttattcaataaaattcatttttcttatatattttcttattcraaaaatttgatccttaatttattagttttattaattttctttttacctaattatgcctcatggtatgaagagaagcagtagagaaagatatttagatcacaatccctatccatcttttttctgtttttttgctccatctccatttaaatgact

SEQ ID NO: 104434 - DNA, 568 bp, Homo sapiens
cctttctgttccaaaatgttgatcactgaggtttcccaaactcaagcatatggaaatctcttgaggtgaattgttagactttcttctattagacattcagccattattgttagtaacaataattgcaacaatgatagtgatacttacaacttattcaacatagactacttgctagacacccatctatttgctttctatatgcaatctttttttttgcctcataatcacttttggaggtatttttatcatcatcttataggtaaaaatgctgcagcttagagaatttgagtaatttacttaagctaatacaactcataagtggtggatctagacagaaactcaactttctctgactccaaaggccatcatgccacactcccttggcattacyatctcccttcattagaaaatgctgtactgcattagtcagaccgaatgttggcctagggatgtgatagaattctgagaactaggatgactccaattttcctgacatgggttctaaaatttcctaattgagcattacataaattggatcattagaaatttctttgaaaagtaaatacta

SEQ ID NO: 104435 - DNA, 577 bp, Homo sapiens
cttttctctcctatttttcatatcttcttctgggagatttctttaacttaatcatttaacccttctgttgaatttttcacttctgctgttttgcttttaatttgaaagagctctttttattcttcaaatatttctttttaatagtacccttgtccagcctgggtaacatagtgagaccttctctctacaaagcagttgaaaattagccaggcatggtggggcatggtggcacgtgtctgtagtcccagctactcaggaggctaaggctggaggatcacttgagcccgggaggtcaaggcttcacagcgagttgtgatcatgccactgcacaccagcctgggtgacagagtgagaccctgtctcaaaaaaaaaaaaaaaaaaaaaagtatccttgttctacttttatgcatgtactagtatctctgaagataataatgaaagtgtttttgaaatttttctctgtctgcaaaacttccrtttctttcaagtgtctatttgttcaggactctatattttgtatttataggcattttccatatgtctaataatgtttggcagtctattcatatttatcagt

SEQ ID NO: 104436 - DNA, 557 bp, Homo sapiens
aatacattttcccctgacactgcataaatccaggaacatttatatgctaatcaaatcaaaataggaattattagtgactggagagccccaacatggctgttattttcccatcaacctatgataacagctctgacgctgaattaaggagctgaatattacrtaagctccaaaaggttataatacatgacaggtttaagcaatattaaatcctagaaaccctgacccacctattacatatttattcagtattacaaattgtaaatatttaaaaatacacaaagatacagtgtgggtaaattattaatgtttaatgaaattattcatggcatacaaagagttgaataactcaacaaataccatgaaggttaatgcatgcaaaggaatctgaggggtccagcaatgagaataacacattgtgtcctttcctggagtgatcatgaaatggaattaacatgacctgatttccatggttaaggatatctctggggataaaaggaagcaatgttcaccaaagacctactagcagctaatccagattcaatgtccggtctccatct

SEQ ID NO: 104437 - DNA, 459 bp, Homo sapiens
tgtcagtcttcacaattttatcatcacacacttgagttaaattcatcagcctcctgaatgattttgacatcagtctctaccatttwattctcatcaaaatactgcttttataatgacactcaacaaaaacaacaaaatttaacaagcaaaacaagacttcaccactatgcaacatgtctatgtaataaaaatgcacttgtagttttctctaagtgaatacatctataataaaaataaagattcatcattaaaatgcccatcaaaaacaccctgcagaggccttaaatccttatactggcgttctagaattatcacatgactggatctctcctccagctttaagtcttactattcttcaccaagaatcttcttcaagccatactcatctcttttctgtcccttgaatatataacaaacattgatcacttgaagcacctattcattttgcagtctctgcag

SEQ ID NO: 104438 - DNA, 459 bp, Homo sapiens
tgtcagtcttcacaattttatcatcacacacttgagttaaattcatcagcctcctgaatgattttgacatcagtctctaccattttattctcatcaaaatactgcttttataatgacactcaacaaaaacaacaaaatttaacaagcaaaacaagacttcaccactaygcaacatgtctatgtaataaaaatgcacttgtagttttctctaagtgaatacatctataataaaaataaagattcatcattaaaatgcccatcaaaaacaccctgcagaggccttaaatccttatactggcgttctagaattatcacatgactggatctctcctccagctttaagtcttactattcttcaccaagaatcttcttcaagccatactcatctcttttctgtcccttgaatatataacaaacattgatcacttgaagcacctattcattttgcagtctctgcag

SEQ ID NO: 104439 - DNA, 459 bp, Homo sapiens
tgtcagtcttcacaattttatcatcacacacttgagttaaattcatcagcctcctgaatgattttgacatcagtctctaccattttattctcatcaaaatactgcttttataatgacactcaacaaaaacaacaaaatttaacaagcaaaacaagacttcaccactatgcaacatgtctatgtaataaaaatgcacttgtagttttctctaagtgaatacatctataataaaaataaagattcatcattaaaatgcccatcaaaaacaccctgcagaggccttaaatccttatactggcgttctagaattatcacatgactggatctctcctccagctttaagtcttactattcttcaccaagaatcttcttcaagccatactcatctcttttctgtcccttgaatatrtaacaaacattgatcacttgaagcacctattcattttgcagtctctgcag

SEQ ID NO: 104440 - DNA, 450 bp, Homo sapiens
tcacgtggagaatacggactgcaaaaaccaagatttaaaagtctcagttgatgatttatggaaataaaaccatgcaaatatacatgaaaaaaataaaattatttaatgcctaaaataccccaataagtaatggttaaaacaatacacatatatcatctaagttattgttagccaggagtccaagaagagattatctggtccctctgtttcagggtcattcacagactacaattgagtcctggagtcgcatctgaaggttcaactgcagaagaatctatttcaaccaagctcactgacctggttgtggggaagacttgcagactgttggaacgagagcctcagcayatggctggctattggccagaggctgccccaggtctttaccttgtgggactctccaacacaacaacttattccatcaaagccaacaaaaaagaaagtctaccagca

SEQ ID NO: 104441 - DNA, 656 bp, Homo sapiens
aacattcatacaaacattcatacaagtagtaagtggtaggatagaaagttcatgcaagtccatattgcagaatatcttagaagttaaaatacagaattttgactctattctacctacattgtggaacaactgaaggcttttgacaagaaagaacattataggtggatttaacagataatactctgaaggatgaactgttatttgaatcagaataaatatttaccaatatgaaaggcacagtatagtgttgagaaagatgccttttggtgtgcaataaagaaggttgatgtgcaataaagaagtacctctgccatttggtgtttatgtgatgttgcaaagatagctaagctttgtaagcctcacttttctcatccacaaaatggagacaatagtaccatctatcttgttggctttaatgttaaacaaaaaagatagattttataatcttaaaaaaawtctgaacagagtaagttctcaataattattgcccattatcatcaccgccatcatcattattattaacatcattttaaggagttaaggtagagttaggctttaaagaagtagagagctaatgaattagacattgggcaggcaaaattcagttttctatatggtagaattcagatgttaataagctaaatagaaatgaaaag

SEQ ID NO: 104442 - DNA, 552 bp, Homo sapiens
ctgaaggagatttgtttgaaagtatttttaatgccttttaggttgcttcatattattgaggggggctccatttccactatatacaactgcctatttaaagtgccttatagctttacatagggattgggctatagttgaacatacaaaaaaaaatcaatagatgtaaaaacttggcttagttttcactccattataatggagcaatgctagatgttttaggttagtagagcaaactatttttagaaattactgaaccttaaatagattctaaatgagcagaaataagatttgagaatttttttaaaatgaaaagagattcacatttacagctttgttataatgtgaaagcattagaagaaacttacactatcaactcaggcaaagtagctcgtgtatagctatggtcaccttyaagcaagagacagtggacaaggccaggcaagtgggagaaataaaggttggagcagaactccccagcaaatttgtggttgccatattaaagaagggaaagacacacatagccagaaataaagcttctgctgtagctgccat

SEQ ID NO: 104443 - DNA, 627 bp, Homo sapiens
cttactatttcattaattttggtggatttgggagtgtaacttgggactgcacacctttcccaaagatcttgttgaccactttaactgtgggatctatggttgccagtycttctggttatcacctgacactgggaaaatctaccttaagctatcaattccccatgtctttctagtattctcttgcatagagcccaacataaaaatatctacagagaaggagatagcatgtattagtggacatcacagaatttataggagggcttccagaaaaccgtgaagtccttgaaaatgcatactttgcatatactcttcacaatcttaaaaaatgtctttcttataccaagaagcagatgtagatataaacttcttttttgcattatatatagtctttgtgtatgtgtgtatatacatatggcttcaggaacacatagtttctgagtctatgcaataatcttacctcttaggggcctaagaagttcttaaacaatgagtatcaaagtccttaacagaactggctgataaagtacaggcataagtcactatagcttttgcaagtaaattctttttattttttcagtgcaaaagggtctattcctatttcctttctctggttactttccatagcta

SEQ ID NO: 104444 - DNA, 564 bp, Homo sapiens
gtaaaattaaaagaaaagaaaactataagttgtttgtgtctttagggtaaattagtaagagtaacatggactccttaattccaggaaagtctctgaacacttctccccaatttctctatcacctccatacacacacacacaaattacatataaggccaggaggtaccctccaacttgaaaaaaatagaacaagaccatctgtggtatgggagagaacggcccttcctgtcctttagtttctagatctggccagtgacgaggaagtagwgtattagaaaaggtttaatcatctcatggtttgtgggctgtacaggcttttgcttctggggaggcctcaggaaacttaaaatcatggtggaaggtgaagggaaagcaggtacatcttcacatggctagcaggaaagagagagagagggaagggggaggtgttacacactttcaaacaaccagatctggttggaaatctattatgaaaacaacaaaggggacatcccttctaaagggggaactccaaaggattcaatcacctcccaccaggcctcttttccaacactgaagattaca

SEQ ID NO: 104445 - DNA, 564 bp, Homo sapiens
gtaaaattaaaagaaaagaaaactataagttgtttgtgtctttagggtaaattagtaagagtaacatggactccttaattccaggaaagtctctgaacacttctccccaatttctctatcacctccatacacacacacacaaattacatataaggccaggaggtaccctccaacttgaaaaaaatagaacaagaccatctgtggtatgggagagaacggcccttcctgtcctttagtttctagatctggccagtgacgaggaagtagagtattagaaaaggtttaatcatctcatggtttgtgggctgtacaggcttttgcttctggggaggcctcaggaaacttaaaatcatggtggaaggtgaagggaaagcaggtacatcttcacatggctagcaggaaagagagagagagggaagggggaggtgttacacactttcaaacaaccagatctggttggaaatctattatgaaaacaacaaaggggacrtcccttctaaagggggaactccaaaggattcaatcacctcccaccaggcctcttttccaacactgaagattaca

SEQ ID NO: 104446 - DNA, 625 bp, Homo sapiens
actctttaaatcattaaccaagactgttatctgaaaatagaagttcctcagaattctccattttgaaagtatagtagaaacttaacttaatttcatggttgaaatatatgtttaaggtcttgctatataaaatatataaataatttctggacgtgttatatactgtgtacccttcatatatgtcttaatttggtgccaatacattcaagaggaaataaaatatttgttatttttaaaatttttgaatatagatttttaaatatcttgacctgaatctactttataaacttgtagtctttatgtctgattggatcccacgtgtttttcagcatttctgtgtctaaggcagagaagtcaccatctgtttgtagtagtatcctttaggttcaggagagcacttccctgcgtccagatgaartcatcagtcaaagaaaaattgggtcagaggaaagcccaccactgatagactttctgtttgggttagccgtaatcttggtcttttgttgatgcagagcatagtgagttctgttgtaaattcttggcaggatgaggggctataatgagggctcttgtacctcccatgggctgtacatgtctatcttttatcttctcactactgttggta

SEQ ID NO: 104447 - DNA, 494 bp, Homo sapiens
tcttattaccttctttctcctaaaagagataatgggtgagaaatgagaggggagagagcaatggaaaatggactgtgttccctcccttactcaggacgaagttcagctattcctaggaaaaagaaaagagaggataattaaattagacatgaactagatgtcttaaactgggctcaaccaaaaataacattttattaattgaaaatgatcaaagagttatgcgatctatctgacatagccttaggggacaacaaaaggaaattttgcatagcctggttggatcagcaactggaggaaaagaatagacaaacattcctatatttatatcctgctaggtttatactattgataggaataaatatrgaagaaaatagatataaagcaatgaggaaagtgtataaacaagtcctaagaaatgcatgcagttaaatttgagttttacttggattagtgaggggagtgagaatgtcaaagagatactgaaaaattttaag

SEQ ID NO: 104448 - DNA, 591 bp, Homo sapiens
ctgtggcaccaatctccatgttctgattctgtgtcccagtgagggtctacactgggaactgcctgctggcctgtggggaattgttcgctttcctctgttgtcatcctgtcattgacctgactgagataccagagatcgccaaactcttggggctgcagttatggtggcacttctctcatttggggttagtgtctgatctagcagtaacattctatctctccatgtcagatcaaaggattgtcctaacccttgtaaaacatcaatatagccatcagggttatctgagtatttacctaggtctattttaatttgcttcaagtctgacaggaaaaaaagtacatacactctgactgggccaaattctccagaatacatcttaggggcatttttgccttgggrggaatgtttcccatcgctttggaggtccctttgtggtcgtcaaaatgttaccaggaggtccttgttcttagagctcccaagagggtggcgggctgcttccaagatgtcagcaagcctcttgttctctgacctgaggttcttggcctcacggattccaagaaatggaatcttgggctatgcagtgagtgttat

SEQ ID NO: 104449 - DNA, 591 bp, Homo sapiens
ctgtggcaccaatctccatgttctgattctgtgtcccagtgagggtctacactgggaactgcctgctggcctgtggggaattgttcgctttcctctgttgtcatcctgtcattgacctgactgagataccagagatcgccaaactcttggggctgcagttatggtggcacttctctcatttggggttagtgtctgatctagcagtaacattctatctctccatgtcagatcaaaggattgtcctaacccttgtaaaacatcaatatagccatcagggttatctgagtatttacctaggtctattttaatttgcttcaagtctgacaggaaaaaaagtacatacactctgactgggccaaattctccagaatacatcttaggggcatttttgccttgggaggaatgtttcccatcgctttggaggtccctttgtggtygtcaaaatgttaccaggaggtccttgttcttagagctcccaagagggtggcgggctgcttccaagatgtcagcaagcctcttgttctctgacctgaggttcttggcctcacggattccaagaaatggaatcttgggctatgcagtgagtgttat

SEQ ID NO: 104450 - DNA, 585 bp, Homo sapiens
ccaaagggggttgcccttacctggcaattttttcaattaccatttcaatatcattgcatgttattggtctgttaagagtttctaattcttcctgatttaatccgggaagtttgtgtatttccaggaatttatccttctcctctaggctttctagtttatgcatgtaagggtgttcatagtagccttcaataatcttttgtatttctgtggcatcagttgtaaaatctcccatttccagttgagcttatttggatstctcttcttgtctcactagtgttctatcaattttatttatcttttcaaacaaccaggttttcgtttcatttattgtttgtgttttttgttgttgtttcaatttcatttaattctgctttgatcttggttatttcctttcttttgctgggttagggtttggtttgttctcgtttctctagttccttgaggtgtgaccttagattgtctatttgtgccctttcgtactttttgacataggcatttaaggctataaattttcctcttagcatcacctttgctgtatcccagaggttttgacaggttgtgtcgctattatcattcagttcaaat

SEQ ID NO: 104451 - DNA, 588 bp, Homo sapiens
tctgtcccaagatcgaagcaggatgccactttacgttagtggtcatgtctccttagtctcctcaaagtgtgatagtttctcagtctcatcttatttttcttgcccttgacagcttggcaagagttgtaggtgtgtttccaccataatttatgattatccatgccttttcttccctgttattatcttggtattgtagaggaaaaggggggaaagcttcgtttttatcctttgaatgtttgctgaaaatgacctgacaaaaggcagattaatagaagaaaaaggcatacaaaatttatttaatgtgcagagggtgagggttcatagcagtgtgattacccaacaacttaatggggtacagatgcttatttacccttcacagggaacaggggagatggggaacattggtaattctttagaggggtaataagtggttattaaggagaataaagggacctggaagacagaatttaacttgtaaatgattctctttggaatctgaatgatcctgagagtcaggaattatcttgtaagaaagtccatcgaggtgtgrttgcattcttcagtgttcttttctgtgatagacaatga

SEQ ID NO: 104452 - DNA, 574 bp, Homo sapiens
atgcagtcacatgccaaagctgtgtcagctgctgtggtgagcacgagcccttaaatttcatcagtaatgctatctgtcaatctggattcaatagcagtttaaattctggtgactgtttaggaacgctctgctacactatttcaccactacactactgccataaagcaaacctagcgatcaaaaatgcttgattgattatgggcccattaaggatatcttcactttgattcatgaaacatgcattctgtgcactggaggaagaaaagctcaagtcacaatttgcaaatttacaagtcagtgtattgcctccttttccccatcgcaccccactccattcaaactgcagtattttgaaggagtgtaaaaaagttatttcttttattaaaagagctgtcggaagagcagatacataaatgtgggtgaataagtcacaggatatttacccttattaaattttcattccttacactcatctgtaccccaggyatgccatgcaatgctggctcttctttccctagaaaagtcaagaatagtggtatcaggcatttgtactccttgtttctatgcaacaaga

SEQ ID NO: 104453 - DNA, 575 bp, Homo sapiens
acagtttgacttcctttatgtcaatttggatgccattttttctcttgtctgattgctctgggtaggacttccagttctatgctgaatagatgtggtgagagtgggcatccttgtcttgtcccatttctcagtgggaatgctttcaactttcaccattcagtataatgttggctgtgggtttgtcataaatgattctaattaccttcagatatgtcccttctatgccaattttgctgagggttttagtcataaagtgttgctggattttgtcaaatgctttttctgcatctattgagatgatcatatgatttttgtttttaattcttttttatgtggtgtgtcatatttattgacttgyctatgtgttaaaccatccctacaactctggtatgaaacccacttgatcatggtggattatctttttgatatgttgttggatttggttaactagtattttgttaagaaattttgaatctatgctcatcagggatatttgtctgtagttttcttttttcattatgtcctttcctggttttaatatttggttgatatgggcttcatagaatgatttaggg

SEQ ID NO: 104454 - DNA, 575 bp, Homo sapiens
acagtttgacttcctttatgtcaatttggatgccattttttctcttgtctgattgctctgggtaggacttccagttctatgctgaatagatgtggtgagagtgggcatccttgtcttgtcccatttctcagtgggaatgctttcaactttcaccattcagtataatgttggctgtgggtttgtcataaatgattctaattaccttcagatatgtcccttctatgccaattttgctgagggttttagtcataaagtgttgctggattttgtcaaatgctttttctgcatctattgagatgatcatatgatttttgtttttaattcttttttatgtggtgtgtcatatttattgacttgcctatgtgttaaaccatccctacaactctggtatgaaacccacttgatcatggtggattatctttttgatatgttgttggatttggttaactagtattttgttaagaaattttgaatctatgctcatcagggatatttgtctgtagttttcttttttcattatrtcctttcctggttttaatatttggttgatatgggcttcatagaatgatttaggg

SEQ ID NO: 104455 - DNA, 551 bp, Homo sapiens
gatatttacacatgatgaaaaaaatggaggttcttttctctgatatttttgactctctgaacatagcaagtcttcaaaatttcgttkatccttatagagaccgggattcctagaaatcaatatccaggcatgccatattcagatttcaactacggtctgccccagctgcttttaacttaggattctcaggaagaatgtgaaagatacatattttgtatttatgtctggatgtgcatcgtaatggataaatctgttaattaaggggctttcaataaggcagggttttattgttccaaaaaactctgtggaatatcccagccaaactctctacattatgcaacaacaagaactacaaagaaacaaagacagtaccaagttctcagaaggaataagatcagtactattgagctgacatttatacaatatcagaaatgattgctgaaaaacttgccttcctgtgaagtgcaggtgtctgtgttcctggacaagtggctgatgctcatcatccaaatgtacaaattgcaaacaccctaacttctagaatcttaagc

SEQ ID NO: 104456 - DNA, 617 bp, Homo sapiens
agaaagcgacactttcagattaagttgaaatattgtcttgatggctgacaattgctactaatttcaattttaatggaaaaaaataactaaaataagatattgattcaattttgaaactatatttccttggaaaaggtttgtctcacttattacaaattacgagttatttggctgtgtgctgttcctatacattttctctctgaatgttttaaacaaaattaatgaaataagaatgctaagtttctggtttctaatatactttaacagagcaattaaacatagatttttaatatgaagtttttactatttattgcaagaaataaaaaatctcttatacatctaattatcttaagatattaatacacctctaatgttttattttttagaatacwtatatgtagttttcctcttatttcttatttattatgctatagcttaatattaaatattgcttcaaatatggaagagcagtaaaaataactttattcttacttgagtctatttttattgctccgtaaatatatttattaatggtattttttatttcagcaattatagaattcactttttgtcatgaaccctgtatcagaaacataacagaaaaaaaataggactaa

SEQ ID NO: 104457 - DNA, 394 bp, Homo sapiens
tcagacctgcatgctagagagctctcaggcaactacctggaaggtgaaatgaggagaaacaagattagttgggagactgttgtaacagactgaatgaggggaggcgaaggcatgaacttcttccaaaggagctcaaagaaaattcacggatgggggcaaatgcaagagcagtggtgtcaccaaaccaaactgtgtccatttgcacccatacaacagaaagccaaacacgaaagcaytggctttttgcagtgagaaaggcttattgtgagtcgactgaaaagaagacaggaggaaacactcaaatctgtctccacaagctggggtttgggttggattttataagcatagggtaatgaggtgtgatctgattggatcttacaataatgtgatgcct

SEQ ID NO: 104458 - DNA, 620 bp, Homo sapiens
tgggcgtggtggtgggcacctgtagtcccagctactcaggaggctgaagcaggagaatgccataaacccaggaggyggagcttgcagtgaaccaagattgcaccactgcactccagcctgggtgacagagcgagactcctgtctcaaaaaaatttttaaaaatcaatcaatcaataaaggctgggagaaccagaataaatgaaagaaagcaacatgcaaaagtggaatacaaaaaaacttccacttccaaagatgctcatctgaagattcagagtttactaaataccacacaaaattaacaatttttaaaacacccttacacacaactgtttttgaattctaaagaatcaaacgaactatcacaatgaaagagttttggtagagcagcccattataagaaaaaaagtaaaaaatgtagcagcaattgtcatttgggaaatatgagaaaaaataatctcactcggtcataacgaaaaattttcagatacctaggaacaaacttgaccaggtatgtgactgcgcagggaagaaacacgggcccacagtgtggacaaggataacacggccaagtgaccctgacagcaacatggatctccaatggcttagatggattcaagtaa

SEQ ID NO: 104459 - DNA, 620 bp, Homo sapiens
tgggcgtggtggtgggcacctgtagtcccagctactcaggaggctgaagcaggagaatgccataaacccaggaggcggagcttgcagtgaaccaagattgcaccwctgcactccagcctgggtgacagagcgagactcctgtctcaaaaaaatttttaaaaatcaatcaatcaataaaggctgggagaaccagaataaatgaaagaaagcaacatgcaaaagtggaatacaaaaaaacttccacttccaaagatgctcatctgaagattcagagtttactaaataccacacaaaattaacaatttttaaaacacccttacacacaactgtttttgaattctaaagaatcaaacgaactatcacaatgaaagagttttggtagagcagcccattataagaaaaaaagtaaaaaatgtagcagcaattgtcatttgggaaatatgagaaaaaataatctcactcggtcataacgaaaaattttcagatacctaggaacaaacttgaccaggtatgtgactgcgcagggaagaaacacgggcccacagtgtggacaaggataacacggccaagtgaccctgacagcaacatggatctccaatggcttagatggattcaagtaa

SEQ ID NO: 104460 - DNA, 588 bp, Homo sapiens
atcatttggtcctttacagataaagcttgccaactcaagttcatgaccatctctaattcttttaaatatcaagtcatgatgtgtattaatataaagattgcatattaaatgcatcttccatagacatagaaagtaaagatatraaaatcagtttgtactgattgtaagacaagtctctgaacgaccaacaagatggcccagtctgtggagctccaggcttatttacggggtgcacctcgtagtgcccacaaggaagctagatcttttggaaataattctgcaatgtggaaataattttgcaacgtggaaatactgaggcctggggctgactgatttattgatgagaaacccagggaggcattggtttggggttctgtgacatcatgttgaggcatctgcatttcctatcacactgtactaaatcagttagaaaatatcttaatttccctatcctcacatgagtcttactgggtcctgacaacctcctggcctctcaccctaatgagtcctcatttctgagtggacatttctcccaaattcagttgcaacaacagatggtgtgtggccacagcccataaaggtagagac

SEQ ID NO: 104461 - DNA, 583 bp, Homo sapiens
atggtcctggggcaccctccatgcccttgctagtcaaaagcatcttgggtctctgctcctrgaattcccacacagtgatccctggatgcctcagctgtgggtcaagaggcccaggtgtggctagacccactcttctgcaaagtacagaccatatataccttggtagcatcaatctgatatttagtcggcaggtatgcattatgcaagagctgtggaggctgtgacttccttcagttatatttcaaaagatgccacagaccacctggaagcccaggcagaaacctgctgcaatgaaactggggcaatgtctactggagctgtgggagtggggaagcacctgagatcccagaattgtagggtggcaccagcatccaattccaacctgagagagctgaagcatagactgagcccagcaaagccaagggaggcctagggactcaaacccagtgtatgcagaaagtggcacatggaatcaagagattattcttcagctttgatatttaatgttgttttctctgcttggttttggacttacctaataccagttctatgtcttttcttgcttatgtcttccttttggaat

SEQ ID NO: 104462 - DNA, 583 bp, Homo sapiens
atggtcctggggcaccctccatgcccttgctagtcaaaagcatcttgggtctctgctcctggaattcccacacagtgatccctggatgcctcagctgtgggtcaagaggcccaggtgtggctagacccactcttctgcaaagtacagaccatatataccttggtagcatcaatctgatatttagtcggcaggtatgcattatgcaagagctgtggaggctgtgacttccttcagttatatttcaaaagatgccacagaccacctggaagcccaggcagaaacctgctgcaatgaaactggggcaatgtctactggagctgtgggagtggggaagcacctgagatcccagaattgtagggtggcaccagcatccaattccaacctgagagagctgaagcatagactgagcccagcaaagccaagggaggcctagggactcaarcccagtgtatgcagaaagtggcacatggaatcaagagattattcttcagctttgatatttaatgttgttttctctgcttggttttggacttacctaataccagttctatgtcttttcttgcttatgtcttccttttggaat

SEQ ID NO: 104463 - DNA, 427 bp, Homo sapiens
gatcaaaatatgcgatcaccarttgtcactctaatagcatatagtgtgaagctgaggcaggtaatttcttgcttagaaccaatggaccatttttggtcatcatgggtaacccagagactacaggaggaataacagaatattgctaagttctttacaataaaggggattcttgtgaatactaaaaagagtgcccatgatattgcaatttggattccaaggcctttttagtaaaagttttattcaaggtagtccaagttgtaagtaacaccataaatgggcttaagtaaaatttaaataaagaattagttgcaactagaacacaaaaaggtgaaacagatgctgggcttattttaatattgtggtttttgagagggtaaataaatgtcttgacagtgttagggatggagtggtcctcagataaccaaat

SEQ ID NO: 104464 - DNA, 620 bp, Homo sapiens
gggtcacagattgtcaggcagggctgccttcttcctctgctggagatgatgatgacagctgtctgcagatctgtggatcatctagtcccctccactggtactggtcccaaaagaatcctcggcacacacctcacactcaagcctaagggcgctgcaggctctgtactaagccccgtccaggtgcaggctgctgcctccacctggaattccagccccgtcttcctgagagctcctggggctgaygcctgcccttctcccaggctcggtttcttcttttataaaacaaggaggaaaagatctccctctgctaggggtgcacgacaggatgttggaaatttctcagcactgaggatgcggtcactgtggttcctgtcacatcccgcaggccatgatacctgtcctgacccctaaatcaaatgtagttctgctctccacaaagcccccagagcatccagggcctcttccctccttctgcatgagatcctttgtgcagcctcctagactgacagtaagctccctgagggcagtgggcgggtgcacccttaccctctccattgccccagcacccagcgcaggcaatggcgcatcccagcagggacctgagagtcgggaacaaggag

SEQ ID NO: 104465 - DNA, 620 bp, Homo sapiens
gggtcacagattgtcaggcagggctgccttcttcctctgctggagatgatgatgacagctgtctgcagatctgtggatcatctagtcccctccactggtactggtcccaaaagaatcctcggcacacacctcacactcaagcctaagggcgctgcaggctctgtactaagccccgtccaggtgcaggctgctgcctccacctggaattccagccccgtcttcctgagagctcctggggctgatgcctgcccttctcccaggctcggtttcttcttttataaaacaaggaggaaaagatctccctctgctaggggtgcacgacaggatgttggaaatttctcagcactgaggatgcggtcactgtggttcctgtcacatcccgcaggccatgatacctgtcctgacccctaaatcaaatgtagttctgctctccacaaagccccyagagcatccagggcctcttccctccttctgcatgagatcctttgtgcagcctcctagactgacagtaagctccctgagggcagtgggcgggtgcacccttaccctctccattgccccagcacccagcgcaggcaatggcgcatcccagcagggacctgagagtcgggaacaaggag

SEQ ID NO: 104466 - DNA, 623 bp, Homo sapiens
gtaattccgacccttgacatttgtaatcataaaaaaaaaggcaatttataattatgttgttcaaatgaaggtgggggaaaaattcaatctgctattatacaaaagcaatgacggctgtcttcggtgaaaaaagcaacgcaagtcaatttgtgaactttggcaccagacgacctttagaaacacaacaaaatacygactttacaagcaaatagcagcccatgcaaatggcccgggcctgcctgcctgtggattagagctgcagagagcattatggagaatgcttccacaaaacaaattaagactgttacttaaatgtcacggcacactattgtatttggctacagatcattacacctgatactaacacttttaaaaactgtaataacttgggaaatattacactgagtgcccacatgtataaaggaaaagaaaaaagaggagaaaataggtttctgaagtaatttaaacatcactactctacgactgaagggaaaggtcaaaatttaagtaagctgaaaggaacacgaatggtaaaataaaacacacaaacaaaaagatgaaaagaccacaggaatgactctgcaaacacaataagggagcatgcggctttgggcaaattgcat

SEQ ID NO: 104467 - DNA, 623 bp, Homo sapiens
gtaattccgacccttgacatttgtaatcataaaaaaaaaggcaatttataattatgttgttcaaatgaaggtgggggaaaaattcaatctgctattatacaaaagcaatgacggctgtcttcggtgaaaaaagcaacgcaagtcaatttgtgaactttggcaccagacgacctttagaaacacaacaaaatactgactttacaagcaaatagcagcccatgcaaatggcccgggcctgcctgcctgtggattagagctgcagagagcattatggagaatgcttccacaaaacaaattaagactgttacttaaatgtcacggcacactattgtatttggctacagatcattacacctgatactaacacttttaaaaactgtaataacttgggaaatattacactgagtgcccacatgtataaaggaaaagaaaaaagaggagaaaataggtttctgaagtaatttaaacatcactactctacgactgaagggaaaggtcaaaatttaagtaagctgaaaggaacaygaatggtaaaataaaacacacaaacaaaaagatgaaaagaccacaggaatgactctgcaaacacaataagggagcatgcggctttgggcaaattgcat

SEQ ID NO: 104468 - DNA, 549 bp, Homo sapiens
ggcagtgatacattaatccaagccaacctttattttttatttagtgtaaatgactgcactatcttgatgtaattcttatttttaaaaggcattttaaaatcagcaattgccacattctttttcacctaagrgaaataaaaggacttttattaatctagttttatgccttccgtgattttaaatatacaaaggaaaaaaattcagatgtgtccaaggaattaacttgtctttacatgattactacatgtgttaaacaacagattatgttttctttttctttttttggtctaaagcagatattattgtgagacactgtaatctaattttcttgtctgctggttaacatcacaaaggccaagaaaatcttgtatattcaaagacagatgatagtatccaactttttcctaaaaaagtctatgttctattttcactcacaagaagcctgtatttgtgaaaaaaataagtatttccccatagtcatgtaacattgcccagagatccagaacctaatgagggaaagacagtcattaagacctttgaaatgtataa

SEQ ID NO: 104469 - DNA, 653 bp, Homo sapiens
ctttcatctgttgaaaaattgtcataatatactgattctgtttgaataagaccctttagcaccatctgcaggaaaatcatctgtgatgtctaasatgtgaacagggctctcttagagttaaaatcatgtggcttcaaaaccaaacaatttggattcagcctctagctctgcatcttccagcagctgaccttgggcaaattgcttaagttttctgagctccaggtttccctactggtaaaatgggaataatatttgtaattatcaagcttgtaaccaggattaaatgagatgatgtaaagcatttagcattatgctcatcaaatactatgggttgtggagaaaggacagaaacatacacattagcagtgctcatgatgtacattaaaaatagggaaaatgagcagagaagtagcagggtgttcattaggctctgaggtcccattatccctagagagatcccccagcacagggcacagacacaccatggaaagatcccaagagtgggaaaccatctttgcaaaaattgtatctaaggaaattatgatagtgaaagagaccaggcctaaccaactccaccttgcttctaacctttaagctgtccttgctcattcctggccataggccgaactaaccttgggaaggaatttagttta

SEQ ID NO: 104470 - DNA, 653 bp, Homo sapiens
ctttcatctgttgaaaaattgtcataatatactgattctgtttgaataagaccctttagcaccatctgcaggaaaatcatctgtgatgtctaagatgtgaacagggctctcttagagttaaaatcatgtggcttcaaaaccaaacaatttggattcagcctctagctctgcatcttccagcagctgaccttgggcaaattgcttaagttttctgagctccaggtttccctactggtaaaatgggaataatatttgtaattatcaagcttgtaaccaggattaaatgagatgatgtaaagcatttarcattatgctcatcaaatactatgggttgtggagaaaggacagaaacatacacattagcagtgctcatgatgtacattaaaaatagggaaaatgagcagagaagtagcagggtgttcattaggctctgaggtcccattatccctagagagatcccccagcacagggcacagacacaccatggaaagatcccaagagtgggaaaccatctttgcaaaaattgtatctaaggaaattatgatagtgaaagagaccaggcctaaccaactccaccttgcttctaacctttaagctgtccttgctcattcctggccataggccgaactaaccttgggaaggaatttagttta

SEQ ID NO: 104471 - DNA, 342 bp, Homo sapiens
tcttatgtgatttgcacgagcaaaagagttctaggtcaagtgaactaaaatttaacttgaatcacaaaaacacagagtcatgaccccttaatcaatacccagaattgtgccagtttacagacccaggwcccctttaatgaatgggaggctgggtctcttgaggaagggctctgctacactgccagaaatttatactgttaattttttcccagccttttgcaaatggattatagccttttaccaaggtcatcatcactgggaaaaaggaataaccatattttagggaagaagagtggacactggctctgaactgatgctaatttcaagagagcaaaaatatca

SEQ ID NO: 104472 - DNA, 531 bp, Homo sapiens
attttccttctttagtgttatgttggctattccagatttttttgcctatagaatcagtttgttgatatctaaattggcttgctgatatttttattggaattgtattaaatctagatcaagttggaaaggattgatgtcttaacaatattgagtgttccaattcataagcacagagtatctccctgtttagatcttgaatttctttgatcagagtgttgtagttattcacatataattactgtacatattttgttatatttaaacttaaatattttattttgggttactattgtgaatgctattttttaaaaaattcaaaatcccattgtttgttgatggtgtgtagcaaagcaatttacttttgcttattaatcttgtatcctgcaatcttgcaatcagttattagttttaggagctttgttgtcaatgacaatcatgtcatctgtaaacaaaaatagttttattttattttcctaattggcatacyttttattttgttttcttgtataattgtactagcttaattggact

SEQ ID NO: 104473 - DNA, 491 bp, Homo sapiens
ctctcagcatttaggaatatattcatattttccagactttttttcaacaagtacaagaaaagatttatactttcttatatagcagtcaccccaaagtactgaaagttctacaattttgtaaaggtccagtatggcccatggacactttatgacctggtatcagagatgagttcacacatggcttgaccacttgctggcagtgtgactttcacaaagacacttaaactttttaatcctcagcttcctcatctgtgaaacagaaatagtagtatctatcttgtagcattgttgtgagagtaaatgaaataaacactactactgtgtactgaacaagcaataaataaagaatatttgttgctgctactggctgctatttgtagctctctcaagacrtaaggcatctgcatctcacctagtcccatcacagatataaacataactacccatgtggtaagctgttattcttttcagtgaatagactgaaatggaaa

SEQ ID NO: 104474 - DNA, 617 bp, Homo sapiens
gcagttttaaaatatgcaattacacctcaataaagctgatttttaaaatgaagaaaaataaataaaataaaaatggaattccaaaaatgtttaacccacaagaagacataaaaaagaaaacaaagaaataacaatgaaatatagagagaamaaaaattttaaatgtcagacttaagtactaacatataaataattacatcaaatgtaagttatctaaacacaccaattaacacacatcaacagagtagtttgaaaaacatgacccaactaaatgctgtttacaataaactcacttcaaatataatgatacaggtaggttgaaagtaaaaggatggaaatatatataccatgcaaatcttaatccaaaagaaaagcaggaattgctatattagtatcaggtaaagtaagcatcagagcaaagaaaattaccaggtacattatgtaatgataaaagggtcaatccaccaagaagacatagcaatcctatttatgattaattgacatatttgtaattttgtatcatatacattttaatttgttcaagtgtccttttgtgatgtcacaaggttttcttcatctaggttatgcacatttctcaatctgtgagcaccacaatc

SEQ ID NO: 104475 - DNA, 617 bp, Homo sapiens
gcagttttaaaatatgcaattacacctcaataaagctgatttttaaaatgaagaaaaataaataaaataaaaatggaattccaaaaatgtttaacccacaagaagacataaaaaagaaaacaaagaaataacaatgaaatatagagagaaaaaaaattttaaatgtcagacttaagtactaacatataaataattacatcaaatgtaagttatctaaacacaccaattaacacacatcaacagagtagtttraaaaacatgacccaactaaatgctgtttacaataaactcacttcaaatataatgatacaggtaggttgaaagtaaaaggatggaaatatatataccatgcaaatcttaatccaaaagaaaagcaggaattgctatattagtatcaggtaaagtaagcatcagagcaaagaaaattaccaggtacattatgtaatgataaaagggtcaatccaccaagaagacatagcaatcctatttatgattaattgacatatttgtaattttgtatcatatacattttaatttgttcaagtgtccttttgtgatgtcacaaggttttcttcatctaggttatgcacatttctcaatctgtgagcaccacaatc

SEQ ID NO: 104476 - DNA, 593 bp, Homo sapiens
ctactgtgggaattgggcccccaaggtctcagacaaccccactcctatggctttgctgggcttagccttcccagcagctctcaagggttggagtcttayacctgcagatttcccaggctggagttgcatactagtgactctgaagtcctgaggtctctgaggtggccttgctgtctgggctccactaggtgtttccctgatggagatgctatgtagtagctctacccctgcagtaggtttctgcctgggcccccaggccatctgcaacatctctccacaaaatctgaaagatgccattctccacagctctggcattttgcataactacagaattagcaccaaacggacactgttaaggcttctagcatgtacttttcagagtggcaggtcaagacacacaagaacccaattgagtcatggctagggcagagaggagtgctgtaccagaatgcagggcacagaaacctgagatggctctgagcagtgagcccatgagaggcaccctgggcctatgccccgaaatcattctgccctcttagagctctaagtctgtgatggaagtgggcagcctcaaagatttttgatggccttca

SEQ ID NO: 104477 - DNA, 593 bp, Homo sapiens
ctactgtgggaattgggcccccaaggtctcagacaaccccactcctatggctttgctgggcttagccttcccagcagctctcaagggttggagtcttacacctgcagatttcccaggctggagttgcatactagtgactctgaagtcctgaggtctctgaggtggccttgctgtctgggctccactaggtgtttccctgatggagatgctatgtagtagctctacccctgcagtaggtttctgcctgggcccccaggccatctgcaacatctctccacaaaatctgaaagatgccattctccacagctctggcattttgcataactacagaattagcaccaaacggacactgttaaggcttctagcatgtacttttcagagtggcaggtcaagacacacaagaacccaattgagtcatggctagggcagagaggagtrctgtaccagaatgcagggcacagaaacctgagatggctctgagcagtgagcccatgagaggcaccctgggcctatgccccgaaatcattctgccctcttagagctctaagtctgtgatggaagtgggcagcctcaaagatttttgatggccttca

SEQ ID NO: 104478 - DNA, 601 bp, Homo sapiens
gggtatgtcttccacagggcaagggtcaggattagagacagtcttgtaaagctcctggcatagacaggaactctgcaaaagatggttttcattatgtcctgctctgcctctctttgtctttatttatcattattattattatttgagacagggtctcactcttacccaggctggagtgcaatggcacaatctcgggtcactgcaacctccacctcccgggcttgaacaattctcccacttcagcctcccaagtagcatgaactacaggcatgcaccaccacatgcagctaatttttgtaatttttatagagrcagggttttgccatgttaccaggatggtctcgaactcctgagctcaagcaatccacctgcctcagcctcccaaagtgctgggatcacaggcatgcaccacccacctggccctctctctgtctttatccacgtctgtgcacgagcacccactgcccgaaatttcccacaaatgccgatcagcaggattcccagtggccgtgactgtgggtctcttccccatctcagaaacttcccctcggtttgcaggccttggctgcctacagctcagtactcctctctttccttatct

SEQ ID NO: 104479 - DNA, 637 bp, Homo sapiens
tgtatactttaaatatatacaataacattttttcacaaagtttaaaataaataaaaatatcaattccttggtcctactcttggacattctgctttaatctggggttaagaatgagcattaagatattaaaaaatcttccctgctgattctaatggacaaccaaggtcaactaacattggcttagagcactggttctcatataatttgtggggatttttaaaggtcccaatgcccaggtttcacatctgggggtgacataagtcacttagtaaaaatgcttaagtttctattcaccactaattgtagattccagtaaagttgcaataatggcattaagagtcaccatatacacttcacccagattcctctaaaattgtgttacctaaccatagtgcaattatcgaaattaggacatgtgacagaatattttaactaatctaccggtcttatttgaatattaccagttttcatagtaatgtccattttctagttcagggtccaatccaggatcctgcattagatcctgaaaatggaggtgaaattkatataacataaaatgaatcatttcacccttgaaaaatcccttgcggaaaaaaacaataaccatttggaggagtgctggctattttgtaagtgt

SEQ ID NO: 104480 - DNA, 407 bp, Homo sapiens
aatccaggtacatgtgaattttaaaaaataaatgtactggaaaatattttggagatttgtgataatttaaaaaaacttgtagatgaactttgtaacctagaaatattgaaaaaaataaaaaggtatgtcacaaatgtataaaatatgtttagatactagtctattttatcatttattaccataaaatatacaccatctattataaaagttgaaatttattaaaacttacacacttgaagaccctacacagagccattcaaagtctagagaaaagtaaacaaacataaagatgcagtattcaatcataaytgcataaaattaacagtaatacatgtatgtactgtactactataataattttgtacccacctcctgttgttattgtggtgagctcaagtgttgcaagt

SEQ ID NO: 104481 - DNA, 599 bp, Homo sapiens
tcttttcttgaagaatagtgcattttcacaaccaaataactcaatggttccatcctatagattccaaaaagtctgacagccttccttcattttacctagcttccatcccttcagttcaaactggtaatgacccctatggtataatctgatctatatttctggcttccgctgggatggctgattaaatccattgttttcaccatctctttatcaagttgtttttaggccacatgtttagtgttctcttcagaaaaagctttctcaatttttcacaatataggtagcctgaaaatcttccaaatatccaagctcttgcatctatgcttaaaaattgcttctacaatttatttctctcttcttgcattttactgttagcagtaaggaggacccaagccmtacctttgatattttgcttggaaatctcgtctgctgaacactgaatttcatcacatgcaagttctaactttcacaaaaccctagaacaaaattcagccaagattttttttgcttctacatgacaaaaactgctctttctctagtatccaataacgttttcttcatgtctgtctaagacatcactagaatcaccctttacatct

SEQ ID NO: 104482 - DNA, 640 bp, Homo sapiens
cttagaagttgaacttttgttgtgtctcactgctgtcagctctttttctctttggaaaaacctgagatgacaactctctttcagttctttgtcagctcctgtaacatttttctccaggtctaacagttgttatggcctaatgctgaaatgtttttatcatgaaggtaaaataaaaaggagtgttttcctccagtataatttcctccagtataattgattctgtactcttgacttttcttgatatgtctaaatttttcaatrtaatcaggaaacgtcttctgctgttcctaggagtcaggtatttccctgacgtacttataactttgaaaacaatcttccagtatgtgattaaattcaagcactttttttcatcaagtctgactttcagattatctaaatgggcttctcataagaaaaagcagtcacactgcagaaggtttttctttgccttttttgtaactggtttagaaataacattttatgttttaccaagataattcctacattgtcttattaggtgtttgattgtttagaaaaactgagctttaaaataattcaaatttttttcaatccatgtaaccttctgtactgcttttaaagtcttttgattatcactttggttaaatgagtaactataatt

SEQ ID NO: 104483 - DNA, 640 bp, Homo sapiens
cttagaagttgaacttttgttgtgtctcactgctgtcagctctttttctctttggaaaaacctgagatgacaactctctttcagttctttgtcagctcctgtaacatttttctccaggtctaacagttgttatggcctaatgctgaaatgtttttatcatgaaggtaaaataaaaaggagtgttttcctccagtataatttcctccagtataattgattctgtactcttgacttttcttgatatgtctaaatttttcaatataatcaggaaacgtcttctgctgttcctaggagtcaggtatttccctgacrtacttataactttgaaaacaatcttccagtatgtgattaaattcaagcactttttttcatcaagtctgactttcagattatctaaatgggcttctcataagaaaaagcagtcacactgcagaaggtttttctttgccttttttgtaactggtttagaaataacattttatgttttaccaagataattcctacattgtcttattaggtgtttgattgtttagaaaaactgagctttaaaataattcaaatttttttcaatccatgtaaccttctgtactgcttttaaagtcttttgattatcactttggttaaatgagtaactataatt

SEQ ID NO: 104484 - DNA, 579 bp, Homo sapiens
gtgctgggtgcatatatatatttactatcattatatcctcttgctgaattgaccactttattattatatcrtaacccttttgtctcttcctatagttttgtccttaaatctattttgtgtgatataaatatagcaactcttgctcttttgtagattccattggcatggaataccttttgccatcccttcattttcagtctatgtttgtctttataggtgaagtgtgtttcttgtaggcaacagatcaatgcatcttgtttttttattcattaaatcaccctatgtcttttgattagagaatttagtcagtttacattcaatgttactattgatgagtaaggattgcttttgctattttattatttcttttctggtcattttgtggtcttttcttctttctttctttatttcttttctcttttccttttagtgatgatgattttctctggtgatgatttaattccttccttttttactttttgtgtatccatcatatgcttttttgaggttaccacgaggcttgcaaatactagcatatgatccattattttaagctgatagcaatttaacagtgtttgc

SEQ ID NO: 104485 - DNA, 579 bp, Homo sapiens
gtgctgggtgcatatatatatttactatcattatatcctcttgctgaattgaccactttattattatatcataacccttttgtctcttcctatagttttgtccttaaatctattttgtgtgatataaatatagcaactcttgctcttttgtagattccattggcatggaataccttttgccatcccttcattttcagtctatgtttgtctttataggtgaagtgtgtttcttgtaggcaacagatcaatgcatcttgtttttttattcattaaatcaccctatgtcttttgattagagaatttagtcagtttacattcaatgttactattgatgagtaaggattgcttttgctattttattatttcttttctggtcattttgtggtcttttcttctttctttctttatttcttttctcttttccttttagtgaygatgattttctctggtgatgatttaattccttccttttttactttttgtgtatccatcatatgcttttttgaggttaccacgaggcttgcaaatactagcatatgatccattattttaagctgatagcaatttaacagtgtttgc

SEQ ID NO: 104486 - DNA, 498 bp, Homo sapiens
aatcctagcaagcttaaggtaacagcacatcataagcaggtgctaagctatgaggacccaaagatgtaacaatgatacaatggactttggggactcggggaaagggtgggaggtgggtgagggataaaagagcacaccttgggtacagtgtacacattgggtacagtgaacactgcttaggtgattggtgatgggagcaccaaaatcttagaaatccccactaaagagcttattcatgtaaccagacatcacctgttcccccaaaacatattgaaataaaaaaagtaagtaaatttaaaacaaacaaacaaaaagaactgggattttgagtrcacataaaagtgattccaaaagtgtgttccacttgggtctagaatactagacccaagagatacatcctgtgaaatttaagtgtctcatggacatgataatgagatatacaagagtgaaacacttttataaaagtgttttgaaatactgtgtcttgtggcttatatt

SEQ ID NO: 104487 - DNA, 637 bp, Homo sapiens
ctcttcaccttcagctagaacctcttcyggctttgatggtttcttgatattttgacccacagactcatatgtgagggatctgagcccctgtctcaatagacaggcccacctgagctcccatataaggccaagagtactgtcccctccatttaccatcacaattaagccaaacagtaccaaaagttacctaagtggatcacctggattttatcaatttttctcctgacttttgtggtgtattagtaactccctcctcctgataatccaagccagtttctgtttttaaaatagtgatttctcttttttgcttctagtttcaaaaacaaggggttctgaatgttttgaaacaagacgtgcacaatgcctcagtgttttattgagaatataaatgtgtgttattgggctcattctttttcctactgtttgttttttgaactccgtgcactcttcctattgaggacacagtgctgtattgatatgtttgagttaacacatatactgcatcctggtaaaaggcaccattttttcatgcattcccttcaagctatgtaggtatttcagctatacattcagctcaccatctaatgctttatcaggtcagcaaatttagatggtgcaggtacgtaatatgaccagg

SEQ ID NO: 104488 - DNA, 637 bp, Homo sapiens
ctcttcaccttcagctagaacctcttctggctttgatggtttcttgatattttgacccacagactcatatgtgagggatctgagcccctgtctcaatagacaggcccacctgagctcccatataaggccaagagtactgtcccctccatttaccatcacaattaagccaaacagtaccaaaagttacctaagtrgatcacctggattttatcaatttttctcctgacttttgtggtgtattagtaactccctcctcctgataatccaagccagtttctgtttttaaaatagtgatttctcttttttgcttctagtttcaaaaacaaggggttctgaatgttttgaaacaagacgtgcacaatgcctcagtgttttattgagaatataaatgtgtgttattgggctcattctttttcctactgtttgttttttgaactccgtgcactcttcctattgaggacacagtgctgtattgatatgtttgagttaacacatatactgcatcctggtaaaaggcaccattttttcatgcattcccttcaagctatgtaggtatttcagctatacattcagctcaccatctaatgctttatcaggtcagcaaatttagatggtgcaggtacgtaatatgaccagg

SEQ ID NO: 104489 - DNA, 637 bp, Homo sapiens
ctcttcaccttcagctagaacctcttctggctttgatggtttcttgatattttgacccacagactcatatgtgagggatctgagcccctgtctcaatagacaggcccacctgagctcccatataaggccaagagtactgtcccctccatttaccatcacaattaagccaaacagtaccaaaagttacctaagtggatcacctggattttatcaatttttctcctgacttttgtggtgtattagtaactccctcctcctgataatccaagccagtttctgtttttaaaatagtgatttctctttttygcttctagtttcaaaaacaaggggttctgaatgttttgaaacaagacgtgcacaatgcctcagtgttttattgagaatataaatgtgtgttattgggctcattctttttcctactgtttgttttttgaactccgtgcactcttcctattgaggacacagtgctgtattgatatgtttgagttaacacatatactgcatcctggtaaaaggcaccattttttcatgcattcccttcaagctatgtaggtatttcagctatacattcagctcaccatctaatgctttatcaggtcagcaaatttagatggtgcaggtacgtaatatgaccagg

SEQ ID NO: 104490 - DNA, 486 bp, Homo sapiens
tgagttaatttttgaatatgctattaagtaagggctgaattcaataattattttgcatgtggatatccagttttctcagcatcattttttgaaaagactgttttttccccattaaattgtgttagcaccgttgccacaaattatttgaccatacatgttagggttaatttctaggctctctatttggtttcwttggtttacttgtctatctttatgccagtaccatgcttttctgattactgtagctttgtagtaagtcttaaagtcaggaagtatgagtctttcagctttgttctttatcaaagttgtttcggctattcagagtctgatatatcaagtttggatatttgttccccacaatgccatgttgaaatgtaatccccagtgttggagatgaggcctggtgggaggtgtctgggtcatgggggcagatccctcatggcttggtgctgtcctcaccatagtgagtgaggtctcacgagatct

SEQ ID NO: 104491 - DNA, 601 bp, Homo sapiens
aaatctgactttcacttagtatgctgatatttagtgtkggttattctgtttctgtgggtgcctagacctttgttttgttatctgtcattctaatgacttccagttgaaatgtatcttacagatatttgcatcccaagcattcagcaaattgtctagtacaaagtcaatggttaaaaaaaaaagtacttgcagagtaagtcaatgaatgaaaacattttattttgaaatgagtaggatcaggaaattgtctcagatgtctaaaaagaaggttattgtattttattatataaggcaataaaaaaagacagtggtttgtatttcacacatcatttgtatgattttttaactttcatttttagtcagcagatactcaaactttttatggcagcttctaaaaattacatttgaattttaagtcttaaatgattaaattaaaactctattccgctttccactttcaataatatttttagatcttgaacctgataaaatatgaaatccacaaattaaaactatatcctgtttccaaacactttcttcagtaatactttttatctcaaatctggtaaaatatcaaattcaaaaacatttttaataatca

SEQ ID NO: 104492 - DNA, 601 bp, Homo sapiens
aaatctgactttcacttagtatgctgatatttagtgtgggttattctgtttctgtgggtgcctagacctttgttttgttatctgtcattctaatgacttccagttgaaatgtatcttacagatatttgcatcccaagcattyagcaaattgtctagtacaaagtcaatggttaaaaaaaaaagtacttgcagagtaagtcaatgaatgaaaacattttattttgaaatgagtaggatcaggaaattgtctcagatgtctaaaaagaaggttattgtattttattatataaggcaataaaaaaagacagtggtttgtatttcacacatcatttgtatgattttttaactttcatttttagtcagcagatactcaaactttttatggcagcttctaaaaattacatttgaattttaagtcttaaatgattaaattaaaactctattccgctttccactttcaataatatttttagatcttgaacctgataaaatatgaaatccacaaattaaaactatatcctgtttccaaacactttcttcagtaatactttttatctcaaatctggtaaaatatcaaattcaaaaacatttttaataatca

SEQ ID NO: 104493 - DNA, 489 bp, Homo sapiens
tccttatacagtatgaagtagtccaggactggggtaaggagtcctaattcctatcctcttggtcaaatagaaatagatcttttaaaagattcttaatttagagaaggaaatgagaaaaccttccctggaaatattgctttaagggttccatggtgcatttaaaatcatccaattgcrcctccatccccatatgatgcttgaatacttttttgaaatcatatcaatattcagcagccctgctattgggaaattattcaacttcatctctgaattactttattaaacattgtctctattctcttcttaagaaagctagaaaatttccaggagtcatcgcctttgaggagataattttgaatgaacacttaaggactaatggaacacagaggtcagatgtccccaaacagaatctctgtttttgctctttactgtacttgaaccaccccaaattcaatactagttgcattcccaaagggaattcactcacac

SEQ ID NO: 104494 - DNA, 503 bp, Homo sapiens
tgacaaagacaagaaaatgctattacagaaaatgataactttaggtcagaaaacaagaaaagggaagaccaagaattccctaggatggactcataatcctagagataatggcaatgcaaaaaccctagagcatctgggaggcagccaacaataccgaatgctgaaaacccagagtacccaagtatgggccaacaaggggcccacaccaaatgctgaaaactccagagcatctgaggggcagccaacagtgaaccccaaagggctggttggggccacagaacaatatgactctggcatcccagagtcggcaaaatggggacttctcacaaccaagtgtcttgccttaaacaattgcccaaatacagttcacagaaaatcaaagttaaaaaaaacctcaaacaaaacatacaattgagaactgaaaataaaacggctggctcmcccaagctgagggaacctggagagactttcacccgagtcccacatagaagaccagtcagtgc

SEQ ID NO: 104495 - DNA, 575 bp, Homo sapiens
ggcttgtaggagtagctcaaatttcaaaaaacatgcaatgccttaaaccaatgctgtcgggatattaaaattaataatgtaagaaatagttaaggctaatttactggtacaagttaaatcttaaaggagcygccataacctgatgggttctgaacctgttttctggcttttgttttattaggttttggtgaggtcaggcttcagattacattttcccaactggattgtgtctcaaagtcaatagagagttttttttaaaaggcatatatataggcccaacctaaggccaattaattcagaatctctggggaatggtgtcagaaatttgtatatttttaggcttcagcattgattcatttgagcaggaagagttgagcaactctagttcaaagaaatgattcacatactcaaatgtgcaaaaccctcattaacaaaccacaatgcccattcattttgcccttgttatgagtaggtctttccactgaaatcacttccattatgtgaatcctgtaactgctacttctacctttgaaaatatcctgagtgtttattattattgctgtctaacaaataaa

SEQ ID NO: 104496 - DNA, 561 bp, Homo sapiens
aagtccagttcctcatctgggcaggaagttttaaggattgaaagcaaagactctagagtcaggctgccaagagttggcctagatatgggtccttgaacaagatacctaacttcttgaccctcagttttctcatctgtaagcaattataagttcctctacaatctaatggctgacctagtttacaaaatgaccactaaggggggtgctctaaatcacctactctgtaccctccaaactagcatgggagtgctttcagtgtggggaatagtgtcacccacctgcctggctgagcccaccactggcagaaagtccaggcaatgggaagccatagggstaaggtacctctcagcaacctgtggccatgggcaaggcctcctccttttgcagggaatgatcctcaggataaagaaagcaaagcaggacaaaggaaaatcctttctccctctcttactggcaaggcaagaattaagctcattactagttaattattcatgcagcaaaatgtaagcacctgttatgcacctagacatgagccagtcacaagggacacgatggtgaaag

SEQ ID NO: 104497 - DNA, 574 bp, Homo sapiens
gttctcgcttagagtccctcataagtttgcagtcagatggtgggtggggctggggtcatctggaaggcctattcacatgtargcctatctcctgggctggggaggcaacagctgaggctcctcaaaaatgtctctctctttctctctttatatatatattttaaatatgtattcatatatatacatacacctacatatacatacacatacatatatatatatatatatataatttgtttatatagctatatatgtggattcacatggcagcttaaggtgtccaatgccctaagataaataaatagaatcttcatggatttttctaacctagcctcagaagttacctgatgtcctttcagctgtgttcaagtcatgaaagcagtcacaaagagctgcccatactccagaaaatgggacatagactctatctcttaatggaagaaatgcccaagaatttgccgaaatattttgaaatcactacaaatggaaagaaaaacaaaaatattaaagaagtataataaaactgttgagctatatcgagtgctcatttgagataggtactcatgaattaaag

SEQ ID NO: 104498 - DNA, 517 bp, Homo sapiens
tcttgcactcttctttttccctctccttccgccttgccttaccttgccttgccttccttcgttctttcgttctttcattcttttttgacagggtctcactcttgcccaggctggagtacagtggcgcgatctcagctcactgcaacctccacatcccagcttcaagcgatcctcccaatgcagcctccctagtagctaggactacaagtgtgtagcatcacgactggctaatttttgtatttttagcagagacaggatttcactatgttggccaggctggtcttgaactcctgaccttgatctgcccgccttggtctcccaaagtgctgggattacaggcttgagccaccgctcctggccccacctsgcaatgccacaaaacctttgagctctagatgccacaagttacttagaggacgaagatagctcctgggctcagaaacatacagaagtttaacaccagtggcagggtatagcgataagtaataaagaataaagaatactgcgggcaattaca

SEQ ID NO: 104499 - DNA, 572 bp, Homo sapiens
aacacttctagtggtatgattaagaagggtataataaagtgttttaatttcctcaatattgacaaaaattgaaaaaaagaggccaggcaaagtggctcatgcctgtaatcctagccttttgggaggctgaggcaggaggatggtttgatgccaggagttccagaccagcctgggcaacatcaggagatcccctatctaccaaaattaaacaaacaaaaaaacccaaaaacaattagccaggcgtggtggtgcatgtctgtagtcccagtttctcaggaggctgagatgagaggataacttgagcccaagaggtccaggtttcaatgagtcatgtttgtatcacttaaaaaaaaaaaaaaggctgcactattagctgtttctcaggaaggttaatgtagaacataaaaggctcagtttgtagatagactgagtrtatgtgtgtgtaggaatcaaggctatacagggtccaaaaattagcctagattatgtgtgctagttccaggtatcttctatcttttagaattttaaaagaatagaggcagaaagtcacaagcttaatctagatgaggtaa

SEQ ID NO: 104500 - DNA, 374 bp, Homo sapiens
caggaaccacagttggacatttaactcagaagagggccgaagtcatggcagaaaatttgaatcctgtagccacccactccaggtaaaccccataaaccatggggtgatgactttagaaacaaaactgattaaagagtctataaggccaggaggaytaagtggcttaacccacgagccaacttctctgatggcccaacagagactgaaatgaccaagttgcttttgagcagggaaatgaacaagtttttgtccctccttgaaaggagacacaacttggcatgtggactttcagaggcaatcatggttcattccatctcaaacatttgcccattaacctccatcagaatcctgcaggcagatgccaaaagtgaggg

SEQ ID NO: 104501 - DNA, 625 bp, Homo sapiens
aacagttatcttgaaggtcattatcatagttttttctgtccttatatttgtacacctcaagttgaactgaagaacattttcatgtccacgggcaatgatctctgtggagtgcctaatcaaactgatatactattagtctactcttaatttcaaacaatgagaaaacactgaagtagtctcaggtattggggcccaggratggatacacagggagctaaggaagcaaagaggaactcctgtgtctcaggaggaaatgcacagtagctcctggttctgccctctgcatggctcctcactgtaggattctgttgttcaggtgactctgtgtctttgggtctccggattcagcctaactttccagttccttccatgcttctaccactttctctccatctcacatttaaaattccctaagagaatctgagttactgcatgctctcatctccagtccatgcacatcctcctgttatttttaattcagtttcataatttcccctttcagtctgtatccccaatcctattagcttccctcatattaaatttataaccttccacttcactctgcatctgtttatattaatgtatatgtattcctgattatacatataaataaatatatataatt

SEQ ID NO: 104502 - DNA, 625 bp, Homo sapiens
aacagttatcttgaaggtcattatcatagttttttctgtccttatatttgtacacctcaagttgaactgaagaacattttcatgtccacgggcaatgatctctgtggagtgcctaatcaaactgatatactattagtctactcttaatttcaaacaatgagaaaacactgaagtagtctcaggtattggggcccagggatggatacacagggagctaaggaagcaaagaggaactcctgtgtctcaggaggaaatgcacagtagctcctggttctgccctctgcatggctcctyactgtaggattctgttgttcaggtgactctgtgtctttgggtctccggattcagcctaactttccagttccttccatgcttctaccactttctctccatctcacatttaaaattccctaagagaatctgagttactgcatgctctcatctccagtccatgcacatcctcctgttatttttaattcagtttcataatttcccctttcagtctgtatccccaatcctattagcttccctcatattaaatttataaccttccacttcactctgcatctgtttatattaatgtatatgtattcctgattatacatataaataaatatatataatt

SEQ ID NO: 104503 - DNA, 452 bp, Homo sapiens
aagtagtgcttccttggaaaaagatcacatgggacttcatgactgtttcacagattcgtattccaggtaaggagaggctgaaggagagagacccctgascacagccttttatccagaccaagcatccagcccaaaaagtcacctgtggcagatgccaaacaagttcaggtccacgtctgtgtgtgcttctctgccttcctacctgctgtccaacaggcccagccccagcctgccctgacatcttccagaatccaaacctgccagaatccacagcctgccccctatgcctgccctcggtgccctgtccctgcccccagtgttaactagcggtcagccaggcagaaaggcctggcactgtcaacacgtgggcttccgaagccgtgacactactttgattctcactgcagagcactgcgccggctcggaaggatgccctgtgtccgcctgccgcg

SEQ ID NO: 104504 - DNA, 570 bp, Homo sapiens
ctgcaggagcagatgaaaatcgaggaggaggtaattctatctaactcattctatgaggtctgtatggcactgaaaccagacaaggacacaacaacaacaaaactacagaccaatattcctgatgaagatacatgcaaaaatcttctacaaaaaactagcaaatagaatgccaacaacacatcaaaaacataacataccatgattaggtaggattyatgcaaagatgattcaacatacacaaatcaataaatgtgatacatcacaaaacgaactaagaacaagaatcatatgatcatcttaatagatgcagaaaaggcattcaataaaattcagcatcccttcatgataaaaatcctcaacaaactaggcatagaagaaacacacttccaaataacaaaggccatatatgacagtcccagagccaacatcatacttggtggggaaaatttgaaagaattgcctctaagaagtgaaacaagataaggatgcccacattcaccattcttattccacacagtaccggaagtccttgccacagcaatcaggaaacatagaaaaataaaaggtatc

SEQ ID NO: 104505 - DNA, 597 bp, Homo sapiens
caaatgttgaaatgtcctcaataatgaagagatgtcccttttgtacatctgcatctgtgaaagataacatttcttggccgggcgtggtggcccatgcctgtaatcccaggactttgggaggctgagragggcagatcatctgaagtcaggagttcaagaccaacctggccaacatggcaaaaccccatgtctactaaaaatacaaaaatttgctgactgtggtggtgggcatctgtaattccagctacccaggaggctgaggcaggagaatcgcttgaactcgggcagcagatgttgcagtaagctgagatcgcaccactgcactccagcataggcaacacagcgagactctgtctcaaaaaaacaaaacaaaacaaaatttctcaagacttgggcactttaagcaactgtgtatgcggtggtgacccatagaggtttctgactgacctcatgataagtctcaggtcatttttcatggtatttcagatgatcaaagctgcaaacctgagtgcacaagattaccaaccacagtaataaatattgatacttttccttttttaacctattactttaagaatatgattcatcttctcacaa

SEQ ID NO: 104506 - DNA, 500 bp, Homo sapiens
gaattccttcctactggacctagtcatcaattctgctggaactcaccaaaaactaaaaaagcctggcagtgattccttttttttttcttaattaaaactatcttgatgttctcttgaatgatgatctgctatcttkgttaaagtatttaattacagcattggatgtaattcccctggatagactcaatgagtttttgctactggagaccttcaggaaaaacccctatgtaggatctgagacactgcatgctgacacatgtgtgcatgcacacacacaaacacgcgtggacacacacaggcacagatgcacactccatcaagtgatgcttccttctcatcagacacttcagactatgactcctgttgtccagcaagatacaacaaactgtatgcttttccaagacacagcctgcccttctaaataaggaaagagaaatccagtgtccataggtctttcaatgacagttcacttttgtaggtatgttgtaaccaaggctctt

SEQ ID NO: 104507 - DNA, 595 bp, Homo sapiens
ggtccattttaccggcgaggaagccccggctccgggaggggaggagcgcgcccaaggtcaccagccagttgagtgagtggcgggcggatcccaaccccgagcgacgcccacggcctgtctcggccaccagcgtgttccagcgagcgcccagccacctcgctcgcagcctccccagcgcagcagcccggctgtgggcctgcggcagccgggtcttcctggtccccacctcctggggccgacgggcggcaggaaggggctcggcgggacgcgccrtcagggacctgaggaggaacaacggaacgcgttcggaacggcctggactcccgagactcacccgactcgtggccacaccgggagaactgaagcggcagtagccggcggagacgcccgacccgaaggccggctgctagggagcagacagctgaaccgcttgccagacgccgaaacccagtgacgccctccaccgctccaccgtgctcccggctcctcgcccccgccgcccgcgggccccaaggcgcatgcgccgcctgtcctggaggggcccatttccgtccgtcgtggggggaggcacagtgagtccactggggcacggcag

SEQ ID NO: 104508 - DNA, 595 bp, Homo sapiens
ggtccattttaccggcgaggaagccccggctccgggaggggaggagcgcgcccaaggtcaccagccagttgagtgagtggcgggcggatcccaaccccgagcgacgcccacggcctgtctcggccaccagcgtgttccagcgagcgcccagccacctcgctcgcagcctccccagcgcagcagcccggctgtgggcctgcggcagccgggtcttcctggtccccacctcctggggccgacgggcggcaggaaggggctcggcgggacgcgccatcagggacctgaggaggaacaacggaacgcgttcggaacggcctggactcccgagactcacccgactcgtggccacaccgggagaactgaagcggcagtagccggcggagacgcccgacccgaaggccggctgctagggagcagacagctgaaccgcttgccagacgccgaaacccagtgacgccctccaccgctccaccgtgctcccggctccycgcccccgccgcccgcgggccccaaggcgcatgcgccgcctgtcctggaggggcccatttccgtccgtcgtggggggaggcacagtgagtccactggggcacggcag

SEQ ID NO: 104509 - DNA, 489 bp, Homo sapiens
ttggaagcagatgctctctcaaagtcctcagataagagttcaggccagccaacactttgatctaggccctgtgaagactctgaacagagagcaatgaggtgtttatcacagctctcgaatccctgtgcacctcagctatcccaatctatacgcacagagattaaagaaagcactaaaaattgaatgttaactgattgaattagtgattccattggctccactgcatgcctatgaagttagtattagaagaattaagtgaaagaaggaagaaaattgtctatccctaaaggtgtttaattagaatatccctttctttgtgactgctctctatttttggtaagagcatacttttttaaattgaaacaaaaattgaatattaattgtagtcagcactcccctyatttccatatctacttctatcacctctattttaccttgtgctgaaatatttaagtaaccagaaactaagttatggtaggcagaattcta

SEQ ID NO: 104510 - DNA, 575 bp, Homo sapiens
atcaccaggaatgatgattgatgcagtggaacaggctggtggaggatgtcagttgattcacccagatgcaaccaccaaaggggcaaaactagggtatagctctgtgcctcttctgtctcacccgtaggtgaagaattggtggatttctggatccttgctgagaacatcctgagcatagatgagatggacctggaagtgagagactactacctgtccctcctcctcatgctgagggccactcatctgcaggagggctccagggtggtaaccctctgtaacatgaacatcagtaagaattataaagcatctttttggggggatgcaacaaaaaagtaaatccagtgtctgataatcctcagtctccttctttgcaggaaaccccaccttctttccatcttctatgtatcagagaggctagtggcaaccccaacmcttaaccaggaaagtattgaaagacacagttgtccttaagctggcacttgcctctctctaagatactacctgccaatgaaggctggctggaaggagcggggaggaattggggcaggatacttgaaaagcacctgtaacattta

SEQ ID NO: 104511 - DNA, 635 bp, Homo sapiens
tctgagttttctagcttggaagatggggttgattggagaaaagaaataaaggggccaaaactgatttgggatacattaaatttgtgctgtggatcctgttagaatggattaaatttgcagtggatcctattagaggagaagctaggggctagggatctcaagcaaatgggagagtgcgttgtaagaaggtaagttcaacaggagagccacagggrgcactgatatttaaggaagaagcagaagaaatgtgaagaagaatcagaaagaatagtcagagctatgacaagagaaagaaaaaaatggtgttcccaagtctctaggaggcaataatcgcatcagaggcccagattgtgcgttcatacattcttctctaaggaaggtggtctaggaccatggtcggtagaatttctggtgaccaccctaggatatccatgctctaaactctagaatctgtgaatgtgtgaccttacatagcaaaaggaatttggtgggtggaattaaggctaaggaccttaaaacagagacattattctggattgtctgggtgggcccttaaaagggagttgggaggcagaagagggaaccagagagatgtgatgatagaagaagaggcaggagaaattcaaagaacgggc

SEQ ID NO: 104512 - DNA, 570 bp, Homo sapiens
aggaactgccaggtgtccagttttagyatatcagtgaatatccgcaattatctgaaaaggctgttaaaatactcacgtgttttccaactacgtatatattgagactaaattttcttcatctattcaaaccaaaacagcatattaaccaagattgaatacagaagaagatacgagagtccagtcatcttctgttgaaccacattatggagattttttttttttccttttttttttttaagagatagggtcttgctctgccacccaggttagagtgcagtggagcaatcctagctccctgtagactcaaactcctcaggcttaagtgatcctcccactgcagcctcctgagtagctgggaatacaggcacatgccaccatatgcagttaatttttttatttttatttttcttagagaagaggactcactttgttgcccgggccggtatcaaactcctagcctcaagtgatccttccaccttggcctcccaaagtgatgggattacaggcatgagccaccgggcctggatgaaatttctaaaaatgtaaaacaatgccttatgtaagtgatag

SEQ ID NO: 104513 - DNA, 570 bp, Homo sapiens
aggaactgccaggtgtccagttttagtatatcagtgaatatccgcaattatctgaaaaggctgttaaaatactcacgtgttttccaactacgtatatattgagactaaattttcttcatctattcaaaccaaaacagcatattaaccaagattgaatacagaagaagatacgagagtccagtcatcttctgttgaaccacattatggagattttttttttttccttttttttttttaagagatagggtcttgctctgccacccaggttagagtgcagtggagcaatcctagctccctgtagactcaaactcctcaggcttaagtgatcctcccactgcagcctcctgagtagctgggaatacaggcacrtgccaccatatgcagttaatttttttatttttatttttcttagagaagaggactcactttgttgcccgggccggtatcaaactcctagcctcaagtgatccttccaccttggcctcccaaagtgatgggattacaggcatgagccaccgggcctggatgaaatttctaaaaatgtaaaacaatgccttatgtaagtgatag

SEQ ID NO: 104514 - DNA, 564 bp, Homo sapiens
tttctcgtatacttttattgacaaaagattctatataattaattttggaaaacttcaatgaagattttatgagtaccagctttcttgattctctttattgcccaattatttcatatatatgtatactctaccattaataatattaataatatgttgagtacatggctagtgtattttttttaacttttatatgaatttcagtactctgcaactaattttacatttgtttaaggtagattcatttaggggccctgctgtgttctgatgccaactacctcagaagtagcctgggtttcactttcttasttttcatatttatctcagattaccttagtgttcatatgaacctaaacttaaaacccttttattgtgagatagaatacttacatagaaaatcacataaaatataaatgtagaccttaaaaagaagatattcagttaaaaaatagatctgccatcagtgggaagaggaaaacaaaaacaaaaagcaaaagaaaacagaaatagaacattgccaaaattttctttttggccttttttatttcaatgttttctttctgccct

SEQ ID NO: 104515 - DNA, 609 bp, Homo sapiens
aaattttgaagcatattggtgtctggagcataccaactgagcaaatggaactaggaaggaaggaaagaaagtggaatcagctgctgataaattacttaggatgcttggggagcattatgtccaataaaatcaggatctgttaaggaagaaaaatagagaaaaagatgctggtagataaaaattaaatatatatatgtatatatgttacatatgtatatatgtgtgtatgtatatgtgtgtgtgtatatatatgtatatatgtgtgtatgtatatatatacacatacacacatatatatacacacacatattatattcctatgtgtgggtgaaagtgtgttaataagaaacaaacaccagktactccttatttacttattttttggtgatttgggagcttatccaggaaagaatagagcatcactaccctcaactcctatctgataatgaaaggtcttcattttattttaaaaagtctgaacttcttgtatggactttcttaacgatgaggatggggtagtagctttttgcaatagttccattgaggatgatgattctttatttttttcagaactgagattagtgatttgagctgcggcagcagggttaa

SEQ ID NO: 104516 - DNA, 609 bp, Homo sapiens
aaattttgaagcatattggtgtctggagcataccaactgagcaaatggaactaggaaggaaggaaagaaagtggaatcagctgctgataaattacttaggatgcttggggagcattatgtccaataaaatcaggatctgttaaggaagaaaaatagagaaaaagatgctggtagataaaaattaaatatatatatgtatatatgttacatatgtatatatgtgtgtatgtatatgtgtgtgtgtatatatatgtatatatgtgtgtatgtatatatatacacatacacacatatatatacacacacatattatattcctatgtgtgggtgaaagtgtgttaataagaaacaaacaccagttactccttatttacttattttttggtgatttgggagcttatccaggaaagaatagagcatcactaccctcaactcctatctgataatgaaaggtcttcattttattttaaaaagtctgaacttcttgtatggactttcwtaacgatgaggatggggtagtagctttttgcaatagttccattgaggatgatgattctttatttttttcagaactgagattagtgatttgagctgcggcagcagggttaa

SEQ ID NO: 104517 - DNA, 609 bp, Homo sapiens
aaattttgaagcatattggtgtctggagcataccaactgagcaaatggaactaggaaggaaggaaagaaagtggaatcagctgctgataaattacttaggatgcttggggagcattatgtccaataaaatcaggatctgttaaggaagaaaaatagagaaaaagatgctggtagataaaaattaaatatatatatgtatatatgttacatatgtatatatgtgtgtatgtatatgtgtgtgtgtatatatatgtatatatgtgtgtatgtatatatatacacatacacacatatatatacacacacatattatattcctatgtgtgggtgaaagtgtgttaataagaaacaaacaccagttactccttatttacttattttttggtgatttgggagcttatccaggaaagaatagagcatcactaccctcaactcctatctgataatgaaaggtcttcattttattttaaaaagtctgaacttcttgtatggactttcttaacgatgaggatggggtagtagctttttgcaatagttccrttgaggatgatgattctttatttttttcagaactgagattagtgatttgagctgcggcagcagggttaa

SEQ ID NO: 104518 - DNA, 630 bp, Homo sapiens
gtcctttctcagatagctatggacatgtgaacaagagaaactagtagaacttgagctgaccctcaaggaaaatgccttgaaagggcttggcttcttgaaatcatctcctcggaacctgggaattgttctgggtcaattggaccccagacttccatgaatgctagcccacatgtaaagccttgggcgggtggtgctacaggcagtaaaggaagaatggtggggacaggtgaggcctctctacctttatctatgctgaggagcagcttcctgagcagcagcagcaccagggaggagggcagygacccagagagggcggggccagagagggcgggaggggctgtagacctgaggagcaggagacccagagtgggcgggaggggctgtggacgtgaggagcaggagcagaggcgatatctctggagcatcatacaatacactcttccttcttcccatttatgacctggaaaggactgacctctgaatagaggggagggaggcccttaggtcatgtggttattgagctaggttttcttaattgggctgttaaggccatttacagactccttttaatttatctatttagtccccactattccagttgagataaaaactggtgattgttaaaatgtg

SEQ ID NO: 104519 - DNA, 562 bp, Homo sapiens
gtattttaacatattgactaaccatttctctgttgctagacatttggactgttttcaatggtttggtatctcttcgtatataaatttcagargacattcggacctcctgtaaaggccaggtaatacatattttggggcttctgggaccacataaggtctctgttgcatattcttttaaaaaatttcttgttttcttttaacaacccttctcaaatacaaaaaccattagcatgagggctgtgtaaaaacaggccacagactagagctggccctccaacagcaatttgcttagcccttaattgagagtttttaaccagtctgggcctctttggaagttcactctaaaggcataatctcaattttagaagctggcaacacccaagagagcaattgttagtctctagtcccatggatgtggtgttcttcagattcctctgccaatatttttcttgttaggaaagcatgatgtgaaagtggtgacaggatggagaatgacaatggccagtgtatgtgagtttttgtctaagctaattcttatgcaagacaccggctgaaacaggtg

SEQ ID NO: 104520 - DNA, 580 bp, Homo sapiens
tggtatagatccctgccactgatgggcgccagagatgtctctttcctcttctcaggtccagcatctcttcttggtatgagggaaatccctccctctagcactgtttccatcagagaccctcaccttaagctctgttcacctcagtgagcttagggcttgggaaatatgagccaggaaagggaagagtctgcagtcaactctgtggtcatcctgcccagtcggccctgaggctgagaacagatccttttagaatggggacagraaaaaggggaactgcagggagaaaaacaaattaaactttgaaacaattactgggccatatacatatcgaaggtgatgatataattaaaggaccggggcagtatacacacattccaacaggtgcaaagacagtcaggaaagggcctgatctgtctggagaatggtgagtccccggggaatgaggaagaagaggctgggacagggtggagggtgtcagggccttgatggacagccttggatgactgcttctggaatttggattttattctgaaggccacacaagtcaggaaaggtcagtaagctatgctgagacatgatc

SEQ ID NO: 104521 - DNA, 461 bp, Homo sapiens
tagggaaacgagggggcttttaaattcacagagattagaagtccagacaatgcaggaaattcacagataatatccaaagtagccaacctgccctccaaaataaaattctgatttgacccagtgaggtaagcccaggtaaggtgagcttcacttcctgccagccgtctccaagagtctgttctagtttcatctgtccagtttaaagcaggcttctctttccactcaagtgtttggattccagattcaaaagaagttttaaaaatcaggacttacctcatttacctaaagattctgggtgggaaatccaatagctgtggctgwtggaggggaggcagcaggctgcaatctcaccagctcctatagggatggggcaccacgggtgttatcaagtctgagccctcatcagagtgaagataaatgcatataacaataattttaaatcattttgtaggatgttaagc

SEQ ID NO: 104522 - DNA, 561 bp, Homo sapiens
tattgactgatgtatgttaaaccactcctgtatccctggtatgaaactcacttgattatgctggattatctttttgacatgttgttggatttggttagctagtactttgttaaggatttttgcatgtatgttcatcagggatattggtctgtagttttcttttttggttatgtcctttcttggttttggtattagggtgacactggcttcacagaatgatttagggagaattccttctttctctaycttgtggaatagagtcaataggattggtaccaatcgtactttgaatgtctggtagaattcagctgtgaatccatctggtcttggacttttttttgttgctaagcttttaattaccatttgaatctcactgcttgttattggtccgttcagggtgtctaattcttcctgatttaagctaggagggttgtatctttccaggaatttatctatctcctctaggttttctggtttacgggtgtagaggtgtttatagtagccttgaatgatcttttgtatttctgtagtgtcagttgtaatacctcctgtttcatttct

SEQ ID NO: 104523 - DNA, 638 bp, Homo sapiens
tacttaaatctcctgcaagagttaagaatttgtagtcaaaaggatttatctgagtgatcttccttcacttgttacatgagaatgatgctaaagatgggtatattttatgcacacaaatacctgctatctttagacctcagttttttctatttgtaagacaaagggaatagatcaagtttcaatgtatttccacatttaaaaccctatgttcccataaaatgttaagtacatgaagcagaagctgcaaaaatcaaattagaacccatscatacagacctaaagaaaatctacaaaatactatagaattcaggaattgtgcttagccagtgttaagaccaagaactgtccagattcacagatactgaataggtgatgttgcttttcttgtctacttggctatatccgcccccatttcctaaaatcgttatctgcgtacttttgagtattttgtatattgtcatacaaactacacagtggttctaaattatagaacatgagggagacttcttctgattttgaagcatgagtaccctgataagtcacaaatttcagttcaatgtctcttttatctattttaaagcaaaccacattctccagccatatctgaagtttgaaaataggactaaatattggagatc

SEQ ID NO: 104524 - DNA, 638 bp, Homo sapiens
tacttaaatctcctgcaagagttaagaatttgtagtcaaaaggatttatctgagtgatcttccttcacttgttacatgagaatgatgctaaagatgggtatattttatgcacacaaatacctgctatctttagacctcagttttttctatttgtaagacaaagggaatagatcaagtttcaatgtatttccacatttaaaaccctatgttcccataaaatgttaagtacatgaagcagaagctgcaaaaatcaaattagaacccatgcatacagacctamagaaaatctacaaaatactatagaattcaggaattgtgcttagccagtgttaagaccaagaactgtccagattcacagatactgaataggtgatgttgcttttcttgtctacttggctatatccgcccccatttcctaaaatcgttatctgcgtacttttgagtattttgtatattgtcatacaaactacacagtggttctaaattatagaacatgagggagacttcttctgattttgaagcatgagtaccctgataagtcacaaatttcagttcaatgtctcttttatctattttaaagcaaaccacattctccagccatatctgaagtttgaaaataggactaaatattggagatc

SEQ ID NO: 104525 - DNA, 597 bp, Homo sapiens
tgtaatctttgagatatttgaaagaatgggaaaaatttcataatgcaatgcatatttatattacggcattcccttccattactttcctaagtagcccttctttactttttgggaaatcaccattccatgtgttctttgaagtgtggtcttgagatctctggggttttctaagtacctttccagaagttcacaagctcaaaactatttttataatagaaaatttttagccattytcactctcattctctcataagtacatagtgaaattttccagaggttatatgaggtgctaccataacagattaaatgaaattgtaaatgatgttgtgagatttcagctctattatcttaacttagacaataaaaatatttgcaaaggaaaatgataccatttttacaactaatttcttgaaaaacagtgattttaacaaaaagtaccaaattatgttttatataatagtttgttaatattattttaatattaaatatttaaattttgctctaatgtctaataatataaatattatggatgtaattcagagaaactaaaattctgagtatctcaatagtttctagatgagacaaagattcctagta

SEQ ID NO: 104526 - DNA, 597 bp, Homo sapiens
tgtaatctttgagatatttgaaagaatgggaaaaatttcataatgcaatgcatatttatattacggcattcccttccattactttcctaagtagcccttctttactttttgggaaatcaccattccatgtgttctttgaagtgtggtcttgagatctctggggttttctaagtacctttccagaagttcacaagctcaaaactatttttataatagaaaatttttagccattctcactctcattctctcataagtacatagtgaaattttccagaggttatatgaggtgctaccataacagattaaatgaaattgtaaatgatgttgtgagatttcagctctattatcttaacttagacaataaaaatatttgcaaaggaaaatgataccatttttacaactaatttcttgaaaaacagtgattttaacaaaaagtaycaaattatgttttatataatagtttgttaatattattttaatattaaatatttaaattttgctctaatgtctaataatataaatattatggatgtaattcagagaaactaaaattctgagtatctcaatagtttctagatgagacaaagattcctagta

SEQ ID NO: 104527 - DNA, 635 bp, Homo sapiens
gcactccagtgtttgttgcagcactgtttacaatagctaagatttggaagcaacctaaatgtccatcaaacagatgaaatggataaagaaaatgtggtacatayatacaacggagtactattcagccataaaatattttcaaattatcatgggtttattgcagcataaccccattgtaagttaaggagcatctatatataatatcatatattatgtattgtatattattacatgtgataaaagtaagtttaaatagaagaatctacaggaaaatctaaggctgcttattggcaatattagtgaaggttctagaaagcatagttagcaaactcaagctgaccccttaaactaagacaaatatataggcacagtttagaaattccacaagagactataaggatagtaagtgtgggaatgtttactctggggtccaaagaggagaaggagttcctggcatctggaggcccagagagcattgcagatagaagttgcaatttatttggaggtactcacagagcccgtggtgacctgcaggtcacctgcaatgaaggagcaggtgggaaccagaataaatatctcgacctcactcacttccccctcacctgctggtgcttcctattttctgaacccaagca

SEQ ID NO: 104528 - DNA, 635 bp, Homo sapiens
gcactccagtgtttgttgcagcactgtttacaatagctaagatttggaagcaacctaaatgtccatcaaacagatgaaatggataaagaaaatgtggtacatatatacaayggagtactattcagccataaaatattttcaaattatcatgggtttattgcagcataaccccattgtaagttaaggagcatctatatataatatcatatattatgtattgtatattattacatgtgataaaagtaagtttaaatagaagaatctacaggaaaatctaaggctgcttattggcaatattagtgaaggttctagaaagcatagttagcaaactcaagctgaccccttaaactaagacaaatatataggcacagtttagaaattccacaagagactataaggatagtaagtgtgggaatgtttactctggggtccaaagaggagaaggagttcctggcatctggaggcccagagagcattgcagatagaagttgcaatttatttggaggtactcacagagcccgtggtgacctgcaggtcacctgcaatgaaggagcaggtgggaaccagaataaatatctcgacctcactcacttccccctcacctgctggtgcttcctattttctgaacccaagca

SEQ ID NO: 104529 - DNA, 635 bp, Homo sapiens
gcactccagtgtttgttgcagcactgtttacaatagctaagatttggaagcaacctaaatgtccatcaaacagatgaaatggataaagaaaatgtggtacatatatacaacggagtactattcagccataaaatattttcaaattatcatgggtttattgcagcataaccccattgtaagttaaggagcatctatatataatatcatatattatgtattgtatattattacatgtgataaaagtaagtttaaatagaagaatctacaggaaaatctaaggctgcttattggcaatattagtsaaggttctagaaagcatagttagcaaactcaagctgaccccttaaactaagacaaatatataggcacagtttagaaattccacaagagactataaggatagtaagtgtgggaatgtttactctggggtccaaagaggagaaggagttcctggcatctggaggcccagagagcattgcagatagaagttgcaatttatttggaggtactcacagagcccgtggtgacctgcaggtcacctgcaatgaaggagcaggtgggaaccagaataaatatctcgacctcactcacttccccctcacctgctggtgcttcctattttctgaacccaagca

SEQ ID NO: 104530 - DNA, 635 bp, Homo sapiens
gcactccagtgtttgttgcagcactgtttacaatagctaagatttggaagcaacctaaatgtccatcaaacagatgaaatggataaagaaaatgtggtacatatatacaacggagtactattcagccataaaatattttcaaattatcatgggtttattgcagcataaccccattgtaagttaaggagcatctatatataatatcatatattatgtattgtatattattacatgtgataaaagtaagtttaaatagaagaatctacaggaaaatctaaggctgcttattggcaatattagtgaaggttctagaaagcayagttagcaaactcaagctgaccccttaaactaagacaaatatataggcacagtttagaaattccacaagagactataaggatagtaagtgtgggaatgtttactctggggtccaaagaggagaaggagttcctggcatctggaggcccagagagcattgcagatagaagttgcaatttatttggaggtactcacagagcccgtggtgacctgcaggtcacctgcaatgaaggagcaggtgggaaccagaataaatatctcgacctcactcacttccccctcacctgctggtgcttcctattttctgaacccaagca

SEQ ID NO: 104531 - DNA, 488 bp, Homo sapiens
tttcagcaatctcagccttgcaggagatacaagagataagggtttgttaccactcctctcccccgccgccggggcagaccacagaagctttcaagtaatttatgcagtattttgagctgagaatttgaaactctgagcttattcttttctttccccactttctccagctcagctgrgagcagctagcgaatcttattatacttactaatttgactaaaatgttctaaggtatcaaatgcatagtcacccagaaccttgccttttattagtattcggctagtagtatctaatatttgggacatacttgtactaaaaaatcatacattgtttatctgaaattcaaattgaactaggcattctgtatttggtctggcaaccttgctttacagaaatcctctttatcctccaaaattgaagtatatttccaatagactgctccagaaagaagttattactttaattaatattatttattgaccacttacaat

SEQ ID NO: 104532 - DNA, 509 bp, Homo sapiens
ggggcaaagtggcaagagaaggttgctcagaattgtcatttaaattgaaaccagaagttcactgtgaattagtgggagaaagaaaatggatttgcaaggaggcctggatattttctaaaatataaattaccattttccctgaccaactactccagtgtagagggagaaaggtagtgcttctgaaataaacatcccacattatttgagttttttttctaccagttgggctgattttccatatacctagtgccaacatcctgggtaacatcagatggcagcagatgacycagagatgatgaccctgagcatgatactggcacagagcagcttccaggaacctgaagccactcatgcatgcatccattccgttgttcaacagcagttgctattgacttactatggcccaggagccaggctagagctggaggagtacgaagagggagaagtgaacttagctcctacaaagcttaatacaaagtagacaatgggtagtgtaagaggggccacag

SEQ ID NO: 104533 - DNA, 542 bp, Homo sapiens
atgtcatagagctggagtcatatagaacacagccttttcaggttggcttgttttgcttagtaatatgcatttaacattcctccatgctttttatgacttgatagctcatttctttttaatactgaataacattgaattctctggatgtacatagattatccattcacctactgaagggygtcttggttgcttccaagttttggcaattatgaaggaagaggctataaacatctctgtgtgggtttttgtgtggatgttaagttttcaatccatttgagtaaatataccaaagagtgcaatttctggatcatattgtaagggtatgtgtagttttgtaagaaacctccaaagtgtcttccaaagtgcctgtaccattttgcattcctgttagcaatgaatgaaaattcctgttgctccgcatcctcaccagcatttggtgttttcagtgttttggattttggccattctaataggtgtgtagtgatgtgtcatgattgtctgaatttgcagcttcctaataacatatgatggtgagcatcttt

SEQ ID NO: 104534 - DNA, 608 bp, Homo sapiens
agtgtttgcatcagcagactgagtaaagaagatggccctcagcaatgtgggtgggcatggcgtaatccgctgaaggcccagatagaagaaaaaggcggaaaaagggtgagttctctgtcttgttgagctgctacattcatctcccacccttggagactggagctcctggttctcagggctacaggctctgggacttacaccagtggcctccccagttcttggtcttcggacttggactgaatgacatcactggcttcctgggttcttcagcttgcagatggcagatcatgggacctctgggccaccacaatcatgtaagctaattcccataataaatctttgcctatatatactgtattgattctgttyctctggagaaccttgagcaatacagtcattttgctcctatgcagttatactgtagaataaatttctagaagggaatttgctgggtcaaaagttatgtgcttttataattctgatagctatcgacaaatttctcatcacagagatcataccaatttgttcctcaatcaataatgtataaaagagctttgtcctcctacacagggtatgatcaaactttacaattcttggcactctgataa

SEQ ID NO: 104535 - DNA, 568 bp, Homo sapiens
ctttcaaggcagaaaaataaggcttttgtgcaggcgtttcttaggagaaaaaaaaggaaggtttcccatgttgatttttatagtgttatttgggccacaaagggagttagtcagaacaggacagccctaaaccttattgagccccagtggtatatgcctcttgccaatatagccagctatcaaaacaagagagacacaggaagcatattgtgctgagcctcagtggtaccgtaattaccgcacacttgggttttaacacctaaaccctggctcttacttaacagcaataataataacaaatgtcacccagacagtggggcattctgctatgttttaatcccattttcagagagtgtctataaggataagggctttttatttggggcagacttgcagaaagataaaatttggggtctgtcactgcatttatccaccagtctgtcattgggttgtaaggaactaattcatcactctaatatttttcctttgtcctgcaargagagttgcttctgaggctctcaatgtggccctttaacagaaataaagctatccttttcccagcaaagag

SEQ ID NO: 104536 - DNA, 606 bp, Homo sapiens
gtgcttgaaggcaaagtcctcctgaaaataaattataccagatttcaatgtcttctcttcagccttcatgttggaaagggctgactaagagagttacatcattgttggctcttctctttggcttaaaatgtccttgctacgtgcactaatgtctcaggctcaggcctaatatgagaattagcaaaggaaattttattggatgtgagtgtggaaatagaatgggcattcttctggtagtgtcagagttccagagggagttattaaacagtttccaagttattactgcaagcaagtccacacatatgcacacacacacacacatacatacacacagacacgcacaaggatgccgtttctctgctttcyaaattcttgcaaggccccagaacacatggacatgaatctacctattctgtgattctctgagttttggggaaatattggtctctggaaacatctaatgtcatataatcattcatactcaatgagagcctgacatgcccaaagagacaatttgttctcaggggagcaacaaaacttatatattacaatgatgtatggcctcagtacacataaatatatacagtatatttttggtattgaatt

SEQ ID NO: 104537 - DNA, 550 bp, Homo sapiens
atatatgttccaaaatggtatggtatttctaaaattctaatgtgtctgaatatatgctattaatcataattatggttattaagtgtagttattgaagaccaagaaataacctaatttctttgtcaattgtgtctttcactatggctatttaaagtcattaccatasttaattgcttgatgctgatgcagtttttgaaaacttcaccagcgtgcaaaatcctagaatatggtgtcttttaggagattcatgaaaagatggaaaggaccctgaaaagcactatcgaatacagatttctggctgctaacccaagtagaacaaaaattaattgaataccaagaaaatactttgccagattttcatgctaaatcagccagtactgaaattgtttagacatacaatttgaacaaactccatgatctatgtcaaattacctacaataacccatcagttatcagtgctatgcacctaaatttgagaaacaatttgtattcaagaggacataaattcaatgataagcttggacttatggagaacaaggatgtcaccttg

SEQ ID NO: 104538 - DNA, 386 bp, Homo sapiens
atgtttgaaagtcatgtgcttcttattagtagactaaaaaataattagaaatcaattagtgagtagaaagtatttgctgggcaagcattttcaaaagtggtgagaaggagggaagcactggtctatttcctatcagaaggtcagagtcttcagtctcttcatggttgacttcatctcatggtttctcagagtgtagatcaagggttgagcagaggggagatgacagtgaaggtgacagagatggccttatccgtggggagggcagtgaaaggccgggcatagacatagatgcagggcacaaaatgcagggtcaccacagtgatgtgggagrtgcaggtggagatgactttcctcctgccctatcctgcctgagacttgagtaatga

SEQ ID NO: 104539 - DNA, 555 bp, Homo sapiens
ttgtgctgaaatatactggttagaaacacatgtttccaactctgagaattgggtttaaattctggctctgcccttttatcaatataaacatgttcaatgttgtttaatgtcttaaacttatcaactmcctcatttgtaaaactggtgtaacaagaatacctacctcaacagagttgtgataattaaataagctgtgaataagaaaggcttagcacagtgcctaacaaacagaaatcactcaatgaatgtaaactaatgatgtcattaactctgtttcttgggtcatggccaaaaatatgtctttcctttctatctttttattgtgacttatttgcatcacgatgaaaagatttcttttctctttattttttttaatgaggctggatgggatgaagggcttgatggggctcttcttttctctttttaatattttgggtgctactaccagcaatgccactacctggatgagtcactgtgggcaagtcaattaacccctccagcctgagtgaattgggctcactctccaagaattcctccagccctgaaagtctgatg

SEQ ID NO: 104540 - DNA, 550 bp, Homo sapiens
catcacagttgcagactactcaagtctttgaatgactacacatcaggaaaactgaattggtcattttgtgtcagtatatgagcagatggcagtggttgccatggctggatagctttctgatttcattacttgggtcaaagaggtcgcttctgaatgtgagtctacacactgtgtcatctatagagaaatgctggctatccaaaaaatgtcacctgaacttaacaacgttttgcaggatgtgattaaaattatcagccacattaaagtacatgcccttaactcatgtctgttcgcatagctctgtgaagagatggatgcagagcaaacacgtcttctcttatatacagaagtgagatgactttctaaaggtgtatcactggccagagtttttgagttatgagagcaacttcagagatttctttcagaaaatgtcaccactggaagcacattttagtgacagagaatgggtctcaaaacttgcttacttgtatgacctatacagcctgctcaacaaacyctatctgtcacttcaggggagaatgacaactgt

SEQ ID NO: 104541 - DNA, 551 bp, Homo sapiens
gttgttgaggtacgattgacaaataaaaattatatatacttaaggaatataacatgatgttttgatacacacatacattatagaatgattgccacaattaagctaactaacatatccatcacctctcaactagttactgttgtatgtgtgtgttaagaacacatgagatctattcacagcaagtttcaagtatacagtatattaactgtagttaccatgctgtacattasatctcccaaacttattcaccttgtaactgaaaatttgcaccccttgtccaacgtctcccttcttcccctactcccctcacccccagcccctcatcaccaccattctactctctgtcaaactcacagaaggggtagttttgaggcaagtttttgaggcttgctctgatcccagaagggctcttgttagctgctgctgtccatggttctctattcaacttctaactggtctattgtttccatttttgttttcgtgatgtttcctcttaattgtgaagcagtggctttttgaaagctcgttggctgtatgtgccaaaatttcca

SEQ ID NO: 104542 - DNA, 551 bp, Homo sapiens
gttgttgaggtacgattgacaaataaaaattatatatacttaaggaatataacatgatgttttgatacacacatacattatagaatgattgccacaattaagctaactaacatatccatcacctctcaactagttactgttgtatgtgtgtgttaagaacacatgagatctattcacagcaagtttcaagtatacagtatattaactgtagttaccatgctgtacattagatctcccaaacttattcaccttgtaactgaaaatttgcaccccytgtccaacgtctcccttcttcccctactcccctcacccccagcccctcatcaccaccattctactctctgtcaaactcacagaaggggtagttttgaggcaagtttttgaggcttgctctgatcccagaagggctcttgttagctgctgctgtccatggttctctattcaacttctaactggtctattgtttccatttttgttttcgtgatgtttcctcttaattgtgaagcagtggctttttgaaagctcgttggctgtatgtgccaaaatttcca

SEQ ID NO: 104543 - DNA, 586 bp, Homo sapiens
ctcccatggccttgggcaactccgccccttacagatttgcagggtacagccccctctcagctgccttcatgggctggcattgtttgtagcttttcaaggctcacattgccagctgtcagtggacctactattctggggtctggaggacaatggccctcttctcacagctacactaggcaatgcccaagtggggactctgtgtgggggctccaatcccacatttgccttccacactgcctcagcagaggttctccacgagggctctgtccctgcagcaarcttctgcctggacattcaggcactcccatattctgaaatctagccagaggttcccaaacctcaattcttgacctctgtgtacctccaggctcaacaccacatggaagatgccaaagtgtggggcttgcaccctccgaagccatggcttgaactttaccttggccccttttagccacagctgggatgcagggcaccaagtcttgagtctgcacaaagcagcagggccctggcctggcccacaaaaccattttctcatcctaggcctgtgggcctgtgatggaaggggctgctatgaagacttctcaca

SEQ ID NO: 104544 - DNA, 535 bp, Homo sapiens
atttgtaatatttagaagtgtttcttccagagttcactccaatgagatattttgcacatttaccataaaataacaagacatttatttcttaacaaatgtactgagcctcatatattcaaatgagtgttgtgtcttcaaagtagacatactgagaggtaattcagttataccaatataatcctgccattattcaaaatattttaaaactcagtgattcatcttgctattttataacgctcatctttggagctgtagaggagagatagcaagctgcctaagtggaaggcttgataatgattaacattcttcctttgcaccagccactatgctaaaagcatttcatacattctttcatttagtcatcacagcaaaacagcwttttgagcttatcttttttttctaggtaaagaacctgtgatttagacaggcagcaagtcctattgctcatgcttgtctgactgcaaagagtacacgcctaatctttatactttattgctcagttaacatcagttaagggacaggcacaaggtcatag

SEQ ID NO: 104545 - DNA, 612 bp, Homo sapiens
actgggtgatggtaacagtaaaaaacacttttctttataaaacaattgttaaaatatttgaaagttttggattttgtatctgtatattgtaattatgcattaatgcaatacaacatttcaaaattctcaggcttctgctaaatatgtaatttcccctttttttttgagacagagtcttgctctgttgcccaggctggagtgcagcggcatgacctcggctcactgcaagctccgcctctcagttcaagccattctcctgcctcagcctcccaagtagctaggactactggtgcccaccaccaggcccggctaatttttttttttttaatttttagtagagacggggtktcaccatgttagccaggatagtctcgatctcctaacctcatgatccgcccgcctcggcctcctaaagtgccaggagtacgggcgttagcccccgtgtgcagcctatatcatttattttaataataaatattagcgaaatcttgcttagaatcaatgttcaactcgtcattgaaatttttctgtggaaaacagacctgaaaatatttaagtatccattattccttcagacttgttttatatcctctttactgtttttcttatatt

SEQ ID NO: 104546 - DNA, 612 bp, Homo sapiens
actgggtgatggtaacagtaaaaaacacttttctttataaaacaattgttaaaatatttgaaagttttggattttgtatctgtatattgtaattatgcattaatgcaatacaacatttcaaaattctcaggcttctgctaaatatgtaatttcccctttttttttgagacagagtcttgctctgttgcccaggctggagtgcagcggcatgacctcggctcactgcaagctccgcctctcagttcaagccattctcctgcctcagcctcccaagtagctaggactactggtgcccaccaccaggcccggctaatttttttttttttaatttttagtagagacggggtttcaccatgttagccaggatagtctcgatctcctaacctcatgatccgcccgcctcggcctcctaaagtgccaggagtacgggcgttagcccccgtgtgcagcctatatcatttattttaataataaatattagcgaaatcttgcttagaatcaatgttcaactcgtcattgaaatttttctgtggaaaacagacctgaaaatayttaagtatccattattccttcagacttgttttatatcctctttactgtttttcttatatt

SEQ ID NO: 104547 - DNA, 617 bp, Homo sapiens
ctctcaacattgccattcaatcccaagtttctgtggacagcttaatttgctactctcccctaaatttttggaaacttctgtgctttccttagactggattgcctcacgaccaccacttcacaaaaactgtgtaccttatcaaatcatcttcctactaataaaatttaaatcttaactgcatctccatctgcattgttatctcccatcctatttcaatagagatagtatactgtccatcctcctgttacaaccarttcctccatcctgtactattgagaatcattccctccagcctttcagaaaattacactataagtcattgcttcttatataacagaattctaggtcactaaactaatactgttttggtcattatgttaattgaactgactgtagcagttgacgttgttgacacttttttcttttacaaacgtctatattttcaaaaagtcattatttgagaagtactatataaaaggctcaataaagcaagtataaatcaataaaacaaaactgttattttaaggttgacatttaacaaaaacaaaaaaaccaggtaggaagcatctgctaaatttctgttacatcgttcagtaacagtcttattttttaccaga

SEQ ID NO: 104548 - DNA, 617 bp, Homo sapiens
ctctcaacattgccattcaatcccaagtttctgtggacagcttaatttgctactctcccctaaatttttggaaacttctgtgctttccttagactggattgcctcacgaccaccacttcacaaaaactgtgtaccttatcaaatcatcttcctactaataaaatttaaatcttaactgcatctccatctgcattgttatctcccatcctatttcaatagagatagtatactgtccatcctcctgttacaaccaattcctccatcctgtactattgagaatcattccctccagcctttcagaaaattacactataagtcattgcttcttatataacagaattctaggtcactaaactaatactgttttggtcattatgttaattgaactgactgtagcagttgacgttgttgacacttttttcttttacaaacgtctatattttcaaaaagtcattatttgagaagtactatataaaaggctcaataaagcaagtataaatcaataaaacaaaactgttattttaaggttgacatttaacaaaaacaaaaaaaccaggtaggaagcatctgctaaatttctgttacatcrttcagtaacagtcttattttttaccaga

SEQ ID NO: 104549 - DNA, 605 bp, Homo sapiens
cttgttctctttgctctacacacaacctcctctacagaagactaactagtagtctggcaacttaaagttcattggtttgagcaaagggtaatagtaaagattaccagcaggctgagaaaagagattcaaaactagtgcacaaatgactaggtgaggctaacttatattgttacactctttttgaaagacagtttgacaatacttatcaacaaacttaatactgattctctcacaaggaaattccaccactagaaatttggtatcaaaaaataattacatatatgtatataatatatacacaacacacacacatatatatacatacatacacacacacacggttctctattaatgttcattgcaaagcaatttacaataagaaatatttttgaaaatgccctcaaatttctagtatcagaktagagattaaataatctttctggaatacatacagccattaaaaattggggattaaataatttttaacatggaatgatgtttataatataatgctcggtgaaaaaaacctaatctctaaggtcctaaggcatgtattatatgtaataaactaacttatcttctatttatttagaatgattttagtt

SEQ ID NO: 104550 - DNA, 556 bp, Homo sapiens
agctgacagaggagaaagtttacaataagtgactatgtaatctcacctagaaagggaaggcacttgaggatgtgagggtatgatggacagtgaagtggtgaactgataaaaggaatgagaggtctgaaggggccaaatgattgtttaagtggaagtagtaaacataattatttgaatggaaaagaggctttcagcagaaaatggcttacttgaaattgagattgtgatgaaggtagaataattgataatcacaasattcaggctattaccacaggaaagggtggctaagatgggatggagtacaagttcatgggaagcttggaggtaaagaaactgagaagtcataatattggatggatcattgatgtatatatggttatcaccaagacattgactgaataaaataaatgaggaagaccgtgccaggaagatgaggggttattaaaagacggatgattacaatggctaaaaaaggatgtcatgaatgctttactcactaatgtctaaatgttttagtcttccacttgaaggctttgatagaggcaggaggcagaca

SEQ ID NO: 104551 - DNA, 552 bp, Homo sapiens
gctgcccttggccatctggaagatgcatggtgaaagaaacggatgcttgctctcagcacacacttccttccctgacagtttgtcgcctagcagctattttggcttcccaagggaaatcttgtcctttgcccttgtggggcttactgcaaatcaactcatcatgaggaagattaatcagagaaaagacatacaattttttttttttaaactgtgagcatgaagagaatcacagagtgtatactcaatctcccaatgggggcaaaatacttctgtaacctcctttcaggtggcgagaggggacatgggaatgtaggtaattctgttgagcggtaataagtgatgactaggaagattgaatggatacttgggagaatgaatagggggaggaaacagagattgacttattaatggttccctttggaaattaaatactccttggagaccastcattactttgtaaaaaagtctgtttgagcgggcttacatcttaacgttctttcctgtagtcaagaagaagatcccagggagggagggaaagtgaattgtaataat

SEQ ID NO: 104552 - DNA, 487 bp, Homo sapiens
aatggttgaactaatttacactcaacagtgtaaaagcgttcctatttggagaacatcttttgttctctctctccctccctgagagtggaagtattccagaacagggctgctttatccccctgggtcctagtcttaagatgacaaatagtgaagcccccattggtgagcaggtggtatgggtgagaaacagactttggtgatgttagctgctgagattctgggattgtttrttatagcagcatcacctggtctgtcctgactaatacacatattgacaatttacttttcatcgaattactttgttgagctgtgtgttaatagaatgaaaacgctgctttgtgcaaaaaacactagctaataatatagacccttagttccacgagcattttctaccttgtattccttggtgcaaggacttaacaaatcatttggcacttgtacaagagcattcatataaagaggcagcagcttaattttgcttgtttcc

SEQ ID NO: 104553 - DNA, 571 bp, Homo sapiens
caacattaccttgcctggcaacggcctcaggggtgaccatcactgttccctcaggcagtgcagggtgtatctcctcaaacaaagccgaaaggctgacggaagcgtgggccaggaaggggatgttgccactactggggatggggaagctgtttcttctgtcaaaagaggttcatcagagtttacaaactcagtgtcctcagctccatcagggtcctcccacatgcccctattccaagttgcagggccccattcttttccaatcattgccctcactttaacagtagacacctggagaggctgtgmacgcaccttttgttgcatcagccactcacacaataagacattgtgtctgttttttccacaattttagctctctctctacaggagataagactctcactcagggcaatcttagcaggtttgaggctcaatatctgcttctgaagccaggagatagaatccttaagtttatcattttctctcatcactttgtccactgaactcaggaggaaccaaccagcttcgttatgttcctgggttctccacatatggtcaaaggtattatgtatag

SEQ ID NO: 104554 - DNA, 599 bp, Homo sapiens
cctcactgttttgctagtgtgatctggggaatggatggagttaaacagtggtgagaaagttaaaacctataattgttagaagctacgccactaaggagaaacaattcaggcaaacacaagcctaccctcttcacccctcttctgccaagcaagcgtcaaaataatgggcgaaggctctgggtgacayacaaaacaaaacaaaacctcaagctgttttatttggagaagataggaagagtaaccccagaacaccataggaggtgcgatcacttgcatgggaaaccttgtcattctccattcagagggaagatttttctcattttaagtaaacctccacatcatctttaaaagatcctatatatatttacagatagatatttaaactggctgaataacaccaggcatagcccaaccagctaaacaatgcaccttataaagttctgttttaaagacacttatttctgtttagtgcctgcaaccacccttcatccagacacagctagacaaagaacgtaggcattaatactccaaagtgagcatcttagacttgcatgatacctagtaaaaataaaagcatgtttttttgttgttgtaatata

SEQ ID NO: 104555 - DNA, 561 bp, Homo sapiens
cagataatggtgtctgcgagggcccattccttacagatggcagtcttctcattgtgtccccccatgacagaagaagagccaaggcatctctctggggccccttttataaaagcattaatgccattcatgaagctccacaatcattacctaatcatctcccaaaggccctgcttcccaaaaccctcatgttggagccccatcccatggctccactagacattggtctaatggagctctgtgcaatggctccatgcttttgggggattttacagtctgggccaatgagtggagaggcagccctgatgatcttggaattgactttaaggtgattattttattgtcttgaacaayagttcctggcttctttttagatggttgaggaacttccttatcagaatgagccacatgtttgtattctatgacaaacagactgtaattcttttcaatttgaatatgttgataatgttacaaaactttaagttctgcttccattttgataacaattctgtctattaatcattattttcttctcacattttactatttattgtcaagagggac

SEQ ID NO: 104556 - DNA, 632 bp, Homo sapiens
gtatgccatcttttgaagattaatttataaaaatggtattatgaaaaaaggttattcaaatctgacattatatataatatatatacattagacacgatttaaaagtaaaaattttatacccttgagatagattttaggttttcaaaatgacaaaaatgtatttgctttgcaatatacactgagacaatttatagcagcctgtgtaattaacataatcctaatttcttcscttcccagttaaagcatctttgtctccttatcttttcacttctaattttgtctaaccattttcacctttgaggttatacacttgttttaatggggacagtgtagtacacagttttttttatatagtcatctctcaaaaattgcttattgaataaattaattctgacctctagagttttgcactaactgataaataataaaactcattttaattaagtaaacatattcagaagttttaaaattttcaggttaactatgtcaatgtaaagatttagggcatttcaaattatctgtgcaataaaatagaagtaaaaggagaataaagtgtagaatctaaaatagaaacctcaagttttgataactatttccccttattctctttcaaacatgtagtagcaataaga

SEQ ID NO: 104557 - DNA, 592 bp, Homo sapiens
tattatacaatgactctaaatcagcaattataaacattttaaacaactaaaaaaagtatatttaaaaattaagggaaggtatggcaataatatctcaccaaataaagagtaacaataaacaaaaatattttataatagaaatgaatagaaatttggggttgaaaagtacaacaactaaaatgaaaattctctggagatgttgaaactataagcttgtagaagaaggaattatcaaaccagatttgtcaatatctgaaaaatagaaagtaaaaaaratatatatacatatatatatatatatatatatattttttttttttcttttttgagatggaggtttgctctgtcacccaggctggagtgcaatggtgtgatctctgctcactgcagcctccacctcccgggttcaaggaattctcctgcgtcagcctcccgagtagctgggactacaggtacacactgccacacccagctaatttttgtatttttagtagagatggagtttccctatgttggccaggatagttttgatctgacctcatgatccacccacctcagcctcccaaagcaaacatttttaagaagaaacact

SEQ ID NO: 104558 - DNA, 537 bp, Homo sapiens
caattcatcacccaggtattaagcccaccatccattaactattcttcgtgatgctctctcaccccaccaatttcatgtcttttaaagaaagttgagagaagaaaggaaagcaagtatatattcatagtttttgttataataaacttcttacttactatttctggttttctttctttctttctgtggattcaaattaccgtctagagtaattatcttagcccaatacagctctgcttccacccacctcttttctactgttattggcaaatatattacatttatatatgttatatgccctaaattacatacacattgtttttttttgtttgtttgtttttatacacattgttttttacaactgcttttaaaccagttaaaggaagggagaaaatatgcatttatactatcttttataattacataattacctttaccagytttttttttccatgggaattcagattgcattctggggtcacttgttttcagtctgaataaattcattctttcttgtagggtggatctgctagaaacaaa

SEQ ID NO: 104559 - DNA, 523 bp, Homo sapiens
gttttgatgtctgtttgttgttcaatgtcaaaggcaagcctaacgcaaataatgtgtttttcttgttcttctcagtgaagcagctgggttgatcccttcatctggtcatcagacacatagcccttcagtgctacaccaccttaaaaatgaaacctgaacgactgtccttggtgtttatcttgatctgggttgattttcaccaggccaccctgctaactgttcctctttgtcagcttaagcacagctcagcacatttccatcaaatcctgccctgtccagtgccttgcttggaacactgagttaagtattaagaggaaacagataaatgtgtttgacccaaaagaacctccacgcaaaagaattaaacagtagacataattcagatatttgagaactgattcaggtccagcctcatgagacagtgaacacttttgtaaaactcacttacyggagttttggtttttggtttggacatgtcttcttaagtatggcctttgttccatacttatgatactgactctta

SEQ ID NO: 104560 - DNA, 612 bp, Homo sapiens
cctaacccctttcaaggtgacttacctgaccacttccatctgccttgaccatccaggtactctccttcagaacccccttataaccttccacagatttctgacactgcactcacccctgtctccccaggggyctctgagctccttgagggcagagacagagccttttgtttgctgtattctcaacaccttgtccaggacttgccatatcagaaacctcattaacaccttaatagattagtgaaaggaactgcctgggaggctttttcccactttcctactgcagtgccagaatggaggatgtcctccaccatgccttaggaaaattaataaaaagtgaatattctcagggactcagtcccagatcaccacctaggattgcatagggtgtgacctcacaggtgctgtaactgctgaagcaagaaattatgcaccatatataagtattatgccccatgtataagtctgttctcacactgccttaaagaactacctgatgctgggtaatttataaagaaaagagatttcattgacagacagttccacaggctgtacaggagacatagctggggaggcctcaggaaatttacaatcatggcagaagggcaaagggaa

SEQ ID NO: 104561 - DNA, 636 bp, Homo sapiens
atggggttaggttaagcagcaaaaattgatagtaaaacattgcaatgtggtacagggcttaggcaggtattatattatcatgtgggttatatgacagagaaaaacacacaaaaaccccaaacaaaacaagaagcatctgagataagcagccttatttttataggtatttagcaatgctaaagggtatcaaagactttcattaggaaagcaggcttcttagcattactccaatcccacccaagccatcagagtaattaaactccatatgcctccatcacaggtcctgtatttttttttaagtattcagagttagcttgtttgttacgtaatacagttggatgacaatctaagtaactgacctaataatttatttaaaaattgaacctgtgatgtttttgcatcttttcaagatttttttttgtttcagaaaatcaattttaatgagattatatcaagagttagttttaatgaagggtttattggaaaggcagtccagtaagtacttttatctaagaggcctaaagggcaataaaaacatacatttgtatacctrtcagttacagacttatctaaaataaacaataataacattgtaatgagaatgaaaaattctatcacgcacaggcattagaagca

SEQ ID NO: 104562 - DNA, 633 bp, Homo sapiens
aaactattaagagatgtcatgatcttatacacagaaaaggctaaagagaagaaggatcaagatggccaactaaatacaggtactatgtgcttccaccatggggaagagccagaataggaagtagatactcaaatttcaaacatatcttctaggagagaatgtttggattcatcacagaagmgatggaaagcaccagaaataagtaggaagagagtttgaggcagattgtccagctaggaacttactgagagttgggagaaatgccttgatgtggggaaacagtaacagagaaatacccagacctctgaaatgaactttaacaaacctggcatgggagaaaccatcaacccactaggtcctcgtgcctgacatatggagctgcctagattttgcacagagacgttgctccagaaagggttcctacacagaatcccacagttatctgtgtcaggagcagcctcagtcaggagccattttcagaaccaagatgctgtggacctatagaccatggctgcaaccactgtgctgctccaagaagggagaggggtgaataggtgcacccatacacccctgggtgggtacttgctgtcctgctacaaactactgttgagactgagatataagtggatcaca

SEQ ID NO: 104563 - DNA, 629 bp, Homo sapiens
ttctatcactttagaagcccatttcctgtagggacaatgataggaatctttggtttgctttggaagttgagaaaacttttatctctaaagcatgtttctctgacaatagaactactttaaaaccccactcaacctcaaggctattatatttctaaggactcccagttacaaatactgggacatttttaaagatatgatccatgtatgtggatcccaacctggtagactgttttttgtagcaataggccttgatgctaggctgtaatggatgccatggggtacctcctacaacccctgtacaggtytaaaaccctcatttccctacttctgggagttttagcagccagcagttttcagctgaattcttttttggaacttgccttcaactaaacagagctgactctcacaatttttgcctcttccctggatttagaggcacatttgatgaccggtcaacataggggtataaatgcctggtccccctgttcaactttagacaactctgaagggccaactcagcttcataactttacatagaattgaccaatgtcaatattgctatagcatcactctgcccaatcttgctacctttattcctccacaggtgtggattctgaaagcattcctac

SEQ ID NO: 104564 - DNA, 628 bp, Homo sapiens
tctgaaattttgccccttcataacagcaatagaaaaaactggtgaaaattatcagaatcaacttttatggaagtctggaaatcaaccaaaggcttacagaaacctgaactttagtccctggaagactaaattgaaaggcttgtttttagttcatctgatttggaaatccccagtgccaaaatcactacctaggtggaggtgttttctgtaaaaatttatatccaaatgttttagtcgctgctgcctgaggtatagataaaagttgggtcaaacaattgactaactgaaagcttgggaagaatgactaggaagggaaatgtgtataaggactttggaaagctctgacatatttcttggaatgtaaaaggccrtgtgcctacctagaactgcaaatatgctcaggatagtcctgagaaggccctgagttctcactttttgttaaccttcagtctctgcatgagcaggaagtgaaggctgaggcatagttgtaatggccttgtcgagtgttgaaggcatgtgccccaacaggtacacaaaggctcccagtaaagactgggagacttgtgtgtgtgttctaggcattaaaaaaaatctctgaccaatctctgacctctaaactaatggaact

SEQ ID NO: 104565 - DNA, 609 bp, Homo sapiens
aaatgaattttaattgtttctgagaatatttacttgggtaaaagagataagagatatttttaaattcttcaaatacatatgtgaatcgagatgtttcattcattgacaacaaaataatttgttcctcatcacattagaaacatacatcctattcatactctcctttaaaatggtttttttaagaattgggtggatttttctacatcttggatgctatagaaggcattgagactcaaaactgaccagctattttgcttggggcaaagttaggagaattgtgcccttttatactkcaatcctgtagtttctggtgacaaggattatgaattctaccaagatttctctacccccagacctccatgagattaacacaaaaagtttctctaaatactaatattttccatccctacctttttgaccatgacagtcattaaattactgccttggaaggattaatccaggagccatgaacagagggagatgggcaggtctattgcaatgaaatgcagtgaaatgggaaaatctgttgtaagcattttgacataggcctttcagagactgaaggttattgattagagcaaatgggatgaatcaaagactttctaaaac

SEQ ID NO: 104566 - DNA, 521 bp, Homo sapiens
ctgtgattaaatttgtctttttgaaggatcagtctgatggtagaggaagaagattagagataggtctagttaggaggttgttttaggaatccaggtgagagaggatggtggctgaacttcattagtatggtggagagaaatggagagactgaagatacatttttttgtttgtttttttaggtggaaatacgggactagagttctgacagtatggtctggttgttaagtgtttgttctggggactgattattcaggatcaaaatctacctccaccatttgttttccatgtggctttgatggagtcactaaactactatatgcatacatttccttacctgtaaaacactgtgtagcaaaggttacctaaactaacccgtataaagcacttagagtgcctaaacacagcaagcccttaaaacacatcaggtataaccttttctrttactatctagctctctgacatagaaagctcattcattcagcaagcttgtattcagtgcctactatgtcccattggttca

SEQ ID NO: 104567 - DNA, 552 bp, Homo sapiens
agcaggcctcagaaataatagatgtgaatgtcttatagcagcaatttccaatttgctgtcatcagggaccagtttcatagacaatttttccatggacaatgcggggatggttttgggatgaaactgttctacctcagatcatcaagaattagattctcataaggagtgtgcaacctagatccctggcatgtggagttcacaatagggttcatgctcctatgagaatctaatgccgtcgctgatcagacaggaggtggaactcaggtggtaatgcctgcttgcctgctgctcacctcctgctgtgtggcccagttcctaactggcyacagaccagaccctgggggttgggcacccctatcttataggaccttaaaaggtgtcatactttctggaaaagaccaaataagggaaggagattttctacagaatgtaaatgtcccccacaagagacagctttggaaggcaatttcaaaatatgtcaaatatattttggagggtaaaatactttgatgttccccagggcccgctatctgtaatgtaatgtaccagtca

SEQ ID NO: 104568 - DNA, 600 bp, Homo sapiens
ttgcttttaccactcccatgcaacatagaactataagtcctagccagggccagcaggcaagagaaagaaataaaagacatccaaattggaaagataaagctaacttacctctgtttactgatggcataatctcatacttataaaatcctaaacacttcttcaaaaaactagattcgataaatgaattaggaagtgtcaagatataaaatcaacatacaaaattcagtgtttttttaatataccaataacattcaaggtgagaaagaaatcaagaaagcaatcttgtttacaatagctacaagaaggaaacacctggaaatatatttaaccaagaaggtgaaagagctctagaagtaaaattacaaaaacaactggtaraagaaattgcagatgacacagacaaatggaaaaatatcccatgatcatagattggaataattaatattgttaaaatgaccacactgcttttttttcttttccctagcaacaatgttgatacctagtaatatgttatcttattactatctcctgtctttacttgagaattctgtttgatctatccagtaaagttgtcaatcatctctattaattgtctgcact

SEQ ID NO: 104569 - DNA, 618 bp, Homo sapiens
ttcatttgctggtttaaaaataaaatcttgtcaaactcattagagaatttaaaagcattgggtaagaatggttttgcattacaggtagatttaacatctcaattttttgagtcagatccaaacccttctcagtttttattcttctccccatatagcagttgggataaaattcttggctctgcttcaaaagagaaataatacattggtattttatgatgggccttcaagaggaacactgaagtaaaatcatgtctccataattttcatcattatgaaaaatattaaagtatctcaatggtggatactcccagaaattgccttgggcaacaggaggaaggtattcccaagtacccactgctgacccctttgayaattttaaaatatgactgcaattcctttaacacttctcccatgagaagtggggcctatgtcccctcccttgaatctggactggtcttagtgaccagtaaccaagaaaatgcagtggaagtgatgctgcataattctaaggctaagtgagaaaagtccatgcagcttctttgttttcttggcatgctcgcatagggggatggccaagcgccatataacacatctgattaccctgagaccaacacgctg

SEQ ID NO: 104570 - DNA, 618 bp, Homo sapiens
ttcatttgctggtttaaaaataaaatcttgtcaaactcattagagaatttaaaagcattgggtaagaatggttttgcattacaggtagatttaacatctcaattttttgagtcagatccaaacccttctcagtttttattcttctccccatatagcagttgggataaaattcttggctctgcttcaaaagagaaataatacattggtattttatgatgggccttcaagaggaacactgaagtaaaatcatgtctccataattttcatcattatgaaaaatattaaagtatctcaatggtggatactcccagaaattgccttgggcaacaggaggaaggtattcccaagtacccactgctgacccctttgacaattttaaaatatgastgcaattcctttaacacttctcccatgagaagtggggcctatgtcccctcccttgaatctggactggtcttagtgaccagtaaccaagaaaatgcagtggaagtgatgctgcataattctaaggctaagtgagaaaagtccatgcagcttctttgttttcttggcatgctcgcatagggggatggccaagcgccatataacacatctgattaccctgagaccaacacgctg

SEQ ID NO: 104571 - DNA, 618 bp, Homo sapiens
ttcatttgctggtttaaaaataaaatcttgtcaaactcattagagaatttaaaagcattgggtaagaatggttttgcattacaggtagatttaacatctcaattttttgagtcagatccaaacccttctcagtttttattcttctccccatatagcagttgggataaaattcttggctctgcttcaaaagagaaataatacattggtattttatgatgggccttcaagaggaacactgaagtaaaatcatgtctccataattttcatcattatgaaaaatattaaagtatctcaatggtggatactcccagaaattgccttgggcaacaggaggaaggtattcccaagtacccactgctgacccctttgacaattttaaaatatgactgcaaytcctttaacacttctcccatgagaagtggggcctatgtcccctcccttgaatctggactggtcttagtgaccagtaaccaagaaaatgcagtggaagtgatgctgcataattctaaggctaagtgagaaaagtccatgcagcttctttgttttcttggcatgctcgcatagggggatggccaagcgccatataacacatctgattaccctgagaccaacacgctg

SEQ ID NO: 104572 - DNA, 538 bp, Homo sapiens
acagagagagatttattctaaggaatcggctcatgtaattgcagggactggaaagttcaaaatctgcaaggtaagcctacagactggagaccarggaagaggtgatgttgcagagtccaagggcaatctggaggcagaattctcttggggatgtcaatctctttttctcttaagaccttcaattgattgggtgaggccaccccacattacgggaggtaatctgcttttctcaagctctactgatttgaatgtcaaatctgatctaaaagataccctccccagcaacatatagactatatttgaccacatatctgggtactgcagcctagtcaaattgtcacataaaattaaccatcccaggtggggtgaggcattgttgaagaaggcattgttgaagaaaatcttcaacaagcatgaaaaatacgtggactagaatcagagggcaagttcatctgctttaccctgataggtcaaagcaagagaagggaagggcagaaaggttgattttattcctattagtcaaggtatttttttcttt

SEQ ID NO: 104573 - DNA, 563 bp, Homo sapiens
atttgaattgttgtcgactgaacacaaaagtgagggtgagatttattgccctgcccaccaggtgatactgtcaatatgtagctgtttatccctgaaacaggggtcctggtaaggaatggaaaggatgagacagagcattttattattttattggcagaaagggaaaagttacagtcagcccagaaggtgcatcttttgctatttctatcagttttctctaatgcttatgatgatgggaatgcatagttcactgagtggatggaaattcaggctccaactatggccaaaaccaatgagcagtaacgtggaagtagtcaagaatatacaaaacacaatgaaragacagaaacactttaaagcaaccagttattttattcaatcatttcctgagcatgctggatgcaaagcccaggtatgatgctgggggtaagagacacagaaataattaaagcagtccttaacctcaacaactaaaagtctgtgagcaaagactgagacctgtacagactagcgatatagaacatagagtattctggctgggcgtcgtggctcatgcctgtaat

SEQ ID NO: 104574 - DNA, 582 bp, Homo sapiens
tttgtatttattctgtttggggtttgtagactttcatgaacctgcagtttgagatccttcacttgtttttgaaattatttgaccagcatatcttcaaatatttcttctcctccatttccctctcctccccttctggagcttcaaataaacatatattcaacacttgtgccaatttttatrtgtaccctatgctactatctagattttccattaattttccttctctgcacttcaaacttaacattttctacttatctactttcagcttactaattctctattctgttctctaatctgcagttaaactcatttttttacttcttaatcctctcagctctagaatttccatttgactatgcttttatagattctaattttctagtgatagtctctatttttagaatctactttttaaatctattaattatagttagttaaataacctcaatatccacatcacctgtagacctattgctgattttttttccttttagcttttgtcatttggtcaagttccctggcaaacctgataattttagattgaaggctgacattacacatgaatgattgtagagactctgg

SEQ ID NO: 104575 - DNA, 505 bp, Homo sapiens
gtatggaatttcctcctgtgtctctcctgatttggccatgtaagacatgcttgcttctcctttgccctccataaggattgtaagtttcctgaagcctcctcagaagctgctgtcttttctgtacagccttcagaactgtaagccaattaaacctgctttatttagaaattactcagactcaggtatttttatattagtatgataactgactaatacagaacattaatactaaggagkgaggcattgctctaaagatatctgaaaatgtgaaagcagccttggaactgggtaacgggcagaagttggaacagtttggagggctcagaagaaggacagaaagatgaggaaaagtttgcagctccctagagattggttgagtggttgtgacacaaatgctgaaagagaaggccaagctgagggaggtcacagatggaaataatgaacttattgggaactggagtaaaggtcacttttttatgtgttagcaaaaaggttggaggcattg

SEQ ID NO: 104576 - DNA, 628 bp, Homo sapiens
tagtgaatgtaatcagacaagagaaatcaatttgaagaataaggattgcaaaaatagtaaaactctattttcagatgagatgattgcaaaactagaaaacgaaaggagatcagtgataaacctaacataaatattcaaactattcagtcacctactggaatataaaattaacataaaaataaatacttggacttcatgttgtacagagtttgaattttattaaaatttaaaacctttactctgtggaaaacactgttataagaatgaaaggtcaagccrtagactgagagaaaatatctgaaaacataaatgtgataaagaacttatatccaaaatatacgaagaagtttttaaactcaacaataaataaaccaaataatccagttaaaaatgggtaaaacatccgaataaacacctcagcgaagaagatatatagatggtgaataagtatatggaaatatgcttcacatctgttatcgttagagaacttcaacttaaaacaacaagatgtcattacacacctattagaacatctaaaatccccaaaactgacaatgatagttgctggagagaaagcagagcgacagggactgtcatcattggtggtggacattcaaggctacagaca

SEQ ID NO: 104577 - DNA, 604 bp, Homo sapiens
gattcagtacaaggctatattaaaacagaaccaaacaaaatgaaacaaacaaaaatctacctctaattcataatgcataatgtgaaacctaaactaaagaaatacctctgctgttgaaagcatcattgttaggtgatgcccagtggagaagactgacattgtaggtgatcaagcataaacaaacataggagcaaaaacatcataatggaaatatatatttggaaagtatctccaagkataacatgatatattggaaatcatggataactaatgcctggggagatatgtgttggaaaatgataaaaaatgatttttaaaaatcttgcaaagggaaacaaaacttttagatcaataataaaaaccccaaaaaggcagaaagtatttcagtgttttcaggtgaacaccataacaggagatacccattatcttatggttttctttaccgaagtattatagtaagtcaatgatttattttactctgctcaaggaagacctcatccgcaaagtaatgtgggtacaatgaaaccagtaataaccatgcgaatcttcaatatcttcccacattggatgtctattggttgaacagtgtgcaagagagaaaatc

SEQ ID NO: 104578 - DNA, 669 bp, Homo sapiens
tgaagatcaggtatgctactaataatcaagctaattatcaagttgaccaagagcaacaatattaataaagtttttaagaatgttatgctctgaagccattgtggaaatagttttaggaagcaatagttatttccaaataaaaaatgcaatactgagattttaatttcacttcttaagwaacggagactctattaaaaagtacacattgtgaaaggatgaataggaaggatgatttaaattaaatcgttcatttactgagaagaattctgaagcaggtttaaatattaactttaaagtcaaatactccaaaccaacatgtttactaaatagtcactcaactgatatttcaacatttttttatgattctatatccaaagctgcccattatatactggaataagcctgaacgagagtaaaccaaaatgttgggattttttagtatgaaaaatatgaatgttctctaagaacctaatattttgttggtaactgggtcatattttgttggtaactgggtaaattcatataaatagttcaacatgtgagcaatgagaaataatctgggtcatagggaatcaagaagaatatgaattttcaattttgattcatggaatattaattgtcatgtttaaagtactcaaggttttgagcaaaacaacatttaacagcacc

SEQ ID NO: 104579 - DNA, 636 bp, Homo sapiens
tagttcaagaaagctatgtagattgatgagactttatgaagaaatatgagccttaaagtattcttaggtaaactgatcttatcatggtgtgtttattctccaaagaagctgattgcagagaaagtgtgagaccatatcagactcatctggggagctattttattatttacgaaacccatgcatgaatattccatatctttccacttgaaaaactttggcctaaataatacttgtgcaaatgtgttagagaagctcctgaatatcttctatataagaagcctccaaaattacttaatttgaaacatttgttttggtaccagtaccatgctgttttggttaccatagacttgtagtatagtttgaagtcaggtagcktgatgcctccagctttgttcttttggcttaggattaacttggtgatgcgggctcttttttggttccatatgaactttaaagtagttttttccaattcggtgaagaaagtcattggtagcttgatggggatggcattgaatctataaattcccttgggcagtatggccattttcatgatattgattgttcctatccatgagcatggaatgttcttccatttgtttgtatcctcttttattgcattgaccagtggtttgtagt

SEQ ID NO: 104580 - DNA, 522 bp, Homo sapiens
gcactctgctccaagaggctgcccacctgccaagacagggcaggagtgagtcagatggggaaatctgggcatcttgtgcctgcccataccaccccttcccaggtgccacagggccccttccactggctcagcccatcctcctgcagcccgaacccaaccctctcaccagctcgagcggccccaacagggtctgcgactccagcgcctccgccagcagcttgtgctgcgtttcactcagcactgggagagagtcaggtaaaagggggtttctgaasgcccaccgggaaagcccacctccctccctcccacccgccacctgcccccagcggccgctcactggtcagtgcccccagcaggtagacaacagggatagcgagttccggcaccagcattccggagacaacaccaggcactccaggacagcacctgctggaccgtccaggggctccaccggcccaaggctctggccctgctccagctgtgggcacgggaagggcaggtgagtctggctggctggggcag

SEQ ID NO: 104581 - DNA, 516 bp, Homo sapiens
tcataattgaccacacaatctctgctgtggtctaaaaataaatcgcctgcaagaactctgcagctgtccggctaacaacttggccaactttcagcagagctgtgtagcaccctgaccctggcccagccatgaggctgtcttcacacactccttgggcatgcagcttgtcttcagtgccagctcagctcctcctgtgccatcatcctgcyagcgggaccctggcaacaccaagttgctcagcaccttcagagcaatggtccaagggccaggtgtcaccacaaccatgtatgtgtgatggttctgtaaaaatgaagtgtattcatttattaatatttattcatatttgagagcacatctgtgaagggctcagggcacagcaacgtgtgtctgtgtgcctgttgatagcgtctgatccaagcaggggctagatgcagacctatcagagatctgaaagaagtgggaaataaagctggatgactttgaaggactttttaagattctatcatttgaaggaag

SEQ ID NO: 104582 - DNA, 621 bp, Homo sapiens
attatgtcactcaaggactgaaatatctcattcctacttacttttctaagtttatctccttcactttccgtttatgtaaaatccagctaaatggactcctttatttaatgttgaagttcatccttccatttagatcccacttccttcatgcctttgcctggaaaaatatatttatgtcttcactgattcatrcaacccagtgcatttcatgagtagctgcctactatgtgccagacatggggctccacagtagaactacagatctgcctgggattgacagagttcacaccctgtgttcaaacgcttctctttcatgaagtttcccctcattaccttccatacacaatacctcctttctgtctctgccacagccatgttacacacagctctgtgttttaattagctgtgtgcatgccattccccacaccagacactaagctctttgagatcaatggtggtgttttctttatctttaaagaggatccctttggtacccagcacatagagcaaaaactatttgttgaattgatttgaaagagctttcaatgcatttggcaagacaaaccttacctagcaattaactaagaaggcagtggtgtagcctgatgaatgtaatttata

SEQ ID NO: 104583 - DNA, 497 bp, Homo sapiens
tctttttttgtttgcttgggtttttttttttgagacagggtatgtctctgttgttcaggctggagtgcagtggcaggatcatagctcattgcagcctccacttcctgggctaaaaccatcctccccgctcagcctcccaggtagctgggaccacaggcatgcaccaccacaccaagctaacctttcaaaattttctgtaaagatgaattctccctatgctgcccaggctgccctgggctcaagtaatcctccagacttggcatcccatagtgctgggattacaggtgctagccactgcacctggcctcagcaaaacttctttggcaggaacctggtattgaatgaaatctgcccagcaatgaaaaactcttaaacctctgccrgaaatcccagcagatcggtgcagtttgtcccccatcttgctcatctcccctgaattgggctgaagagggcttcaccaagcaaggaaatgcacaggcagtggcccaggcagccga

SEQ ID NO: 104584 - DNA, 513 bp, Homo sapiens
ccgctcctcctctgggggatgggaatatggcttctcctgatactagaatcccagttacaagctgatggggaagattcactataattacacagttcctgagcttcagttaagatttacttccttggctttgaatgacaaatgtcactctagtttgacatattccattctgggggttattttcttttctgtttattagaactccatgttttaagtaaggacaacaaaaagtaatacccaaggataaaggtagaattgatgtctgagaaaaacctagtcataacttytgaactttccactaccattccaatgctataggaaataatttttattctgggataagtgaggaaactctttgccataacccagtaaacctttagggcctttctgcccctctacccataccccctatcccccttaaaatcacccagtagaaacccttctggtgggatttttaaaattatttttattttttatgcgtaagtagtaggtatatatatatatttatggggtata

SEQ ID NO: 104585 - DNA, 594 bp, Homo sapiens
cttctttctttaaacgctttccagtttctagaattaatataaatgtattgcagctgatgggcaggactcctgggttttccagtttcttcaattcaagacatctaaagttaaatgttcttgttaacggaggtaaacttaactctgagccaaagsgagacaaatcacctcaaaaattgccttttagtaaaaggcctaaatgtaacttgttctattgccatgtggtctcaattcacaagaaaaaaaaattgtagaaagaacacggtgacttcaccagctgtaatcactctgaaaagacattcagtttctggatttcaccagactctgcttggggaatgacatggtcctgttagtaacaggtagtccccaggggctctgcctacagctgagtgagtgatgtgtttttacctccagcatggcaagctactggaaagcccttcatagcctctgcaagggcttggagaggtgtctggggagaaagcaaagtttttaaagggttggctggtcttctggggtttcactggcttgccagaatgctattccacttcatcttaaaaataatatttcgatcccagaccataccatgtttctggctaa

SEQ ID NO: 104586 - DNA, 594 bp, Homo sapiens
cttctttctttaaacgctttccagtttctagaattaatataaatgtattgcagctgatgggcaggactcctgggttttccagtttcttcaattcaagacatctaaagttaaatgttcttgttaacggaggtaaacttaactctgagccaaagcsagacaaatcacctcaaaaattgccttttagtaaaaggcctaaatgtaacttgttctattgccatgtggtctcaattcacaagaaaaaaaaattgtagaaagaacacggtgacttcaccagctgtaatcactctgaaaagacattcagtttctggatttcaccagactctgcttggggaatgacatggtcctgttagtaacaggtagtccccaggggctctgcctacagctgagtgagtgatgtgtttttacctccagcatggcaagctactggaaagcccttcatagcctctgcaagggcttggagaggtgtctggggagaaagcaaagtttttaaagggttggctggtcttctggggtttcactggcttgccagaatgctattccacttcatcttaaaaataatatttcgatcccagaccataccatgtttctggctaa

SEQ ID NO: 104587 - DNA, 440 bp, Homo sapiens
aaacacttgttatgtattcctaggaaaccaggatcatgctcagagcattcaaagagtaaggtgggggaaaatggcataaaacccaaatataaaaaacaccaacacaataaaaatactactgaaatagctagaatcaagcaacatacagtgagaattaggtctgtcagccacaataaagtgaatccaagttttcatttatgtcagaataaaaagaaacacataaacctggttgggagactaggtgctggatgtgctggagaataaatgcagaagagggccagctttataagggaggaggccaagttttggcctaaaggaataargactaaggcttttgcaattagaatgtcatcaaattcaaatgttaagcttgcaaagatgtcccaatagcaatcaagttgcttgtttggtgacaaagaaagatccagtttcagcagtag

SEQ ID NO: 104588 - DNA, 534 bp, Homo sapiens
agagtataatcaaagtttggtcctattcttgctaaaaacaaagaaacatttcccaaccaagaggaagtctttctcattcagtactctttcatctgacttttcattttgctattttcttattttgactctgatatttgaatacctactgtgctgtatttgttttcatatatgtcaaacttctcctaccctttcagagttctgtttcctctgtcatatctgtatgatgcttacttgcctactgttgtgtacagatttttaagagcagaagatatgtgtacttctcattctcagcaaataatttataccaaatccatggataggattacatataagaaaaagttggtgactcattagccctactccaataaaaarctaaagctaaccgtaagtacttaagtataaacataaatacttaagtttaaacacacaaatgctttcttctgatttacctgtgtttttaaggatcaagagcaattatttcccaaatagaaaccatatctagaaataaattctctcttcccaggtttcgagacc

SEQ ID NO: 104589 - DNA, 599 bp, Homo sapiens
tgtacttctcattctcagcaaataatttataccaaatccatggataggattacatataagaaaaagttggtgactcattagccctactccaataaaaagctaaagctaaccgtaagtacttaagtataaacataaatacttaagtttaaacacacaaatgctttcttctgatttacctgtgtttttaaggatcaagagcaattatttcccaaatagaaaccatatctagaaataaattctctcttcccaggtttcgagacccaaatttatactcttgggaaagaagaaaaagatggcggartaaagataactaactttttcattccaaaactcccttccaccatcaaaactctcactatgtagactagttatttgtgatatctaacatagttcttccacaaggagaggtgaggggcagaggagggtgtcaatggtatatcatctacctgtttttgtctatagttttcttaatccctaactcatagttactcatttgttttccttctttttatttctggaaatctggaaaaaaaaaacacacaaactgtttcattgtcccaatattaattatttatatgatttacataagggcatgcact

SEQ ID NO: 104590 - DNA, 579 bp, Homo sapiens
ttagccaattatatttactgataattatttttgaacatatattcatattatattagtttaaatgaaagtttctygaacttagctactctcacaactctttaggttggaggcaaatattgacatttgttattttgtatacatttttgaagataatttttgactttctttacaaatcaaaagaaaaaaagcaaagcttaggtttggaaaaatggtttagggtgacaaataaaattctgaacttgaacttgctttcatactctgaattataaaatgaatttattttacaactattatgaggaaacaaattctccaaaacataaatctaacaaatcagtttccaaaataattctgaaaatgtcaattgctttgcgagatgaaattatttcttgccagatgagactattatgctttgtttgatggtttgtattttaagagtcttttccaaaaatgtaccaattttagcatgttattaattaaccattatttagtcagattacctatccttatttggagatactcagacaataaaaataacagctgggggaagatgaatatgttaagcaattcagtaattaggtt

SEQ ID NO: 104591 - DNA, 506 bp, Homo sapiens
aaaagagtattaagcatgtgtatttcttagaatattacatatatgtaacgacagcatgctttgttttatcatgctgttattgttaaacaatgttctaaacatttttactgatggcagtattcttgtgtctattaatcattttacttctttattttataataagaaaaatattgctgagtcaaattttcatatcaagagcatcactctatttttatattttgtttctgaggtaacagagagggattatctgattttgtacaggtatatagaagcagagcraagaaaacaccaagtatattctgcagtatttactgaacttgcaacaagctaactctaagagtcagtatttattatttttggtcagttcatctcctgcgtctgtgtgtatgtgtatgtatttgtgtgtgtcagtgtttgtgtatatgttctcagaatctgaaatttttgcttttccttgttaatctcaagttattctgattggtaaatgtttgagtcagacaaatttg

SEQ ID NO: 104592 - DNA, 445 bp, Homo sapiens
ttggtaatgcattcccctaggatttatttgtctggaaagaattttatttctccttttcttatgaagtttagtttggctgaatattcaattcttggttggattttcttctcttaaggatgttgaatcttggcccttaatttcttttggcttgtagtacttatgctgaaaggtctcctgttaccctaacrggtttccttttttaggtaggtgactagccccttctctttatttccctttaagattttttattttgcactgaatttggagaatctgattactatgtgtcttcatgatgatcctcttgtgtagtatcttgcaagggttctctgaattttctgaatttgagtgttgacctctctaggaaggttgaggaaatttttgtggacaatatcttcaaaaatgttttccatttgcttgttctctctctttttgagggacaccagtg

SEQ ID NO: 104593 - DNA, 542 bp, Homo sapiens
aggccaagaaagagagatgactatattcaaatatacttgccaagggaaagataaataaaaaaaaatcctatgttaggaaaagcaaaaattccccatgaactcagggttaagtttaagtgggaataatgataaatcacggacctccataaatataaccatataaaaggtaggcagaggtatgctaccccacacccrtgctgctcttgctcccttttatcctgctactacctttctatcacttagcaaaaaataacaataatataaaaaatagaagcagcattaaagcagaaatatttctgtgtttttttcccctcagtgtgaatagaaaagtacttaacacttgggaggtgataattatttatttgttgagtaaatgacaggccagttacttcctatctgtaaattctgttatatagtagaaagaatccaggaccaggtattagaatattttcaaaaccaggcttctttattgaaccagccttttaaattctatcaatcagttttctcgtatgtaattagagaaaagcatgaagcccttgtag

SEQ ID NO: 104594 - DNA, 538 bp, Homo sapiens
aggccaagaaagagagatgactatattcaaatatacttgccaagggaaagataaataaaaaaaaatcctatgttaggaaaagcaaaaattccccatgaactcagggttaagtttaagtgggaataatgataaatcacggacctccataaatataaccatataaaaggtaggcagaggtatgctaccccacacccgtgctgctcttgctcccttttatcctgctactacctttctatcacttagcaaaaaataacaataatataaaaaatagaagcagcattaaagcagaaatatttctgtgtttttttcccctcagtgtgaatagaaaagtacttaacacttgggaggtgataattatttatttgttgagtaaatgacaggccagttrcttcctatctgtaaattctgttatatagtagaaagaatccaggaccaggtattagaatattttcaaaaccaggcttctttattgaaccagccttttaaattctatcaatcagttttctcgtatgtaattagagaaaagcatgaagccctt

SEQ ID NO: 104595 - DNA, 575 bp, Homo sapiens
actgtctgaccagttttttggtaggcctgctgctacatgctggggacccgytccagtctctagtcactttggattttccagcacctggaggtatcatcagtaaaggctgtggaacagcaaaaatggcaacccgctctgggagctccatcccaggcagtacagatctgttgctggccctaacacacctgtaagtggtgactggagaccccagttgggaaatctcactcagacaaaaaataggatcagggtcttgcttaaaaaagcaggctggccatattttcatacagtagttgtactgttctgggaatccagttcacctcagacagtccaaagcctgaagcctggaacagctaagtcaccaaacagtaaagatggtggtccactcctccctctgggaactctatctcagggagctttgaaacctctgtcagctgaagaaaaccagcaggggtagctggggaccccagttgggatactccacccagtgatgagaaatgggatcaggcacctgcttaaaaaaatggtttggccataattttctaactcatctgtgctgtgttggaggtccacattag

SEQ ID NO: 104596 - DNA, 623 bp, Homo sapiens
aagaaaaccaacacctgaagagatcagtaacaggtaaccaggtcaaaggtgtaatagaaagtctcccattaaagaaaagcctgggacctgatggcttcactgctgaattctaccaaatatttaatgaagaactaataycaatcctacttaaactgttaaaaaaaataagaggaggaaatacttccagattcatgaggccagtattaccctgatatcaaagccacaaaaagatacaaaacaaaatcacacgctaatatctgtgatgaattttaatgcaaaaattctcaacaaaatattagcaaatcaaattcaacaatacattaaaaatattattcatcatgaccaactgacatttatcccaggaattcaaggatggttcaacatatgaaaatcaatcaatgggaaacatatcaacagaatgaagaacaaaatcagcatgattatttcaattgatgttggaaagccatttgataaaagtcaacatcttcatgataaaaatcctcaaaaaactgtggatagaaggaacatacctcaacataataaaagccatatatgacaaactacagctagtatcctactgaatcaggggaaaactgaaagccttttctctaagatctggaaca

SEQ ID NO: 104597 - DNA, 623 bp, Homo sapiens
aagaaaaccaacacctgaagagatcagtaacaggtaaccaggtcaaaggtgtaatagaaagtctcccattaaagaaaagcctgggacctgatggcttcactgctgaattctaccaaatatttaatgaagaactaataccaatcctacttaaactgttaaaaaaaataagaggaggaaatacttccagattcatgaggccagtattaccctgatatcaaagccacaaaaagatacaaaacaaaatcacaygctaatatctgtgatgaattttaatgcaaaaattctcaacaaaatattagcaaatcaaattcaacaatacattaaaaatattattcatcatgaccaactgacatttatcccaggaattcaaggatggttcaacatatgaaaatcaatcaatgggaaacatatcaacagaatgaagaacaaaatcagcatgattatttcaattgatgttggaaagccatttgataaaagtcaacatcttcatgataaaaatcctcaaaaaactgtggatagaaggaacatacctcaacataataaaagccatatatgacaaactacagctagtatcctactgaatcaggggaaaactgaaagccttttctctaagatctggaaca

SEQ ID NO: 104598 - DNA, 623 bp, Homo sapiens
aagaaaaccaacacctgaagagatcagtaacaggtaaccaggtcaaaggtgtaatagaaagtctcccattaaagaaaagcctgggacctgatggcttcactgctgaattctaccaaatatttaatgaagaactaataccaatcctacttaaactgttaaaaaaaataagaggaggaaatacttccagattcatgaggccagtattaccctgatatcaaagccacaaaaagatacaaaacaaaatcacacgctaatatctgtgatgaattttaatgcaaaaattctcaacaaaatattagcaaatcaaattcaacaatacattaaaaatattattcatcatgaccaactgacatttatcccaggaattcaaggatggttcaacatatgaaaatcaatcaatgggaaacatatcaacagaatgaagaacaaaatcagyatgattatttcaattgatgttggaaagccatttgataaaagtcaacatcttcatgataaaaatcctcaaaaaactgtggatagaaggaacatacctcaacataataaaagccatatatgacaaactacagctagtatcctactgaatcaggggaaaactgaaagccttttctctaagatctggaaca

SEQ ID NO: 104599 - DNA, 642 bp, Homo sapiens
gcccactagattagctagacacagagccctgattggtgtgtttacaaacctttagctagacacagagtgctgattggtgcatttacaatcctctagctagacataaaagttctccaagtccccatcagattagctagatacagagtactgattggtgcatccacaaacyctgagacataaaagttctccaagtccccacccctgccctgtgaggaggcagctgaggcctggtgaggattcgagcacagtgcaggcgggtctgcagtgctgggggaccagcgcatcctccgcagctgctggcccggctgcaaagcccctcactgcctggggccggcagtgccagctggctgcttggagtgtggggcccgccgagcctgcgcccacctggaactcatgctggcccatgagcgccgtgcacagccccagttcccacctgtgcctctccctccacacctccccgcttgcagagggagctggctccagcctccaccagcccagagaggggctgccacagtgcaacggtgggctgaagggctcctcaagcatggccagagcagaaaccgagactgaggaggcactgagagcaagcaagggctgctaacacattgtcacctctcaatcccccctctcaaacaggacacc

SEQ ID NO: 104600 - DNA, 642 bp, Homo sapiens
gcccactagattagctagacacagagccctgattggtgtgtttacaaacctttagctagacacagagtgctgattggtgcatttacaatcctctagctagacataaaagttctccaagtccccatcagattagctagatacagagtactgattggtgcatccacaaaccctgagacataaaagttctccaagtccccacccctgccctgtgaggaggcagctgaggcctggtgaggattygagcacagtgcaggcgggtctgcagtgctgggggaccagcgcatcctccgcagctgctggcccggctgcaaagcccctcactgcctggggccggcagtgccagctggctgcttggagtgtggggcccgccgagcctgcgcccacctggaactcatgctggcccatgagcgccgtgcacagccccagttcccacctgtgcctctccctccacacctccccgcttgcagagggagctggctccagcctccaccagcccagagaggggctgccacagtgcaacggtgggctgaagggctcctcaagcatggccagagcagaaaccgagactgaggaggcactgagagcaagcaagggctgctaacacattgtcacctctcaatcccccctctcaaacaggacacc

SEQ ID NO: 104601 - DNA, 642 bp, Homo sapiens
gcccactagattagctagacacagagccctgattggtgtgtttacaaacctttagctagacacagagtgctgattggtgcatttacaatcctctagctagacataaaagttctccaagtccccatcagattagctagatacagagtactgattggtgcatccacaaaccctgagacataaaagttctccaagtccccacccctgccctgtgaggaggcagctgaggcctggtgaggattcgagcacagtgcaggcgggtctgcagtgctgggggaccagcgcatcctccgcagctgctggcccggctgcaaagcccctcactgcctggggccggcagtgccagctggctgcttggagtgtggggccygccgagcctgcgcccacctggaactcatgctggcccatgagcgccgtgcacagccccagttcccacctgtgcctctccctccacacctccccgcttgcagagggagctggctccagcctccaccagcccagagaggggctgccacagtgcaacggtgggctgaagggctcctcaagcatggccagagcagaaaccgagactgaggaggcactgagagcaagcaagggctgctaacacattgtcacctctcaatcccccctctcaaacaggacacc

SEQ ID NO: 104602 - DNA, 642 bp, Homo sapiens
gcccactagattagctagacacagagccctgattggtgtgtttacaaacctttagctagacacagagtgctgattggtgcatttacaatcctctagctagacataaaagttctccaagtccccatcagattagctagatacagagtactgattggtgcatccacaaaccctgagacataaaagttctccaagtccccacccctgccctgtgaggaggcagctgaggcctggtgaggattcgagcacagtgcaggcgggtctgcagtgctgggggaccagcgcatcctccgcagctgctggcccggctgcaaagcccctcactgcctggggccggcagtgccagctggctgcttggagtgtggggcccgccgagcctgcgcccacctggaactcatgctggcccatgagcgccgtgcacagccccagttcccacctgtgcctctccctccacacctccccgcttgcagagggagctggctccagcctccaccagcccagagaggggctgccacagtgcaacggtgggctgaagggctcctcaagcatggccagagcagaaaccgagactgaggaggcactgagagcaagcragggctgctaacacattgtcacctctcaatcccccctctcaaacaggacacc

SEQ ID NO: 104603 - DNA, 586 bp, Homo sapiens
tcattggtattagtataacttttaagcagccttaatatatatctgactcagtctttcaggaatatatgacctagttgactttcttgaggatttttttataccttagtttccacgagtgtaaatctctcagggaatgcaggaacacatcagcccacccagaaattagccaaaagtaaagtagctaatagcaaayggagttaatttccttatctatactgctcttgatgtctagattctggcaaaataacatcaaatgaccctctggcttttggcacctctgctgcttgacatgataagcttgccccttcaatctcaaatcttctcctttttacttctttatacttctataatagttcacaatcagttgaccaagctctaacttaccttttgttttttattctctttatttttgactatattatagattgttgtagaaatatctttctatggtatataaattatcatgtcatacacttgttcaatttttttcacacttttcatactgagacctagtaagtaaaaaatatggcattcttccctttctaattcaaattacttatttttatgttgtcctcccaattccaat

SEQ ID NO: 104604 - DNA, 655 bp, Homo sapiens
aagtaacctgataaattacagatagcagtctagtcaatgaatggcctagaccccaaaatttattttaccatgcctgcaataaaatgactgataaatacaaataaggaagcctaaaactgtcttatgacacaagrgggaggtaccagttgaggtacataatctgctggatgcgaaccaaaactacatggttcacaggataggtgatcacaaattgggggaaaaaagacaaatcaaatatatattttgtaaataaaaatcatcatatgtacacttgtttacataatgtgaagacataacttaatgacaacacacattgattaacctaaaatgtaggatttcatgaccaataatgcactaaaattttaaaattaaaaataaaacctctgatcaaatgtataaattaactccataaaacaataaaacaaagagcagaattagtcactaaacaactatgcaatttagcatgtcagctaaatggagatgtggggaataaacaatgagcctgcaactgaaaactttatttttattttattattttcctgcgtggcttctataactgttaatttttatcaccctcaagtctagggctaattcacttcgcctgaataaccccaatttattacatatttagaacctggaaaggaagactattttc

SEQ ID NO: 104605 - DNA, 539 bp, Homo sapiens
ccatcgttgggggtaaggagagtattgataagtcctgacatgttctagatgtgccaacattgagatttttatctcaggtgaactggaatgaaatactggtgaaggacatsgtacgctttatgaaccataaaattgcacttaaaggtgagggaaaatagtgtttataaggactttggaagtaggcagctgttgctgagtaccactgatgcattcaggagagaatttcacaagcaaaggtagaatattaatcaaaggacccagaagatagaggaaagaaacatagagaattattctgaggccttgtgacctaatcaaggctcttccaacatttgcatggctgaatatttaaattgctttgagccagcaactcctttcaattttctctttttgagcaggaatgtctttagtgattattcagtgtctcctctactattacatgtgggatgtgcaggggtgagggactgattatttgtctctttagtttcacagatctacagtttgagataaactgcatttgaagagctgtgctcaaggaactg

SEQ ID NO: 104606 - DNA, 539 bp, Homo sapiens
ccatcgttgggggtaaggagagtattgataagtcctgacatgttctagatgtgccaacattgagatttttatctcaggtgaactggaatgaaatactggtgaaggacatcstacgctttatgaaccataaaattgcacttaaaggtgagggaaaatagtgtttataaggactttggaagtaggcagctgttgctgagtaccactgatgcattcaggagagaatttcacaagcaaaggtagaatattaatcaaaggacccagaagatagaggaaagaaacatagagaattattctgaggccttgtgacctaatcaaggctcttccaacatttgcatggctgaatatttaaattgctttgagccagcaactcctttcaattttctctttttgagcaggaatgtctttagtgattattcagtgtctcctctactattacatgtgggatgtgcaggggtgagggactgattatttgtctctttagtttcacagatctacagtttgagataaactgcatttgaagagctgtgctcaaggaactg

SEQ ID NO: 104607 - DNA, 576 bp, Homo sapiens
gggtgtaaggggcaactccagtaaaatcttagccacagaataacattctggatattatccatctgtgagactggttgtttgccacagctgtcttgggaatcagacctcctatgacagtcatgaattttaaaaagtatccattgacttctgacctgttggttttgagaaggtgagtaagcaaacagtaggatggtgactcgaagttaaatacatttcaaggaaaccctcaaggagaggtcagagcagtgaaactcgaaggcaaagcaatggcttctccgggaagaaytatcattttcccagcggggcatatagattctccatacctttctatgaaaaccatgcagattacatacataatatttgtgtgtaaattgccttgaatttaaagggcacttttccacaaaagtctaaagcattttcttgttcagagaagtagtttttctttgctcatcttccagatggatataccaaggcactgaaaaattgtgtgtagaataacgctacaactaattttctgggctttccattgaaccctttcttgatcaactgtactttgtatgcatacacatgcataac

SEQ ID NO: 104608 - DNA, 456 bp, Homo sapiens
ctctaaagaagactaaagccctcaagtcagtaaaacagttggttggcaggctgcctctctttcctgagaaaatgtctgtactgcatttgttggataatttcatyttagcctttatcagtttactgtgctttgtttacaattctggtgttataaaaaatggcatcaacaagttgtctgatttttctctaaattactccttctctttacagatttgttttggttactggtcttacaaattactcagtcattcagatttaatagctgactgacattcatcccaactctgccacacaggagcagtgtgacattggataagttgcttaacctctctgatttctagttgcttatctgtgcaataaaggtaaatgtgtaccttcatgggattgttgtcaaaattaagtaagattgttttggttgtctattgctgtaaaacaaactatccaaacattagtgagt

SEQ ID NO: 104609 - DNA, 586 bp, Homo sapiens
taaacctcttttcttataaattacccagtgtcaggtatttctttacagcaatgcaagaatgacctaacacaaatgggttgatccattcatggcccaatcacttttaaataccccacttccaatactgttacattggggattaagtttcaaaatgagtttcagaggagacaaatatttaaaccatagcttttaataactctgcaatgttgagcaagtttattgatctttttagacttcttgctcttcatctgtgaaatgtgaatactattagtaatgatgccatagaactgtggtgagagtataatgagatagtagaaataaggcactttagcataacatctgagacacagtaaaggcttaataaatgttagctgttattaccaagagcagcatttttaggtactctacaggatgctggatataaaatgatgagcaaacctagacatggtccctgcccttatgcagccagtatttsaggatctgaaagaatactcagcatgcctggagtacgaaaagcagaagaagttattatggcctgtgaaacacgagaggacaggtactttgtatatataaaatttagccttat

SEQ ID NO: 104610 - DNA, 673 bp, Homo sapiens
tgcgtgaaaatgataagtatcaaatgcaaagaaaggaagacggtatatatgacaacatgttaagatttgataggattcaatgatgggtccaatatggtcacattatactttaaattttcctatatgtttgtaagtttgtgaatattattaaaaggaaaatgcttatagtgtcacaaagatttatactggaaagaattctaaaartattcaaaatgaagtgtcctaggttacacagccagacacttcagagcaggtaaatggaaactctgatgctaaaaccaagtttctctaatttgcacatctgttctttatccactgtgcctcactgtatattttgcattgcttctatttttggttctttttaaataaattttttttatttaattagaaaaatgtcagtacaacaattccttcacttctaaataacagccttgttgacttaagggttgtaaatttcaagactgtgagaatgagtaaagaaaagtgagaaaaaaagccatagggccctgaaagtctttacatgtccaagctggaaggaatcatttcactgatattgccaacacataaacctgctatgggagccaaacacatttgcagagttgtggataaagggctggggtgcagttattcttaatggagatgatggccatctgtctcacccctcaaatgtcag

SEQ ID NO: 104611 - DNA, 645 bp, Homo sapiens
tttcaaaattttgttgagttacaattctcacagcctttataggtatataatccttaaaaaatggaaaaaaagctcttaaatatataactttaatgaaatttcaagaaggagcagatgaaattatgtgcatttagccaaccatgtttatttggaaacttgtttatagagaatttttttgttttgcctaattaccagcttctctgttagatgtctgaaagtctacaatggggtgtgtgtgtgtgtgtgtgtgtgtgtgtgtgtgtgtgtttgtgtgtctgtctgtctcatccttccctcctyaggaataggggtgggagggggaatgtagcacctagagacatataaaagcacaggagaagaaaagcagcatgatatagggaaaaagagcacaggcttaggaggaagagaccgagattgaatcttctgctgactttgagttattaatctttttggcatctcactttccttatctatgaagtgattagaataacagctgtcttgtagttgcattttgcagatggagataaagtgtcatcctgcacaagccttgaatatggtgcccagtggaggccatgttgtatctggaatgaagggagaacatttgccagcaggagatgggaaggctggagggaatctttttgagaa

SEQ ID NO: 104612 - DNA, 511 bp, Homo sapiens
ctactacatacctattagaatggttaatatttaaaaagactgaccatatcaagtgttggtgatgatgtggaagattggaagtctcatacactgctggtgagaatataaaaaattgtacaacccctttggaaacaggtcagtatttttttcttaagttaaatatgtacctaccctgggatttaatgattctgctcctaggcatttactgaggataaataaaagcacatgtctattcaaagacttttatacaaatattcatagtagctttatctgtaatagccaaaagcttgaaataacatcaaaagatgaatagattaaacaattgtggtatttgcatgcaacagaatagtgttcagcaataaaaaagaatgaaatattgacacatgcaaaaacatggactaatctttaaataatcatgttgagtgaaagaggacaaacaaaaagtacatactatatgatctcacttatataaaattatagaaaatgcaakttaatgtataaagacagaaag

SEQ ID NO: 104613 - DNA, 549 bp, Homo sapiens
attttaagggaaaacaacccagccacatcacctggtgttagactggacctgagattcgaagatattaaactaacacataagcaggacagagagaagatgcctggatgggaagtgtatggtgataattaaaacaggaactctggacccgacagtaagggttaaatgagtcaagatgtgaaaacagtgcttagragaatggctggcatataataaataatggagaagtgttcattgttattatacagtgaatcatccaccctaagagcaaagctaatgcaactaattctgtcttctatggaatacttcaaaattattttccacttttgattaaacctcatatttgattttattagaattttacctaagaaacatcacagtttgttctgggtcctatgctgtacagggaatagcctacagtctggtacaggtcaaattaaactatcctaaccagttcagctgaaattatggtcaaaacaacaataatgtagatgtttcataagaaatatcatcctttgttacactgtgtccctactgaagcttgtacaactt

SEQ ID NO: 104614 - DNA, 595 bp, Homo sapiens
tgagtgaatggatatttattaggtatttgaaacttaccattcactgcactagtattaggaggtggaaatataaaagtaaacaagacatgatccagtttctgcagaaactcacgatctaacagtattttagcatttctctaacacttactgtattctattttacattggaattatttatgcacacatcttatcttttcttgggatttatagaacttaactgtgtatacttcttgctacytggtgctggttcaattactgttaaatgcttaataacatttagctttgtaaagtcttgtcttctttagtacaactaagccttataaagtaaaaaagaaaaaagagatgcatttattagaagacttcacaatggtacaaacattagtggaaataaataccaatttacaagctaactgtaatttataattttgatgagtgtcattgtgatgtatcaggatcctgatttattacttatcatatctgaatacatgtaatgatgaactgtgttttaaatagtgtctcactataattatgcattcttaacatgtacctttctggtttcatttgcttatatatagctttaccaggcagaaacatc

SEQ ID NO: 104615 - DNA, 432 bp, Homo sapiens
gaattcagacaagtcatcaggacagtttctgtttcctcatcgctttgtaagcattcatgaatttgtggatgtgtgaagtgagttctaatcctctagccagaatagggtaaaggttttatctttccagtaagggctccatatctatctatctccctcctatcactctagcaccctgtactctttggggcactctttctattagcagatagagccttatcaatgttctcgggacttcatctgatcctgttctacatgagaatcatctgggaagcttagacaataggtactgtcttgcctccatcccagagcaattaagttggaatctctaggggwagagcacagttgttcacatttattactcccaggtgattctaatgtgccatcaaggtggaaaactttgctatagatgttgaggcagtgatactcaacgtt

SEQ ID NO: 104616 - DNA, 633 bp, Homo sapiens
tagtgaatgggaagtactcaataaaagttagctagctaatggaaggagaaaggagtcatcagtagagttggaccaaggttaaatgttttcatctcccttcattttatccctgaagccttttggtaaagaggaagtcaaactttcatcctttttcttcctacatggctattctgacaattaccctgtgctggtcaaagaaagccccaccccaggaaagaaaacttggtgtaggcttcttaagtagctgtttttcttaaaaaaaaaaaaaaaaaaaaaaaatacaaaagaaattcctttgtttcatgatcctttctctagctgaggatgcatgaaaaatatttgctacataatttctacattagtataagagcataatttgagtgcttacattgagccaagtaactttgctaagcattttgcatattaacattaggttgatgcaaaagtaattgaaataaaagtaatggcaaaaatcacattctcccaaagttcctaggaaatgaataacatttttatcctcatttacaaatgaagrcaactgaaacttaatttgccaaagcactcagaggtagcaaaagactaaatttgcatcgaaaatgagcctgtagaaaggacatacacacacataaaaaa

SEQ ID NO: 104617 - DNA, 568 bp, Homo sapiens
atcctggaacatcttgttataacaaaacataatgaagctatcttgagagtcataaaaaggactcagccaacttgaagaagctactgctggctaagaagggacaagtatatgttgttatccatgagtttataataacaacaaatacttcttggtaaatactggtgaatgctactgaacttagaaaattacttggaaaataatgctagtaaagcattttctaaagaaatgatcaatatttgagatgatagatatgctgactgcactgatctgatcactataaattatatgtatcaaaacatcactatgtacctcataaatatgtacaattattatatgccaatttaatgaaaattcaatatgaaatataaaggaatagaattataaatttaccttgctttttctgtacccactaatcctaaaatttgtcaactagttgatgaggaaacattcctctttataggaatattctagctaaaaagaaaataatgaaaaatgagtaatagaaagtcataattttgtaaccaytaagtaactaatagatgagggcaaagattattagtagctgtta

SEQ ID NO: 104618 - DNA, 510 bp, Homo sapiens
ccaggttaattacctacaggtgtgctgactcaaagtctttgtcaattaaatctgtactaaataaatgtgagcattgccagcttagaggagctgcaaactcttcaggccctagtgccatcagccccctggcccgctttttcactgaatatccgtgtctgagtacgtgtctcatctgtygtgcagttggggtctgcaggacagacccccgcataattcaagatgagatttgggtggggatacaaagccgaactgtatcacccatcatctagtagtcctataaaggcaaagactcacatatgagaggagtccctgtaactataaggctatagttaaaggctctagaaaaaggggcaaactgtcataatttgcagttacaaggggcctcaggtaaaagcctctgaaaaagcatagtaaaatttgttatattttcttggtaccaaaggtcaacagccctgcaagctctcaagtgaaagccttagaggctcatagtctaaaaatgggtgaaaatta

SEQ ID NO: 104619 - DNA, 583 bp, Homo sapiens
gtcactaaatacacctataagaactctaataccaatccttgaaaaggatactttaacaaaagacagtccttaacagaatattaccaaaataaatcaatgtacagaaagggtaatacatcatggtcatgtgggatttatcccaggaatttaactttgctaatatttggaaattaattaaggtagttcaacatrataacagcaggaaaaaaatcatattatctcaataaatgcagaaaaagcattttaaaaatttaatatctttccttttataattaaaaaatcttagggaaactataaagtaattgcctcaaacttataaagagcaactacaaaatatcctgttgctgacattataattaagatgatatattgagctgaagcactttcccctaaaaacaaaaataaagcaaagatgtttgctattactacttctgttcaacattttaacagaggtcttagcaagtgcaccaagtgaaggaaaataaataacatgtatacaggtgatatggtgtgtctgtgtccccacccaaatctcaactttaattttatctcccagaattcccccatgttgtgggaaggaccc

SEQ ID NO: 104620 - DNA, 585 bp, Homo sapiens
gatgtaaaataaataaatgatattatgaatagtaaaaatttgcatctgtctctttttcgtctgaaaaatattactgtatacatctattttcccagtagattgagacataacaactataaatatatttgataagaagagaaaaataaatgtgtggaaatgcaaggtttcatttaatatccttctgtataacttacttgctagaaaatcagccatgcctataagtaagtgtagtggctttgcactgtcagttaagtgaagctggaatttttctcagatttctcatccccgtggttctgcatcaggagtgatcacagggtaatttgcatgaagcttggaaggcagaagtgaagcatagtagccatgttttccttcagaggtccagttcagaatctcatgctgttgcaaatcacacaatcatcactgatctacttgcttatcttcttggcttgggctagcagctcctctagctcccttctgacttcttcctccagtttcttgcaatcctagtttagatgcttattcagcatcagaaccarctatgccaatgttttctgcaagtcactagcattactgaaattggagtca

SEQ ID NO: 104621 - DNA, 583 bp, Homo sapiens
ttctcatttataggcagaagttttttgctggctataaaacaaatcagaaccagccctggaatcacctaatcacaaagaaaaattgttgttgttgttgtttttttaactgtagtcattgccacctttggggttaggagtggcagagagaggattgctattttgattagaaaaacaaagtatctctggtaatataagaaacaaataggcacactggttcacacagtagcgcatatatccatatgcttagtttttaaaaaggtaggttaaaacataacactgccaaattcctctgaataatattataaaagagtgtctttaatgaatggcttgatttgttcagtttctcagatgttagtttccctttcaagggaaggcaagtagaagagactagagactggggtcytcaatttgagcagagaaagagaagatggaataaaagaacagatagaagccaaaggagagaggtggtcaataattcccaacgggggaatgctgaaagaatggctttagaggtatataaaacctagggttaaactgtccttttctgtgctgtgactgctctccaaactgcagcagatttgtc

SEQ ID NO: 104622 - DNA, 614 bp, Homo sapiens
aaatgatgtacatatttgctcctaccagcacctctcactcttcccacatccatatctatacgggggtgaagggaagttcctatggccagctgtacaattctctgctgaaaatgacatggccttcttcaaaatcttaaatatctatactttgattctcctattgaagcttggcataaactctatatggtgtcttttcccaccacagaaagctgtaataccctcgtgttcactgggttgtacagcccaaggtacagggctgtgagcatcacagaccagagctgatgcaagctctttcctgctcaaggacaactcaaagtagacagctctcaatgtcatgcgataaacaagtcaaagaaatagtcccaagttcctagcaggcattgtgtttatgatttagaaataagaggttaaaaatgcaataatttgtccttttcttttgaagaaaaatcccagcatgatacacctactggatccctaacaacttcactgatggtggcaggaacttgaawctctacagggcttatctcccaccctctgaaaaatatatggcttataaagccttccaacatacttgccatttcttattcatctgattcagttaacccaatgtcgtt

SEQ ID NO: 104623 - DNA, 525 bp, Homo sapiens
tcagccccaacaagagactcccagtgtcctctgcaggcctgtggcatgatgggaagcacactggaccatggctaaggacactgggctgaagcagactttgcctcttagcactagggtgatactgaaccagtcacttcctaaggtgggcagctgtggttcattctgcaggatccatgtctattagggcatctgccactccatcccacagctcctagggaacaatctcagtgccctgctwgtcccctgatgacagaggtaggcacacaatccatgcctacaaattgtggaaccccaccccaccccacccccatccatagtaaatggactacgaattggagatgcaacccaggcagggaaggtcagtgtgctttcacgcctttgctatatggatgctggaagagatagagtgtctcctccttaggatcccaagatggcagcaccacgtatgtcttaggcttccagtgggtgtctttcccactgtggagaaagaaagactgcctgaaagaaagccacagagaaaagcag

SEQ ID NO: 104624 - DNA, 643 bp, Homo sapiens
cattgtgttaagtgtcaccctccatgtctgaggcactttgcagtttacatgctaataatgttttttccattcattatctccacttatgatttgagcatgccttgggcaaagaagagggcatcacccagagctcaggctcgcatcagtggccccacggaaaggcaagcaggaagggctgggagttggtaagaaggaagggttgatggtgggaggacatcaggggaggctccacagccaagggacaggaagctyggccgtaagcagccatgaggctttgagacccttagtctcaaccttccaggaagcagcccttacatctttggcagccctcacctttccttctgacctggtgccaaaggaacagactacatgacctaaacaacctctcctctggcctgtgtccttggtataagaaatctggaataagaaacctgtgaacgagatggggcttgtgaactgatttccatctgattttaaaccattcagatccaaaggggaaaataatgaaccattcccataacagctgccttcatggcagtaactcagatataacgaaagggaattctccaaccagttctacttaattcatttgttccttccttcctttcttcattcattcaacattccttgctctgagtctgtt

SEQ ID NO: 104625 - DNA, 643 bp, Homo sapiens
cattgtgttaagtgtcaccctccatgtctgaggcactttgcagtttacatgctaataatgttttttccattcattatctccacttatgatttgagcatgccttgggcaaagaagagggcatcacccagagctcaggctcgcatcagtggccccacggaaaggcaagcaggaagggctgggagttggtaagaaggaagggttgatggtgggaggacatcaggggaggctccacagccaagggacaggaagcttggccgtaagcagccatgaggctttgagacccttagtctcaaccttccaggaagcagcccttacatctttggcagccctcacctttccttctgacctggtgccaaaggaacagactacatgacctaaacaacctctcctctggcctgtgtccttggtataagaaatctggaatamgaaacctgtgaacgagatggggcttgtgaactgatttccatctgattttaaaccattcagatccaaaggggaaaataatgaaccattcccataacagctgccttcatggcagtaactcagatataacgaaagggaattctccaaccagttctacttaattcatttgttccttccttcctttcttcattcattcaacattccttgctctgagtctgtt

SEQ ID NO: 104626 - DNA, 643 bp, Homo sapiens
cattgtgttaagtgtcaccctccatgtctgaggcactttgcagtttacatgctaataatgttttttccattcattatctccacttatgatttgagcatgccttgggcaaagaagagggcatcacccagagctcaggctcgcatcagtggccccacggaaaggcaagcaggaagggctgggagttggtaagaaggaagggttgatggtgggaggacatcaggggaggctccacagccaagggacaggaagcttggccgtaagcagccatgaggctttgagacccttagtctcaaccttccaggaagcagcccttacatctttggcagccctcacctttccttctgacctggtgccaaaggaacagactacatgacctaaacaacctctcctctggcctgtgtccttggtataagaaatctggaataagaaacctgtgaacgagatggggcttgtgaactgatttccatctgattttaaaccattcagatccaaaggggaaaataatgaaccatkcccataacagctgccttcatggcagtaactcagatataacgaaagggaattctccaaccagttctacttaattcatttgttccttccttcctttcttcattcattcaacattccttgctctgagtctgtt

SEQ ID NO: 104627 - DNA, 643 bp, Homo sapiens
cattgtgttaagtgtcaccctccatgtctgaggcactttgcagtttacatgctaataatgttttttccattcattatctccacttatgatttgagcatgccttgggcaaagaagagggcatcacccagagctcaggctcgcatcagtggccccacggaaaggcaagcaggaagggctgggagttggtaagaaggaagggttgatggtgggaggacatcaggggaggctccacagccaagggacaggaagcttggccgtaagcagccatgaggctttgagacccttagtctcaaccttccaggaagcagcccttacatctttggcagccctcacctttccttctgacctggtgccaaaggaacagactacatgacctaaacaacctctcctctggcctgtgtccttggtataagaaatctggaataagaaacctgtgaacgagatggggcttgtgaactgatttccatctgattttaaaccattcagatccaaaggggaaaataatgaaccattcccataacagctgccttcatggcagtaactcagatataacgaaagggaattctccaaccagttctacttaattcatttgttccttccttccttycttcattcattcaacattccttgctctgagtctgtt

SEQ ID NO: 104628 - DNA, 546 bp, Homo sapiens
taataaagaactttgaggtattattgatggaaaagataatgttttcaataagacttgcaggggctgaggttcgagacattccacacccagcaaagtgcaggcgtttaaaacagacgccgaccctctggctgtggtgctgccagcgctgggtctgacagccacaggccaggcagctgcccgtcgctccgtggtcaccgtgcctccatttccagcactatttgaattgcccaactggttttaagaactctgtcctttttcaaatggttttcctgaccatcagtaacagctgagcttatcagagagccacaagagaccgttttcccagtatgatggctttggatttacaagttgagccgtggataggagagaaaaagaaatcgatcatttacagtggaatctcatatttctgttttgaaaggcaaaattggattcattttttccacctttrtcttcatttgtggattattcttctgccttcctcccttacaaggaaaaaaaaaagaaattacagaaaagttggttttcatctgccatgtggccagggtt

SEQ ID NO: 104629 - DNA, 607 bp, Homo sapiens
aggcaattcttgcattgaaataaagacctgagactgggtaatttataaagagaagaggtttaaatagctcacaattgtgcaggctgtacaggaagcatggtgctggcatctgctcagcttctggggaagcttcagaaagcttataatcatgacagaaagtgaaggaggagcaggcatgtgatatggccagagcagaaggaagagagagagagtgaagggggaggtgccacacrcttttaaatgaccagatctcataagaactctattatgaagacagcaccaagtcatgagggatctgccaccatgatctaaatgcttcccactaggccccacctccagcattggagattacaattcaacatgagatttgggtgggggcaaatattcaaactatatcagtcccacttgtttatttttgtttttgttgcaattgctttcggggacttaaccaaaaattctttgccaatgttggcgtatttcctaggttgttttccaggatttttacagtttatggtcctacatttaaatctttaatccattttgagttaattttttatatggtgaaagggaggggtccagcttcttctattttctacatgtggctagc

SEQ ID NO: 104630 - DNA, 509 bp, Homo sapiens
caaggttaatattgatatgtgaggttttctttccatcataatgctgtcagctagttgctttgtaatctcagttgtgtaattgcattattggatctctgaatattttatttatgtgtgttttgttttccatatttagaattcattggaacatttgttttaggaccagcataatggtgacaaagttccttaatgtttacatgtctgggaaagactacttcttgtttakgaagattagtttgacaggatataaaattcttggcttgaatttttttttttttttttcagaagactaaaaatggccctcaatctcttctggctcttaaggtttctgctgagaatttcactcttaatctgatgggattcccttcatagatgatttgactcttctctttatctgcctttatgaatttttcttcatcattatccttggatactgtattagttcattttaccctgccaaaatggaatacctgagacaaaataatttattttcagaaataggtttgttt

SEQ ID NO: 104631 - DNA, 499 bp, Homo sapiens
aataggatacttccatggaaaaggagagttgttgaatataaaggaaggagaataatgaaagagcaatattcccaagtagaaatatagtttttgtagttttattgtaataattcatataattggttaaaatgcctccaaggaggtaacctcttaagcatcaattatttacttcatttagacagaatttgattagcaaactttgactcaaggcacaaaagagtggcaatatttttggcctttttgttgcagattgaaatatgattaaatgatttcaagactgttatctcttgtaggccagmcttcaatttattttcactgaaatatgtgtttagaatagttcttttacagaaacatttataaaaaaatcagaagcatggaataaaaattatttgtgaattcttgtttctggttatggtctatttagaatcataggatagtttctgagacagcaagcatctaaaggaccaagattcctaaaagaaggcagttatgaagcatt

SEQ ID NO: 104632 - DNA, 572 bp, Homo sapiens
acaaattttgggtatgattttctcttgcttttctagattcttaaaatgaattattaggttatttatttgaagtttttctacttttttctataggtgtttatagctrtaaactttcctcttactactgctttcactgtatcccataggttttaatatattgtatttacattatcatttgctttgggaaatttttaaatttccttctcaatttcttcattgacccactgtttattcaggagcatattattaaatttctatgtgtttctaatgcttccaaaatccctcttgttattgatttatagttttattccattgcgttaagagaagatagatagaatttcatttgttttgaattttttaagactcgttttgtcttaaaaaatggtctgtccttaagaatgatccacgtgctgaagagaagaatgtgtattttgcagccattggatgaaatgttctataaatactggttagatccatttggtctacaacgcagagtaagtatgatgtttctttattttctctctggatgatctctcctatcgggggaacctgcccctgatatttcaacatag

SEQ ID NO: 104633 - DNA, 572 bp, Homo sapiens
acaaattttgggtatgattttctcttgcttttctagattcttaaaatgaattattaggttatttatttgaagtttttctacttttttctataggtgtttatagctataaactttcctcttactactgctttcactgtatcccataggttttaatatattgtatttacattatcatttgctttgggaaatttttaaatttccttctcaatttcttcattgacccactgtttattcaggagcatattattaaatttctatgtgtttctaatgcttccaaaatccctcttgttattgatttatagttttattccattgcgttaagagaagatagatagaatttcatttgttttgaattttttaagackcgttttgtcttaaaaaatggtctgtccttaagaatgatccacgtgctgaagagaagaatgtgtattttgcagccattggatgaaatgttctataaatactggttagatccatttggtctacaacgcagagtaagtatgatgtttctttattttctctctggatgatctctcctatcgggggaacctgcccctgatatttcaacatag

SEQ ID NO: 104634 - DNA, 418 bp, Homo sapiens
ccaaggctcctgatcagccaggggtcctccaggggtgaagcttactagctgtggtggtggccagcattcattcattcacttgctccttcattcattcactcacacacacacacacacactcaatctctctcacccaccagaactgtcacagggccctgcttcacagcctgggaggcttgtccagcctgtcatacctcctctgtcagctctctggtccctcgtgccagctaaattgagatggggtggaggggatagtcccagtcaccaccctagtcacggtagcttttctggtccttgcacttacagagctagctggtggcagagagaaagcaggggcaccgcagctcctgcctatgggcagcatgtgatcttctcccacgttctraattggcatcaccccctccctgccagagctcat

SEQ ID NO: 104635 - DNA, 611 bp, Homo sapiens
tcctcactgcccttgccatgccacctccttgaggcactcttggctagcagctgctcagtccccacagcatgcctgccttgggtttgggagataaatcagtatcctctgtgctctccactgctacttagggactacgtcatcatcaccccattttacagatagagaaatggcagcctgtagagggtaaaaaacgtacccatggtcaggagactggatgcttacaaaatcattgaaagggctagaaaatgggctctaggtgggcccctgggaatgwcttccagaatcccactgagctgacttgccaatttggaagtcaggtgttgtagacagaataatggctccccaaagatgtccatgtcctaattcctagaacctgtgaatattcatttttgtgacaaagggaatttaggatagcagatgaaattacagtggtaaaatggcttccttcgaggtaaggaaattatcctggattgtctgggtgtatccagtgactacagtatcccagtgtagacacgagggttctgaaatgtggaagatgaagaagagtcagtgtcagagtgatgtaatgtgagaaagacacaaccagtggctttgaagacagaagggtcttc

SEQ ID NO: 104636 - DNA, 549 bp, Homo sapiens
tttgtttcccaagctggtctcaaactcctggactcaaacaatcctcccacctcagcctcctaaagtgctaggatcacagatgtgagccagtatgcctagtctatagttagaatttgatttaatattgagattgaagagaatctgggaattgaatttagaaatgttaagactcttgaaaatcttactttatggagcaagtaatactcatcagacttgtattctgcattaattttagtcaaggtcaatgttgttcttagaaattacctgtcttcaatggaaatgaaagttaatgatctattattttcattatgctacccctaatgcctggacttgatcaaaaaaaaattagtaattaaatataagaataaaagtatgaccggacttcaacatatcgcttgaggtctggagccagcaagtaactaacagtatttaatagggtgagagctttactgtggcttagaagagaawcaataatgtaatatcaaaatgtaatgtaatcaaaaatgtctttcattgctgtttatatattgtgttagttcatatgcatta

SEQ ID NO: 104637 - DNA, 606 bp, Homo sapiens
ggcaacttgtgatatcatcatgcccaccaggttctaaattgacctcataattggagatgtcatcaattctgctcagtctatgaggtaattgatgacatcactgagtgatagtaatgagctttcttttgcggagggcattctatgtggtggacggctgtatcagcaytttgaaagttgctggtatttattgagtgcttactgtgttccaggcacagttctaagccccttctgtgtgctaaatcctataatcctcctgataacgctaagtggtaagttctaatgtcaaacccattttacagatgaggacactgaggcacagctgaccaaggttgcacagtttaaaggtggcagagcctgcattcaaatcaatgtagtctgcacagtttaaaggtggcagagcctgaattcgaatcaatgtagtctggctgtagagcttgggctgcacaaagccagcagagggaggctgagacccagaaaatcaagtccaaaggaggcactccactgcctctaagttctccatctgtcctccatccaggcctgccagagaaggtcctcaggataaagccccaaactcattatctcagggatcaaggccaccccgtcagc

SEQ ID NO: 104638 - DNA, 531 bp, Homo sapiens
aacatgctatttctgatcactactatactatgtatactatactatgtatactgtagtaagtatactatgctatacctactgaataaacattgctgggaataggcctagaaaatagcgtcttaaatgttcatcccagctcatgctttagaaaactaagctttgtgaacctctgctttatataatttycatatgatactcaggaaaacctggaaaagtgggtatgatttcccccacattacagatgaggaaagtgacggacacggaggtaaagtgggtataatggagccctcacccttcaaggctacttcctggaggagttttccaccatggcattgagttaagggactgtgaacaagagacagggcaatgcaggccagaggggaattctgtttggacacaggaggctttctctgtttcagagactgtgtcacctggccttaataacccagcctcacaacctcacccatagcttccattcctggctttaccgtttgctccttgtgagaccttgggctagttgcttagtctctc

SEQ ID NO: 104639 - DNA, 393 bp, Homo sapiens
gacatgaattcctaacagccaggcaactgcagaaagtgtactgaggcacagttgaaccaggattttatatctccttgatgaacaaattggcttaccacactgtcagtctgattgtttkcctctcagccaattactaagacaacagaaaattgcaaatccacttagccagtgaatttggccatgtcatagagacttggtaataaactctatttccaactgtcttcataaaagataaacatataacatttgaaaatcactctgaaggatgtagcaaacatttttcaaatttgttctgatgacactgatattgctatcataaaaactttaattatcaggttgatatgaatttatcttaagttgccttgatatggtttggctgtgtccccacccaaa

SEQ ID NO: 104640 - DNA, 630 bp, Homo sapiens
aacaactactctttgtttattaatttaatattttttgagcacctatcaagtaccacatgttgtgctaagttccagagtagcaaactgtagttgccctggtctttagctgcctgtcatatcgtaatctttcctatttctcttggtatcagcacgccctttcctcacttttgatcccgttggggtaataattatgatgccaatgtctcctgagcctgtggtgataggcatttgacttaggctgggctaatcgtggtacctgacataaattcacagawgtgcctataacttataggggaattaatccgtgggacatttgggaaaaaaaggtttgctttcttttggagtgactaatctgagtttacataatccagaatgtatcagttagtaaactagtaattttccttttatgcctaaattagaatttgatttctatctcttgtagctaaaagtcttgattaatgaaattgtggatgcagagatgtacaaaataaggttttagtccttaagtaattctgtttgattagaatggactcataaaacaatagttccaatgtaatatgaaaagcattatttttggtgtatgtatagcaaaatggaaccagagaggagaaagaaacttggctggtgaag

SEQ ID NO: 104641 - DNA, 673 bp, Homo sapiens
agtttttctttctgcactgttttggtcctaaatcttaaagatgtaaatggtgcctctgtacccatacaaactctacagaagcagtacaaggttgagtttagaacctttctgtgaaatgtgggtaccatctcatgttgacttggcaaatctaaatatttttgctttatcctatttgagtgatgggtatgggttacgttttctgcataattatatgaacttttatttagtcattgtctatactgctaagaagttattgttgcactggggtactagctgaaacacaatattataaggccaaggggccaggaattctgaccttagccaaaagtacccactttaaacagaaagataaatgtctacacccgtgtgcttaataatatttatctyttttgaaaatgtcacccctaaaaacgtgactaaatcactgctactgaagccacacttcctcctaggtagggatgggatggtggggtggggttgatgttgcatagggttaagagcggcaagtaagatttccctgtgtttagtttacagctctaccacttactagtgttatgacatgagtcaagttatctcatctgtaaatggggttagtaatagcacttacctcatagtgttggtgtgaagattgatgtgtatatgttattatgcataatgctcttagaacagtatt

SEQ ID NO: 104642 - DNA, 516 bp, Homo sapiens
ggctctctactgtgatgtttgcagccaggtggtcaggggttcttgccaaccaacccactcatccatcccaatgccttcatggccttacacatcccctcatcctcttgccccactgacggccaccctaggcctttggagcccttgaaaaacagtgattatgatcctgtccactggccttgaaattggctgacttctgggatggaaaatatggcagccaaccattcctgtgacaccatccagagcctccgccctctgtaattcacagggatagaatctgcaggtcattcgaaagggcctctgttttttgttttatttatttatttagagacagagtctcactgtgtcctgaagtgcagtggcgcgatctcggctcactgcaasctccgcctcccaggttcaagcgattctcctgcctcagcctcccgagtagctgggaccacaggcgcccgccaccatgcccagctaatttttatgtttttagtagagatggggtttcaccatgttggccaggctggg

SEQ ID NO: 104643 - DNA, 590 bp, Homo sapiens
ctatatttagaatgtcattccttcaattaattagcttctacaattgaaattataatatattgtaaactaaatttctggcagagatatataaagatgtacacacttaaatttaccttcaaaactcaatggagttaaaaatgataactataaaatatactttgatytataatttacaaagtcctttgcctacatgatttcattaaaatatgaaaatcctgtgcaactttcagttttgttttgttttttgttttttttttctgagacagggtctcattctgtctcccaggctggagtgcagtggcgcgatcctgggttcaagcaattctcctgcctcagcttcccaagttgctgggattacaggcttgtgccactatgcctggctaattttttgtatttttagtaaagacaaggtttcaccatgttgaccaggctggtctcgaactcctgacctcaagtgatccacctgcctcggcctcccaaagtgctgagattacaggcgtgagccactgtgcccggccgcaactttcagtcttaaaacagctattatcgtaggctttgtaaatttctttgaaatccttaatttaaagcat

SEQ ID NO: 104644 - DNA, 590 bp, Homo sapiens
ctatatttagaatgtcattccttcaattaattagcttctacaattgaaattataatatattgtaaactaaatttctggcagagatatataaagatgtacacacttaaatttaccttcaaaactcaatggagttaaaaatgataactataaaatatactttgatttataatttacaaagtcctttgcctacatgatttcattaaaatatgaaaatcctgtgcaactttcagttttgttttgttttttgttttttttttctgagacagggtctcattctgtctcccaggctggagtgcagtggcgygatcctgggttcaagcaattctcctgcctcagcttcccaagttgctgggattacaggcttgtgccactatgcctggctaattttttgtatttttagtaaagacaaggtttcaccatgttgaccaggctggtctcgaactcctgacctcaagtgatccacctgcctcggcctcccaaagtgctgagattacaggcgtgagccactgtgcccggccgcaactttcagtcttaaaacagctattatcgtaggctttgtaaatttctttgaaatccttaatttaaagcat

SEQ ID NO: 104645 - DNA, 521 bp, Homo sapiens
aactgtgtccaaataaggcatacactgagctgtaaccaatccagccattctgtacctcacttccaatttctgtttgtcatttcctcccccgctttttgttttgtctataaatcttcttccaccatgtggctgcgctggagtctctgtgaatctgctgtgattctggggsttgccgattcatgaatcgttcattgctcaattaagctcctttaaatttaatttggctgaagtttttctttcatcaagagcttcaggaaaaaatagagagcttagtttccttgttaggatagtaaagggagaggtcaccaagaatatatgactcgaactgagaggattttttcttttaataacttaatggctagtttcttttttttaatgatatatatttgttcctttaaaaaataaacaatttttaaaaataaaaattaaagttaaaataggatgggtgtcgtagctcacacttgtaatcccagcactttgggaggctgagaagggagagtcattaaggccaggagtacaag

SEQ ID NO: 104646 - DNA, 629 bp, Homo sapiens
tgcacacatttttataccagttttcctaggaggaaatatgggttggttctttggcaaataatagtaataatgctttacattcttagagctcccactgtcttaagagcttcctgcactgtgctgaagaaagatcaagagatgtcatctgaggtgaagtttttgaaggaagaatggtttttcaattatgaaaggggagagctacaaaaggtcacagaacacaacaagcaaggatagatgtaaagctgtgagagataatgacattttaggaaaactgtaatcagttttacagcattgttttcattcaaaaaatactcttcaaattattctataatctaggcattccagtaggcaacatcataggacgtcatagttaatgcgtggttaagaactaaagcataaaagtkgttacccaccccctaacaaactgaagtgtctgtaactgtatctatattgatccagatattttaaaattaatttcacttcatctttctttctctagtaattgcaactatttgtaaaaattgctactttgataaaggatgtggtcacaggtatttttcttattaaaatgagacctttttttgtcagttctcacaatggaagtagtatgcacgtataatccacaagtt

SEQ ID NO: 104647 - DNA, 454 bp, Homo sapiens
cctgagactttacaaattcctactgttgaatctcttctccctccatttctccaagatgtgaactttcccccaactgagtcccaaattgcctattgtctaatccaatactgtagcatcctttacttggttacttcatggtgatcttgatgtttgtttgtttgtttgttttagaattatactacytgtttcaaaatggaatggcaaacaatttcagggcctaggaaatggtctttctatattttgtcatctgtttcctttacagaaatgtaaatacctcctaactcccacaaacaaagattatattacctttttcagtgagattcctgacccatcagatgaggagatatttattttgatttttatgtggaattttatggtccattttttaactattgtctatgtcaagtagaaatgtattaaatatgattttccaaaattaatcacaaagcaccct

SEQ ID NO: 104648 - DNA, 634 bp, Homo sapiens
aatcatttaataatatatttatatataaaatagcaaaacattgtatacattaaatatatacaatttttatttgccaagtattcttcaatacagcaagggaaaaatgaatatactatctgtatcagtcagggcacaaacagtgaacagaaacgaaacagaagtttgaacagagaagatttcatacaaagtgtttttaaccgtaatagraaactggagtaatgaggtattggctagaagaagtaaggagaaccctaagcagtgtggggctagcagacataagaagccatcactatatcttgggctgagatagtgtgcccaaggaggaggctgcgcccccaaccccaaagtctggaggtcataaacaaggcccactatatagtagaaaagtcactgtgctagcagaaattaaacatgttttctagggttctagggaaggtttcatggtgtgggggacggggtatccctgtctcaccacaagctactaaactaccaagggcaggagtgttttccatagggtgactaacttgtcctggcttgtccaaaaatgcctatttttaaagtataaagtcccatatgccacaaacacccgcagtcttgagcaaaccagtatggttggtcatctggatttctgata

SEQ ID NO: 104649 - DNA, 634 bp, Homo sapiens
aatcatttaataatatatttatatataaaatagcaaaacattgtatacattaaatatatacaatttttatttgccaagtattcttcaatacagcaagggaaaaatgaatatactatctgtatcagtcagggcacaaacagtgaacagaaacgaaacagaagtttgaacagagaagatttcatacaaagtgtttttaaccgtaataggaaactggagtaatgaggtattggctagaagaagtaaggagaaccctaagcagtgtggggctagcagacataagaagccatcactatatcttgggctgagatagtgtgcccaaggaggaggctgcgcccccaaccccaaagtctggaggtcataaacaaggcccactatatagtagaaaagtcamtgtgctagcagaaattaaacatgttttctagggttctagggaaggtttcatggtgtgggggacggggtatccctgtctcaccacaagctactaaactaccaagggcaggagtgttttccatagggtgactaacttgtcctggcttgtccaaaaatgcctatttttaaagtataaagtcccatatgccacaaacacccgcagtcttgagcaaaccagtatggttggtcatctggatttctgata

SEQ ID NO: 104650 - DNA, 612 bp, Homo sapiens
aggtacttaatatttgttgaatgtatgaatgacaacttgatcaaatatttatatgaagatatttttgtatctataaaaagagggggtacttttaataaacaatcttaaattttgtgggaacacgataaattatgctttaaatcattgtatcacaactgtccttccatctggaggaaatttaaagagtaactctattttaaatcaagtttttaaaaatcctgatctatcaaaggcttacaaatttttaaaaatattaaaagattacatatgttttttaaaawtctagaaaacaagacataaaatctaagagacaagaaaatccatcttaaacaagatggtagatgcctaaaacagacaaatttactatacaaaaatctttaaatgtttatttatggaaaacatcattaaaaaattcaaggcaatgctagatttgaaaaataatttgaaatgcagaaaacacatagggttaatatccacaatatataaaatatacttacaaattgacaagagaataaatagtacaatagaaaaaaactggcaggatatttaaattggataatttacagaagagaaaatttaaaagccaagcaacttatcaaaaaaaagtccaat

SEQ ID NO: 104651 - DNA, 488 bp, Homo sapiens
gcaaacagttgctgaatttgtagaatgaatgattacatgtgactattttaacgtwtcattaaaaatcggacttctgaagatgataaaggtatgtaaggttgtccaaactttcactatcttatttttatactcctaagtaaaaaataagcaatgacaatccaaaacaaacagaaagtaagaaatttgtttaaaatgtaaagactccaacttacagtgcaaagttaacaccctgaaagtctgaggatatagatttttgtatttaagaatggatctatggggtgttaatttagtgtgatacagcatcaaatataaaggcacatgctaggcagtcagactgtcaggattcaaattcttaccccttcatttaataagtatgtggccaggggaggcaacacagcctctcagtgcctcctctgtaaatgatgtgaggcttaaaagagatatgacacgtagaactcccagcacacggtctaatatttggcaaaagc

SEQ ID NO: 104652 - DNA, 619 bp, Homo sapiens
acaaactgacttgcagaacatttcaaagagaggacgtgatttttgtaccatatggagctggacagcacgttggcaactggttaatttcaacctgtcattttatagacaaggaaactgaggccaagagaaattaaagtgattcccttgggtaattatggctacttaggagtagaatttagactcaaatctaggattggagcctacggtcaagacgtttacttttaaattttgcttgaagcaattacatttacacttgttacttgtgcccccctccaggtctgcttgaggtctattcacattcaactgggtcaactagaggactgtgatggaaggtatagaaaatctagatcactcacgttgaaaggaggggaatatatttcctcttcacytctaatcttcagtttaggctgaattatagcatgtggggaagaagcagagggaagaaaaacactggcacagaagatgtgaacatgggtgagttagcttcaaagaaaccttgtaagacttgcctaccgactttaaccacattttccctctgcttaggttggaaatttcagtgtactgctccttttttcgaaatacagttttacctccctgtctagtctccctgcctgctgtt

SEQ ID NO: 104653 - DNA, 339 bp, Homo sapiens
ggaaacagtcctcccgccttggcttcccaaagtgctggaattacagatgtgagccactgagcttggcctcttttcttcttctctaagaaacctaaaatactgctgctttcaggaaaacagagaaaaccaaagtttagatgactcttcataaaagatatacaacaaaaacagttcaattaataaaacttaggcccaggcatccctgaggtgaaatacggacaggcctgattaaagaaagacagctagcaattcttgaatakaacagccaccatagacatctcctaggtctatgcagaagacattattgttgccgttttataaatgaggaaacctggggtc

SEQ ID NO: 104654 - DNA, 535 bp, Homo sapiens
tttgtatatgtccatttcttaaactttgagttcctgtgagcaagaacatattttttcatcattttgtcctccatgtaatctatcttgtgcaaaatagctatctaatgttcataagtttaagttacgtagaattaaagaacttattttctttgaatgtttaattcccttattgaaaacattgtcatttagatacacactcccagaaaaagtatctattcttccctgagaaagacatacaggactgccatgggctttgtgtaaacaaagtgatttcaagctgacaagacacatttagatttctgagtaattataaaaatagccctagataaagtcyttataaatgcttataacattaacagctctgtgatatgcataaatacacgtaagtaaaatgccacaggttatagtccttaaaaacgcttcgtgcttacagttcacatagcagtatgcataaatacacgcattataatatcacaggatgcaattgttagaaactgcttgtaacattaacaggtcttaccgtgaagtgcatgta

SEQ ID NO: 104655 - DNA, 486 bp, Homo sapiens
tggatatttaaaatgcattaatttttcaatggccaataaaccaataccactgaaaytttcaaaccaccccagcccctagaacacagggcacggctggtcaggacctcctaagtttgctcacctaagtacacaaaaccaacctaaccagctttggctctaataaacagagcctgtcattaacacataggttaccctcctttactttgtgactcacagttttactcaaatgagcaagactctgcccagaattgtgtctctgctgacgttcatttcacaggacttctgagtatggctatagctgcccacctatcatcttaaaaaattctcactgctagctacagttccttcagcatctaaacaaaaggaaattcttgggccaaacaaagctgatctgatggttttatctttaccctgcgaaagctgtgcggcccaacttcagcagcacaattacccttggtcacactgatagcctggctgtaaggaatt

SEQ ID NO: 104656 - DNA, 548 bp, Homo sapiens
aaatcacactgtaggaatccgtcttatttcctcaacactcacagagtttctgcaattctgtttttggccctaaacggccgtctggcacagctgcatggcagagaacagggatgggccaggccagcactttccagctgggacctcagcgggatccaggtcaagcccctgtcccaggatgaacgctgcgtgcccaacactcctggtcccttgcccagccatcctttgagagaacaggtgtgagacaggaatgttgggtggtcataggmgacacaggaagatatcaagcagcgatctttcacagcagcaagaaatgagagctgttaaatcagctaccaggacaagggtgagcctgggctgatggggccctaacaaacaggaaggggctaagcggctgaaatgggctgagtccaacatggcatttggtttgacccatgccctaccccaacctaattatatgctcattaacatcctaaatcacacaccctccggcaccaagagagatcggagcatggccatatttagtatggaaatgagtggcacctgaattc

SEQ ID NO: 104657 - DNA, 612 bp, Homo sapiens
aagtgggttggctggccatcaatttaggcatctacttagatctatcagatattatattagcagtttgtattcattctctctacttgtcccctactctgtagtttccagtgctgccatatccactactgtatccactagccacctgtggccaatgagcttttgcagtgtggctagtctaaattgaaatgtactatcagtataaaatgtacgctagattccagagccttactacaaaaaaaagtgaaatatttgatgaataatttttacattgactatttgtttaaatgataatactttggacatattgggttgaatatacaaattattgaaaattaattttacatgtttatttttatttttaatgtaacttctagaaaatgtaacattatacttgtgcccagatagtatttctatagaccttcattgttctgtaacatatgamccagcccttagccagatcttaatttccactgaggatctcatatttcttattttctaaatgtgaggacctatcatcacttgttttgtcccatgtggccctacaaacaataacaacaagaacaacaaaaatctacctaaatttttcatttatagttgtaaatataccaaaaa

SEQ ID NO: 104658 - DNA, 612 bp, Homo sapiens
aagtgggttggctggccatcaatttaggcatctacttagatctatcagatattatattagcagtttgtattcattctctctacttgtcccctactctgtagtttccagtgctgccatatccactactgtatccactagccacctgtggccaatgagcttttgcagtgtggctagtctaaattgaaatgtactatcagtataaaatgtacgctagattccagagccttactacaaaaaaaagtgaaatatttgatgaataatttttacattgactatttgtttaaatgataatactttggacatattgggttgaatatacaaattattgaaaattaattttacatgtttatttttatttttaatgtaacttctagaaaatgtaacattatacttgtgcccagatagtatttctatagaccttcattgttctgtaacatatgaaccagcccttagccwgatcttaatttccactgaggatctcatatttcttattttctaaatgtgaggacctatcatcacttgttttgtcccatgtggccctacaaacaataacaacaagaacaacaaaaatctacctaaatttttcatttatagttgtaaatataccaaaaa

SEQ ID NO: 104659 - DNA, 574 bp, Homo sapiens
tatatgtgtgtgcataacaaaatatatagaagacacaaccaatrtttattagtaagaagccgaataacaaataagtgagaaattttaattttaatttatggatttgtttgttttatggtggattttttaagaacaacattatggcgtttgaattaaaaaaaagagagcgagagacataggacattcttaaaatatgaaaaaaaaactaaggaagattatatatgtattttcatggaatttacatcactgcagtgtccaaggtaccactgtgattcttcttctgacccccacctttccacattactcacaactattttagtgacatgctctcctgagtggctagaagtagacaaaagggataatatgggacaaaggaaaaagagaatccagtcaaaaatactttgaataaacaattaagagattatatttctgagccctgccaccaactcatttattatatagtcttgtacgcagagattcaattatctgtcttaatttctccatatgaaaaacaaggataataagtccagacccctcctaacctaatgagctaggtagagataaaaatgagaag

SEQ ID NO: 104660 - DNA, 589 bp, Homo sapiens
gaaaaatataccagaatgttgatagagatatttatgtgtacttttgccagctttatattgtattgtggaaaaaagttaaagcaggtaaaacacttaaaatgtgtctggcactaagtcagtgatccagaaatattaatattgcaattttggttatttttgttatttccaataacattaattacctatcatatgccagtcacctgagatatcattcctcatttaatagatactgattatcatctagcacatcaacattacattctcyagcaatgttatagatgacagatatcctgtggacttgtttaaaagcagaagcagaagtttttgcaaacagatgagcaaggtgaaatgctaatgatgtattgtaaggattggggctcttcaccagtattctagcttaaaatgtacaccattcttcaacataaaaagaaattgtgcccccaaaatatttgcaacaaaacccagtgtttacttgctttcactccagcatttaaaccattcatccctgagattccagaggtctacatgttacagcaaaaaaaggtcattttaccctataagaacaggtgtttttccaccttatgccaag

SEQ ID NO: 104661 - DNA, 585 bp, Homo sapiens
tacccctgtattttgcttggcttggttctctaatttgactcagcttcacataaagtcaggaacttctcctgccaacagaacttcagcttctccagtggggatgtgtattctggagagggggatcaccctttcccacttccattgttggggcactcacagtgtttgggatgtctcccaggtcctgcaggagcagtacgcttcctgcagagggtgtgtggatcctctcagaattgctggtctgttcttgcagttgatctgcagctaaaattcacaatgcaagcctctgcatgctgctctgtctggagctgcaatctagtcctgcatcccatctgccatgatcactggaaaaccctcatttattttttaaagggtccagaaaatgctaatctatagagatagaaattagattagtggttgcctagggtaggatggatgcaaaatttcagagtggggggttagaggctattgtatagaatcttttggagataatactgattattgtagtgaawgtaaaattctgtgaatatactaggaaacattgaactgtacacactaattggtgagtcatatggcatatgaattatg

SEQ ID NO: 104662 - DNA, 582 bp, Homo sapiens
tcatttcttcaaaaaatatttgtagagtgattaatacaaaccacaggtaagtgctggattttcagagaataaaggtagcacagtttctgctccctcatgccttacattgtactttgaaagatagaataaaaacaatgaaaaagaaaagtctaaaaagtgttataaggaaagaccacaatgataaagaaatatgcagaagagatcccaaactcattgacaattaaagtgagtactcaataatgtgcagagataggtgaaacgatgaggggatgakaaacacccaaaaagaaaaccagaggccaggcaaggtggctcacacctataatccctgcactttgggaggcagagaaggcatgattgcttgggctcaggagtttgagaccagcctgggaaacgtggtaaaacctcatctctaacaaaaataaaaaataaaataatagccaggcatgctggtgtgtgcctgtagtctcatagtcgtagctacttaagaggctgaggcaggaggcttgcttgagtctgggagcagaggctgcagtgagctgagaccacaccactgaactctagcctgtgcgacagagcgag

SEQ ID NO: 104663 - DNA, 608 bp, Homo sapiens
gttattcaatatattactgaaatcctagtaagagcaatcagacaaaagaaagatataaacggcatccaaacaagataagaagaagtcaaattattcttgtttacagattatatgattttaaatttggaaaaacattacgacttcacagaaaactattaaaactgataaattcagtaaagttgcagcatacaaaaaaatataaaattagtaggagttctatatgycaatagagaacaatgtgaaaaaaaagctattccatttacaaatagccacacaaaaattaactacctaggaattaaccaaataagtaaaatatttttgtaatgaaaactataaaatgctgatgaaagaaataaaagacaccaaaaagtgggaaaatattctgtttgtggattgaaataattaatattatgaaactgtacatcctacccaaagcaatctacagattcaacaataagtgccaagataccaatggcattcttcacagaaatataaattacaatcctaaaatttatatgaaaccaaaaatgactcagaatagccaaaggtatcctaagcaaaccaagccaaaacaaaacaacgacaacaacaaaactggaggaactgca

SEQ ID NO: 104664 - DNA, 608 bp, Homo sapiens
gttattcaatatattactgaaatcctagtaagagcaatcagacaaaagaaagatataaacggcatccaaacaagataagaagaagtcaaattattcttgtttacagattatatgattttaaatttggaaaaacattacgacttcacagaaaactattaaaactgataaattcagtaaagttgcagcatacaaaaaaatataaaattagtaggagttctatatgtcaatagagaacaatgtgaaaaaaaagctattccatttacaaatagccacacaaaaattaactacctaggaattaaccaaataagtaaaatatttttgtaatgaaaactataaaatgctgatgaaagaaataaaagacaccaaaaagtgggaaaatattctgtttgtggattgaaataattaatattatgaaactgtacatcctacccaaagcaatctacagattcaacaatawgtgccaagataccaatggcattcttcacagaaatataaattacaatcctaaaatttatatgaaaccaaaaatgactcagaatagccaaaggtatcctaagcaaaccaagccaaaacaaaacaacgacaacaacaaaactggaggaactgca

SEQ ID NO: 104665 - DNA, 606 bp, Homo sapiens
ccaataacaattccatcaagaaaattctggcagcaagccaccagaaaacctaactacattggctgaagagattcatttcattaaaactattgattgcccatttctctgaagtacttacattgaatttgtcatatcagacaaatgtggtttaaaaatagtcactgacaaagacagtagagtttgtgtatataatatatatttgtagcagacgtgcagaactttaaaatataaattcttagaaattgaggaccatgttgtattttctgtatctctcctaaacatattgcgagagatcaataaatactaaacaaacacattgtgcttccacaaaactggacatgaatttatgaagtgacaatacaagcaccaggcaaaatatctcatttggaactaaccatgtgaagaggcaatagggagcagattaaagggcgcagctgtctcattccacaastttagttggaaaacagcccagagaatatgggaatatgtgactctacatcttttctataggcctagctcctctaggtgtcactgggttttacaatagcacctttcctattcactgcagctctgttatgctcaaacattgacagcagttagttcttc

SEQ ID NO: 104666 - DNA, 570 bp, Homo sapiens
taactttgtcagccattatgttaaatataagtggtcaaaataccataattaagaggtagggattggcagattagataacaaagcaagacccaggtataagctgcctgtaagaaacttataggtaagaaaagaaaaaaaaaagtccaaacaggttaaaagtaaaagaaggtaaaatacatatatacatgtatattctatgcaagcataaacttaataaaagctggagtaaacatattaatgagacaaaataatttttagagcaaataatattaccaggaataaagaagataattttatagtgataaaaggaatcaagtcatcaaaaactcaaagttatccgtaatgcttatgtacctaataacagagcttcacaatacatgatgtaaaaactgatagaaccacaagcaaattgtaactggagagttcaatgtttctctgtcaatcaatgctgaacaagccgacwgaaaatcagcaagggtataggagacttgaaaaataccatcaacataatcggccaaattgttagttgtagaacactctatcctgtaacatcagaatatgtattcatta

SEQ ID NO: 104667 - DNA, 404 bp, Homo sapiens
ggtgcacacgctgcgggagagcccagcacatgagactcagctctttccacgtgtgagttgtatcaatggacctcagttttgctctttggacatattccacattttaacatgcatgatttaaaggcagttgtaaggccccttgtaagacgttatttacccaaccaaagatttatggtccaatttaccatctgggtgatccatcaccatcttagtgtggccagccctccctccatyccgttatagtccctggctcattgatttttatgttactttaggccccataacaattaataccacctaagttttggtggcatttaatacaagaggttgactcagaattgcacttacatggaggtgttgtgttgttgttgttgttgcatggcctttcattattcctgatttat

SEQ ID NO: 104668 - DNA, 544 bp, Homo sapiens
atgacagaaatctgtgttgactttctaggatttcaatgtgacactatagaatgtcttgaaaagtagttagaagttactctttgtggcatttctaggttttcacagtgcagccttcaagcctaggggaattactacaggccgagaggtttgaggggtggatgaaatgcaaaaatttgaagatgaggatcccttcctcaaggagttttgctgtaaaccttaccaactccttgaatgccaaatattaatatgggagattttctttcatcattgggcatttcagcaggagttatttgtgaaaagcccaaatcaaagttgttaactgtgtgttgattataccacctgcacttgttcaacgtgtgcttcaactcttcaggccgtgcaaaaataggaaatgagcacaaagaaaaccctttaagatctatctatagatattgaaaaatagctaagaacatgagttcataactaaaaatacaaatgataaaktaaccacgtggaaaatatagacatagaattctgtccaaagcttaattacacaaagaaacag

SEQ ID NO: 104669 - DNA, 640 bp, Homo sapiens
tgttatctgaaaaagtaataagtgaatctgcttatttttgttctacgggctataacagagctagtttgtgcttcattatacccatgtgatgctagtcactgtagaagcagataattataaacttggcagtgttgttaatatgcttaaatatctaaatttgggtcccactaggtaggagagataggtttcacattgaagcatacctcacatagcatattcagagagtaagagaacactgcagttttctgatttgcttctcttttacaccctatgtggttctcagaaaaaaaatgttttaattctttttattcatttatttatttatagacagagtcttgccctgttacccaggctggagtgcagtggcatggtctcagctcacagcaacatccaccccccaggttaaagtgattctcctgcctcagcttccmgagcagctgggattataggcgtgcaccaccatgcctgagtcatttttgtatttttgttagcaatggggtttcgccatgttggctctactggatttcaactcctgaaatcaagtgatctatccactttggcctcccaaagtgctaggattacaggtgtgagccaccgtgcccagccctaggttcactaattttagacaacttattcctgt

SEQ ID NO: 104670 - DNA, 558 bp, Homo sapiens
gtgtctgtgaagctgccagccatgcggacagtgatccaggcaaaacccagtgaagacagaaaaaaaaaaaaagcaaagcagctggaaaagagctttgtccaaaacactacataatgctctcttcttcttgatctcattaacagcctgatttttcctcctgtgtattttaccttaggaatgcccttgttcactcttttacaataaatgattcctcttgtgacctttctgtctttcagaaacttccaccttgtccatgtatgagatgcatatacagagatcatggaaacatcacacmgcaaagtctttctccagcaacttgctttcagatacaaagcgacactccaatgtcagaaatcattttagaaattgcttttccctttacaaagctctgaactttgactaattcctcaaagacacttgtgtttatatggctgtttatttacttattgtccctgggttgttcaataggtctcttgacatcattcctcctatcattttgtatcctttgaccaatgtgcccccaatacttcccagctcaaccaagtccagcctccagta

SEQ ID NO: 104671 - DNA, 558 bp, Homo sapiens
gtgtctgtgaagctgccagccatgcggacagtgatccaggcaaaacccagtgaagacagaaaaaaaaaaaaagcaaagcagctggaaaagagctttgtccaaaacactacataatgctctcttcttcttgatctcattaacagcctgatttttcctcctgtgtattttaccttaggaatgcccttgttcactcttttacaataaatgattcctcttgtgacctttctgtctttcagaaacttccaccttgtccatgtatgagatgcatatacagagatcatggaaacatcacacagcaaagtctttctccagcaacttgctttcagatacaaagcgacactccaatgtcagaaatcattttagaaattgcttttccctttacaaagctctgaactttgactaattcctcaaagacacttgtgtttatatggctgtttatttacttrttgtccctgggttgttcaataggtctcttgacatcattcctcctatcattttgtatcctttgaccaatgtgcccccaatacttcccagctcaaccaagtccagcctccagta

SEQ ID NO: 104672 - DNA, 551 bp, Homo sapiens
acactatagaatgacttaatgaaaacacaagagtggcaaaagcttattgcctacaagtaggaacatggatatataaagtgtgacttctcatacattaaaatactgtacatcatactttagaataaactaagcaaatctatgtaattcaatgtaaaactatcttaaaacactatattgaatgttaacaaaaagacattgaatggtggagggcctataatacatttatataaatttaaaaatgaacwcataaaaactatttttaactatggaactataataactctctaaaccttgggcagtaacttctagtgagaagtagaacaattagataatggtgtctggtagagatataatggagctgaaatgttatctgcaatatttaattcatttaaaaagatcttaaagatgcataatatattacaattttaatatagggtttatgtgtgcatgtgtgttcagtatattattttatgctattttagaagttgtaataaaaataaaaataacgcttaaattttcatccacatttctgggaagatagagtctcaaag

SEQ ID NO: 104673 - DNA, 525 bp, Homo sapiens
tgaagtttactttgcatcataatattamcattgaaactttctttggattatggttaatatatgtttttctcttatttttaagacacttctatatttagctctcaaaaataaaagaagctgttgtttttacctctaaaagcatcttcataaattatcttaaagcattaaacaaccaagccagagactcctgttacattaggtcattgtcaaaaatatagtgttctcaactcatttatctttttcctaattcttattttagtatgctctgtttttcttccaagctttttcactcttttttatataccgtgtttcatgagaaatatgaattctactctatcataaaatacttttttgaaatgttattacttctgtcttagtaaaactaagtttttgtctgaatatattaattcatctgacttttttttaagtggttaataaacatgtttccaaatgttcttctcctccaggcaaggagtgtatttcagcctcatctttactctttttaaaatgtgcttttcaaagagc

SEQ ID NO: 104674 - DNA, 525 bp, Homo sapiens
tgaagtttactttgcatcataatattaccattgaaactttctttggattatggttaatatatgtttttctcttatttttaagacacttctatatttagctctcaaaaataaaagaagctgttgtttttacctctaaaagcatcttcataaattatcttaaagcattaaacaaccaagccagagactcctgttacattaggtcattgtcaaaaatatagtgttctcaactcatttatctttttcctaattcttattttagtatgctctgtttttcttccaagctttttcactcttttttatataccgtgtttcatgagaaatatgaattctactctatcataaaatacttttttgaaatgttattacttctgtcttagtaaaactaagtttttgtctgaatatattaattcatctgacttttttttaagtggttaataaacatgtttccaaatgttcttctcctccrggcaaggagtgtatttcagcctcatctttactctttttaaaatgtgcttttcaaagagc

SEQ ID NO: 104675 - DNA, 498 bp, Homo sapiens
tggaactacagcatctctgaactgttggaagaatggggtttagggcaaggtaaagcatttatttattggttaccttctattctcattcgccaagtgtagccccacttctcagttgtgagttgctttatctgcttccatcagcagccactggggaagccaaacactagccctgcatttgaccttctgagaagatgtggagggaccagagtaccctgactatgaccacagtygggagagtggaggtatcctcatggcctgctttggctgagtttatttataactataatttatttctttacactgctctacatactgtgtgtttaattttgtaggcatcgttattttcaataatatcctaattatataacttttcttatcacaactaatacccattacttctgaacttaccagatactatgtaattgagaagcacaactcagccaaactgcagtagcacttttctagataaaatggctcactggaaacctttcgtttgta

SEQ ID NO: 104676 - DNA, 498 bp, Homo sapiens
tggaactacagcatctctgaactgttggaagaatggggtttagggcaaggtaaagcatttatttattggttaccttctattctcattcgccaagtgtagccccacttctcagttgtgagttgctttatctgcttccatcagcagccactggggaagccaaacactagccctgcatttgaccttctgagaagatgtggagggaccagagtaccctgactatgaccacagttgggagagtggaggtatcctcatggcctgctttggctgagtttatttataactataatttatttctttacactgctctacatactgtgtgtttaattttgtaggcatcgttattttcaataatatcctaattatataacttttcttatcacaactaatacccattacttctgaacttaccagatactatgtaattgagaagcacaactcagccaaactkcagtagcacttttctagataaaatggctcactggaaacctttcgtttgta

SEQ ID NO: 104677 - DNA, 498 bp, Homo sapiens
tggaactacagcatctctgaactgttggaagaatggggtttagggcaaggtaaagcatttatttattggttaccttctattctcattcgccaagtgtagccccacttctcagttgtgagttgctttatctgcttccatcagcagccactggggaagccaaacactagccctgcatttgaccttctgagaagatgtggagggaccagagtaccctgactatgaccacagttgggagagtggaggtatcctcatggcctgctttggctgagtttatttataactataatttatttctttacactgctctacatactgtgtgtttaattttgtaggcatcgttattttcaataatatcctaattatataacttttcttatcacaactaatacccattacttctgaacttaccagatactatgtaattgagaagcacaactcagccaaactgyagtagcacttttctagataaaatggctcactggaaacctttcgtttgta

SEQ ID NO: 104678 - DNA, 525 bp, Homo sapiens
tgcatgtggatatccagtatactaatatcatttattgaaaaagattatcctttccccatgtgtcttcttggtgtccttstcaaaaattagttgactgtacatgcatggatttattttggggctctctattctgttccatcagtctatgtgtttgtttttatgccattattatactgttttgattattacagctttataataccatttaaaattaggaagtctgacgcctccaactatttctctttttcaagtttgctctctggctatttgaaatctcttgaggttttatacaaattttagaattttgtctatttcactgaacaaggtcattagaattttgattgggattccattgaatctgtatattgctttgggtaatatagatattttaacaattatttcaatccacaaacataggaatcttctcatttatttgtgtccatttcaattactttcactggtattttatatttttcaatgtacagacattttaccttttggataaattcttttttaagaatttta

SEQ ID NO: 104679 - DNA, 525 bp, Homo sapiens
tgcatgtggatatccagtatactaatatcatttattgaaaaagattatcctttccccatgtgtcttcttggtgtccttctcaaaaattagttgactgtacatgcatggatttattttggggctctctattctgttccatcagtctatgtgtttgtttttatgccattattatactgttttgattattacagctttataataccatttaaaattaggaagtctgaygcctccaactatttctctttttcaagtttgctctctggctatttgaaatctcttgaggttttatacaaattttagaattttgtctatttcactgaacaaggtcattagaattttgattgggattccattgaatctgtatattgctttgggtaatatagatattttaacaattatttcaatccacaaacataggaatcttctcatttatttgtgtccatttcaattactttcactggtattttatatttttcaatgtacagacattttaccttttggataaattcttttttaagaatttta

SEQ ID NO: 104680 - DNA, 437 bp, Homo sapiens
atgaattcttctcttaggttctgtttctggaaaatccaaagaaaaccacttttgttgaaaaccaaagacatgatcactactgagaatgaactcatcctgagtagaaaaaatagacaygcaagccagcaatttagattttaatattctatctaccataatagtgggatttgcaaagtcctgtgaaatgaggaaagaataaatacctacctcgggtaagggaagtcagactggaaagtcttcacctaaagtaatgtctgatctgaaatttggagaagattttatttaggcagaaataggtaaactagttataacaaatagtgtgggaaaaaatttcatgttataagaacatgaaattcttcaggaactacaaataactcaatgtattattatcagagacaatatttgatacaagggagggggagggaactgattcgaat

SEQ ID NO: 104681 - DNA, 515 bp, Homo sapiens
ccaccaagcctggctaattttgtatttttagtagagatggggttttaacatgttggctaggctggtctcgaactcctgacctcaagtgatccacctgcctcagcctcccaaagtgctggaattacatgtgcaagctaccgcagccggccggtaacctaccttctgaaatasttatgacaattcctagaagtctaagaactatatttttaaaaagcattatggattttaaaaatgtgctccccattcatcagctccctttcccacccatattctttgaagggaggggtaggtgatgcgccctttttatgtttgcacaatatatgaattcctcatagtatccagggtaaacttttgagcctcatggtcagtgttggaaagatgctcagctaggatcggccttaataaaacaaaaagatccttccaaatcacttgtccttctcttcccttttcaactctgaacttgccactctatttttagctagatcagcttcttatttaggatagtttccttttat

SEQ ID NO: 104682 - DNA, 598 bp, Homo sapiens
aggtgtagaaaagatttactctataaagaaaattataaccaggtgyccagaagattggtttttaattcaccttttgggaaggcaaaaggatcatttgcaaaccaatgccaatttattaaaaatctagattatatgccagcttatccaagataaattatttttcccttgttcatcttatctaagatgaaacatttgtcccttgtttaccgtatctaagatgaattatttgtcccttgttagagtatagaaatcttaggaaggtaccaaaatgaaaatagttgtaactttaaagactattaaaacaagtataaaataagtaggaaataaactaatcatgatgttgatatgtagagtaggttaagatataagtatgctaataaatggcatataagctttataattatgtacattttatcttcactgtgatgtatttgaagtagccagaagaatcattcttccaaatgttacattataatgaatcttgaattaaataaaataaagctttgtggttgcttttttcttatgcagaaaaatggttggggcatgaaattaatgagtacatttgtccagtaataacatagaatggatgccttggaaa

SEQ ID NO: 104683 - DNA, 598 bp, Homo sapiens
aggtgtagaaaagatttactctataaagaaaattataaccaggtgtccagaagattggtttttaattcaccttttgggaaggcaaaaggatcatttgcaaaccaatgccaatttattaaaaatctagattatatgccagcttatccaagataaattatttttcccttgttcatcttatctaagatraaacatttgtcccttgtttaccgtatctaagatgaattatttgtcccttgttagagtatagaaatcttaggaaggtaccaaaatgaaaatagttgtaactttaaagactattaaaacaagtataaaataagtaggaaataaactaatcatgatgttgatatgtagagtaggttaagatataagtatgctaataaatggcatataagctttataattatgtacattttatcttcactgtgatgtatttgaagtagccagaagaatcattcttccaaatgttacattataatgaatcttgaattaaataaaataaagctttgtggttgcttttttcttatgcagaaaaatggttggggcatgaaattaatgagtacatttgtccagtaataacatagaatggatgccttggaaa

SEQ ID NO: 104684 - DNA, 483 bp, Homo sapiens
gttatcttggcataagatttagagtagtcagaaaagacttttcaggttcttgtagcagataaaaatattacatctgggccgggcgcggtggctcacgcctgtaatcccagcactttgggaggccgaggcgggtggatcatgaggtcaggagatcgagaccatcctggctaacaaggtgaaaccccgtctctactaaaaatacaaaaaattagccrggcgcggtggcgggcgcctgtagtcccagctactggggaggctgaggcaggagaatggcgtgaacccgggaagcggagcttgcagtgagccgagattgcgccactgcagtccgcagtccggcctgggcgacagagcgagactccgtctcaaaaaaaaaaaaaaaaaaaaattacatctgatgggatttgatagtttgcatagacatgcatattcttttctgtataggaagtagaactggtctttctctgactgagtcaaatacataaa

SEQ ID NO: 104685 - DNA, 645 bp, Homo sapiens
aaatatattacaaaaagttaaaatttatcaaaacgtaaacacacaaacactttctgtacaaggcaccatttgaagttaagaagaatatgaagaagcataaagatgcagtattaaaccataactagataaaactaaatgtgttacatgctatactactgtaataatttcctagccacctcctgctgctattgtggtgagttcaagtgttttgcctatctacttaaaaagccacatgatgctaattatctccatgtgagcagtttctctctttagtaaactgagtattgcagyaaaaagtgatctctcatagttttcacatattttatcatgtttcatgcaatactgtaaaccttgaattacaccatggaacccatgggaagtgccactagtgatactggaagtgctcccaaaaagcagagaaaagtcatgacattgtaagaaaaagttaaattacttgatatgtactgtaaatttaggtctacagctgtggttgtctgaccttaaaagataaattaatccagcataaggaccgttgtaaaagaaaaagaaatttgtaaagctgttgctgcagctacaccagaagacacaaaaaccttgcactttatgcaaagtaccttatctttcattaaaaatgcaggttttatg

SEQ ID NO: 104686 - DNA, 589 bp, Homo sapiens
ctgttatttgcatattattattaagcttgaatattttctaatgggaaatgaggtggtgtaactttagaaagtatttttctttaaacaatctccaagctaaatgaatgttatattgtttagtaatggcaacagtggcggtgaaaatgatattaaccttactaataataacttttaacagttagtacttaccaaacatagacaacattctcaatactttatacaaaggaactaaatcagttttaacattaagccaattatctgagtactcttattatcctcattttacatgcaaagaaattaaggaacatagatgttaggtaagttatccagatgttttggtatgtgggtttagtccacagctaatggaattaaattctgtggtaaaataagcatacttcccatcaatttgagtaatgtattatattctagatggtgataatattctaratagtcactcctttcccccctcctccatctcctgacaaccactaatgaactttctacctgtatggatttacctattctggacgtttcatataaacaaaatcatacagtatgtagccttttccatctttttcagatagtttgt

SEQ ID NO: 104687 - DNA, 569 bp, Homo sapiens
tgatgttaactatattacctcctatatatattctttcccaaccattacacatatttactttattttttttattttaatgaaattcaccagggaggagtgagcagctaagtartctatcccttctcaggcataaaaattatcagaattcttcttgaggatacaatgatgagggctttcatttcaaatgggtggtgattgtcagtcttattaacaataatcatggaaagtaaaatgtcccaaatttatattgacttttacatacacatacacgcacgcacagacacataaaaacgtttgataaaaaaaaaaaagagtgtaaaatgattttacttagaagctctttggtttatttccatcatacctgaagtttcagatggaaatgcaaaaattgaatgacttgggatctttgatttgcttgatattaactcaatgaatgttgccaaatgttcttgagtaaattgtgttttccatgtaatggcctaataattaaattctttttaccctagtatttaacatgcattacattgtcttaatatatatgcttatttctatgccttggtattctcact

SEQ ID NO: 104688 - DNA, 569 bp, Homo sapiens
tgatgttaactatattacctcctatatatattctttcccaaccattacacatatttactttattttttttattttaatgaaattcaccagggaggagtgagcagctaagtaatctatcccttctcaggcataaaaattatcagaattcttcttgaggatacaatgatgagggctttcatttcaaatgggtggtgattgtcagtcttattaacaataatcatggaaagtaaaatgtcccaaatttatattgacttttacatacacatacacgcacrcacagacacataaaaacgtttgataaaaaaaaaaaagagtgtaaaatgattttacttagaagctctttggtttatttccatcatacctgaagtttcagatggaaatgcaaaaattgaatgacttgggatctttgatttgcttgatattaactcaatgaatgttgccaaatgttcttgagtaaattgtgttttccatgtaatggcctaataattaaattctttttaccctagtatttaacatgcattacattgtcttaatatatatgcttatttctatgccttggtattctcact

SEQ ID NO: 104689 - DNA, 569 bp, Homo sapiens
tgatgttaactatattacctcctatatatattctttcccaaccattacacatatttactttattttttttattttaatgaaattcaccagggaggagtgagcagctaagtaatctatcccttctcaggcataaaaattatcagaattcttcttgaggatacaatgatgagggctttcatttcaaatgggtggtgattgtcagtcttattaacaataatcatggaaagtaaaatgtcccaaatttatattgacttttacatacacatacacgcacgcacagacacataaaaacgtttgataaaaaaaaaaaagagtgtaaaatgattttacttagaagctctttggtttatttccatcatacctgaagtttcagatggaaatgcaaaaattgaatgacttgggatctttgatttgcttgatattaactcaatgaatgttgccaaatrttcttgagtaaattgtgttttccatgtaatggcctaataattaaattctttttaccctagtatttaacatgcattacattgtcttaatatatatgcttatttctatgccttggtattctcact

SEQ ID NO: 104690 - DNA, 614 bp, Homo sapiens
gacaaaataacgaagaaattcttaacagggccaatttagaattaaacatgttttattgcaggtttgaagaaactccccaggcttccacaaacaagtttattaggggtctgaaggaactccccaaacctccatgatttagcaggagacaagataaggttaatcacccagcacctggacccatttagattaagtaaatttacagaggctccagaggaaggtcttcaagactcagaccttagttatagattaaaagaagttaatcacttatgtctttagatgaatgcacacttacatgtagacgtatcgcttagaaggtatattgcctctggaaaactttgtaattttgaattggcatggtgataatttccaggccctttccctgtaaccagttgcagaaatacacactcgcttcctccttagttcatgtgtatctcgttattggcycatgagaaatagaagcccaaccctcagttttgtttgggaacactatggtacttagaaaacagtctctctgtaatagcctatagatgataggcaatcaaatactataatcatgattaattgctagccatctagcaaagaaagccccagatgcatttaaatacagatttcag

SEQ ID NO: 104691 - DNA, 586 bp, Homo sapiens
ttatctttattataggagttcatgttgccttttcctggagaacaagtaaatcaagtaaatgggaggggaaagagtaaggacagaactgggactcatttctctcttactaaggggatgtcccatggaaagaacacctcttaccagcctcctaataaacgttctgatggtacttactgattgatttaatggagtccctatctaagaaatgccttttaagtgtcaaagtctgagatacttatttagactgaaggaaacttaggacaattaaatgtgaagcatatatctgaaatggattattttgctattatagacattattatgatatttgtcaatatttgaacaacagatctaatcaggattagatgaaataattttctttttatttcagattttaaaagaatattaaaatttatttttatcaagttataatggatgtgcctcaattaattattataaataaaatttgaatttatggacttacagagaatagaatggctggtrgcaaaggggaagctaattacatcagcattttttcctacatacccaagaatataaaactatagagcaatcaacctgagacagattc

SEQ ID NO: 104692 - DNA, 594 bp, Homo sapiens
aaatcttgaaaaaatattttaactgatgatttggggagttttgataactttactaaattagcaatcctctagtgaaagtggttacattctttcttcaatgcctgtcacccttttctcatagattagaaacaacgtggtggcaagaatgccrtttttctttgatagttgtcagaagtcattttgaagactttcatctgactctgggaaagccattttgaagtggaactaaagagagcatacatgatttaatgacaaaattgctttgtgatttagaaagagcattatagaaacacgtaaaaatattctaaatgaaaaggctagcattttagtcaaatcaatgtggtatggttttagactatgaggcagaattcagaaaagaaagcagagaggaaaagttatccaaggccattttagtatcaaggctgagaagaaaatcatatggattatagctgggagttagggggaagtgtagaatcacacctaaagtcatgttaatggggagataatgatcttgagataaccaagccaggtctcagactccacctgaaccaagtctcaagtgttccttgggctaaaagctctaatagatggaga

SEQ ID NO: 104693 - DNA, 590 bp, Homo sapiens
gatttaatgacaaaattgctttgtgatttagaaagagcattatagaaacacgtaaaaatattctaaatgaaaaggctagcattttagtcaaatcaatgtggtatggttttagactatgaggcagaattcagaaaagaaagcagagaggaaaagttatccaaggccattttagtatcaaggctgagaagaaaatcatatggattatagctgggagttagggggaagtgtagaatcacacctaaagtcatgttaatggggagataatgatcttgagataaccaagccaggtctcagactccacctgaaccaagtctcaagtgttccttgggctaaaagctctaatagatggagactttctatttctatagcaatgggaactatagatraatatagttgtcagtgtcaggtaaaaagtgtgaggagagggtggctttcagaagcagacagactttaggatagtacctgaaacaacttcaaagttgcaaagccacaaggacatcatcatgttattttgacaatatttgctaaatctgtttatggcctgttatcatgccatatgccagacactgtgctaattctttacatgcatt

SEQ ID NO: 104694 - DNA, 621 bp, Homo sapiens
tagactatgaggcagaattcagaaaagaaagcagagaggaaaagttatccaaggccattttagtatcaaggctgagaagaaaatcatatggattatagctgggagttagggggaagtgtagaatcacacctaaagtcatgttaatggggagataatgatcttgagataaccaagccaggtctcagactccacctgaaccaagtctcaagtgttccttgggctaaaagctctaatagatggagactttctatttctatagcaatgggaactatagataaatatagttgtcagtgtcaggtaaaaagtgtgaggagagggtggctttcagaagcagacagactttaggatastacctgaaacaacttcaaagttgcaaagccacaaggacatcatcatgttattttgacaatatttgctaaatctgtttatggcctgttatcatgccatatgccagacactgtgctaattctttacatgcattatcccatgcaatcctcataacagactataggacaggcactattattatcctattttacagatgagaaatctaaagttaatttacttgcccgaaattatagctaatcagtggaagagcttacctgagttctaaaatatgtg

SEQ ID NO: 104695 - DNA, 544 bp, Homo sapiens
gatatggcagaggtgttggaattattagactgataactttcaacaactataattaatatgttaagggctctaatagaaaaacataaactggatgtggctgaggcragagtctctgagcttgaggatataacaacaaaaaactccaaaactgaatagcagaggaaaaataaaactgaaaaagaaacccaaaccccaaaccaaaaataccagaataggatatttaagaactgggaaacaactacaaaaggtgtaacatacatacaatgagaataacagaggagaagaaataaacagaagcaatatttgatgtaataattactgagaatttctccacattaatgtcagacaccaaaccacagatctggaaatctcagagaacaccaagcaagataaatgccaaaaatgacgcatgagcatatcatattcatacttcagaaaatcgaatatataaaagaatctcaaaagaagccatagggaaaaaaataccttacctacagaggatcaaagataataattacatctgacttctccttataaaacataa

SEQ ID NO: 104696 - DNA, 544 bp, Homo sapiens
gatatggcagaggtgttggaattattagactgataactttcaacaactataattaatatgttaagggctctaatagaaaaacataaactggatgtggctgaggcgagagtctctgagcttgaggatataacaacaaaaaactccaaaactgaatagcagaggaaaaataaaactgaaaaagaaacccaaaccccaaaccaaaaataccagaataggatatttaagaactgggaaacaactacaaaaggtgtaacatacatacaatgagaataacagaggagaagaaataaacagaagcaatatttgatgtaataattactgagaatttctccacattaatgtcagacaccaaaccacagatctggaaatctcagagaacaccaagcaagataaatgccaaaaatgacrcatgagcatatcatattcatacttcagaaaatcgaatatataaaagaatctcaaaagaagccatagggaaaaaaataccttacctacagaggatcaaagataataattacatctgacttctccttataaaacataa

SEQ ID NO: 104697 - DNA, 313 bp, Homo sapiens
gaaatctcagagaacaccaagcaagataaatgccaaaaatgacgcatgagcatatcatattcatacttcagaaaatcgaatatataaaagaatcycaaaagaagccatagggaaaaaaataccttacctacagaggatcaaagataataattacatctgacttctccttataaaacataaaaccaagaagagagtagaatgaagtatttaaaagattgaggcaaacccccccccaccaaactaggattctgtatcctatgaaaatatccttcaaaaggaaaggcataacactttctcatacaaacaaaaattg

SEQ ID NO: 104698 - DNA, 529 bp, Homo sapiens
atgctacaaagaggaggatattttcaycgggaagaggtctgtggagagaatcagccagagtctagaagtttgggagtagaatggcagtagaatgactttgccttttagtttgtctaagacagtcccaatatactccagttgttctggaataattactcatgaagctccctttcactctcagaaatgtctcagtctgggtgataaattacagttatttgatggatggagatcttgtgctaagacttgggctcagttcttgggcacatcagcttctggaaggtagtggagaaaaattattgtaagagctggaacttaaatttgcttctcctgactcccaatcagtgctcttttttttctagacaggcttttataacaacactgttactgttcctgtctcctctaggctccttttgtcttctcaaaaaggtttgaagaactgatgattgatatcatctctggtcattctttcacttgtcttaagcctcaagaatcatgctaaaacaaaaaatagttgttgaagatatgttta

SEQ ID NO: 104699 - DNA, 529 bp, Homo sapiens
atgctacaaagaggaggatattttcacygggaagaggtctgtggagagaatcagccagagtctagaagtttgggagtagaatggcagtagaatgactttgccttttagtttgtctaagacagtcccaatatactccagttgttctggaataattactcatgaagctccctttcactctcagaaatgtctcagtctgggtgataaattacagttatttgatggatggagatcttgtgctaagacttgggctcagttcttgggcacatcagcttctggaaggtagtggagaaaaattattgtaagagctggaacttaaatttgcttctcctgactcccaatcagtgctcttttttttctagacaggcttttataacaacactgttactgttcctgtctcctctaggctccttttgtcttctcaaaaaggtttgaagaactgatgattgatatcatctctggtcattctttcacttgtcttaagcctcaagaatcatgctaaaacaaaaaatagttgttgaagatatgttta

SEQ ID NO: 104700 - DNA, 529 bp, Homo sapiens
atgctacaaagaggaggatattttcaccgggaagaggtctgtggagagaatcagccagagtctagaagtttgggagtagaatggcagtagaatgactttgccttttagtttgtctaagacagtcccaatatactccagttgttctggaataattactcatgaagctccctttcactctcagaaatgtctcagtctgggtgataaattacagttatttgatggatgragatcttgtgctaagacttgggctcagttcttgggcacatcagcttctggaaggtagtggagaaaaattattgtaagagctggaacttaaatttgcttctcctgactcccaatcagtgctcttttttttctagacaggcttttataacaacactgttactgttcctgtctcctctaggctccttttgtcttctcaaaaaggtttgaagaactgatgattgatatcatctctggtcattctttcacttgtcttaagcctcaagaatcatgctaaaacaaaaaatagttgttgaagatatgttta

SEQ ID NO: 104701 - DNA, 607 bp, Homo sapiens
aaactatgagacatattagccaggcatggtggctcacgcctgtaatcccaaaactttgggaggctgaggcagacagatagcttgagcccatgagttgaagatgagtctgggcaacatggcgaaaccttgtctctacaaaaaacacaaaaattagccaggcatggtggtttgcacctgtaatcccagctacttggggggctgaggtgggaggtttgagcctaggagatgaaggttgcagtgagccgagatcacaccactgcactccagcctggrtaatagagtgagaccctatctaaaaaacaaaacaaaacccaaactataaggcatatagaaaacaaataactaaatgacagaagtccctccttatcagtaattaagtgtaactggattaaactctccaattaaaagacagagattggcagaatgaataaaaaatgcataagccaactatatgctctctttaagaaacttacattaaatccaaagacatgaataggttgaaagtaaaagatggaagaaaaaaagatattccatataatcagtaatcaaaaaagagcaggagtgtctatataaatatcagataaaatagactttaaaaaatttgcaa

SEQ ID NO: 104702 - DNA, 607 bp, Homo sapiens
aaactatgagacatattagccaggcatggtggctcacgcctgtaatcccaaaactttgggaggctgaggcagacagatagcttgagcccatgagttgaagatgagtctgggcaacatggcgaaaccttgtctctacaaaaaacacaaaaattagccaggcatggtggtttgcacctgtaatcccagctacttggggggctgaggtgggaggtttgagcctaggagatgaaggttgcagtgagccgagatcacaccactgcactccagcctgggtaatagagtgagaccctatctaaaaaacaaaacaaaacccaaactataaggcatatagaaaacaaataactaaatgacagaagtccctccttatcagtaattaagtgtaactggattaaactctccaattaaaagacagagattggcagaatgaataaaaaatgcataagccaactatatgctctctktaagaaacttacattaaatccaaagacatgaataggttgaaagtaaaagatggaagaaaaaaagatattccatataatcagtaatcaaaaaagagcaggagtgtctatataaatatcagataaaatagactttaaaaaatttgcaa

SEQ ID NO: 104703 - DNA, 571 bp, Homo sapiens
accccccttcaacccaaacggtccaaaaggagatagacaaaggggtaaacaatgaaccaaagagtccctatattccccgattatgccccctccaagcagtgggaggaggagaattcggcccagctggagtgcaggtagctttttctctctcagatttcaagcaaattaaaatagaccaggtaaattctcagakaaccctgatggctatattgatgttttacaagggttaagacaattctttgatctgacatgaagagatataatgctactgctagatcagacactaaccccaaatgagagaagtgccaccataactgcagcctgacagtttggcagtctctggtgtctcagtcaggtcaatgataggatgtcaacagaggaaagagaatgattccccacaggccagcaggcagttcccagtgtagaccctcactgggacacagaatcagaacatggtgattggtgccacagacatttgttaatgtgtgtgctagaaggactaaggaaaactagcaagaagcctatgaattattcaatgatgtccactacaacacagagaaagaaagaaaat

SEQ ID NO: 104704 - DNA, 591 bp, Homo sapiens
ccaactaataaggaccccccttcaacccaaacggtccaaaaggagatagacaaaggggtaaacaatgaaccaaagagtccctatattccccgattatgccccctccaagcagtgggaggaggagaattcggcccagctggagtgcaggtagctttttctctctcagatttcaagcaaattaaaatagaccaggtaaattctcagataaccctgatggctatattgatgttttacaaggrttaagacaattctttgatctgacatgaagagatataatgctactgctagatcagacactaaccccaaatgagagaagtgccaccataactgcagcctgacagtttggcagtctctggtgtctcagtcaggtcaatgataggatgtcaacagaggaaagagaatgattccccacaggccagcaggcagttcccagtgtagaccctcactgggacacagaatcagaacatggtgattggtgccacagacatttgttaatgtgtgtgctagaaggactaaggaaaactagcaagaagcctatgaattattcaatgatgtccactacaacacagagaaagaaagaaaatcctaccg

SEQ ID NO: 104705 - DNA, 407 bp, Homo sapiens
ggaattctggggggttcatctcagttcagtgcattcaagaagagaaagtgcttcccgttgttccttggccataaccatgtgcaggagttcagagagtcagccacaccttgtatgctctggatatggcctaaattcatgctgtcctagcaaatgttgtcatttgtcctccatttgcctgcaggcttcatccctggctggttttctctctctccagagcaaacatttagcaaccactgtgttgagtgcctgtgtgtgtgtctgtgtgtgtgtgtgtgcgtgtgcgtgtgtgtgatctccagtcccctcctgctayttccctgtgactaccaaaaataccattatcttttcatttatttcctttactctgtaagtatcacccttttccctaattccttctgtcttcagac

SEQ ID NO: 104706 - DNA, 613 bp, Homo sapiens
aaatcacatacagggaagacatttttcaggctttcaggtataaatgaaatgatcacttcactaattttaaatcagtgtctatgaaaacaatacatttctttggcactgtcattttgagctgcatgttgacaaaactgaccacacagggagcataattattcaccagaatgcctaatggtttgtgtcacatttaaatccatttctgcctccttgagaaaatatgtatcctgaagaacatcttasagattccattgaattacaggaataacaataaatggatttctttagaaagaaggattcaataaaaagaaaaatgaggggaaataggaatctaagctaataaatgagactctctgataccaaactattgagagctagcatttttgaggtaggaagtgaagaattgaaggtaaaaagcctccagagaagagaaggacccataatcagttcctgaaatccagctccacgcatgcaaccttataccaataaatgctcttgactagaagcctcttaatttttttctaggagatataaaattggttttattcttctattctattcatgaaccaatggctggaaccacatttccccactaactttttcatattgaagt

SEQ ID NO: 104707 - DNA, 525 bp, Homo sapiens
atgagcctgtaaaattgaaagcaagttagctacttcctagatacaatgggggtataagcattgaattagtataccgtctccaaatgtgtgtatttacccaatgcctgtaaatggaagtaaaaacagaggagctgcagaccacatccaagtccaaaaatcgataggccaatcattaagccttaaagttacaaaatgatctccattgacttgatgtctcacattcaggtcacactgatgcaagaggtggattctcatagtcttgrgcagctctgcccctgtggctttgcagggtacagccttcctggctgctttcattggctggcatgtagagtctgcagcttttccaggtgcacagtgtaagctgtcaatggatctaccattatgtggtgtggaggatagtggccctctttctcacagctccactaggcagtgcccagtggaactctgtgtgggcctccaaccctacattttccttccacactgcctttacagaggttctacatgagggctccattcctgcagcaa

SEQ ID NO: 104708 - DNA, 525 bp, Homo sapiens
atgagcctgtaaaattgaaagcaagttagctacttcctagatacaatgggggtataagcattgaattagtataccgtctccaaatgtgtgtatttacccaatgcctgtaaatggaagtaaaaacagaggagctgcagaccacatccaagtccaaaaatcgataggccaatcattaagccttaaagttacaaaatgatctccattgacttgatgtctcacattcaggtcacactgatgcaagaggtggattctcatagtcttgagcagctctgcccctgtggctttgcagggtacagccttcctggctgctttcattggctggcatgtagagtctgcagcttttccaggtgcacagtgtaagctgtcaatggatctaccattatgtgktgtggaggatagtggccctctttctcacagctccactaggcagtgcccagtggaactctgtgtgggcctccaaccctacattttccttccacactgcctttacagaggttctacatgagggctccattcctgcagcaa

SEQ ID NO: 104709 - DNA, 443 bp, Homo sapiens
acagttatttaactgtctctattatttgaagccttttgcaatgcttcctcaaaagtttttcatttattcattccataagtatctttttaattatttaagacactctgcataaaatctcaccytcaggctggtggtcatttatgctgttgactgtagttgtgcccaggctgatagaaatttgaccccatcctgtataatatctgcagataggaacagttgttccaaacagatcttttggcctggcctgtggtaatgatatggggatatagatgattttctcaccttttcagtggtgatggctatggggctgaggtgggcatttggctaccctctgtgtgagttccacattatgagattcatgcacgatgaagcagatcagagatatgcaaattttccttagacagaatattctcagatgagcttttcttggctgtaaattgatt

SEQ ID NO: 104710 - DNA, 443 bp, Homo sapiens
acagttatttaactgtctctattatttgaagccttttgcaatgcttcctcaaaagtttttcatttattcattccataagtatctttttaattatttaagacactctgcataaaatctcaccctcaggctggtggtcatttatgctgttgactgtagttgtgcccaggctgatagaaatttgaccccatcctgtataatatctgcagataggaacagttgttccaaacagatcttttggcctggcctgtgrtaatgatatggggatatagatgattttctcaccttttcagtggtgatggctatggggctgaggtgggcatttggctaccctctgtgtgagttccacattatgagattcatgcacgatgaagcagatcagagatatgcaaattttccttagacagaatattctcagatgagcttttcttggctgtaaattgatt

SEQ ID NO: 104711 - DNA, 443 bp, Homo sapiens
acagttatttaactgtctctattatttgaagccttttgcaatgcttcctcaaaagtttttcatttattcattccataagtatctttttaattatttaagacactctgcataaaatctcaccctcaggctggtggtcatttatgctgttgactgtagttgtgcccaggctgatagaaatttgaccccatcctgtataatatctgcagataggaacagttgttccaaacagatcttttggcctggcctgtggtaatgatatggggatatagatgattttctcaccttttcagtggtgatkgctatggggctgaggtgggcatttggctaccctctgtgtgagttccacattatgagattcatgcacgatgaagcagatcagagatatgcaaattttccttagacagaatattctcagatgagcttttcttggctgtaaattgatt

SEQ ID NO: 104712 - DNA, 535 bp, Homo sapiens
atttattgaaaaaatattcgtagtcataattccttatcttataaattgcttgatggcatttgatttcatatttcagcatttacagtttaaagtcaaaaggtctataactttatgtttccatccaggttgagtatcaaagtttcagcaatctcataaaatatacccgagaactttcttctctctcttttttttttttcctgtacaactgattgtatctggaactcaatcctaggctattttataaatgatyggaaagccatattcaatatctgtttccttctctttccctagatttagacatatgcattttcctatctgtaacatcttttttggcactttccatcttataaaatcatcatcattatgatgaacagagaaaatccaaaattatctctaggtattgtttcacactccgggaatatacccaaggaaccatatggacccagggaaaaaatttaaatggaagagaaaaaatgaaaatgaaacttctacattttattactaatataagatttaaaaagtaggacaccaccac

SEQ ID NO: 104713 - DNA, 630 bp, Homo sapiens
ctaggaaacttacaatcatggcagaaggcacctcctcacagggcggcaggagagaaatgagtgcagagcgaagggggaagcctcttataaaaccatcagatctcgtgagaactcactatcatgagaacagcatgggagaaactgctcctataattcaattatctccacctggtcccatccttgatacgtggggattattacaatgcaaggcgagatttgggagggaacacagagccaagccatattaaggtgggaaaagtttaatttagtctttgctatcactaaatgtttactataataaatgttgagaatctggatagagatgacttactcaatgttgaggatctgaaaagaaaaaraattcacgatggatactataagaaattacctgggaaagaaagacctgggctcaaaaagtagtcctaagaattaaattttagaaaaatgattaacatccctcgtatgatgccaatgacatttttgttaggagctgagatgaaaggataagataaaaagtgagatttctgaagtaaaaagtaattaaaaagagctaaaaattcaatatctagattaaaattcacgttgaggacagtaaaagacagatttgacactgcagaaaattgaactggt

SEQ ID NO: 104714 - DNA, 632 bp, Homo sapiens
acaaggcaaggaatgctggcagccaccagacaccagaagaggtgaggaacggattctcccccgaacctccagagggaagacagccctrctgtcaccttgattttagtccagtgatgttgatttcagactctggcctccagaactgtgagtaaataaatgtgtgttgttttaatccactaaatgtgtgttttaagccacctactacaggaaactaatactctaatctccagctggtttctctctctgggactctccctgtatcagcaatggtactatcacttttccttgtcacccaatcactatgaacttcttcccctctcacacccatacccaaagtaacgggtagtgggaatgggtggatgttcatcccacctctttttttaatgaatacattaaataaaagagtatctccacaagtttgcctacctatcattttaaagtaaaaccagtttaatttgattgttgacctctctggtgaaattgctagaaatgaagaaagtatcttaccaacctaaaggaaatggagataaaagagttggagaagaagaatgatgcctaaggcaagtctttaaaaaagagtttttcacatatctttctcttaccaaactttaggttgctaatacatttatcac

SEQ ID NO: 104715 - DNA, 484 bp, Homo sapiens
attgacttttttatttactctctgactctccaatttaggattactgtaagaaatacaaaaatactttaaaattacataaaatactactatcaatctatatataattaaaattaatcatataatacttttttatttaaataaattgtgtgctcatctgcattaacagagatggtccaaaagggcagattattactttgacatgtattccgtgcttctaattaatacaaatgcaactgatttcccaaagcaagaacaaaattaatttcaaacctaagtcagatgttgcctttcattgtcatgttgccactccacattcctgggatgaataacttactatttcctttgaatatatagttctatcacacaaaataaatccatttaaaatatgggctaataataaccaataaatgttatttctcctcactgggtaatagggcttatatttsaacaggcaatgtcccagagaaattcaaggttaaagtgg

SEQ ID NO: 104716 - DNA, 648 bp, Homo sapiens
gacgccctgactaaattgtttttttcaaatttatcttaaccattcctgctccttgatgatttttaggattagtttgtcatattctgcatgagcaaaaaacaaaacctattaagattttgactgaaattgcactcaatctacaaatttattaagaataaactgacagctctatagcattgagtcttgccactgataagcatggtgtatctctctacattcattcagctcttcttcaaaaccattttataatcttctccaggaaggccttttattagatttattcctagatgcttacagtttttgccattaaagttaatgtaatattttwaaaatgtatttgctgataggttaatgctgatatgtgaatgctatcattttttgtttactgttcttatctttagcaaccatgctaacctttcttattctaacaggttgtctactggtgctcttgaaggtcctcttgaatttaatttgtagcttttccatactgataatcaattgtgccaacaccatttactaacgagcttacatttctcactgatctcagattcccacattaagtgtaggtctccttttggagtctattctgtcccactaagccatttgtctatttctgtgtcattaaaaccttgttttactatagcttat

SEQ ID NO: 104717 - DNA, 648 bp, Homo sapiens
gacgccctgactaaattgtttttttcaaatttatcttaaccattcctgctccttgatgatttttaggattagtttgtcatattctgcatgagcaaaaaacaaaacctattaagattttgactgaaattgcactcaatctacaaatttattaagaataaactgacagctctatagcattgagtcttgccactgataagcatggtgtatctctctacattcattcagctcttcttcaaaaccattttataatcttctccaggaaggccttttattagatttattcctagatgcttacagtttttgccattaaagttaatgtaatatttttaaaatgtatttgctgataggttaatgctgatatgtgaatgctatcattttttgtttactgttcttatctttagcaaccatgctaacctttcttattctaacaggttgtctactggtgctcttgaaggtcctcttgaatttaatttgtagcttttccatactgataatcaattgtgccaacaccatttactaaygagcttacatttctcactgatctcagattcccacattaagtgtaggtctccttttggagtctattctgtcccactaagccatttgtctatttctgtgtcattaaaaccttgttttactatagcttat

SEQ ID NO: 104718 - DNA, 578 bp, Homo sapiens
tttgggctgagacctaatggcaaatgggagttagagactttggcaaaaataacagccacatgaaggaagacccaaaggccagcattgtccagttttatgatcaaggggacggtggtggcagctgatgaagccagaagggacagcagacatcaggcaatgcaaggtagttctgtggtggtgtgggtttcacctgacgtgcagtggagtccacagagtgttaattagcagtgcggtgatgtgaacccatgtggagaaggaccaatcgggatgcttgtggagggtggaccaggcagcaagatagacatgaaagccagtcaggaggctacaccatcactgggtggaggtggctgtaagtgaagtggtgggattggagggacctgggcrgggctggatacacagggagggagagggaaagggagggccgaggacagtgcccaggtgtctgctacctgaaactgagtgtaggaggtcccatttcctgagggggacactagagtccaggctgggagctgtgtgagtcccctgggctgtcataacaaaggatcacaaagcaggtggctcaaaaacaacagaaatgt

SEQ ID NO: 104719 - DNA, 522 bp, Homo sapiens
ttatgtcctgctttataaaaataggcatcttacaccctagaatgtgggcaaaatctgcatccaaacagttcaggaaatttgttasctgcttagcaatttttttatgaaatccagaaaaagttaagccatgctacagactaaagcctttgctataaactccctatcggccaaatccccttggggacccattttaaaaaccaaacattgaggaattttcttaaatacccaggtcctaattgattttaatgagtattttcccctctttgaaaaaggtagagcttaattttcaagagttataaaaatagctgcttctccacctttcatgtcagaatcctaccttgaaaaaatttggcaacaatctatgtcaaatatattcaaagtaatgctttgcattctatagatggtttaaagatacttttacacttgtcatttcatatctttaaaataatcctgtatggtagaacacagtggaggaaagataagttgagaaggtgagctacttcaatgtacaggggaaaaaaa

SEQ ID NO: 104720 - DNA, 522 bp, Homo sapiens
ttatgtcctgctttataaaaataggcatcttacaccctagaatgtgggcaaaatctgcatccaaacagttcaggaaatttgttacctgcttagcaatttttttatgaaatccagaaaaagttaagccatgctacagactaaagcctttgctataaactccctatcggccaaatccccttggggacccattttaaaaaccaaacattgaggaattttcttaaatacccaggtcctaattgattttaatgagtattttcccctctttgaaaaaggtrgagcttaattttcaagagttataaaaatagctgcttctccacctttcatgtcagaatcctaccttgaaaaaatttggcaacaatctatgtcaaatatattcaaagtaatgctttgcattctatagatggtttaaagatacttttacacttgtcatttcatatctttaaaataatcctgtatggtagaacacagtggaggaaagataagttgagaaggtgagctacttcaatgtacaggggaaaaaaa

SEQ ID NO: 104721 - DNA, 651 bp, Homo sapiens
atcccaggaatgggaagataattccccaggagattggccagggatggtcctgagctcctcttgacgttcagatgcttcctcccttctctttttctccactgtgccgctctgctcccctgccagtggaatttgggggttttatgggtacaggatgcagggcgtggtgggccacagtggttttggaaaaagcaacatccaggagggaaaacagggatatgaagtgctcatttagggccatggcaggtcttgtgggtggggcttttgccagggaaccaccctcttgtactcagtattgccctgcctcctgtctgtttcaatctcagacggggaaaggkagtttacagagaagtgtggtaagaaggccaggaaggactgggaacacttctgaggtctgagagcaagaatttaaaaggaaccctgtctgctgagttgtggtttcctccaacagctcagcagctcagatacaggccagacaatgtgggcagctgaactcatcgcacagtgggtctcagacggactggacgttagaataatgtgagcactttttttaaaaattctgatgcctggctcctccccccgagactctgctcgggtgatctttggtggggcacagtcatgggtaatttttaaagctctctggtggtgttaatg

SEQ ID NO: 104722 - DNA, 591 bp, Homo sapiens
attgcaggatcacatggtaattctatttttagttttctaagaaacttccatgccattttccataatagccatactaatttttgatgttactagaacgcttcatcccaggtgagacagatgtgcatttataataaacaccaaagattgtccttctataagtgccttgtggggttgggctcatggagagaaaggctgacctttatgctgatctcttaacctgtgcccagtgaagcatgcagtcgtatacttcaggtaatagaaactggataagagaaaagaatgtcttgattcacaagagatttgtgaaggggaaaagtttgttcttaatcctctcttctctgagctattccgagtatagcatctcatacacttctatatgagcccaggttcctccattggtataaggaaacaattttaaatcaaactaattcatgctaaratgtgaatgactaaataagctatctgcccctagtctattttcatcttaacagagtaccataaaaagagaataatatacaatgtgtgtacgtctacattggacgttcagtctgatatccaagtcagactgaatgtagaagataaatttttggt

SEQ ID NO: 104723 - DNA, 469 bp, Homo sapiens
ggctcctctagatggctgggaaaggagccaagccttgcaagtctccgagacagcctgcagaggctcagcacaaaaggtcttggaagaagtttaataaaagctgttttattttctctgggggtccttattggttattatcaaatttatttcatccccaatctttgttctttggcaaggcagagaaaagggaaggtrgtggtgggggggcgctgagaggaatagatccatacgactagtaaataatactccctttccccaatccaattacctaaggcagagaggctccaggaggttggagggctgaagtagcagctccaggtgcaactggggctgtagccttgtgtgcagacatcacaatctcagacacctgctcttgctgccaaccccagggaaggccccacatgcgagggatggaggggcaggaagccaaccagaactgggtctgtcacaaaagcttcagaaatgtgac

SEQ ID NO: 104724 - DNA, 469 bp, Homo sapiens
ggctcctctagatggctgggaaaggagccaagccttgcaagtctccgagacagcctgcagaggctcagcacaaaaggtcttggaagaagtttaataaaagctgttttattttctctgggggtccttattggttattatcaaatttatttcatccccaatctttgttctttggcaaggcagagaaaagggaaggtggtggtgggggggcgctgagaggaatagatccatacractagtaaataatactccctttccccaatccaattacctaaggcagagaggctccaggaggttggagggctgaagtagcagctccaggtgcaactggggctgtagccttgtgtgcagacatcacaatctcagacacctgctcttgctgccaaccccagggaaggccccacatgcgagggatggaggggcaggaagccaaccagaactgggtctgtcacaaaagcttcagaaatgtgac

SEQ ID NO: 104725 - DNA, 511 bp, Homo sapiens
tagagtggggaccaggaggaagtaacctctgtaacccagaagtggctaaagtgttgaactttgagcttctctaaggagagctggctatctggctgagctgccaagtactcctgtctttcagaaattgacagctgaagtatttggtcttggtttcccactgaagaggaatgtgtagaatcactgcagagcagaagaaattaaattttgaatattaatgcctgatcttttaagttatctgactaaaaacagaagagtgatcrtaagcccaaccctaggtatcagtgtattatggctagcaaggagttaagaagctttgtctattcagcagtcataattgaatgtgtagtttgcaagcctgccaaattgctaaacctagatttctcatattagataatgtgtaataaaagacagctgttgccagcatatgctgtgaattgcacaccagttcctcattcatgatttttggcgccatcactacaacccttagaaaaggctctgactggagggctgt

SEQ ID NO: 104726 - DNA, 625 bp, Homo sapiens
taatttgtaatttgacttaatctgacttttggtgttgctgataacccaaattagtcagtccacaggaactgaaaatctgctatgcttctcatgttgtgctagacaaatattttcatctttaactagtcaattagctagatagaaaggttagaagtagagtggtgggggaaatatctatagaggcttcaggtctgtcctgtggtttaaaagattttacatttgaatctatccagaatgacttttgattcaaaagaccgattggatgaaatcttgaagttcctaatagatgcactgatttccggcatactaaaagggtatttaaaattgacaaggctcaaaattttactaataatttattaattcttgccaccattcatccacttagcagctatgtactaaggcactactatctttgttttctgttagtactttttctgcatttcttgtttcggattgaatttttttttttgttcttgtctgttttctttcatttaaaattttttggtttttaaaatttgtayttattcagttgatatataatcatacatactcatggtatacatagtgatgttttgatacgtggaatgtacagtgatcagatcagagtaattagcatatccatcac

SEQ ID NO: 104727 - DNA, 548 bp, Homo sapiens
gtcctgcacagccctagatcccttaaaccttgatttcatacaacacrtgtttttgtgagctccaggttgggtcaaagtggctggggcaaagctacaaattaacaacatctcagcaaagcaattgttaaaagtacaggtctttttcaaaatggagtctgtcttccctttctacacagacacagtaacagtctgatctctctcttttccctacaacgcttggtggtaggatcgtaaaaatgaaaacaatacaaggatggtggaggaaataagtggaagaaacccagtataaagttaatatgaaggaacagacaaacaaaccagctctgaactacctatctccagacttctcaataagagagaaaaataaaccccttgtttgtttatgccagtgtagtcatatttctgttacatgtagccaagtacaataatctcttctatatttcctttttacatgtaagagaatacaagcttggaaacattaagcagcatgcccaaagtcacagagctcccagatttgccctcaacttttctcttcgatgcagagccca

SEQ ID NO: 104728 - DNA, 592 bp, Homo sapiens
attattttgaacaagtttttttttaaccttagtgaaaattaaagtttgttccttctttcctacactttactgcttttcttactactttggttagaaccaactttagggttttaaacaaagtggcaatagtaagcattttgcttttctcaattgttagaagaatgcttctaaatttctccatcaggaatggtatttgctgtagttttctggcaggcacatttaattagaccacctaatttaactgatctgcttataggaatggagtggggaggcatcaaaattgcttaaaaactcctctgaaaaatcttttatgcagacagatttgtgaatcatcatgttagagccataagggctgtagaagttaaagctggctctcatctccataggagttttgattagcaagttagcgactttaactctgagacttaaggaagccaaggaaatcgtagttcrgggaaatattcacagtgcacattttattttagctgtagttgatgatgataatgatgggtgtagtatgcaaggtatttcataagggatctgggtgtaaaaatattgaatcaggattttaatttgttctaaacatacatag

SEQ ID NO: 104729 - DNA, 543 bp, Homo sapiens
ctgtgtctatcctatgtcaagatcatactcttgattactgtggttttgtagtaagttatacaattggaaaatgtaagtcctttaaatgtgttattcttcttctaaggttgttttggaaattctgggcccttgaatttcaraatgacttttagatttggcttgcgaatttctgcaagaacaaaaaaagcactttgatcatgatagggattgcactgaaatcatagatcaattaagagatatattgccatcttaatgatattaaatctcctaatccctgaacataagattttttcccattcatttatattttatttgattttttaaaataatgttctctagttcgccgtgtctaagactttcacttattttgttaaacttattctttagtattttgttttttggggtgttattgtaaatgtaattaatcacttggtttaatttttggtttgtgaatcactaatgtatagtaatacaattgaattgtggatgtcgatcttagactctgcaacctcgatggtcttaattatcacttttagtaataat

SEQ ID NO: 104730 - DNA, 578 bp, Homo sapiens
ctaaactttttcattctaaataaattctgcttccttgggaagatayatgatgctctctgttttcactccctttttctcttcttgggtcaaacctctgtgttgttcattaggaaccacagatatgctttgccattctgagggagatgtgggttgtggtgccaatgccacaggtttgcattgcttctatcagaatttagtagattttattttatttgaggaatgtcctttggaaaatatccagagactttaaattgtttgcttatttgtaaataattttcacgagttatttttttttcctggggaccaggttcatagctcttcactattccagaaatcagtcctcaaataattttaataacatgttttaaatattctttatgtaatgtaatgctttgcatactataagcatgttaaaggtagtagctatgccttagttgtatttttcatacctggaatgacttatcacagccacacatctgcacacattataatctcagtatgtgctttttgtgctaaatatgtagcacaaggtcaaaggcttacctttacaacttccttatttcttatagagtgcggag

SEQ ID NO: 104731 - DNA, 597 bp, Homo sapiens
tgagataaaacttgaagaagaaatattatttgcataggtaggaattataggaaatatattttagaagagagaaacacaatttactactcataatctgatgatgattaaaattcaggttcacctcttgcaaatatgtatgaactatcctagggctttgatgagatrctaaaggataatgataaatacattacacaaaaagagtccaacaatatggttgttacagtgaagattttgggcattagtaaaatcttataaaatctactttctaaaaatttttcagcaacaacctagtattaactgcataagttttgcattgcttctttgttaacctagcaattttactgctgatttttaccctcaaaatgtaagcattatattgataatatctagcaaatattaataattatgtactacacattggcatttattatcaaacccaatcttcacaaaacccctggagctagattctatccctgtgttacaggcatataaacagagactccaacagcttgagtaatttgaccccccaaaatagagctaacataatgtagagcctacttacaacattcagtctgattttacaagttatgttctgaa

SEQ ID NO: 104732 - DNA, 574 bp, Homo sapiens
ctgagtcatcaatgacctaccaatatacactcatggaaaggaatcatctctttccttttctctgtgacttctgccaagaaaagaaaatgcagagtgatggtgcacatacaaaaagcagaaaacatggatccattaggtttgtggccaatatattgtaattaaactcacttttactggatacttcctgttttccagacagtgtgccaggatctgaggagacarcaattattagggtaatgtgatttctgcatgttaacatgatgcctgcatgttaagacctaataatcttatgagaaaacagaaattcctagggagacactgatggtgggattttaaacatttcttagcatatctgataacaatattcaacatacagtcatggattcctatgtacttgctgtcttatatactaggatgtacctttataaatgaacctctcttaccttttgaatttgcaaaatgttgggcactctctctcctccaggttatttctcaagcaaactgacacggagatgttggaggaatattacccctggcaattagttaagagcctagcactgagctaattgttctg

SEQ ID NO: 104733 - DNA, 574 bp, Homo sapiens
ctgagtcatcaatgacctaccaatatacactcatggaaaggaatcatctctttccttttctctgtgacttctgccaagaaaagaaaatgcagagtgatggtgcacatacaaaaagcagaaaacatggatccattaggtttgtggccaatatattgtaattaaactcacttttactggatacttcctgttttccagacagtgtgccaggatctgaggagacagcaattattagggtaatgtgatttctgcatgttaacatgatgcctgcatgttaagacctaataatcttatgagaaaacagaaattcctagggagacactgatggtgggattttaaacatttcttagcatatctgataacaatattcaacatacagtcatggattcctatgtacttgctgtcttatatactaggatgtacctttataaatgaacctctcytaccttttgaatttgcaaaatgttgggcactctctctcctccaggttatttctcaagcaaactgacacggagatgttggaggaatattacccctggcaattagttaagagcctagcactgagctaattgttctg

SEQ ID NO: 104734 - DNA, 483 bp, Homo sapiens
actatgtcatccatgttgacagctgagggcactggcaccatcataactcaytgaagactccacagcaatcctcccagttcagcctctggagtaggtggcactgcagacacataccaccacacccggctctttttattcttttgtagagaatgggtcttgctatgttgcccaggcccatctcaaactcctgtccccaagtgatcctcctgcctcagcctcccaaagtgctggaattataggcatgagcactgcatcaagcctaatttccattttctaaacgtgtctttccgtgccagaaaacaagcacctacagacacttgtgccatctgctcagttgctttgctctaaatataaggccctgtgtcatcaggaggcaacatacgaggcatttaaacagtgcattaagaggatcaagtctaaacgtggccactcaccaaccaaaagggtttatgtttgtcaacaacagatagaaattgaatcaag

SEQ ID NO: 104735 - DNA, 483 bp, Homo sapiens
actatgtcatccatgttgacagctgagggcactggcaccatcataactcattgaagactccacagcaatcctcccagttcagcctctggagtaggtggcactgcagacacataccaccacrcccggctctttttattcttttgtagagaatgggtcttgctatgttgcccaggcccatctcaaactcctgtccccaagtgatcctcctgcctcagcctcccaaagtgctggaattataggcatgagcactgcatcaagcctaatttccattttctaaacgtgtctttccgtgccagaaaacaagcacctacagacacttgtgccatctgctcagttgctttgctctaaatataaggccctgtgtcatcaggaggcaacatacgaggcatttaaacagtgcattaagaggatcaagtctaaacgtggccactcaccaaccaaaagggtttatgtttgtcaacaacagatagaaattgaatcaag

SEQ ID NO: 104736 - DNA, 226 bp, Homo sapiens
cctttgacgctgtctcacatccaggtcaagctgatgcaagaagtgagctcccatggccttaggcagctccacccctgtggcttcacagggtatagtccccttcctggctgctttcacaggctggtgttcagtgtctgcagtttttccaggtgcacagtgcaaactgtaggtggatctacyattctggggtccagaggatggcggccctctgctcacagctccatga

SEQ ID NO: 104737 - DNA, 566 bp, Homo sapiens
aataacttccagtaacatctctggcagttaggctgcaagaaaagtctttgatacttcccccactttttttttttctaaaatataaagaccttaggacttcagaatctgctaaataaacttctcagtgatgagagctattgtctttataatttccatccttctaggtatgtcagtggaaaataacggtttataatacatttccatagaacagtggttttctttttaaartaattaatttaacttttttaattgacaaataataatttacaaattcattggacagatcatgatgtttccattcatataatgtatagtgagtgaccagattagggtaattagcacattcattacctcaaacaattgtcatttttgtgtgtgtgttggaaacatttaatatcctccttctagcaaggttttcttaaagtgaagtcttaaaggctaaatcgtttgtttgatcaggtgtttatcaaaccatgttctagagactgcagaattctagaggaatatttctgtcaaagcaatttacagtatttgttagcacaagtaatacattctatttaagaatg

SEQ ID NO: 104738 - DNA, 566 bp, Homo sapiens
aataacttccagtaacatctctggcagttaggctgcaagaaaagtctttgatacttcccccactttttttttttctaaaatataaagaccttaggacttcagaatctgctaaataaacttctcagtgatgagagctattgtctttataatttccatccttctaggtatgtcagtggaaaataacggtttataatacatttccatagaacagtggttttctttttaaagtaattaatttaacttttttaattgacaaataataatttacaaattcattggacagatcatgatgtttccattcatataatgtatagtgagtgaccagattagggtaattagcacattcattacctcaaacaattgtcatttttgtgtgtgtgttggaaacatttaatatcctccttctagcaaggttwtcttaaagtgaagtcttaaaggctaaatcgtttgtttgatcaggtgtttatcaaaccatgttctagagactgcagaattctagaggaatatttctgtcaaagcaatttacagtatttgttagcacaagtaatacattctatttaagaatg

SEQ ID NO: 104739 - DNA, 566 bp, Homo sapiens
aataacttccagtaacatctctggcagttaggctgcaagaaaagtctttgatacttcccccactttttttttttctaaaatataaagaccttaggacttcagaatctgctaaataaacttctcagtgatgagagctattgtctttataatttccatccttctaggtatgtcagtggaaaataacggtttataatacatttccatagaacagtggttttctttttaaagtaattaatttaacttttttaattgacaaataataatttacaaattcattggacagatcatgatgtttccattcatataatgtatagtgagtgaccagattagggtaattagcacattcattacctcaaacaattgtcatttttgtgtgtgtgttggaaacatttaatatcctccttctagcaaggttttcttaaagtgaagtcttaaaggckaaatcgtttgtttgatcaggtgtttatcaaaccatgttctagagactgcagaattctagaggaatatttctgtcaaagcaatttacagtatttgttagcacaagtaatacattctatttaagaatg

SEQ ID NO: 104740 - DNA, 529 bp, Homo sapiens
gctgccacactacatagaaaatgtttcataaatgtttgtgaaatgaactaagtaaaaaaataaaaggagttgcaaaaataaagggagttgttgttatttaaatatcacaaacgactttcaaataaaakaaaattttaaaaatagttctaagagggggcaaatgtccccactgtgaggtgcttcagaaggagataggagtataggctaggaacaagtcattaaggacagtagtcattccaggaattcctgatgaaattagcatttttaaatatttccagtagaattaaaatttaaattctcctgtgaaacatcatttggcaataggcggagaggttctacccatggaggtcagggagcattcccagaagacaggaagagcagataactcttttatcttgagtctctcacacacactgccaagtttttggcagctgcctctatttaagctgcatcagatcagtgcctgagagattttggattactctgaagttgctgctttgactgtattagtgatattaaaccaataaga

SEQ ID NO: 104741 - DNA, 556 bp, Homo sapiens
ataaataacttgttttgtttttatagtctcatatatagaaggaattcatctccagataggactttgaacttgagttagtgttggaatgaattaagacttcaggggattactggcaggggatgattgtattttgcaatgtgaaaaagacatgaaatttgaggagaggtggaatgatatagtttgccccctctaaatctcatgttgaaatgtaatcccyaaggtggagcctggtgggaggtgtttgggtcatgggagcggatccctcatggcttggtgctttccttgagatggtgagttcttgacagatctggtttttaaaagtgtggcacctctcctgtgctctctcttgctcctgttttcgccatgtgacaagcctgctcctcttatgctttccccctgagtaaaagctccctgaggccttcccagaagccaagcaggtgctggtgccatgcttcctttacagcctgcagaaccataagccaattaaatctctttgctttataaattacacagtcttaggtattccttttagcaactcaagaatggcctaacacat

SEQ ID NO: 104742 - DNA, 616 bp, Homo sapiens
gatctggtttttaaaagtgtggcacctctcctgtgctctctcttgctcctgttttcgccatgtgacaagmctgctcctcttatgctttccccctgagtaaaagctccctgaggccttcccagaagccaagcaggtgctggtgccatgcttcctttacagcctgcagaaccataagccaattaaatctctttgctttataaattacacagtcttaggtattccttttagcaactcaagaatggcctaacacatgtgataattacaattcttatttcacaggcttattgtgaggatgaaagggtaaacacatgtaccactatgcttgacccacacaaaacactccataactaattactaattattatgaactattcccacttacaggtatgacaggtgtgcagaatttgtcaaagcagagacctatggtttagaactgtcctttgctcattttggctggagtttaacagcaccatctcagctagagggaggaagaacgaaacaggtggaaacaactttcctggttatgttgttctatctatattcctggttcctctagtgctagttcacaccagtacaaccctgccaaagatcactcttcccagaatgcactgcttat

SEQ ID NO: 104743 - DNA, 501 bp, Homo sapiens
aggtgcgatggttcatgcctgtaatcccagcactttgggaggccgaggcgggcagatcacctgaggttgggagttccagaccagcctgaccaacatggagaaacccccccatctctactaaaaatacaaaattagctgggcgatggtgcatgcctgtaattccatctactcgggarcctgaggcaggagaattgcttgaacctgggaggcagaggttgcagtgagccaagattgtgccattgcactccagcctgggcaacaagagtgaaactccgtctcaaaaaaaaaaaattttccatattatagaaactcttttacactatattcttcaacctaatttttgaggagagtttattttaataccaaaaccagaaaagaatagtatgagaaataaaaattacaagttaaactcacttacaaatgtgaacagataaattagttctcttgcaaactaattgcagcaatgaatgagaaaaacaaataaatttatcccaggaattc

SEQ ID NO: 104744 - DNA, 469 bp, Homo sapiens
gaaatatggaattactgtcaccaaaaactctctcaagtacactgattgtgaatttaatgtgagacccaccagtatcattgcatgttttccgctagtctcatttaaagtgcatggggaattggaattaactgcatggaacattttgccaggaataaaaggaaagtatgtgaaagtgacaacagcaaatgacaagggggcttcttyggctaggaacgaaaggaagtgcggcatgtgtggggtctgagggacagtggcaaagctgtggagcaactgattggaggattccgtgaatgaatgaagttggagtgtagagaaaggaagcagaagtgattcaaagtggtggttagagagtgtaatacttaaaattgaggttgtggaggggttgtcattattggtaataacaatattaaaggtaaaaataaatgactgacccttgattgtgggcaagattactagaagtggaaaactc

SEQ ID NO: 104745 - DNA, 570 bp, Homo sapiens
cagctcagcccaggttcattcaatattctttgcatgttgccctaaacacggctttctcctggcaccaggaagcccagtgacctagtaaaatccaaatgtggtctttataaagaacaagcccccatgtaatatccaatatgttagggaagagatctaagataataaaactgaatgagtacaatgaggtattcatctacttaccatccatggggatgtgtgggctgacagctttgggctrttgcaaaatccattgagttaagtgggagtgccataacaggttaagttccaatcaaacctctctgggaattgtctgtgcaaattcacaagctggattaccaatgaacgtgcattttcaagatacataagtgaattggcatgctgtaactgggtgccatcttatggaaactggtatgcatccaccccacaagagttattttgtcacagacccaagaaatacttcatggtaacttggagagaaaatgtttgccaggacttgaagcagagacacctcttagtcataactctgtctgtagtctatcccaaatgctctcagcatagttaaaacatcat

SEQ ID NO: 104746 - DNA, 542 bp, Homo sapiens
attcatcttttgccccttgctgatggagaatgtttgtggktttttttttccaatggaatgggaagcctgaaagcgtaatgattgcagaataatttttcctgtgtttgtttttcacttgtctcgataaatttttagtttgacaggtagaaagggctttctgtttttctatgtgctaaagagggtctcatcactcaacaaatcccacgagcttttacattctcagcactgtgtccttctgaccttaaactttctcattgcctggaaataaagcttttcatgagaactcacaaagccctaccagctgagtttgacaatgagacaggcaatacacagggcagattatcattggaggaaactgcaacttcctcatcaaaatcatttgtttaacagaaaacccaggagtctactgtaagttaacagacttgctcccttacctccagcagcttataatttcttgggaacatagaacacagtggcacttagagaatgaaatgactttatttctctttgcattagatataccctcccccatttctggcatg

SEQ ID NO: 104747 - DNA, 574 bp, Homo sapiens
atggagactgaagtcagccctaatagtaaaacattctgtaaaaggttgtgcctatgtaagtttattcatggtgggcaccaaaaccctatattaaaggtcaggtagatacaaacttcaaacaaacattgttctataacttgtgtggtaggtacaataatattcccccatacacacatgccatgatgcctatgtcttaatcccgaaaacgcatgaatatgtcaccttaccttgcaaaagggactttgcagatgtcattaaactaagggcactgaggtggggaaattatcgtggattacccaagtgggccaatggaatcacgagggttctaataaaggggatgcaagaaggtcagagtcagaaaaaggaaatgtaaggatggaagtagagataagagagagasagaaagggagagagatctgaaggttctacactgtggctttgaagatggaggaggaccataagccagggagccaaggccgcctttggaagttagaacaggtaaggaaacattctccattcgagatttcagaaagcagccctgctgaaaacccgattttagccaaatgaaactcat

SEQ ID NO: 104748 - DNA, 646 bp, Homo sapiens
tgttacattatctcaaaaatttttctaaaatatttccaatttatttgaactccctgaaatcacaattctttttttactgatttgtttctctgtcatgcttatgagccacacttttttggtgaaaaggggccaatgcattctcactacaatccagagagattagaaaatgtattttctttgcaacatcaaaaagacacaattttggtatgtaagatcaccttagactaaactgtgttgctatggcacagatgatttggagcaagggctaaaaacagttgccgactcatttctcctaaggccgttgaaatacttgtcaacaggaaatgtggagtcttgattagactagtgtaattgtattcccataacataacttctgtgagccaaatttctctcatctgcaagaaatgaagctaaaaatacctaccaggaggattttttttgaagattaaatggtgtaggatatacaaaatacccagtctgtaacaggaactcaaaaatgtttctccatttcttcatatttgtctgagtacacgtgaataaagcccaatttagaaacaactgaaattatttttaaaagatagatactaayattttttgaaagaattttgtgctaactttcttacaaacatctgtgaataaaaatagc

SEQ ID NO: 104749 - DNA, 568 bp, Homo sapiens
atctttcaataatatcaaatttctgtgtgcttatctacatttgctcttcaaatattcatttaagaatttttcttgaatactttcctggatattaaacataaaaatcatattaagacacaatccctgacttggaattatttgcagtcaactgggagaaacagagaggaaaacaaagacaataaagagaatttttttggtttcrcatgaccacattctaactcaaataggctttaaaatcaaagaaaatgagttgttccataaaactaatagtccaggtccatcttcagaaaaggctgatgcacactcatatagtcaggaattcatctttccacaagtctcagctcgagttgtctttgtgttaacttgtttatctgattcaggaggattctaacttcataggggcaagatggcctccagaagctgtagacttcacaggaaaaagataactcctctttccacataactctaagaaaaatcccagaaagtactatcactgtcctagagaatgagacactgtcagtgggaagccttgacaggactcatctacacgtccagagcacgagggact

SEQ ID NO: 104750 - DNA, 580 bp, Homo sapiens
cctctcttctcttctcctctcctccttcctcctgtggctcctcttacaagcacctgccctgcagttgaagaaacacgtccatgtgtttgyacttcaagaataggtatacataggccgggcacggtggctcacccctgtaatcccagcactttgggaggctgaggtgggcatatcacctgaggtcgggagtttgagaccagcctgaccaacatggagaaacccagtctctactaaaaatacaaaaattagctgggcatggtggtgcatacctgtagtcccagctactctggaggctgaggcagaagaatcgcttgaacccgggaggcggaggttgtggtgagccgagatcacaccactgcactccagcctgggcgacaagagtgaaactccatctcaaaaaaaagaaagaaagaatagatatacatgaataaagacatcctaaaataatgagagtcactgctcactgctgcctggcagtgtggggcaggtgtggggttgctggcccagaattcccagaggcctgacaaggtgtccccatcatacctcatcctaccacactgctcagtgagggctgtccaga

SEQ ID NO: 104751 - DNA, 580 bp, Homo sapiens
cctctcttctcttctcctctcctccttcctcctgtggctcctcttacaagcacctgccctgcagttgaagaaacacgtccatgtgtttgcacttcaagaataggtatacataggccgggcacggtggctcacccctgtaatcccagcactttgggaggctgaggtgggcatatcacctgaggtcgggagtttgagaccagcctgaccaacatggagaaacccagtctctactaaaartacaaaaattagctgggcatggtggtgcatacctgtagtcccagctactctggaggctgaggcagaagaatcgcttgaacccgggaggcggaggttgtggtgagccgagatcacaccactgcactccagcctgggcgacaagagtgaaactccatctcaaaaaaaagaaagaaagaatagatatacatgaataaagacatcctaaaataatgagagtcactgctcactgctgcctggcagtgtggggcaggtgtggggttgctggcccagaattcccagaggcctgacaaggtgtccccatcatacctcatcctaccacactgctcagtgagggctgtccaga

SEQ ID NO: 104752 - DNA, 580 bp, Homo sapiens
cctctcttctcttctcctctcctccttcctcctgtggctcctcttacaagcacctgccctgcagttgaagaaacacgtccatgtgtttgcacttcaagaataggtatacataggccgggcacggtggctcacccctgtaatcccagcactttgggaggctgaggtgggcatatcacctgaggtcgggagtttgagaccagcctgaccaacatggagaaacccagtctctactaaaaatacaaaaattagctgggcatggtggtgcatacctgtagtcccagctactctggaggctgaggcagaagaatcgcttgaacccgggaggcggaggttgyggtgagccgagatcacaccactgcactccagcctgggcgacaagagtgaaactccatctcaaaaaaaagaaagaaagaatagatatacatgaataaagacatcctaaaataatgagagtcactgctcactgctgcctggcagtgtggggcaggtgtggggttgctggcccagaattcccagaggcctgacaaggtgtccccatcatacctcatcctaccacactgctcagtgagggctgtccaga

SEQ ID NO: 104753 - DNA, 580 bp, Homo sapiens
cctctcttctcttctcctctcctccttcctcctgtggctcctcttacaagcacctgccctgcagttgaagaaacacgtccatgtgtttgcacttcaagaataggtatacataggccgggcacggtggctcacccctgtaatcccagcactttgggaggctgaggtgggcatatcacctgaggtcgggagtttgagaccagcctgaccaacatggagaaacccagtctctactaaaaatacaaaaattagctgggcatggtggtgcatacctgtagtcccagctactctggaggctgaggcagaagaatcgcttgaacccgggaggcggaggttgtggtgagccgagatcacaccactgcactccagcctgggcgacaagagtgaaactccatctcaaaaaaaagaaagaaagaatagatatacatgaataaagacatcctaaaataatgagagtcactgctcactgctgcctggcagtgtggggcaggtgtggggwtgctggcccagaattcccagaggcctgacaaggtgtccccatcatacctcatcctaccacactgctcagtgagggctgtccaga

SEQ ID NO: 104754 - DNA, 576 bp, Homo sapiens
cttatgttctgccttcctaaatactgccaaacagttgcctgaacaggttttatgaattgacacttccaccactgtgggatttctaattgttccacattcttgtcagctcttggtattatctttttcattttagccattttggtgcatacacaatggcatctcactgtggtttacaagtttcttctgaaaatcagttacaatttcactcattactaactcatgacatttaccctgatagggtaatttaaatgtaggtttatgttttttcaaatgtacctgctataccttaytcttcacagtcacttatccttgaaaagatcaaataatttggaacccatattttatgttcacttactgtttcaaatactttgccaaaatagaatgagggaatctctgcatgcacaaaatatttcaggtttatttcctatctaattataaagtattgttaagattctgctatattttaaacatcttgcctctatatattggtccacatcagtgacatcctattgtgctctattctcttgtgactttaacttacttgcttaaatagcttgatgtggacaatgcagtaaa

SEQ ID NO: 104755 - DNA, 451 bp, Homo sapiens
agtgaaacctcatctctaattaattaattaatgtatctatgccttttcaaatttatctatgccttaatctatgcctatttcctacaaaaatcaagatcagagataattactsccatttgcctatacaacctccttcatccattgacctgctatcccaatggcctctggagggcctagctaaaatactgggtctccaaccacccctgcagctagagacagcaatggaggtgaaggagctgacatcaccggggagagtggttccaggaaagctctttgagggagatgactcagctggcagccaccctgatggcacttgctgcaggcatctcataaccaagatgccctaccctaacgtaccctactcctatttcacatggaaaattaaaatagagtttcttttgtgggctaaggagtcccatgtcctccaacttttctgtgctttagtctgaaa

SEQ ID NO: 104756 - DNA, 418 bp, Homo sapiens
ctgagatcttgtttttgctttcaaacaatcgtctgcctaattcccactaactctaaaacagcaaaggggctggctggcaacaccccaagtggtgatgcccctcgggtctattcacattgtggagcaagaggagaggggaaggtggagaagtccagaaaaaagaacctgtctgcggccttgcaggatcagcggcttctgtgaaggggcctaaagcagctccatctcactgtcatcatcccaggacattagggggagatggggactatgcwacaatgaaagaaacctagagatgacttgagacctcacttaaatttaaatgaacaaatcaagacaatactgtcatttcagaaaagctgctgactgttcatctaaactttatagtttaacctacccccatctcaactctgccagaccccag

SEQ ID NO: 104757 - DNA, 553 bp, Homo sapiens
ggccaatttcaacatgcctcccactaagatctgtcttggtaggcaacaagttgatgttgacacctcaggctctaggttccctggcactgctaagttttggtgcctttcttcttacccttagggacaggaaaattggcaataatgggacaaagctgtgcagatctaggggcacagtcaacgtttaagtcagttatatagccaacctctgtctaccttcaagcttgccctgatgggttaggatgaggagactgtatctgagcccattgattgtgccttcaactaaattaagcagagcttggggatggtgtagatttaagaacatcaaattcaaaccatcacatagccataaaatcaaaaaaacagccatgaggccagggttagatatacaaacattaaaaccatttaaaaaaaraaaaaaagaactatgaagaatgagatcaggaatgctgaagacccaagtcaggtttcctggaaaggaaatgggaattaggagcagtcactaattctgctaaagtctcctgcacttgattcttcctcacaagtttaccccatg

SEQ ID NO: 104758 - DNA, 486 bp, Homo sapiens
tcaggaatgctgaagacccaagtcaggtttcctggaaaggaaatgggaattaggagcagtcactaattctgctaaagtctcctgcacttgattcttcctcacaagtttaccccatggcacatyaaatctacttattttcccatacaatttgcttctggactactcactgcccccatttagcaaagcacccccatcaacatctaataaataaatgtcctaaagcaagagaacaccctcccatgaggcttctggtaacacagctgtgcaaagggtcatcagatggatcttttggctttgtgagatatttaatagagcaagaggaagagaatggagcctgagcatcaaaaaggactttaattgtatttgttatgttttcttgtattaaaaaaaaattgtgggtataaactgttaattaaattttacatgacattgctatttttaaaaaatatgtcaaaatgaaaaagaagaaaccaaaaggatgatgag

SEQ ID NO: 104759 - DNA, 486 bp, Homo sapiens
tcaggaatgctgaagacccaagtcaggtttcctggaaaggaaatgggaattaggagcagtcactaattctgctaaagtctcctgcacttgattcttcctcacaagtttaccccatggcacatcaaatctacttattttcccatacaatttgcttctggactactcactgcccccatttagcaaagcacccccatcaacatctaataaataaatgwcctaaagcaagagaacaccctcccatgaggcttctggtaacacagctgtgcaaagggtcatcagatggatcttttggctttgtgagatatttaatagagcaagaggaagagaatggagcctgagcatcaaaaaggactttaattgtatttgttatgttttcttgtattaaaaaaaaattgtgggtataaactgttaattaaattttacatgacattgctatttttaaaaaatatgtcaaaatgaaaaagaagaaaccaaaaggatgatgag

SEQ ID NO: 104760 - DNA, 486 bp, Homo sapiens
tcaggaatgctgaagacccaagtcaggtttcctggaaaggaaatgggaattaggagcagtcactaattctgctaaagtctcctgcacttgattcttcctcacaagtttaccccatggcacatcaaatctacttattttcccatacaatttgcttctggactactcactgcccccatttagcaaagcacccccatcaacatctaataaataaatgtcctaaagcaagagaacaccctcccatgaggcttctggtracacagctgtgcaaagggtcatcagatggatcttttggctttgtgagatatttaatagagcaagaggaagagaatggagcctgagcatcaaaaaggactttaattgtatttgttatgttttcttgtattaaaaaaaaattgtgggtataaactgttaattaaattttacatgacattgctatttttaaaaaatatgtcaaaatgaaaaagaagaaaccaaaaggatgatgag

SEQ ID NO: 104761 - DNA, 519 bp, Homo sapiens
agaatttcctctgcctttcttcattcacctgatggggaccwcttagcatgttttggggagtagactggttgctgttatcagacagactctccaataaaaggagaaatagatgttcagtgctcttccagattacagagatccttccaatgagggtatgacccaaaaaggcatactttgtatgaagaagaagaactttaaagcaagggaaatctttaaaatgtagagaattccctatgattctgggtattccaaatgttcatcacccctctttgaggcctcagttgggtccagcacttgattgtgctgtaaatgtggattgttttcctcccttgctgtctttacttagcagcttggctccattatgacaaagggcaagtagattgatggaacttggggcagtgctgggccctactcaacaactgcagagaagtctggatgaccatattctacatgcactcaccattgctttccttcagactgaccatttcctttccgttgcattatccaaatataccacgt

SEQ ID NO: 104762 - DNA, 519 bp, Homo sapiens
agaatttcctctgcctttcttcattcacctgatggggacctcttagcaygttttggggagtagactggttgctgttatcagacagactctccaataaaaggagaaatagatgttcagtgctcttccagattacagagatccttccaatgagggtatgacccaaaaaggcatactttgtatgaagaagaagaactttaaagcaagggaaatctttaaaatgtagagaattccctatgattctgggtattccaaatgttcatcacccctctttgaggcctcagttgggtccagcacttgattgtgctgtaaatgtggattgttttcctcccttgctgtctttacttagcagcttggctccattatgacaaagggcaagtagattgatggaacttggggcagtgctgggccctactcaacaactgcagagaagtctggatgaccatattctacatgcactcaccattgctttccttcagactgaccatttcctttccgttgcattatccaaatataccacgt

SEQ ID NO: 104763 - DNA, 519 bp, Homo sapiens
agaatttcctctgcctttcttcattcacctgatggggacctcttagcatgttttggggagtagactggttgctgttatcagacagactctccaataaaaggagaaatagatgttcagtgctcttccagattacagagatccttccaatgagggtatgacccaaaaaggcatactttgtatgaagaagaagaactttaaagcaagggaaatctttaaaatgtagagaattccctatgattctgggtattccaaatgttcatcacccctctttgaggcckcagttgggtccagcacttgattgtgctgtaaatgtggattgttttcctcccttgctgtctttacttagcagcttggctccattatgacaaagggcaagtagattgatggaacttggggcagtgctgggccctactcaacaactgcagagaagtctggatgaccatattctacatgcactcaccattgctttccttcagactgaccatttcctttccgttgcattatccaaatataccacgt

SEQ ID NO: 104764 - DNA, 632 bp, Homo sapiens
tgtgaataggaacactcgtggccttggtcttttgtgctcatacctgggacaaagtacttgcttgtctctttaatcagtgtcattgcccttggagggaaaccccaaattctttctgtcccagcaaagacaagacagggaaggatgaagcacaaggaaagtaggcaggtaggctaaaggtaagacagaactgatgacagatttgcagagatgaattcaggatgaggaatgtatgtctacccctgggtgggataaattttgttccagaaggagtcagtctcacctagagcttttccttctaatttcagctggtcctgctgatgatgaagcccctgatgctgaaaccactgctgctgcaaccactgcraccactgctgctcctaccactgcaaccaccgctgcttctaccactgctcgtaaagacattccaggtagcaagactcctccatctgtgtgcttcctttatgtggctccttgattccttgggttctctattctcacagagactctatttttgaggtcagggagacctcttctttacattgttctctaaatccttgtagtttctaagtcaagtcaacagataaatatcagaggagtcaggaggttacctgactcctaggttaccaatatta

SEQ ID NO: 104765 - DNA, 553 bp, Homo sapiens
ttaatgttattaaagtctttactattcaaagtgatctacagattcagtgcaatccttgtcaaaatgtcaatggcgttttggattaaaatggaaaaaacaaytgtaagatttaggcaaatccacaaaacaccatgaacaaccaaatcaatcctgagaaagaacaaagctggaaacatcatacttcctgattaaaatattttagaaagctacagtaattaaaacagtacgatgttgctataaagacagacatatagaccaatgaaacagaacagacagcccagaaataaatccatacatatatggtcagctgatctccaataaggatgctaagataaataatggaaaaatgatagtctcttcaacaattggtgtaggaaaagtggaaatccacttaaaaagaataaaatttgacccttatcctgcatcagacagaagaacaatcctaaaataaattaaagacttaaatgaaagacctgaaaatgcaaaatgcctagaagaaaatgtagggtgaaatcttcattttattggtcctggcaatgatttcttgggtatg

SEQ ID NO: 104766 - DNA, 637 bp, Homo sapiens
gtttttcatattgtataaagtaagagtcatgatgcatttttttgttggatccattttttttgtttaatactactctcattgttctagtatcacttactgaaaacaactttattctctgtattgcaattgatgcttttgttataaaccaggtgattgcatgtgccttggtgggcttctgtactctcatcagccctttggtctacttatctgtgsttgcaacaattactgcacctcagaattactatacctttataattgctcatttttgataagttcttcagccttaccttttatcttcaagagtgccattactatttttggcccttctcattttcatataaattttagaagattctcatcaacttctaccaaaaaaccttcctagttttaaaaatgagactgtattcaatctatagatcaatttctaagattgcaattttcaaaatattaagttttccaatccataaacatagcatatccttgaatttctatttttatagatggttttaaaatttcttttttataatgcttgcatttttcaggaaacatatcttaaaatatttcattagatttattcccaggtattcatgcacctatttattaatgaagaaaggactcaactatcctgtttaaatct

SEQ ID NO: 104767 - DNA, 176 bp, Homo sapiens
ttgataggtacagcaaactaccatgggacacatatatctatgtaacaaacctgcacattcagcacatgtatcccagaacttaaagtgaaatwaaaaaaaagttaaaaagaactaaatatataaagggtataccataattaaatggagagatagagtcaatattattaaaattaaaa

SEQ ID NO: 104768 - DNA, 617 bp, Homo sapiens
tttgtcctatttgccagaaacgtgatttggataaaaatataaagtagaagaaaggtgagaggcaattattttatataaaccagagagttttgtattactaacttatggctaaactttgaaaatgaaagcactaagatctytacagtctgtatatttctgtatgtgtatatgcatgtatgttatgtttatgtgatatttttctactcccaaatggtattatcaaattaatttatgcaatttcttagaggaattctatgcaaattgacttagagataaatgagtgcttatataaattaaatattcctaaaactcacagaaatttagaaactcaaatgtctttcaagttcatgtgacttgggtaagtttttggtaaataagattagtttaatattgttagtttagtaaaaacagctgtgttctgggtaatcagcattaagtataatagaaacatacatttatattctacttgggtttaatagtcatataaggttaaaatagttaagggggaaataacttgagatgatgactaactttgcttaatgttacaataagtctacctgaaaaatagtttctttttggtaacttgaaaccttaagttatactaagttaaatgatgc

SEQ ID NO: 104769 - DNA, 615 bp, Homo sapiens
tgtactttgctaacagcaatcatgcttactagattatgacaaactttacagaagttatgtctgtttgaaactaaaaagaaaaaatacattcctttgaaaagttccaatttcaaagacatttagacacgatggataagtaggaaagagtcttggaattagtgtgattagtactaccatttctcttaacatctcctaatccattgtaaacatttgatttcagaataaggttccatatgtattgcaaaagcagagtgaaaagattacaccctagaaatgtgttattgaaaatgttctaaaagtgtttctttacatgaatatcaatgaaaagttgtttcttttttacttcactagaagtaattattgaccaaattatgactaacatagaacatttaaagaattaagataaaaactgaaatattccatttttcatttacaacagtagaggttttagtgttttcttgcaaaattctttagtattttcatacatgtgtttgtgtgtgtgtattttaaaaacttttamctcagggatagaataagaaaagcagcacacagcatagttttccattaacattcctgattggcatcatttgcagtttgcagcctacatttagtagc

SEQ ID NO: 104770 - DNA, 552 bp, Homo sapiens
ccaaaatgttaatagtaatgtgaacagttaagttgatatggtttggctctgtctccccacccaaatatcatgttgaattgtaattcgagtgttagaggaggggcatggtgggagacaattgaatcatgggggttgacttcccccttgctgttctcctgatctcacgagatctggttgtttgacagtgtgtagcatctcttcctttttctctstctcccactggccacgtgaagatgttcctgcttcccttttgcttttggtcacagttgtaagattcctggggccttcccagaagcagaaacctgtaaagcctgcagaaccacgagctgattaaacctcttttctttataaattgcccagtttcaggtatttatagcagtgcgagaacagactcatacaaaagttcaggctgacaaggtctcagatggaaataaggaacttattgggaactggagcaaaggtcacatgtattatgacttagcaaagaacctggctacattttgtcccctctttaggaatctgtgaaagtttgacttgagggtgatgacccag

SEQ ID NO: 104771 - DNA, 625 bp, Homo sapiens
ggatatatcaatatacgaatctgaaaaagggataaaatactttatggtataaaagacttgaactttagttcatgggagtattatgagaaaaatcttaggtttatctgtttatttctcagttcagcattgaagttgctggaagtctgatattcttatttatgttggaatttgtgtgggtgtatgtgttcacactagtttttatgtttgtgtatatacacacacacacacacacacacacacacatccatcttattttgtgaacaacagatttgactgaatacccttaacaagaaggaaatgattattaaatttattaattatgggcatatttaaatttcttatgttggcattcttcatagttcgtttgaactaatagtctccatagttcattagtctttagtgcctgccaataaaagaaaaacakcactttaattttgccaatgtatatgaattgcatagcatagcaggatcctgacccatgctattagttaactgaatgaaaggttctctggaaggctcatggtccacatgtaaaagaaaaaattttaagcatatctatttaatgtatttactaatagcagttaatgatttacagcaaagcttagttggtcttttgcagtcccag

SEQ ID NO: 104772 - DNA, 575 bp, Homo sapiens
ataatatataccatgtttgtaactgttttctccatttaatttgctttttcattctttattttccttcttttctaccttctctgattctaattgagcattatatatagtttcattttgtctcttctcattagtatcatttgtaattttctaaaaaaaatagtagttgccctagagcttagaatatatgttttaaactcacctatgtcaatttcaaataacactccactacttcctgggtagtgtttgtgccttataagagaaaacaatccaacctacctcctgtcccttataacatttcagtcattcgctttatctatatgctgtaaataccatgtacattataactatttttttaagttatyttttagatcaattaagataaagaaaaatgaaatattttatttcacccatgtttctttcttttctgatactcttcctttcctttggcagatctaagtttctgacttgtatcattttccttctgcaagaagagtttcttttaacattcattgctgggcaggtccacaggtgattaattctctaggtttcagattgtctgaaaatctactttactt

SEQ ID NO: 104773 - DNA, 556 bp, Homo sapiens
tcttacatttaaatcatcttgagtcaatttttgtatatggtgagagataggggcccagttttattcttctgcatatggaaatccagtttttccagcaccatttattgaaaaggacatcctttcccagtgtatgtttttgtcaactttgtcaaagatcagttggctgtagatatgtggctttttgagttctctattctgtttcattgatctatgtgcctattttcatgctagtgccatagttcatgtgcttaaatgttaccataaacgatatgtttttatcgggggaaattcagcccctgatatttcatataggttcttttctattttccctatgtgttggccagtctgagaaataaagggacagagtacaaaagagagaaattttaaagatgggtgtccgggggagacatcacatgttggcaggttcygtgatgccccctgaaccgtaaaaccagcaagtttttattagtgattttcaaaaggggagggagtgtacgaatagggtgtgggtcacagagattacatgcttcacaaggtaataagatatcacaaggta

SEQ ID NO: 104774 - DNA, 631 bp, Homo sapiens
atttattgagaaactggaagtaattcagcacagctaaggaaagacatgacataatgaagtaatcagaaatgagaatggaaacgtaaacaggggcaagtaagcaggaccttacacatgagaactttaccaagcatagtttctgctcctttcctaatatagcctgaaatcaaagaggaggccactcataatgtcagcatgactcaaccttagagccaccctgcccccattagctgcattatcagttacacattggattaattacttagaaagccagcaacttttaacaaaaatgtggtctctcccacgcagagcataaattcatcccatgagacaaaatggagccccatatgggcacagatatttaaactgtgtgtttactctccgactattatatctaattagcaatcagcagggcataaccagctctagagcttctactagccccctttcagtcattaacactgcctttgggcagtagtggggctgaaaataatatcatctaaatgattacttaattcagacttccatctggaagatctataaaaactgcaaagggttagcarttgtaagaaggaagaaaagagctaagctttctaatgtgctacaggtaccccatatttgaaagaaatgg

SEQ ID NO: 104775 - DNA, 614 bp, Homo sapiens
gtgattaagcaagttcccctgtgaagggcacaacgttcagttgtttaggtaagaagtttctccttctgttttttcttaggactcttgtatcatctgaatgtttgtgacacccccccacccaaaaacagttcacaccataaagcctgtcaacataatgaactatcaatccagagtcagcccatcaacacagtatcgcctaaggtgatgtggtaggaggtgagacctttgggaggtgttaggtcccagtggggagccttcgtgaatgggattatttccctcaaaaagaaacttcagaaagacatcttatcccttccactgtgtggggacacagcaagaagatgtggtctgtgaaccaggaagtgggccctcaccagacaccaaatctgctggtatcttgatcttggacttttcagccttcagagcgatgagaaataaatttctcttgtttgtaagttgcccagtccatattattctgtcatagcagaatgaaaggactgagaaaaccattctagccaagttcttgcagaggaattaagcccaggsctgaggagagagccgtgcagccatgacctaatgtgtttggcagtcaggtccttcttgctctttgttaatga

SEQ ID NO: 104776 - DNA, 631 bp, Homo sapiens
cacagtgaacatgtctgtcctttcacactttatgttgacttgcgttatacaaaccaagctctgtcttaacataattgctaaagtgactggtaatagtaggtagtttatgatcctattttcagagttggcattttattgattattgtgattaataacaggttaattactcctgagakacacaagatatttatatacatgtgcatttccaagaattatagtatcatcacatctcagagcctgatgagatcttataagtcaactaaccaaacttatcatttaacttttaaaaataatctctattcaaaatacacgtatataacccagactaccaccagcaagacataaaatgaaggaaattttcaaatagtagccatgaaagaaaatatcatcatcttatttattcagctaaaacaaaataattatctcaacaacgtttagtaataagagcacttactatatgcctggtgctgttcaaagtccttatatgtatgaattcatgtaatcctcacaacaaccctgtgatgaaattattattattattgctattcccattttatagatgataaaactgaggcacagagcggtgaaataaatttacttagagtaacacaactagttaatggcaaagcta

SEQ ID NO: 104777 - DNA, 631 bp, Homo sapiens
cacagtgaacatgtctgtcctttcacactttatgttgacttgcgttatacaaaccaagctctgtcttaacataattgctaaagtgactggtaatagtaggtagtttatgatcctattttcagagttggcattttattgattattgtgattaataacaggttaattactcctgagatacacaagatatttatatacatgtgcatttccaagaattatagtatcatcacatctcagagcctgatgagatcttataagtcaactaaccaaacttatcatttaacttttaaaaataatctctattcaaaatacacgtatataacccagactaccaccagcaagacataaaatgaaggaaattttcaaatagtagccatgaaagaaaatatcatcatcttatttattcagctaaaacaaaataattatctcaacaacgtttagtaataagagcacttactatatgcctggtgctgttcaaagtccttatatgtatgaattcatgtaatcctcacaacaaccctgtgatgaaattattattattattgctattcccattttatagatgataaaactgaggcacagagyggtgaaataaatttacttagagtaacacaactagttaatggcaaagcta

SEQ ID NO: 104778 - DNA, 631 bp, Homo sapiens
gtgggatctgacattatctctggttagataatgttgcaactaaattagaggacacccagctggtatctgctgcttgatgtttgcagaaaaaaaacccacacatttgatcacggaagtcttctgtgttggttgttaatatggtgtgagactagaggggaaatgtggttatagagaattttccatctacaccatctcatagagctgttgttggrgtcagctgctttggtacatgccaagtgctaagtatcagctttcactgttcacaaaattaacagttttgtaaatgctttgggtaaaaataaggtgatgaactttcaaaaatgtgaatttcttctgctttttaagcatttaagaaactgtaatatttgacttctgattttaatcaaatgcttaaaagtacaatttttcaacaattagtaagaatttacataaatttaactaaactcttaggcttcaaatttctattgttttatttatttagagaatgtttaaaggagcaatcattaaaggaagggaaacattgcatgttctcatttatatgtgggatctaaaaattaaaattgaactcatagagatggagagtagaatgatggttaccagaggctgggaagggtagtagcgcttgggggca

SEQ ID NO: 104779 - DNA, 631 bp, Homo sapiens
gtgggatctgacattatctctggttagataatgttgcaactaaattagaggacacccagctggtatctgctgcttgatgtttgcagaaaaaaaacccacacatttgatcacggaagtcttctgtgttggttgttaatatggtgtgagactagaggggaaatgtggttatagagaattttccatctacaccatctcatagagctgttgttggggtcagctgctttggtacatgccaagtgctaagtatcagctttcactgttcacaaaattaacagttttgtaaatgctttgggtaaaaataaggtgatgaactttcaaaaatgtgaatttcttctgctttttaagcatttaagaaactgtaatatttgacttstgattttaatcaaatgcttaaaagtacaatttttcaacaattagtaagaatttacataaatttaactaaactcttaggcttcaaatttctattgttttatttatttagagaatgtttaaaggagcaatcattaaaggaagggaaacattgcatgttctcatttatatgtgggatctaaaaattaaaattgaactcatagagatggagagtagaatgatggttaccagaggctgggaagggtagtagcgcttgggggca

SEQ ID NO: 104780 - DNA, 618 bp, Homo sapiens
agagtttacagtcagaaagattccagtttgaattcctgctctgtcacttagctgtatgaacttgaataacttatttaacttcttgagccttagtttcaatatctttaaaatgaggatcataatgatacctatttttttacttgcttgataaaatcgtgtgtgattataaacatagagtgctcagtatagtgcctggtgcacactaagcattcaataaatattaagtattattacttacagatacagacttaaccttgtacttctttattgggctttatttaccaggttgaacatgctctaggatctacagctgactcaggctgtgccagctcatcatttggtgctacttagtttttagtaaatgtagtaagtaatagcttgctttttcagctctatctcttccgctctgtagtggggatgagcaggtctggccataaagttaaggcaaatatttaagaaygcaggaagggtgatttaatcaaaatcacagctggtatgaatgtcagagctttatcgactgttccaaaaagtttttggcttgcagtaatgtccttagtccaggctgcatcttgccaacccaagtaatatttcaaaggttgatttagatttggctgttca

SEQ ID NO: 104781 - DNA, 618 bp, Homo sapiens
agagtttacagtcagaaagattccagtttgaattcctgctctgtcacttagctgtatgaacttgaataacttatttaacttcttgagccttagtttcaatatctttaaaatgaggatcataatgatacctatttttttacttgcttgataaaatcgtgtgtgattataaacatagagtgctcagtatagtgcctggtgcacactaagcattcaataaatattaagtattattacttacagatacagacttaaccttgtacttctttattgggctttatttaccaggttgaacatgctctaggatctacagctgactcaggctgtgccagctcatcatttggtgctacttagtttttagtaaatgtagtaagtaatagcttgctttttcagctctatctcttccgctctgtagtggggatgagcaggtctggccataaagttaaggcaaatatttaagaatgcaggaagggtgatttaatcaaaatcacagctggtatgaatgtcagagctttatckactgttccaaaaagtttttggcttgcagtaatgtccttagtccaggctgcatcttgccaacccaagtaatatttcaaaggttgatttagatttggctgttca

SEQ ID NO: 104782 - DNA, 596 bp, Homo sapiens
attcttatggaaatttttgttttagaaattttttacataagaattttagtaattttcaaaatcactgctcagaaagaaaagggctttgctgtttttaaaaaaaaaaaaaagtgtggtcaggccaagtgtggtggctcacacatataatcacagcactttgggaggccaaggtgggaggatcacatatggccaggattttgagctcagcctgggcaacatmgtgagtccctgtcattatcgtaaaagaaaaaaaaaatgggggcattattaacaactgctgctttctaatgactcttatactgattattcctggtgaaattgtttcagatattgggctatttctagcctaattcaatctgattcaaattaatttaatcatttgctgaaggtctgacaagaaaaacttcaataggcagatgatggcattggcgaaaaaaaaactgtttttcttttctatcttatccagccattacatcaacatttattgagcctttactgtgtttactgcaccacattaaataacagggaaaattcaaaatggagtttacaacctcactagaaagaaggaacacaataaatggaaacaagaagacaat

SEQ ID NO: 104783 - DNA, 595 bp, Homo sapiens
ttcttatggaaatttttgttttagaaattttttacataagaattttagtaattttcaaaatcactgctcagaaagaaaagggctttgctgtttttaaaaaaaaaaaaaagtgtggtcaggccaagtgtggtggctcacacatataatcacagcactttgggaggccaaggtgggaggatcacatatggccaggattttgagctcagcctgggcaacatcgtgagtccctgtcattatcgtaaaagaaaaaaaaaatgggggcattattaacaactgctgctttctaatgactcttatactgattattcctggtgaaattgtttcagatattgggctatttctagcctaattcaatctgattcaaattaatttaatcatttgctgaaggtctgacaagaaaaacttcaataggcagatgatggcattggcgaaaaaaawactgtttttcttttctatcttatccagccattacatcaacatttattgagcctttactgtgtttactgcaccacattaaataacagggaaaattcaaaatggagtttacaacctcactagaaagaaggaacacaataaatggaaacaagaagacaat

SEQ ID NO: 104784 - DNA, 588 bp, Homo sapiens
ttagttttctgaggaacctctaaactgttctctatagttgttatactaatttacattcccactaacagtgtactagcattctcttttctcttcatcatttcttgtattacaatttgttataaataatactatgttatcaattagtatgtgattttttttgaggtatgtaaactatatttttctcctctttttcaccagaacctaacatagtacccagaacatagtggaactaatttctatttctctagttaaagtagggtctaaatttcaaaatataggagaggattatttttcacatacatgtagtataagktatggtcttcaaatgatgattttattttctagtgtagctttgagaatctttcagaacagaggtatagcaaattgcgacaagtatcctgataatcatttagcataaaaaaccagggaaccaggaacaagaatgaaaagtcccaggtctctaagaattaagaaagatggtggcaaaggatgtgaaaatgagtacaagaagaaatgaggttccagattatgaaattccctgtagctcttgcaaaggagtttgacttttgtactgtaagcaatggataa

SEQ ID NO: 104785 - DNA, 632 bp, Homo sapiens
aatcaatactggtatttcttttccccaagtgtacattctcctaaaatccaagtcttaagagtacctgctaggagtcgagaccaaaaggccttatattttataaaatggttctctatatcgaaaaaataaatgcataattggctttatgttgtgcaatagacatagtcttaatgaaagttttgggaaaaaagcaagaattacagattgattcctttcaaactcttttatcttgaaccgcaaatatgattaatacatccggctgtttaggtaaggttctttggagattgatataagacaattgtaagaaaaaaacaaatttcaaatatggatttaacaatatacttattaccacacaaaagttgtttacctattcaagagacataacttggctattgctgaagttagccttttaygcataataaatcatcccaaaacttaataggattaacgttcatttaacctgtaagtctctttttcaggaatttgggcagggctcaggtgggcagttctggttacatttgaattgattcaagcatcttcagtcggcagtcaggccagttgagagctgactagcctaggatcacgtctactaggagaactcttctcagttccacatggtctctcttcctcca

SEQ ID NO: 104786 - DNA, 568 bp, Homo sapiens
aagttaagatataatggattacaggaggtgagattttagtaaggttgaatcattttgttgccttctgggatggagggggagcgaaaggttactgttacagtgaacaagaatgaagtcagattttcatccgaggtgacctaattaccaaggatgtgattctgactcattaattttcaaaatcatatctaattattggtatggcttactgaggctcaaaaatgtgttttctaagtgtatagtatcttttccataagtactagatttaggcatgttataaatattgtggtttaagaggactctaaacagtcaagaaatctctytctctgtttctgtctctctctatctctctctgtctctgtctccctcttctttctgtctctttcttgtctgctagttcttcagccctggaaatgtaaaatgaagggttacagaaaacaagaagaatctgtcagttttctctttcggggcaattaaaaaattgatatattatttaacataaagctttgatggtaactgtggatatcatttatccatattatctcactagagttaactgtaggaacacatt

SEQ ID NO: 104787 - DNA, 598 bp, Homo sapiens
attctttacttgaactttgacattctttgaccattttgcaattcaatggtaaatgtactaggmgggaagatagaaaaagaaaatcctgtgagtcttaaaccatgcaatgtgacaaatgataagcacttatctaacatgtaaattaataaaggaactgaggatcaactaaatattaaaatttataatagcaaacactttaatttatacaatgcatgcaatttctgtttctcaccatcatacaatggtaagatttgtgttaatttgatcatgaaagaagaaaaataacagagtcaaatcaaaaaagcacttgctgaacaaaaagccacccaaatttatacctagtaactaatgatcaaactattttgtattaaaaaaatctattttttgtgtgtatatagtataatattatttgcttctattaggggcaaatgagaacgcatggtacaacatgtaaattaatgagaattgttcatgatgagcattatgtaggaaacaataaataatatataattaataataacattctataaagagtttttttataaaggaaaaactgaatccttgtaactgcatgtcggggaacactgaaaatataagt

SEQ ID NO: 104788 - DNA, 598 bp, Homo sapiens
attctttacttgaactttgacattctttgaccattttgcaattcaatggtaaatgtactaggagggaagatagaaaaagaaaatcctgtgagtcttaaaccatgcaatgtgacaaatgataagcacttatctaacatgtaaattaataaaggaactgaggatcaactaaatattaaaatttataatagcaaacactttaatttatacaatgcatgcaatttctgtttctcaccatcatacaatggtaagatttgtgttaatttgatcatgaaagaagaaaaataacagagtcaaatcaaaaaagcacttgctgaacaaaaagccacccaaatttatacctagtaactaatgatcaaactattttgtattaaaaaaatctattttttgtgtgtatatagtataatattatttgcttctattaggggcaaatgagaacgcatggtacaacatgtaaattaatgagaattgttcaygatgagcattatgtaggaaacaataaataatatataattaataataacattctataaagagtttttttataaaggaaaaactgaatccttgtaactgcatgtcggggaacactgaaaatataagt

SEQ ID NO: 104789 - DNA, 656 bp, Homo sapiens
ttcatgtgtcaaatgaaaccataattgtagcacatctgcttcactgataaaatctcactcttaaagggctaaggtttttcagtcatggatgaacatttataagaaagtaagtgactttcactgactaaagtcatacagagtaatttacagttaaatgtttatttaccgattttttaatagggagtatttcttctaatgagcagaattatatatattctccatccaggatactgtttttgagataattacatggaacattaaattatccaataaaaaggtttccttggtgaataaagaatggaaaaaaaagaaaggaataaaggaaggaaggagggagggagggaggaaggaaggaaaaaaagaaaggaaggaaagaaggaaggagggagggaaggaaggaagcaagggacagaaaaggtagaaataaaaccaaaaaattactcaaatggcattctctacaaccttgaaaactacttggattatctgtaccttaaactaaagaacaatcctttagagtctggattacccacagtccagattaatttcactcttacattctgcactttgtcaacttttctttcactcattcccactttggtattctaactacctrctgttttagtttcctattaccattgtaagaaataatcataaat

SEQ ID NO: 104790 - DNA, 642 bp, Homo sapiens
tgtgagaatgttaaaatgtcctggagttgggttggactgtgtttgatgtttcttaaactatggatgtcagacatttcaaatgcctcaagtgaccttgttcttagctctagatttaaaaacatattagttctgggactttgctttgtactctctcatagttttctaagctacaatccactgttattattactggatgcttattaacttggtggtagactgtggacatgggtctttagtcttctgattaagtctcgggctttacagtgcacagtgggcctatatctcaaggatwtggcctcataaatctttctgttcctcacaagattttttgttacccctccagatggtaggcctttttccatgtacttcttaattaactccttggctacagtgggtgttctcaagtattcattgtctttctcctgtgttctttacttttcaatgttgtatgagagagcgtaaaccttgggagatgtgttggggtaaaaggagcagaggaaacatgagcaaaacaacttggtaggattggggagcaccttagattgtcagtgaaaatcttatgggaagcatgaaggaaggatctgagttttagacgacagaagggagttgtcaaaaatgaagactatatggggagaaaatggc

SEQ ID NO: 104791 - DNA, 652 bp, Homo sapiens
aaccattttgtgcatgacttttgattcattttcaaatctacagagatgaaaacatagtaattgtcctcaagggcctctcagaataatgataatgatgataattgatgatgatgatgatactattgttattattttttacatatatagtattattattttatagataacatttaaatagctattaatatagattagctcacttaatctccttaaaatgtctataaagtaagtactaatactaccctctgttacagcagagagaactgaagcacagagaratcatttgccaaatattatacaaccagtgagtggcaaagtcagaattcaacattgaaagtctggtaccaggttccatcctcttaataatttaataagtaaaaacaaataagataaaataggatataagctgtggctacgtaaagttgaatggattctatggtggctcaaataagaggacagttaattcagtctgcagacattccctgatgaaggggaagtctgacattgttccctgctaaaggggaaatttgacattgcttctgacaatcaaagaatatgtagtcataagaataaagatggagttaacagtttgagtcaagaggtcttcagtacaaaacacaaaaccatacaacttgcaaaaagtaacagtgaa

SEQ ID NO: 104792 - DNA, 670 bp, Homo sapiens
ctctgaagactaccataagtacctaactcttcaatgccgagacacagatgaacacctacaagtgtcaagacaatccagaaaaacaagaccttacaaattaaactaaataagctaacagagaccaatactagagaaacagagaatgtgacctttcagacagaggattcaaaatagctattttgaaaaaacacaaagaaattcaagataacacagaaaaggaattcagagtctatcagacaatgttaacaaagagactgaaataataaaaaagaatcaagcagaaattctggagcttaaaaatgtaattggcatacagacaaatccatcaaggtatttagtaacagaattgatcaggcagaagaaagaattagtgagcttgaagacaggctattttaaaatacatagaggaagaaaagaaacaaaaaaagaagaaaaaataataaaatattctgacaggatttagaaaatatcctcaaaagggcaaatctaatastcattggccttaaagaagaagaagaaaaagaaattggggtagaaagtgtattcacagggataataacagagaagatcttaaacctacaaaaaagatatcaataccctagtacaaaaaggttatagacaccaagcagatttaacccaaaaaggactatctcaaggcatttagtaatca

SEQ ID NO: 104793 - DNA, 551 bp, Homo sapiens
ccaaacaatcattaaatgtaggtaacccatatgataatgaattaacccatatgatatccaatgttcctatttgtaatatacctgaaatacatgttactaggttggtgcagttacttttacaccttgtggctggggaggtctcacaatcatggcggaaggtagaaggagcaagtcacatactacatggatgggagcagacaaagagagagagcttgtgcatggaaactcccatttttaaaactatcagatttcatgagacttattcactatcacgaggacagcacrggaaagatccacccctgtgattcaattacctcccactgagtttctcccacaacacgtgggaattgtggcagttacaattcaaaatgagatttgagtggggacacagccaaatcctatcagacatcaagtcaaataccatataatattaccaaaacacatttttactcgtagttgactcatgattcttagaatagtttgagaaagtttgtcttttatatatgacactctctttaattctaccacttcagcaatagcaacaaatcaac

SEQ ID NO: 104794 - DNA, 617 bp, Homo sapiens
tatgtcaattacagctcgataaaactgttaaaatattgtcatcattcatgctgacttttaatgacaatgtaaacttacagctaaaaaattaagatttcaaatcacttatgtcattgtgtcttcattaaaaaaacaacataatttttactcaattaggaatgtttctcttctgggacaaaattctcaacggaaagtttttatatactgcatacaattaaacaattatcaaagaatagtgtatatttatcatttattgaggactaactccatgcaaaacacagtgtatatctgatgagcaacatttcaccaatcctcctaacaacctaaggagataggcattattatcatctccatcctcayagtttaaaaatactgaagcatggagcactatcttgcttgcagtgtctcacccagcaacagaagagctaggattcaaacctagatctgactccagagaggtgactacccccactacactatgtaatacagtagaggcaaaagaatcattcagcgattctcagttttcagggagttattttgaaatcagcaactatgccttcacacacattcatacacacaaaatcaataaacttcactcccaccaactttttaaaaat

SEQ ID NO: 104795 - DNA, 566 bp, Homo sapiens
aaaaaaaacatgtttgtaagaaaacactagagagaaaattatattaagaaaagcaggacactgtagtagggacacagctctctgaagaggtgttaggatagcaaggctggccctgtgaaagggctactggagataggaagataaggaagattcacatggtatcctgaactgtatccagtctggagcaaggaggaatggaaggagatagacaaaacctacyaaataataaggcaggatttattatgtactaaataatagagacaaaatgtggccagactagaaaagaaagaaataaagtttgaacagggtacatcaggaaagagtttatagatattagtgaaagcgtttgtgtggttatgtgtgtgtattgtcttactgtaacagtaatatattatgatgttcagagaagtaaaaataaattgcagtgggttggaggagagaagagaatgttacaataggtaggattttaaaaggatagaaataattttttggaaagttgaggttgacttagtactgtgaagaaggcagaaaggcagcagaaagctattaaatttcagagccccaag

SEQ ID NO: 104796 - DNA, 574 bp, Homo sapiens
gaattctttgaagtctcatgaagtacctaaggaagatattctaaatctacaaatgaagaaactgagacttacccatgatgacatgagatagaaaaggctggccttaaatctattggtttctgcattctagatcagtgcccatttcgtggccctcagaaacctcttaaagatcaaatgttctgaattgttgtttaccaactaccaggttttctagccccttgcagtgtctgaagaccttgcctttgattgcctatatatcaggggctgctgtcactgattttsttgggaacactgaacagctaataattcaccatactcaatattctcattgcaaggccattggccatctgtctcctccccttagttcctctttctccaagctctgctttcttttatctgacacacactctcccttctttctctccactgggcctgccagaaattttgttccctgtcagataaggtttactaaatcctcaaacactgtctaaagatacttctttgtctttgctcaactcacacctagcttttcctacaaggacaaccaccacttcttatgaaacttttagaaaag

SEQ ID NO: 104797 - DNA, 517 bp, Homo sapiens
caaagccaatgctatgcaatgtcgatgtctacaattctttttaaaattagcaaattaccagatgtttttggctactgaatatacgctcagccaaaagatagacacattagggagtaaaaaaagtataaaaaacatttttctgcctcaagaagttgtcagtctacatgartaaataatattttttccatgctgatcgtaatttgacactttaggagcctctctggtgttggcacagatctgtttgtttcagaagcactggtttgtctctgtacacagggtgcaagcgctgagagtgcgaagatgaggtcttgcagttgtgattcttggcacatttaagaaatagtgcagtgtgggtactggtccgtcagaatggatgttgtcatcaaccatccatgtggtcataccagtggcccgattcccagtgcccccatggtaacactgatttctgtgcttagcacaaagtacttgataaatacttgtgcttaattaagttctacaaagtaagatacacagataa

SEQ ID NO: 104798 - DNA, 517 bp, Homo sapiens
caaagccaatgctatgcaatgtcgatgtctacaattctttttaaaattagcaaattaccagatgtttttggctactgaatatacgctcagccaaaagatagacacattagggagtaaaaaaagtataaaaaacatttttctgcctcaagaagttgtcagtctacatgaataaataatattttttccatgctgatcgtaatttgacactttaggagcctctctggtgttggcacagatctgtttgtttcagaagcactggtttgtctctgtacacagggtgcaagcgctgagagtgcgaagatgaggtcttgcagttgtgattcttggcacatttaagaaatagtgcagtgtgggtactggtccgtcagaatggatgttgtcatcaaccatccatgtggtcataccagtggcccgattcccagtgyccccatggtaacactgatttctgtgcttagcacaaagtacttgataaatacttgtgcttaattaagttctacaaagtaagatacacagataa

SEQ ID NO: 104799 - DNA, 586 bp, Homo sapiens
tgagaactaaggggtgaagatttcagagaaaggaagaacttcataaagctggggtgatattctaaagaaacttctctcttggggcatttgacaattcttggtgcatgaaatgaacttaagaatccaaccttcacttgggcagagactatgggtggggatagagaaacaagaagaaatatttttgtggccctgcagagacaaaaacgaagacttraactgtcaggatcccacttaaaagagggaaatgaaaaccaaatactgccagttttctcaacacacatgccagattctgaagctacacgagaggataaaaagctaattacaaagcctctgagaagcagaatggagttttctgacagtcctttggtgacggagacaaggattaaagtgtgagacccatcaggggaggggcccagttgatcttagtaggctcttggttgaaagccattgaggactccatcctagaaacaaaggtgaatgagagaaatataatccagccttgattcagctcagtcccttattgggttaaattagtgagctcccactttatcttcctagtagagaaaagagtgaaggaagacagtgg

SEQ ID NO: 104800 - DNA, 586 bp, Homo sapiens
tgagaactaaggggtgaagatttcagagaaaggaagaacttcataaagctggggtgatattctaaagaaacttctctcttggggcatttgacaattcttggtgcatgaaatgaacttaagaatccaaccttcacttgggcagagactatgggtggggatagagaaacaagaagaaatatttttgtggccctgcagagacaaaaacgaagacttgaactgtsaggatcccacttaaaagagggaaatgaaaaccaaatactgccagttttctcaacacacatgccagattctgaagctacacgagaggataaaaagctaattacaaagcctctgagaagcagaatggagttttctgacagtcctttggtgacggagacaaggattaaagtgtgagacccatcaggggaggggcccagttgatcttagtaggctcttggttgaaagccattgaggactccatcctagaaacaaaggtgaatgagagaaatataatccagccttgattcagctcagtcccttattgggttaaattagtgagctcccactttatcttcctagtagagaaaagagtgaaggaagacagtgg

SEQ ID NO: 104801 - DNA, 518 bp, Homo sapiens
actatcacaccttgctcaaaatccattcttgtacaaagttgcactcagggtgcatggcatgaaattaggaaatggtgtggatgaaaatctagttaataaagactccaggatactttatgtaaccccactcggtgcaacttctggaggacttcaagaagatcccktcctcccttctctcagcctcatgaagcagtgaggtcattcttcagcagcgaaaactgacttcattgttggagactccttttcagttttctgcccttcacataagacagaatatcaaacatttctctatgagggaaacaataatgagaattcaaggttcagcaaggttacacaaagtattccaaaaccattgagaatggccattctttattagtcttgtccatgattttaaaagcctctgtaaggcttatctgattgcaggacttagaagtacctgtgagcggaagctgcattcttcgtcattactctgatatatatttactacaggttcacttcctttagctctatataatttt

SEQ ID NO: 104802 - DNA, 518 bp, Homo sapiens
actatcacaccttgctcaaaatccattcttgtacaaagttgcactcagggtgcatggcatgaaattaggaaatggtgtggatgaaaatctagttaataaagactccaggatactttatgtaaccccactcggtgcaacttctggaggacttcaagaagatccctkcctcccttctctcagcctcatgaagcagtgaggtcattcttcagcagcgaaaactgacttcattgttggagactccttttcagttttctgcccttcacataagacagaatatcaaacatttctctatgagggaaacaataatgagaattcaaggttcagcaaggttacacaaagtattccaaaaccattgagaatggccattctttattagtcttgtccatgattttaaaagcctctgtaaggcttatctgattgcaggacttagaagtacctgtgagcggaagctgcattcttcgtcattactctgatatatatttactacaggttcacttcctttagctctatataatttt

SEQ ID NO: 104803 - DNA, 608 bp, Homo sapiens
atatgaggccagtattaaacgacataactatgttttctttataatgcattttaatgtaaatcacaactcgctcttatttttcttcccaataattggtatgccactgtcacagtcttactccctctcatatagacagtaaaataattttaattcattttgaattttcatcaaaatcctaggttaactatttttccttatgctgagtttttctacttaagaaaaaaagaaactttttgttttagtaccttatattttttcttgaattaatggttactttttaagtatatctaggtcttttaaatttacttaggcattttcctgacttttttccatagcatataagaactgttccataatgaatttctaattaacatattataaaactattgatatttatttacaaagagacatttacattatatgtttctaatacttctttgtgcattctcataaattttccagatttaacttaatcatttgtaaataatgtcaatattcytttatacttcccaatattttcttttgtttttatttctaaactagttctaactagctatgtgaaaaaatcgataataacattaaatgatagagtgattatgctcatatgt

SEQ ID NO: 104804 - DNA, 608 bp, Homo sapiens
atatgaggccagtattaaacgacataactatgttttctttataatgcattttaatgtaaatcacaactcgctcttatttttcttcccaataattggtatgccactgtcacagtcttactccctctcatatagacagtaaaataattttaattcattttgaattttcatcaaaatcctaggttaactatttttccttatgctgagtttttctacttaagaaaaaaagaaactttttgttttagtaccttatattttttcttgaattaatggttactttttaagtatatctaggtcttttaaatttacttaggcattttcctgacttttttccatagcatataagaactgttccataatgaatttctaattaacatattataaaactattgatatttatttacaaagagacatttacattatatgtttctaatacttctttgtgcattctcataaattttccagatttaacttaatcatttgtaaataatgtcaatattcttttatacttyccaatattttcttttgtttttatttctaaactagttctaactagctatgtgaaaaaatcgataataacattaaatgatagagtgattatgctcatatgt

SEQ ID NO: 104805 - DNA, 685 bp, Homo sapiens
ccctttcattgtacattttttaaatagatgtacctttaaagtagagtgatattttcagagtaatcaatataatcttgggtttagagacttcatgttgggtgaatatattcttatctgataagaaagatgaaataataacacattctttgaatgtttccagatgataacatttgtaatatgaggccaaataatttggtttgttatcgtcttacacaggttattcaaagcagcaggattagaggaagcagagaactaactagtttttaatttgaatacatcatygaagcaccccaattagccacctgcattcctgcagtattttttcagcatgtaatcaaaagaatattatttactttgatgattaataaaaatggtctgccaagtgtttgctctttaatgggaaaataatgggcaacattaaggaaaagaaacagtatccatatgcatgatctttgagacatttccattcattcagaagctgactctgtcactgtaaatggcaaacaatcaggaaatgaaaataaaattcttctacaaattatctttcatctgagaatattgttggaccctacagataactttattaatatgtttatagatctgtggaacagttatcagctaatacgggaagaagtctaaggtagcgtcaattctaaatttaaggaattacctctaccttggtcaa

SEQ ID NO: 104806 - DNA, 685 bp, Homo sapiens
ccctttcattgtacattttttaaatagatgtacctttaaagtagagtgatattttcagagtaatcaatataatcttgggtttagagacttcatgttgggtgaatatattcttatctgataagaaagatgaaataataacacattctttgaatgtttccagatgataacatttgtaatatgaggccaaataatttggtttgttatcgtcttacacaggttattcaaagcagcaggattagaggaagcagagaactaactagtttttaatttgaatacatcatcgaagcaccccaattagccacctgcattcctgcagtattttttcagcatgtaatcaaaagaatattatttactttgatgattaataaaaatggtctgccaagtgtttgctctttaatgggaaaataaygggcaacattaaggaaaagaaacagtatccatatgcatgatctttgagacatttccattcattcagaagctgactctgtcactgtaaatggcaaacaatcaggaaatgaaaataaaattcttctacaaattatctttcatctgagaatattgttggaccctacagataactttattaatatgtttatagatctgtggaacagttatcagctaatacgggaagaagtctaaggtagcgtcaattctaaatttaaggaattacctctaccttggtcaa

SEQ ID NO: 104807 - DNA, 701 bp, Homo sapiens
agaatcatattgacttaggtatatttgttaaagaaacacaaaaactatagaaggctagaaggcataacacgtttggtaaggtttatttcataatgcttaaggataataggtgtatattaaaagaagacatgatattagcactatattaaaagggttactagtataaatacataacttmgcaacccagttagaaaaaaaaatgaacacaaaatatgagcaggtaattttagaaacagtaacacacaaagccacaagcatataaaaaatgcttaaaattgggggtgattagaaaaaaaattaaaatttcaatgagtaatcgctttccctaattagagttctagggtagagatgtgctgacattgtaatcctagtggcaagctggcagcagtgtaaagtggggcacagttcaggaggataataagagtgtgtatgcagagcctatgaactagaaattgtgctccagagaatgtatctcaacaatttctgactcctgtttataaaggaacaagtacaaacatttttattacaacagtaattttagttcttggaatttgaaggcaacttgattgtcctactggagaaaaagaaaaaagatagacagtagttggtttgtgtacattctggacatatgagaaagcaagcacttagaaatatatattacagcatggatatgtctgaaaaatataaagggaaactgaaat

SEQ ID NO: 104808 - DNA, 636 bp, Homo sapiens
cttgcaatagtttgctgagaatgatggtttcatgggttcatgagtgggcccttccgatctatgggtggcaccattctatgaaaaaagcacagtttccctgaatgggtagcatgctcattcaccgcctcccttgggttggggkgtgtgtgtgtgtgtgtgtgtgtgtgtgtgtgtgtgtgtgtgtgtgttgaggggggttcccctgtgtgtcacgccagccttctattttgactagagaacctggataccttggttgccagtgaaggattcacctgcttattatgttttttttttcaatgggagactccaaacccagctgcctctagtcggccatcttggccccgccccgtctgtgtgagtttctatgtcaaagaattggtatctcaagtgaagaatgaatggtaagttaaggaagcgccagatccatctggtcattcataaacatgttgagatcaatgtgaatgacatatatttacatattggcaataacatatatatgtgtatatatatatatatgccattttatttcatatttaaaattatacattcaaatgtggttttttaatgttcagttctataaattttacacgtatagattattacgactgccaccatcacgatatagaacaatcccat

SEQ ID NO: 104809 - DNA, 450 bp, Homo sapiens
gctacaaatgaacgatgactctgygttttccttgtatatataaagatcaacaataacacttaggtcatgaaacccacctactttacagatcattatggaaataatacactgcttcagcaatggagaaacaatcatccatatttatgcaagaactaaattcaagtttgaaagcttgctttgagcttgaagatataaaacatgattctgtgacagtaaacaatgtataacaaatcttacagaaatttatgtgattactaaaaaaaaatcaattcatcaattcaataaactgagtaccgtattacttttctattgcttctttaccaaataaatacaagctttgcagtttaaaacaacagaaatttaattttttatagttctgagggtcagtaacctaaaactgatcttatgaaataaagttaaatcttggggatatgggtgtggacagggctg

SEQ ID NO: 104810 - DNA, 617 bp, Homo sapiens
tattttgtccaagatgaaaatagctttattattttttcctgattataaaaataatactcatttattattacaaaacttgaaagttatttrtatgaaaagaagtaaatatagcttgaaatctgaaagttcatagtgggccacagtttaaaaggcaattcaagtagtttcttttttatttgattggctagaaaagtgttgatgagtgacttttagttactaaattttgaatatttgaaattcaatatttaaatgtttgaaaaagaggaccataaaggccgttttctaatcttttactcagaattgaaatcctggattgtgctgtagcccttgagccccaggttgcacattactgatttaaaaacacttggaacgacacgagaggtcaagagggctggtgaggcctgggggagcctggaagcagcatcagggtcctcgttgccttgggactggggggacgttacaaaggaacagggagtatatccaagaagacaaagacctgaagctagaccctaccttctaggaagtcacagaccatgaccgtcatgtttaccatcttgttgtagtgacagggctagcacaggactaaatagatactcagtaaatacttcttgatttag

SEQ ID NO: 104811 - DNA, 600 bp, Homo sapiens
aagctatataatcttgagcaaattacttgaaaaacttcaactcagagaaattaagtaattagcttattcagtgggaaaagaattattaattaactcctgggatttttgtgagggccaaatatgtagttgatatttagataatgatctaatacgtataaggtgcttagcatggaatctgccataactctgtgagaaaggaaagctatttctattaacaatgagaattatagcaattgttgtaataataasgtatgtgggacacatttccaacattctcacatgctctgtctcaccactttctgcatggtgggtcattttccacttcctttagtgtattttcctgcatttttctttgcagatgttcatctttgatggtattttgaaacagggtcaatgctaacttggttccctactaaaacagcctggcattctcaaacaggatgtttgtgatgtaagggggtaagatgaccttagcttttgatgcattctaactgtaaatatttcatgaatttagttccagtttgaatagaaaacaacttaagcagctgctcagactacatactttgaaaactttgccaattaacttacccaatattacat

SEQ ID NO: 104812 - DNA, 600 bp, Homo sapiens
aagctatataatcttgagcaaattacttgaaaaacttcaactcagagaaattaagtaattagcttattcagtgggaaaagaattattaattaactcctgggatttttgtgagggccaaatatgtagttgatatttagataatgatctaatacgtataaggtgcttagcatggaatctgccataactctgtgagaaaggaaagctatttctattaacaatgagaattatagcaattgttgtaataataaggtatgtgggacacatttccaacattctcacatgctctgtctcaccactttctgcatggtgggtcattttccacttcctttagtgtattttcctgcatttttctttgcaratgttcatctttgatggtattttgaaacagggtcaatgctaacttggttccctactaaaacagcctggcattctcaaacaggatgtttgtgatgtaagggggtaagatgaccttagcttttgatgcattctaactgtaaatatttcatgaatttagttccagtttgaatagaaaacaacttaagcagctgctcagactacatactttgaaaactttgccaattaacttacccaatattacat

SEQ ID NO: 104813 - DNA, 617 bp, Homo sapiens
tctatatcacttagaattctactttcttcagagaaagtaacataagattgaaattaaaatcaattaaataataaaaggactttattggctcacaagctgaaaattttacagctaatgggtactttgctagatccagagattcacaatgccctcaaggcacatatgcatttgtttctgattctttaacagtatcttccttgttgtgttgtttccaccttagcctgtcagttctcttggtggctaaatggctgtctgcagtttcttgatctacttttttttttataacttctaggaaaagagcattgcattaagcctgaaattatctaagagaaatggtgagaatctctcaaactggatttccatggcttcccagaacctatcactgggggataggagaatatcatctgttaatctggctgacttttagatcattgcttaccttggaaaaatcaccttgacaaacaccaagagcaacagcaataacagaattacaatgattagcttaacccaatcggggccttcctttggtgcttcagaggatcaaaatccaaatagctgtctgaaasagagagtgtgtggcttgtttctccaaagtaaattcaaggtactgttgtaaa

SEQ ID NO: 104814 - DNA, 576 bp, Homo sapiens
ctggcttttatttatggtggcttattggttgcatgtttagtaatgtcacatttcaaatttcttagctcatgattggtgaggatttttgaggagaaattggggaagtctggaagaagggctttttccttgaataatcatttgattttttttttttgtcttctaaacaacctgaagggcctggcacagtggttcacgcctgtaatccctgcactttgggaggacgaaacagktggatcacttgtagtcaggagttcgagactagcctggctaacatggtgaaaccctgtctctactaaaaatacaaaaattagccaggcatggtggaagacacctgtattcccagctactctgaaggctgaggcaggagaatcttttgaacttgggatgtggaggttgcagtgagcccaaatcatgccactgcacttccgcctgggtgacagagggagaccctgtttcaaaaaacaaacaacctgaagaactattaaaaagaaactgctgtgaatttattggcatagtaaagtagatggtttatagcctaccattctgtaattggtatttcttatattgtcccatttg

SEQ ID NO: 104815 - DNA, 576 bp, Homo sapiens
ctggcttttatttatggtggcttattggttgcatgtttagtaatgtcacatttcaaatttcttagctcatgattggtgaggatttttgaggagaaattggggaagtctggaagaagggctttttccttgaataatcatttgattttttttttttgtcttctaaacaacctgaagggcctggcacagtggttcacgcctgtaatccctgcactttgggaggacgaaacagttggatcacttgtagtcaggagttcgagactagcctggctaacatggtgaaamcctgtctctactaaaaatacaaaaattagccaggcatggtggaagacacctgtattcccagctactctgaaggctgaggcaggagaatcttttgaacttgggatgtggaggttgcagtgagcccaaatcatgccactgcacttccgcctgggtgacagagggagaccctgtttcaaaaaacaaacaacctgaagaactattaaaaagaaactgctgtgaatttattggcatagtaaagtagatggtttatagcctaccattctgtaattggtatttcttatattgtcccatttg

SEQ ID NO: 104816 - DNA, 576 bp, Homo sapiens
ctggcttttatttatggtggcttattggttgcatgtttagtaatgtcacatttcaaatttcttagctcatgattggtgaggatttttgaggagaaattggggaagtctggaagaagggctttttccttgaataatcatttgattttttttttttgtcttctaaacaacctgaagggcctggcacagtggttcacgcctgtaatccctgcactttgggaggacgaaacagttggatcacttgtagtcaggagttcgagactagcctggctaacatggtgaaaccctgtctctactaaaaatacaaaaattagccaggcatggtggaagacacctgtattcccagctactctgaaggctgaggcaggagaatcttttgaacttgggatgtggaggttgcagtgagcccaaatcatgccactgcacttccgcctgggtgacagagggagaccctgtttcaaaaracaaacaacctgaagaactattaaaaagaaactgctgtgaatttattggcatagtaaagtagatggtttatagcctaccattctgtaattggtatttcttatattgtcccatttg

SEQ ID NO: 104817 - DNA, 378 bp, Homo sapiens
aaagccaattcccaactcattgaactaccgtactccttccttacaaggaagaaaaacaaaacacctgaatatgttgtctgtagccaataaacattactaactagattgcagcctaaagtgtcaagtatttctaataattacattaaaaatacagcagcaagacagttccttggatcttactttttccytctcattggaactgaattgtagatattgggcactgtacctagcaagtcacagaagatctgaattaggatgccttaattacacttggcctattttaatgattttaaaattagatcttaaatgtgaaagtaaataaaagcagtaagggaaacactacacaatgagtatgtacggttgctggctgcagaattc

SEQ ID NO: 104818 - DNA, 480 bp, Homo sapiens
aagtgaggtatatcatcagtaatatgggctaataactgtgctagtagtaacatttcatgattgtttacrctgcatcagcttccagtgctaagcacttttgtcttttattgtatgattctcacaaatcctcataaggtaggtaatgcttttatccctttctcccttctcaaaggattcttaggaagcctaggtgtgacactaattatagatgcactttgtaaccattaagggttaatgcaaaaaatgaaatattattgtgatgttcaataatagtaccatgatgttcaacaagtacatatttaatgaataactgcatttgttgaatgccatgacagttgtgggctataattaaatgagtctcaaaatattttgtgtctgtctcctgaacaaaccaaataaaaagcaatagaaggaatgaaaaacgttgtcatcaccaatttgctaattgtatgccatgccggaccacagaagagagaattc

SEQ ID NO: 104819 - DNA, 366 bp, Homo sapiens
tggttttctctctttaaaacaaggatggattagatgggtggttccccacacaagatcccaaaatctccaggagcccctgaggttgyaataaaagacaatgggatatttttattatttcaaaatgtctaacagagatagttcgttaactgctttaaggctaattaaaacaccaagtattttggcttcacattagtactctgcatggtgacactggatggcatgtgattatgtttgtcatatcataggaaatttggaaacaagagtgttagacctgatactgttctcaaagctgtacctcagaaaatcacaatatctttactaaacataacatccaatcacaaatgtgtggttaataaaaaatgggaa

SEQ ID NO: 104820 - DNA, 569 bp, Homo sapiens
tgctgtcttctgtgtatatgctggtttgtgtgaggttttactaaaccagtatgtggattaatctagtttcacagtgacaggtaagtgatttagaaaatccttcctttagcacatgttaacttgaacgtttggaggtagaatgcctagagtgagggtgaaggagaggacctggggacaggaagagagggcagctgggagcaattatgctccttccctcagacctttttggccttgactcttgattcttgtacttctaccagacagagaggcggtaggcttgtggccatgttttgcgaggmaaatcagaatctaagaatctctaaggcaagagcaagaatggattgggatagggaaagtgataggaaaacagaggcactaagaagagggttggttttcatgtactgcatagttcattcccttagttgagaaatcaggtatctcaacctcagatatcttctgtccagcatatcgctggccagatctgattcatatgagggatccagagtaaggaagcatctgttagccaagtctttggttaccccaaattagctcaggtcctttactgcttg

SEQ ID NO: 104821 - DNA, 569 bp, Homo sapiens
tgctgtcttctgtgtatatgctggtttgtgtgaggttttactaaaccagtatgtggattaatctagtttcacagtgacaggtaagtgatttagaaaatccttcctttagcacatgttaacttgaacgtttggaggtagaatgcctagagtgagggtgaaggagaggacctggggacaggaagagagggcagctgggagcaattatgctccttccctcagacctttttggccttgactcttgattcttgtacttctaccagacagagaggcggtaggcttgtggccatgttttgcgaggaaaatcagaatctaagaatctctaaggcaagagcaagaatggattgggatagggraagtgataggaaaacagaggcactaagaagagggttggttttcatgtactgcatagttcattcccttagttgagaaatcaggtatctcaacctcagatatcttctgtccagcatatcgctggccagatctgattcatatgagggatccagagtaaggaagcatctgttagccaagtctttggttaccccaaattagctcaggtcctttactgcttg

SEQ ID NO: 104822 - DNA, 569 bp, Homo sapiens
tgctgtcttctgtgtatatgctggtttgtgtgaggttttactaaaccagtatgtggattaatctagtttcacagtgacaggtaagtgatttagaaaatccttcctttagcacatgttaacttgaacgtttggaggtagaatgcctagagtgagggtgaaggagaggacctggggacaggaagagagggcagctgggagcaattatgctccttccctcagacctttttggccttgactcttgattcttgtacttctaccagacagagaggcggtaggcttgtggccatgttttgcgaggaaaatcagaatctaagaatctctaaggcaagagcaagaatggattgggatagggaaagtgataggaaaacagaggcactaagaagagggttggttttcatgtactgcatagttcattcccttagttgagaaatcaggtatctcaacctcagatatcttctgtccagcatatcrctggccagatctgattcatatgagggatccagagtaaggaagcatctgttagccaagtctttggttaccccaaattagctcaggtcctttactgcttg

SEQ ID NO: 104823 - DNA, 455 bp, Homo sapiens
taatgtcaggatttaaattagagtgtgacttgagcctggataggtctgattcaaaagcctatgttttaatggttattcagcatcatgttgcttcaaattccttatttcactcctccaccttttgtccaacagtagattttttccaagtgcatgtagtgtcatgtttcttctctccatctgwctacttgaaagccttcagtcattccctattacttaaaggattaggcttatgtagttccttttttacttgccagcttcacattattgccaatctttgaatgccatatttcagttatattgatttttttttgcaattactcatttcatacttttaccttcatgatttgcacatgatgatatactctctgtttagaatgcccttttcttactttttcatttggttttactccatttttcttaacagcattaactaagatataaccttctgatgaaca

SEQ ID NO: 104824 - DNA, 622 bp, Homo sapiens
ggactataactttggggcaaatttacatttctgttatcaaaaatttgaggctaaaaataaaaaaaatttaaagattttttgtatgcaaggtatacagtcatttgtaatattagtcaatatgctgtttgggagttatacaaaatcaaactgtaaagaaagcacatgaaatttaagtcaagaaaagtgaaaagtgggtattttacagattaccttagagattaaatttaaaaagatgcatatatagaataacagcaataatagtaaacaggcaagacagaagaaagtgatgggatctttaaaataaaaatacaacataaaaataagttatattaataatgatatatttaatagttgatacatattaaataattaggaaatayacattattatataaaattataatagataatatctatattatgaattggaagaacacagttggaacactcaaacccaatttcaaaacttactacaaagctacagtaatcaaggcagtgtggtactgacataagactaaaggtttagactaaatgttcagatcactggaatataaatcgaagcctggaaataaattcttatatttagggtcaactgattttttttctttttttgagacggagtc

SEQ ID NO: 104825 - DNA, 622 bp, Homo sapiens
ggactataactttggggcaaatttacatttctgttatcaaaaatttgaggctaaaaataaaaaaaatttaaagattttttgtatgcaaggtatacagtcatttgtaatattagtcaatatgctgtttgggagttatacaaaatcaaactgtaaagaaagcacatgaaatttaagtcaagaaaagtgaaaagtgggtattttacagattaccttagagattaaatttaaaaagatgcatatatagaataacagcaataatagtaaacaggcaagacagaagaaagtgatgggatctttaaaataaaaatacaacataaaaataagttatattaataatgatatatttaatagttgatacatattaaataattaggaaatatacattattatataaaattataatagataatatctatattatgaattggaaraacacagttggaacactcaaacccaatttcaaaacttactacaaagctacagtaatcaaggcagtgtggtactgacataagactaaaggtttagactaaatgttcagatcactggaatataaatcgaagcctggaaataaattcttatatttagggtcaactgattttttttctttttttgagacggagtc

SEQ ID NO: 104826 - DNA, 539 bp, Homo sapiens
tggcaattttgtggaagagtaggtggtgactatttgacttcagatgattattctaagtaaatctgtattggcaccataactagcatcattgttgaaaaattaaggagtcacatataatctctgggacctctgagttcattcagttgatcctccgaggctaggatgtcctgtacatctctctaatacaaatcaattttgttttgtgatttcatacaagtgaacaatrtataaacatattagaaggcagtccaatacaaatcttcctgctatttattctgtcatttttctttaatttcatgcatatattattacttcatagatatcttcattaagattttgaaattgattctatctttctgattcaattgtctcaatatgaataaaaatgacttctaattcacttatctattcagtacttcatttagataacgcatctttactgagtgcctactctatgtctggcactgtactagatgcttagaatacattagtgatcaaaaatgactttatgtggcttatattctaatagcaattttctt

SEQ ID NO: 104827 - DNA, 507 bp, Homo sapiens
tcagttatagtgtcttatttcactaatttggtagtttattaagtgagaaaggcctctgaaatgctgtttaggcaaaatgttaactcagttgcactgtgagaactgccaccttcctcctgaatgtccctggttggttcctagtgtctgaatataaacatgacatttttctgttctctacctatccttacttacaaattcttacaatactgcatttagcaatatttggtctataaagctataaagctgttagaacaatgttttaaaacataatttaataatctattgaactwtgacagaaggtgggaacttgtttattcttgcatatttctgtcttaatttcctgaataattcttgttctaattgtgactttgtgtttctgaaaaccaagatgttaaatccataacaattaaactggttcaagaaagtttagatatataggaaaggctacatgtatattttaggacaatagagtagacttctccaaaacatgcctttcttataacaatt

SEQ ID NO: 104828 - DNA, 576 bp, Homo sapiens
cccaactgacctggttatatttcactttgacatccctgatggacctgctaagtgtatcaatctgatgaagcctggagttccagccctcaggagaagtacttaacatgaacacctctctatgacggcagtctgattccacagggaaaaaccatgtagtgggagtgttgttgagggtatggaaagctgtatgatttattccaaggagagaagagagagttaggtagaagaaaataaaaatggaaactgggtaggcatccagaccatactcacggttygacaaatatgtatgtggaaaagtgtatttattgtgttctctctctctcttttatcataatgtttataaccttaatgctttcatagcagcattcgtacctcttttttttttttgcttaaaaactattatattttcaactctattattttacattttcaatgccgttcgtgcccactgaatgcattggattatcttttcaattgttcttttgtctacttgtataccatgtccaacttagtacaggaccacatgaacaatgaatcaaccaggttctaatgaagattaagacatgaagagtattc

SEQ ID NO: 104829 - DNA, 595 bp, Homo sapiens
ggttaggctaaggccaaaaactctgaattaaacttccaaatctaaccagctacctctagatgtaaacctgattttcatcttttctatcacccacatagacatgacttttttttccagacatcttgattacagttaatgttaaaatagcttcaagtctaaaatgcagatgtgttgtcttgaactgaaacgaactatcaaacagacaatgataaataatgatcatttaaacttggccttttaaaaagcacattggatacaataaaaatcagtgtattagtacactaaatgtgcttccaattatgatataaatagtgcataaagctttaaaattttcatcaaattaatgtatcactgacatgcaaattaactactgacatctatggtgtatgccatgtgatgatttctaattggcaagtgaacctcagaggattatttatagattacactgcaacraagtgctggagtaaattcgcattgtgcagctcaattcaaattggtgtttgagctttgattctcttcactttttcacaccccttttgatctccaaaggctctcagaaataagctagctaaggtgctaaatatctaattaataa

SEQ ID NO: 104830 - DNA, 573 bp, Homo sapiens
agagaaaggggaggaggagatatagagaacaaaccctactgtggctccaggcaaacaaaatcaagctccagaattaaaaaacaaaaccaaaaatgaaacaacaacaacaacaaaaacatgtcgcattctgtaccacataggtggtgaccacttacatacaggtctgcaaatgcgaacagctgtatcttgccttcttttgatttcggtcgtttcttttgtgaaattcaaggatggactctgattcycaagccccaagtttaacactccgtggttcttacagtgtctcctagagttaaatgcgaatggaatattgaatagtaagtgggaaaatacactccaatagagtcatttaactctagaaatattttataaatacacattttgggttacacattgttttatttaagtctagataatagtgccatttgcattctaatctcagctcggtcccttccttgctaggagatagatgaagctctcattctttttggtgttttaatttcctcagtggttaagcaaggatgacacatctaacctgcatttcagaatgtatggatagacactatagcaaaa

SEQ ID NO: 104831 - DNA, 623 bp, Homo sapiens
gttggaacttgaaaaattgattctctcttactctcctgtgactttgaaagtcagccccatctctctttgtttctttctgtctgccttttgcctagaagyagcatgaaaaactggacagaaaaacttttatttgaccttaggaagccatttgaaaggcatagtcaaagcatttttctacatcctccatttaaaatatatgctttcctttccaatgacaaattccttttttaaaaaagttcacataactttgtaaaaagtctcttaattcacaatgatatccacattttaaaaaatgcttgaaagaaatcatgttaatgaagtgaatatttgcagtagtttggaggtaattatcagaatcactacatactcgcagaggcttgaacaatacgtgttcagagaaaagcaaaacacattattttaatagtctgatatgcaaactatggaccgttcaattatgtggcttaataatgcatacatgatgtgatcttgttattgggaagggtgggtttgtggtgagtcactcctaagaccaagagcgctctcacatccagtaaaatccattgccatggatcaggggcccatgccaaactacatttaagagaataaaatttaatgactgagaa

SEQ ID NO: 104832 - DNA, 623 bp, Homo sapiens
gttggaacttgaaaaattgattctctcttactctcctgtgactttgaaagtcagccccatctctctttgtttctttctgtctgccttttgcctagaagcagcatgaaaaactggacagaaaaacttttatttgaycttaggaagccatttgaaaggcatagtcaaagcatttttctacatcctccatttaaaatatatgctttcctttccaatgacaaattccttttttaaaaaagttcacataactttgtaaaaagtctcttaattcacaatgatatccacattttaaaaaatgcttgaaagaaatcatgttaatgaagtgaatatttgcagtagtttggaggtaattatcagaatcactacatactcgcagaggcttgaacaatacgtgttcagagaaaagcaaaacacattattttaatagtctgatatgcaaactatggaccgttcaattatgtggcttaataatgcatacatgatgtgatcttgttattgggaagggtgggtttgtggtgagtcactcctaagaccaagagcgctctcacatccagtaaaatccattgccatggatcaggggcccatgccaaactacatttaagagaataaaatttaatgactgagaa

SEQ ID NO: 104833 - DNA, 396 bp, Homo sapiens
ggggagctgatgataacttacatttgtgaaatggaattggagtttgataaataaaaaatactgattttattcraccaaagacattatactttttctgcttaattaactaatcatatggactcatgccttgttaatgataatccattatgagatgcagttgaatttgctaaatctatttcaaaagctctgcttactcaaccatttatagcacatttgacaagtaattttttctatagaagactttaaataaaaaccattgaaatagtgtaagatcctagacccacatactgtctgccatcacacatcactttcctcagtgtctgtcagttgatgtttttgtgtggtgaatgtgaaccagtggcctgaagaaatggagagtaaatggtgatgaggtat

SEQ ID NO: 104834 - DNA, 472 bp, Homo sapiens
ttcaccatgttggccaggctgggcttgaagtcctgacctcaagttatctgcccgccttggccccccaaagtgctgggattacaggtgtgagccaccatgcccagccaacacttgtaattttaaactatattaaatttgaattggcaatatcaatatggactcatgaattaaaaacatatatrtgtgtgtgtgtgtgtattctagctctgtacactgaaagaacatagaagcaatgatattcctctagcaatgagcaatacctagaacccagatcttggtttctactcatctttgtttattgaaacacagtaaacaatgttcctgtttacaggagaaatagctgattctaggtgttgagcatggaaactacaaggtaagtttaggacattttgatataccaaggaagtgctcagcgatttatggaggcatgatacaaggacacaggggctagtgtgaaagggctcccactagc

SEQ ID NO: 104835 - DNA, 472 bp, Homo sapiens
ttcaccatgttggccaggctgggcttgaagtcctgacctcaagttatctgcccgccttggccccccaaagtgctgggattacaggtgtgagccaccatgcccagccaacacttgtaattttaaactatattaaatttgaattggcaatatcaatatggactcatgaattaaaaacatatatgtgtgtgtgtgtgtgtattctagctctgtacactgaaagaacatagaagcaatgatattcctctagcaatgagcaatacctagaacccagatcttggtttctactcatctttgtttattgaaacacagtaaacaatgttcctgtttacaggagaaatagctgattctaggtgttgagcatggaaaytacaaggtaagtttaggacattttgatataccaaggaagtgctcagcgatttatggaggcatgatacaaggacacaggggctagtgtgaaagggctcccactagc

SEQ ID NO: 104836 - DNA, 472 bp, Homo sapiens
ttcaccatgttggccaggctgggcttgaagtcctgacctcaagttatctgcccgccttggccccccaaagtgctgggattacaggtgtgagccaccatgcccagccaacacttgtaattttaaactatattaaatttgaattggcaatatcaatatggactcatgaattaaaaacatatatgtgtgtgtgtgtgtgtattctagctctgtacactgaaagaacatagaagcaatgatattcctctagcaatgagcaatacctagaacccagatcttggtttctactcatctttgtttattgaaacacagtaaacaatgttcctgtttacaggagaaatagctgattctaggtgttgagcatggaaactacaaggtaagtttaggacattttgatataccaaggaagtgctcagcgatttatggrggcatgatacaaggacacaggggctagtgtgaaagggctcccactagc

SEQ ID NO: 104837 - DNA, 610 bp, Homo sapiens
gcctccagctaaagaatatcagaggtccactgaggcctgcttccaagatttggttatctctgataggtttctcaaaatatttggattaaaaagtatttgtttgaccctttggaataatgaggcaaactttaaattcagtaacatgggaggctagtaagtaaaaatgtgaaaaaaagagttttcttctttcttctgaatctcaataggaaaattagatgtatcctataagaagtgtttttgatctggtttttacatatcactgcgtttactatgaatttaggttagggtaaattcaacaacttccacttccacccttctgtttaggctcctgtagctgtcacctggattatcacatttgctgcctgaactaacccccaccacakcttgtctctatcttattcaatctatattgatgccatctatggcattaccaaattacctttcttagggccatgttttttatatgttcaaaatcctttaattactctactttgcctataagcaacgtctaaattttcaaccaagcatacctgatatgtattaaacaaaccccaaactttatcatgtctacaatgtttatctttattcacacttttgcttctcattaagt

SEQ ID NO: 104838 - DNA, 597 bp, Homo sapiens
gtgaatagtactgatcctgattggcatcagttgaaacaaatttctgttcatgttttccaccgacacagttaatgccttttccatcttaactagccacttatcacacactrtggctgtaactttcacagtttgagatgcaacagcagaactagcacacatttgtttttacttcttcacagtttcatagaaagatttattctcaccttagaccttaacaacctcacataatttttttcttttcttattaagtcaagaactttcatctcttcacttaaaggaagtactttgcagcttctctttggcatattcaagttgccagcatcagtactcttggattttgggcattattaagtaaaataagagttacttgaacataagcactgtgatactgagacagtggctctgataaccaagatggctactgaataactggcgggtggcatctacagcatggatatgctggacaaaggaaggactccaggtcctgggcaagatggagcaggacaacttgagatttttttcaccctacttagaatggcatgcaattaaaaactgatgaattttttatttcttgaattttccatttagtattttccc

SEQ ID NO: 104839 - DNA, 597 bp, Homo sapiens
gtgaatagtactgatcctgattggcatcagttgaaacaaatttctgttcatgttttccaccgacacagttaatgccttttccatcttaactagccacttatcacacactgtggctgtaactttcacagtttgagatgcaacagcagaactagcacacatttgtttttacttcttcacagtttcatagaaagatttattctcaccttagaccttaacaacctcacataatttttttcttttcttattaagtcaagaactttcatctcttcacttaaaggaagtactttgcagcttctctttggcatattcaagttgccagcatcastactcttggattttgggcattattaagtaaaataagagttacttgaacataagcactgtgatactgagacagtggctctgataaccaagatggctactgaataactggcgggtggcatctacagcatggatatgctggacaaaggaaggactccaggtcctgggcaagatggagcaggacaacttgagatttttttcaccctacttagaatggcatgcaattaaaaactgatgaattttttatttcttgaattttccatttagtattttccc

SEQ ID NO: 104840 - DNA, 572 bp, Homo sapiens
tgacgcgtattaatgtcacatggagacatttttaaaatccagatgcccaagccacatcccaagccaattaacttagaagttctggaggtggggccctggtatcagtaagttttaaagctttctgtgtgatctttattgtatttatccagatgcaatattcatacaagtcacccagaaacttgtaaarctacagattctgattcagtgaagccaaagatcctgcatttctattacggtccaagtagaaagcgaagctgttggctcatatactattatttgagtatcaaagctgtacagcattaaagaaggataatggaataggattgcaaatgtggaataagttatggaggctcactcttagtaactctactgtgcccacctgaggcctgctgctttaaaagtctagggttataagtttaacaacagcaacaacccctttttattaagtgattactacatgctttgtgctccacatacattactttatttatggctcaaaacatccctatggagttgtccggcagatgctattgatgctccaccctatattttcttggtcgacttctgagttc

SEQ ID NO: 104841 - DNA, 596 bp, Homo sapiens
ataatttattatttcaaaaaaagaaggaatattttgcatccaaaggtttagtgaggagtaaagagcttgcttaccttcaaggaaaacttactatatgatcctcaatttctcctttaaccttgaacttgtgaaaatattaccaaggtaagtgcatgacataktctagctgttggtcccttggtgcaaagacagagttgtcccagaggagaaaggaggctacatgaaggctatcacatatttattccactaggccaggagtcttccattttaacttaaatgtagctatctcatctgtcagattggacatataagctcaagcacagttatcaataggctcagtgaaggacaaataaatatgaagcccaggtacagaaaggtaaaatcatttgcatctcttcatggtttatcctcaaaaagtaactgcttccattgtgagtgaaaatggcaaatgtgtccctgagcattctcataagataaacctgatttctggattttgagatagtaccaaaggaactattaccacataggtaagatgtcgtcacaggtgaagaagatctttgttgtcaggtaccgattaaggaagaagccagttttct

SEQ ID NO: 104842 - DNA, 596 bp, Homo sapiens
ataatttattatttcaaaaaaagaaggaatattttgcatccaaaggtttagtgaggagtaaagagcttgcttaccttcaaggaaaacttactatatgatcctcaatttctcctttaaccttgaacttgtgaaaatattaccaaggtaagtgcatgacatagtctagctgttggtcccttggtgcaaagacagagttgtcccagaggagaaaggaggctacatgaaggctatcacatatttattccactaggccaggagtcttccattttaacttaaatgtagctatctcatctgtcagattggacatataagctcaagcacagttatcaataggctcagtgaaggacaaataaatatgaagcccaggtacagaaaggtaaaatcatttgcatctcttcatggtttatcctcaaaaagtaactscttccattgtgagtgaaaatggcaaatgtgtccctgagcattctcataagataaacctgatttctggattttgagatagtaccaaaggaactattaccacataggtaagatgtcgtcacaggtgaagaagatctttgttgtcaggtaccgattaaggaagaagccagttttct

SEQ ID NO: 104843 - DNA, 573 bp, Homo sapiens
gttgtgtgtggtttctagtattgagcgatcccaaacaaactaaataacaaaattaattacccagagatatattgagtaacaaaataaactatcatccacgagtaccccagtctgaaattgaattttagtcttgaataataaattacttccaaagccaagtrctataggtactatagggatttgtgtttaaatttgacatccgcctcattagggttgaaattggcaaaatagccaaagtgctggtagctgggagcatattcatattaattatgattattttggcaaatctttttaccaggaagcaaataaataaaatcaaggccaaacaatatagctaatagagataaacaggttcattttctggaggtaaatattctattcagttgctgaaataccctggctcttgctattcttttctttggatccaaggctatgctttccacttgcataactgtcatagtgaagaacaaggctctttcaaacctccgtatggcttattcctaaagtcattatccagtagcagcattatgactcatctatacaaaatgaccttgtaaaagtcagctaaaggga

SEQ ID NO: 104844 - DNA, 631 bp, Homo sapiens
tgatctctgtttcattaaatatctatgttatatgatgatgtagaattacagacgacacagggacaaaggcagagcatattctagaaaatgaaattcttatgtgtcaactaatttagtcactagcctctataatgtaaccttgtgcttaatacatatgaagcattaaagagtacttggacatatgtctgaatgagctattcgttttctaagaaatttccctcggaaacgtgtctacaatgaagtagccaatttgttaatacttgaacaccctgattgatggggaattcacttcctctgaagacattgctaaaatgttgtcacacacacacaggacacacagagaaagggagaaaaaataatattctgagtgcctatgcagtgtagaatatacatacccatgttttcccccaaaaagatgttgaaaacttagatcaaataaatcagcatctcctctacagtcttatttagtggaaacaacatgttttaaaagcacragaatagaaccaagaaggcagaaaacatgggcaatgggaaaaaacagaagtgcattttacataaataaacaaataatccctgagcagtgcacatatttgtggttttattaatttttcaattttaaggtgtggaaatc

SEQ ID NO: 104845 - DNA, 599 bp, Homo sapiens
tatagcagccccagatgatgaagacaagaggctactagttgttaactagaacctcactgcctttaaactcaaataaacaaagtaatcaaccccaggttcttaactttgaagaactattacatgtggccatttttggtgtctactactataatggtcagaattttgtttcaggtaaaacagactactagctcttttaaacaaaagtgatttgacacaggggattgagcactgacacattattggaaggtgtgattttatgtgtgcctttgtctagaccacaatacctggatatttgatcaaaccttattctaaatgttcctgtaaaagtattttttagatgagggtaacatttaatcagcagattttgagtaaagcaggttaccccctataatgtgggtgattttctttcaattagttgaaggccttaagagaaaagaaaaactgagrtctcctgaagaagagtgaattttgccagcaaatggcatttacacttgaactggaacatcaaaacttccttgactctctcacctgctggcccatcttgtagatctttgacttgccagcctccacaatcatgtgagccaattgcttaaaataaa

SEQ ID NO: 104846 - DNA, 599 bp, Homo sapiens
tatagcagccccagatgatgaagacaagaggctactagttgttaactagaacctcactgcctttaaactcaaataaacaaagtaatcaaccccaggttcttaactttgaagaactattacatgtggccatttttggtgtctactactataatggtcagaattttgtttcaggtaaaacagactactagctcttttaaacaaaagtgatttgacacaggggattgagcactgacacattattggaaggtgtgattttatgtgtgcctttgtctagaccacaatacctggatatttgatcaaaccttattctaaatgttcctgtaaaagtattttttagatgagggtaacatttaatcagcagattttgagtaaagcaggttaccccctataatgtgggtgattttctttcaattagttgaaggccttaagagaaaagaaaaactgaggtctcctgaagaagagtgaattttgccagcaaatggcatttacacttgaactggaacatcaaaacttccttgactctctcacctgctggcccaycttgtagatctttgacttgccagcctccacaatcatgtgagccaattgcttaaaataaa

SEQ ID NO: 104847 - DNA, 593 bp, Homo sapiens
gccaatcttaaaggatctcataactttattattttaatttagagacactatacattagggtaatagtctaataaaatttttaacaacatattttttggcatgtaacatactgattgaagtatattttagtagaagatatttsaagaacttaaaaagaattctacaaacagttacactgcctgactgccccctccacccctcccaggcaaggaataaacatggtgatggaaagatagggaagttaacaatgcaggataagaatgggaataatattaatcccagtatagatcaaaataagtgtgacagaaaaattaaacacatattactataagcaggttttctttggatcttaacaaaaaaactaggtagttgacagggtgaagagttattaacaatgtttaggaagcaggatttgaaaaataagtagctcttgagctagggtgtattgatgggaacataaaagacgattatctaattttaatctgtacacaaaagcttttcctgaaaatggtggcaacatcatctccattcaataggcattaaatatgatttattatgtatgaagtattttgttaggtactagggatacagat

SEQ ID NO: 104848 - DNA, 609 bp, Homo sapiens
atgaaaaaactgtaatatatttttaaattaaattcagttagtttttctagaatcatagtgttgccacaattctagagaggtaatttagtccatttctctgcctttagggaggataaacataaattttattttctttaaacctttgggcaggagatttyggcatccgagaaccactcttaagaatctatttcagcagtgactcagtcaaatacacaaaaaaatcacattttaatatattgttccaaataaactatattaattctgtaaaataacaattaacctaggttaattaatgggttaatcaagtaactcataatttacttgttaaagaaaaagcaaactcaagaaaatccatgaatagtgggccagacatggtggctcacgtctctgggaggccaagtcgggcgtttcacttgaggtcaggagttcgagatcagccaagccaggccaacatggaacccaatctctactaaacatacaaaaattagcggggcgtggtggtggacatctgtaatcccaactactcaggaggctgcggcaggagaatcgcttgaaccccagaggtggaggttgcaatgagccgagatcgtgccactgcactccagtctg

SEQ ID NO: 104849 - DNA, 609 bp, Homo sapiens
atgaaaaaactgtaatatatttttaaattaaattcagttagtttttctagaatcatagtgttgccacaattctagagaggtaatttagtccatttctctgcctttagggaggataaacataaattttattttctttaaacctttgggcaggagattttrgcatccgagaaccactcttaagaatctatttcagcagtgactcagtcaaatacacaaaaaaatcacattttaatatattgttccaaataaactatattaattctgtaaaataacaattaacctaggttaattaatgggttaatcaagtaactcataatttacttgttaaagaaaaagcaaactcaagaaaatccatgaatagtgggccagacatggtggctcacgtctctgggaggccaagtcgggcgtttcacttgaggtcaggagttcgagatcagccaagccaggccaacatggaacccaatctctactaaacatacaaaaattagcggggcgtggtggtggacatctgtaatcccaactactcaggaggctgcggcaggagaatcgcttgaaccccagaggtggaggttgcaatgagccgagatcgtgccactgcactccagtctg

SEQ ID NO: 104850 - DNA, 609 bp, Homo sapiens
atgaaaaaactgtaatatatttttaaattaaattcagttagtttttctagaatcatagtgttgccacaattctagagaggtaatttagtccatttctctgcctttagggaggataaacataaattttattttctttaaacctttgggcaggagattttggcatccgagaaccactcttaagaatctatttcagcagtgactcagtcaaatacamaaaaaaatcacattttaatatattgttccaaataaactatattaattctgtaaaataacaattaacctaggttaattaatgggttaatcaagtaactcataatttacttgttaaagaaaaagcaaactcaagaaaatccatgaatagtgggccagacatggtggctcacgtctctgggaggccaagtcgggcgtttcacttgaggtcaggagttcgagatcagccaagccaggccaacatggaacccaatctctactaaacatacaaaaattagcggggcgtggtggtggacatctgtaatcccaactactcaggaggctgcggcaggagaatcgcttgaaccccagaggtggaggttgcaatgagccgagatcgtgccactgcactccagtctg

SEQ ID NO: 104851 - DNA, 609 bp, Homo sapiens
atgaaaaaactgtaatatatttttaaattaaattcagttagtttttctagaatcatagtgttgccacaattctagagaggtaatttagtccatttctctgcctttagggaggataaacataaattttattttctttaaacctttgggcaggagattttggcatccgagaaccactcttaagaatctatttcagcagtgactcagtcaaatacacaaaaaaatcacattttaatatattgttccaaataaactatattaattctgtaaaataacaattaacctaggttaattaatgggttaatcaagtaactcataatttacttgttaaagaaaaagcaaactcaagaaaatccatsaatagtgggccagacatggtggctcacgtctctgggaggccaagtcgggcgtttcacttgaggtcaggagttcgagatcagccaagccaggccaacatggaacccaatctctactaaacatacaaaaattagcggggcgtggtggtggacatctgtaatcccaactactcaggaggctgcggcaggagaatcgcttgaaccccagaggtggaggttgcaatgagccgagatcgtgccactgcactccagtctg

SEQ ID NO: 104852 - DNA, 428 bp, Homo sapiens
gaattctgtgatttaaaagcacagaggatttcatwcacctagtctggattttgaaataataaataagtgtgcaattcattaattttggactttgaaaaacagaaatatttccacggccatttacttttatatttaaaataaattcaaaattctctaatttcttgttgttttcagatactgacgtctgtttccaatccatttacatgttaactcaagacagtcttgtctgtgatgggttattccatcttcacggtcacctcctcatatacatctttccactttgaatcttagaatttcattctgtcgagaataacttgtatcttgatatatataatacttagctctgaacacatgatacttaaataattttgggggctggcaaacttgtttttctcccttgtgtttagtttgtagtaatctggttaatt

SEQ ID NO: 104853 - DNA, 659 bp, Homo sapiens
catcctaaatttctttgggagaaatatgctctgctcatggaccttctctttgttcttttatcttttcagattctccctttcctcaaatttcagataaaaaagtggttcggagaggaagttctagagctagactttttttgaagcccagctttgatgatttttaggtatataaactcgaacaccatcataataactgtgacagcgtgatactggtgcaagcatagacgaatgcaccaacagaacagaatagactccaaaacagactgacttatgataagagtgatactgcagttcagtccttaacctctgtgtgtctcagtttcctcaaatgcagaataggaacaactgtatccctatggtggtggtrtgacgattaagggaattaatacaaatgtgcttacaatagggcctgacatctaataaatgtttgataagttccacctattttccctggtcccaggccttaatcaacttcctctgaaatttcagtccttattctgcactgcttattttgggacttaattattcacttccttgttttgctaccaaattattttgtgtgcagtagttttgtgtctccatctattgtaaactctgaggacagagaccacatagactgcatgtaattgcttctctagttatcagggtgcccagaataa

SEQ ID NO: 104854 - DNA, 624 bp, Homo sapiens
ccctggagagtgttgaaaatgtgctcacacctcctacatccagcgccttgggagacgcccagcacctgactctgtggcttgtgctggcaccgtggggcccgtcttcttgctgtcaccaccatgtgaagaagctcaggtcagcctgctggatcctggaaggcttgtggcccagctccccttccactctggccaacagcctgctaatcacatgcatgagcatktcctcggtcagccagccctgggagagctcaccggctgacctcaagcctacaggcagacccttcagagatcagcccagcctttctagcacagaagagcctcctggtcagcccacagaacatacaaataccgtacatcggcctctaatcaagacgaggaaccagactcaaggtgtccaggggtgggttctgaataagatgccccttggatttttccctagttaacaaacgacatgaggggcctcaaacaaaagggacagaaattacaggaccagtaaatttgtggaaaaagtcaacatcactatgtaataattgaatgtgaatgaaaagtacagagacgttaatatcccaccaatttgaaaatgatgaaaaagaattatgccttgtgtgattctgaagaagtagc

SEQ ID NO: 104855 - DNA, 519 bp, Homo sapiens
atgttatatattttcctatgtctttcataattcttggcaccttcccaccattcttatccttcacaggaattaaattctcaagttgasctgtatacaaaagttaaaaatgccctggaaaagccacccaaaagattatatatatatatatgattttctttatacaactctatgagcaaggttttgtgttttttttttttttttttcagtttgtcccctgagttctccttggtcagttcttctctacaacccttaattaattcttcaatttcttccgctaaaatgttgtcaaagtcattatcaccccgcagcctggccatcacttggaataatgagattcagttctcatcagtggtggagagccctgtaaagtcattcacatttttttccataagattagccaggcttaattgtattaattgtctagggttggtgttcactgaatggactatctggttatctgtactaattaaaatgttgttctttttttttcacccagagtgagtataggtgattttgaat

SEQ ID NO: 104856 - DNA, 647 bp, Homo sapiens
ggtgtttataactctctttgactgataaagcaaggatacctgacttatcaggaagggtggcaaatagctctcattttataatgacrtaaattaaaatgagaaacaaaccagaaaataggtggatctttattaaattgaggaatggtttatttctctatttaatttaaaatactctaaatagggatgtttctaaattgctcctaggttctgaggaaagatgtgtctgctggagaggccacatgtcttgacaatttgcttactttcaataactacaatgtattatgctaagttctcttctctacaaaagctatggtcctcacactcagcagggcagtacatctgccattccccagccccaggccagctctgagatgcttcaggtagagagaaaagcttttccagatgcacattgagagagaaaccacatatgcacaattcaactcagaaagcacgagtgtttttcttcaaacttttttctttctcattctgtgagtaattcagtcactgacagttccctaaatgttatcattttaattccgaaaacattaacctcacttcccctgaggattttgagatgtacatcatgacaatgtattttttaaatgtcttaataatgagaaatttcaggtagcccttcataatacaac

SEQ ID NO: 104857 - DNA, 647 bp, Homo sapiens
ggtgtttataactctctttgactgataaagcaaggatacctgacttatcaggaagggtggcaaatagctctcattttataatgacgtaaattaaaatgagaaacaaaccagaaaataggtggatctttattaaattgaggaatggtttatttctctatttaatttaaaatactctaaatagggatgtttctaaattgctcctaggttctgaggaaagatgtgtctgctggagaggccacatgtcttgacaatttgcttactttcaataactacaatgtattatgctaagttctcttctctacaaaagctatggtcctcacactcagcagggcagtacatctgccattccccagccccaggccagctctgagatgcttcaggtagagagaaaagcttttccagatgcacattgagagagaaaccacatatgcacaattcaactcagaaagcaygagtgtttttcttcaaacttttttctttctcattctgtgagtaattcagtcactgacagttccctaaatgttatcattttaattccgaaaacattaacctcacttcccctgaggattttgagatgtacatcatgacaatgtattttttaaatgtcttaataatgagaaatttcaggtagcccttcataatacaac

SEQ ID NO: 104858 - DNA, 421 bp, Homo sapiens
gaattcaagggtgaacttatcttaaataattggcatgctcccatttatgagataataagatctgtgtaactcattacatttcataccttctcctcctcaggagtcaggaatttcaaaatcaaataggcttcttacaataaatataacctctggtgttaacaacattgaatcctcttttctattatggtttgctgtggtctcataattttttgcatgttaatctcytattttaaaccactctgaaataattttttttaaagaagcaaagggaaaataaaaatctcagtttaatggaatccaattaaaattcttttgttgtggtataatatatacaattaactacacatatttaaagtattaatataatatctgataaattttgacatgtatatgcctgtgatattgtaaaatacatatttgt

SEQ ID NO: 104859 - DNA, 585 bp, Homo sapiens
acacgctccctgctcaccatgttgtgggtgatgagaaggagagaacarcttcagccctttggggagcccaggcctaggaggtccctaagccagggctgttataccctttttggggctctgcagttcctagtgtctgcaagcttctgggtgccaccgcgttcccctcatccagatgcaggtgcttgcagcagaagccacgtgcagtaaatctggtccagttgcagcctcacatggagcaaacacctgtgctggcagctggagctgcctgcccagctgcagctgcctgtatgcctggctgtacgcagtggccaggccctgtgctcacttgcccacacacccctcgccactccaaacctggctcacccttggcaggtgtgggatatgagcaggtagcatgagctgagcacagcctgccaagctgagtgggcccaacgagcccagtgggcatgagcaacactcaggcagaagacactgccagccacagatgtttccagctggtgaagcgacaccccaggggtcccgtgacactaacaggtatgtagtggtatcattatagttttggttggcatttccctaacgagtaat

SEQ ID NO: 104860 - DNA, 561 bp, Homo sapiens
gttcattaaaaataggaaaactgcttgactgctgtttcttttgtctccctcctatttgtgctaattcttttttcctgtcaaatcatactgaaagcaagtctataattaggcttaattaacatttctttttaactcctgaaatctgtctcctaatctctcctgctcaaacactgtatggcagcaaatctccttggcaatcttcctgaatttcttttgctgcaagattagcaacgtttcctatctcctagtcgtctccacctatctcagacttcagatagtgtcgatcaagcttgactgaaatcacacagtcctgggatctttctctcctaacttgcacttttttgtgtttgattcaattgccttccctcccacggagttactctctattcccttattctgttttattatattttgagaaatcattaccacttgaaatgattatayatttttcttttctgactgctataaaaatcaccttccttctacagcttatccatttctataacctttatttatatagagggaacactgaggggatagaatgaaaaataagccagctgc

SEQ ID NO: 104861 - DNA, 599 bp, Homo sapiens
aattccaattgcacagctctcttactcaaaactcacccattcctgcaattattcccactctgagaaccgtgcagcgaaactaaaaagaaggctgccaagggacagggctggggaagggaagaygctgtttctgacagaacctacagtcacagctggacagaaatcccatgtaaaacgcagttctgcaactgagactaagggggaggtgtcactcggagctaagtctgtgacacagaggccctaaacactggtctccctggttttgcccagatcctaccctcacagcctggtttctgcagaagcagcaaactctctatgtgcagccaggagccatgctttatttaacctgcatgaaattatccacccactctcaaccagagttttcaaaaatgtttaattagttgccagtttatctcacattaaacataggtttccacttcctttttaacactcagaagacatgatgatgatgagtcttccgtacagcccacattccagcatgatatctccagaggaggccaggcccttcatccaagtgcgcacaccccagttgccacagacctggtcagtttctcctatttttgcttcagaactggctt

SEQ ID NO: 104862 - DNA, 628 bp, Homo sapiens
agccagataaactattatattaagaaaaattgaggggctgggcaagatggctcacacctgtaatcccagcactttgggaggctgaggtgggtggatcatgaggtcgggagatcgagaccatcttggctaacacagtgaaaccctatctccactaaaaatacaaaaaattagccgggcgtggtggtgggcacctgtagtcccagctactcgggaggctgaggcaggagaatggcgtgaacccaggaggcrgagcttgcagtgagccgagatcgcgccactgcactccagcctgggcgacagagcgagactctctcaaaaaaaaaaaaaaaaaagaaactttgagttatgcttttcaaaatgtttgctcacagattttcaactactttcagtaacgtatattgtttcccaaacatgcactttattgtatgtagcaactgagtatttttacaactaactataaataaagctattgtaaccagcttatttacttcctggtttcaatgtggtaggcactactttaggcattttaaatatattaactcatttaatgctcataacaatgcaattacatgcttcacaaaggagaaaactgaagcacacagaggttagacttctgataaatgacaaa

SEQ ID NO: 104863 - DNA, 628 bp, Homo sapiens
agccagataaactattatattaagaaaaattgaggggctgggcaagatggctcacacctgtaatcccagcactttgggaggctgaggtgggtggatcatgaggtcgggagatcgagaccatcttggctaacacagtgaaaccctatctccactaaaaatacaaaaaattagccgggcgtggtggtgggcacctgtagtcccagctactcgggaggctgaggcaggagaatggcgtgaacccaggaggcggagcttgcagtgagccgagatcgcgccactgcactccagcctgggcgacagagcgagactctctcaaaaaaaaaaaaaaaaaagaaactttgagttatgcttttcaaaatgtttgctcacagattttcaactactttcagtaacgtatattgtytcccaaacatgcactttattgtatgtagcaactgagtatttttacaactaactataaataaagctattgtaaccagcttatttacttcctggtttcaatgtggtaggcactactttaggcattttaaatatattaactcatttaatgctcataacaatgcaattacatgcttcacaaaggagaaaactgaagcacacagaggttagacttctgataaatgacaaa

SEQ ID NO: 104864 - DNA, 628 bp, Homo sapiens
agccagataaactattatattaagaaaaattgaggggctgggcaagatggctcacacctgtaatcccagcactttgggaggctgaggtgggtggatcatgaggtcgggagatcgagaccatcttggctaacacagtgaaaccctatctccactaaaaatacaaaaaattagccgggcgtggtggtgggcacctgtagtcccagctactcgggaggctgaggcaggagaatggcgtgaacccaggaggcggagcttgcagtgagccgagatcgcgccactgcactccagcctgggcgacagagcgagactctctcaaaaaaaaaaaaaaaaaagaaactttgagttatgcttttcaaaatgtttgctcacagattttcaactactttcagtaacgtatattgtttcccaaacatgcastttattgtatgtagcaactgagtatttttacaactaactataaataaagctattgtaaccagcttatttacttcctggtttcaatgtggtaggcactactttaggcattttaaatatattaactcatttaatgctcataacaatgcaattacatgcttcacaaaggagaaaactgaagcacacagaggttagacttctgataaatgacaaa

SEQ ID NO: 104865 - DNA, 628 bp, Homo sapiens
agccagataaactattatattaagaaaaattgaggggctgggcaagatggctcacacctgtaatcccagcactttgggaggctgaggtgggtggatcatgaggtcgggagatcgagaccatcttggctaacacagtgaaaccctatctccactaaaaatacaaaaaattagccgggcgtggtggtgggcacctgtagtcccagctactcgggaggctgaggcaggagaatggcgtgaacccaggaggcggagcttgcagtgagccgagatcgcgccactgcactccagcctgggcgacagagcgagactctctcaaaaaaaaaaaaaaaaaagaaactttgagttatgcttttcaaaatgtttgctcacagattttcaactactttcagtaacgtatattgtttcccaaacatgcactttattgtatgtagyaactgagtatttttacaactaactataaataaagctattgtaaccagcttatttacttcctggtttcaatgtggtaggcactactttaggcattttaaatatattaactcatttaatgctcataacaatgcaattacatgcttcacaaaggagaaaactgaagcacacagaggttagacttctgataaatgacaaa

SEQ ID NO: 104866 - DNA, 637 bp, Homo sapiens
atgaataaattccaactgtctgaaacgcatctttcccacttttttctcttcctctaaattaaaaggactgatattccaaagagaaaaaaatcaatgtccagtgcaaaaaactatgagataaacatgctatttccgaagaggatttatttttggagtcagaaggatgtagctttaaattccagttatgctttatgtaaactcaggggagttaatttctgcttcttrttttcttccttcaaaaatacggggctaataaatatcgacatataataggtactcagtgaatggcacctattgtgtatttattttgatctttgtgtaaagcatatgttgcttaagtctttaggatttaattcttaagggacataaaccccaaataaataaaatatacagttctaaataagcagacatgtcccaagctaattggaagggagcatagagaaggtgtttccagtcaataaatcactttcttgttcaattaaactaatttcttttaaatggacaacctcttcttagattcatgaatctttagaaagaaaattaacattgacctaccaattcatgacccctcaaaatgaggttgctcctttaaggaaatcattctctgaacaactgagaatttgaataaaaatggaag

SEQ ID NO: 104867 - DNA, 615 bp, Homo sapiens
ttttttttaactttggctgaaatgtcataaagagtgactacatcttaataccagcagagaagtcagcagattcaaagtcagcagaaaaaaaaaaaaaagatagaaatatagagaacttcaaaggctctacatgtaattttatagttggttacagtttttaatttagttctaaggaaaacaggcttgcagagtctgaatgatcccctttaagggcaataaattagacttggtgtaatctgtccattgactaaaaatgtgtgcaagaatggaccataaaatttgaatgtacagttggctggattcccagagagtttggcatgctttggaattttgaagattccattccacatcaaataaaattctatgaatcctgtcagggaatgtcagaaatttggaccagtgttttggttggtggtaacctctatagtggctttaattggcaatcttgcattcaccatttagaatgtttaatttttgtttatagaagatgtttaggaataagcaaggggaaaaatgtttttaaaaaagccaaattatttacagatattcataaccaaatcaaaatgaaacsaaaataagagtggttatgaaaattttaagccaagagcataaacc

SEQ ID NO: 104868 - DNA, 546 bp, Homo sapiens
atcttatttagaagatgtatcattcaaattacaaattgatataatgaattctaatgaatactttcctcctacattgaagcttaatccctattcaaagtggattagttagtatttaaatttatcataggatcaagggtgattagcagcctattataaaaaaagaatcccatgaaatttatggatctttatcacatgcaacactgagggtgagctatttgaaaakttctggggatggtccattctactaaaaatcttgcaaatggtgccttttcctgaggtgttctgcagtaaatgcaacccggaaagaatgaggtccacttgtacaaaaaaattgttctctaagaaatgaagcagctgcatgctaatggtttgctaagttcttattatctgcattcccattgactgttcagcctcacaatgtgtgactctaagtcccctttgcttgaaagattctctaaggagcttttgaaaacgttaaagctcctgaaagacagcgaagttagaagtttgactaaaatgaatgtaccagagatatggcttagtaaa

SEQ ID NO: 104869 - DNA, 392 bp, Homo sapiens
caagaaccagtgaaaacataaacagactgataggccatctcagactccagatattagaattatctaatctagattataaaaatattggttaatatgtttaaagaaatgatctaaaaatgtgaaagcatctatacagaacaggaatctataaaacgggacagattttttgataaaaatttaaaacttctagaaatgaagatgatcatatctgaaacttaaaattcaatggatatgatatgcagctmgctgcctagcccaacagaagagagaataaataaaatagaaattagaacataagacatacagtaaagagaaatttaacaatatatttgtaattggtttgtcatacatgtgggttccacacacatggtttcagcaaccgcggatgaaat

SEQ ID NO: 104870 - DNA, 553 bp, Homo sapiens
tgtgaaagcatctatacagaacaggaatctataaaacgggacagattttttgataaaaatttaaaacttctagaaatgaagatgatcatatctgaaacttaaaattcaatggatatgatatgcagctcgctgcctagcccaacagaagagagaataaataaaatagaaattagaacataagacatacagtaaagagaaatttaacaatatatttgtaattggtttgtcatacatgtgggttccacacacatggtttcagcaaccgcggatgaaatattttgaaaaaagaattgtactgttgcatctgtagtgaacatttacagatttttcttttcttcttcttgttccctaaaaaatatggtataaaaactatttatatagcatttacactgtattaggtattataaatattctagagatgagttaaaatatatgggaagctatgcataagttatatgcaaatagtatgtcattttatataaaggaratgagcatcctcagattttcgtattcttgaggcagcggttctggaaccaattccttcaggatacca

SEQ ID NO: 104871 - DNA, 613 bp, Homo sapiens
tataattatattcatttttgagaaaccgtagggtttgagcccagtctgttcatttcgtgaacctgttatagaaaatgccctgaaacctgagagttcccaaagcctaaatcatgtacctcatttgaaagtgtttaccttgcrgatctctgaaataacaaggtctcaagctgtagaagattttacagatacattcagtttttaaataaaattaagagaaatagtacagaccccataatatttctccatggtaaataccaagctactgtattcttgctgaagttgaggtgttgtcttcagttgaagcctttatttagtgaatctgtagttgatctccttagctgttaaaacaagaaagattgagtgatattatgtttttatttctgagaaaaggttgctgagcagctctcatgattaacgttattatatttgtcatatgaatttctatgtgactctgtacagagtattccctcttgctttttctttgtctctcactctctctttgaattttctaagattacataattccataatgaagttcacgtgacgtctcactgaaaggtacacatactattccttttactgcccgatagataaaagactggattaggaccca

SEQ ID NO: 104872 - DNA, 392 bp, Homo sapiens
aacaatattatctaaatcccatgttgtatatattatataggtcttttccamctccttagtaactgaatgagagagaggatatttttaattccttctctttattctgaaatgtatctctcttttcatttattcaacaaataatttgagtgcctgttatgtgccaggatctctcatcaggtactgaaaaaaggaactgggtttgttgtaacactttaggtgatctgaataaaaattcattattcaaagttatgctgaactgaggaagagcacttttcacacatcagatagattatataatagagaatcctttcccagcaatttattatatattgttggttcccagaaaagattttagactttggtatcagaaagattgaattatgtaaaataag

SEQ ID NO: 104873 - DNA, 578 bp, Homo sapiens
agaaataaaagagatacagattggaaagtaagtaaaacatatggacaatacaatagtgaagaaacctaaggaatctacaacataactactataactaatcagtaaagataacaaagtcacagaatacatagtcaatataaaaagaatcaactgcatttctatattctagaaagtaacaattagaatttgacattttaaaacataccatttatgatagcatccaaccaaaaccatgaaatacttaaggataaaattaacaaaatgtgcccaataactttacactgaaaactacagaacaatgctgaaataaagaaaacctaaataaaagtaaaggtgtactacattcatggactgggagccattattgtttagatgttggtttgtcartcaagtcaatatacagaatcaatgcaatctcaatcagaatcagttgacttttctataaaaaaaaaaaaaacaaaaacctaaaaggtggattccatactttatatgaaaatgcaaaggacctaacatagtcactacagtattacaaaagaacaacaaaattggaggacatacacaatttgatttcaagattt

SEQ ID NO: 104874 - DNA, 624 bp, Homo sapiens
aggtttggcttgtattattcttgagatagaatcaacaatatattattgcagatattaaatttcagacataaatttatttattctactaatatttaacaagcatcatctatgcaccaggctctgggccaggtgcttgagatacagtggtaatcaagatgcagtagttgacctcatagagcctagaaatatctcttaagcagccgggcgtggtggctcatgcctgtaatcccagcactttgggaggccaaggtgggcggatcacgaggtcaggagttcgagaccagcctggccaacatggtgaaaccctgtctctactaaaaatacaaaaattagccgggcatggtggcgggcgcctgtaatcccagctactccggaagctggggcaggagaatcgtctgaacctgggaggcagaggttgcagtgagccaagattgcgccattgtactccagcctgggtgacaggcaagattccatctcaaaggaaaaaaaaaatgtgtgtgtgtgtgtgtgtgtrtatatatatgtatatctcataagctaatctttataaaactaatttcaaccttttctgttaaaaaagtagacctatggactaagacaactaattaaaattttaagaaaagg

SEQ ID NO: 104875 - DNA, 636 bp, Homo sapiens
gagtgatcaggaatcagttttgctttctctgtcattggcccttatctgctgtctcctgtgttcctctccctgctcacatccaacatgaagacttgcccgtaactgacatcctygtcaagactctttgtcaatcattttactcctttctgtgggtaaaactcagacctctttgcaagaatagatttttgtccccaagggttcttttgtgtaagaactcagggttgttagttactggcaaagtgaacatatctcacaaaacaagtgtttttattttttatttttttgcttgtttgagacaaacagcctaaagtgagatttaataaagaatattttctttgttagtttagtttggacccagttcttaagaaaacaaacaaacaaaaacaaaaaacaactatcctgcatctcccctgccctcgtgcctccccttccattatcacatagcaaagtatttgattttcatcctgtttcatcaaaacccttgcacttgatcacacgaggtattcataggagtcaactcctggcttaattattttgattcaccgtgttagaaagggaagttagagtaggcgtaggggctgagcacattagaaggtacagaggcggagcatatttcaagaatcccccctcccacaa

SEQ ID NO: 104876 - DNA, 636 bp, Homo sapiens
gagtgatcaggaatcagttttgctttctctgtcattggcccttatctgctgtctcctgtgttcctctccctgctcacatccaacatgaagacttgcccgtaactgacatccttgtcaagactctttgtcaatcattttactcctttctgtgggtaaaactcagacctctttgcaagaatagatttttgtccccaagggttcttttgtgtaagaactcagggttgttagttactggcaaagtgaacatatctcacaaaacaagtgtttttattttttatttttttgcttgtttgagacaaacagcctaaagygagatttaataaagaatattttctttgttagtttagtttggacccagttcttaagaaaacaaacaaacaaaaacaaaaaacaactatcctgcatctcccctgccctcgtgcctccccttccattatcacatagcaaagtatttgattttcatcctgtttcatcaaaacccttgcacttgatcacacgaggtattcataggagtcaactcctggcttaattattttgattcaccgtgttagaaagggaagttagagtaggcgtaggggctgagcacattagaaggtacagaggcggagcatatttcaagaatcccccctcccacaa

SEQ ID NO: 104877 - DNA, 636 bp, Homo sapiens
gagtgatcaggaatcagttttgctttctctgtcattggcccttatctgctgtctcctgtgttcctctccctgctcacatccaacatgaagacttgcccgtaactgacatccttgtcaagactctttgtcaatcattttactcctttctgtgggtaaaactcagacctctttgcaagaatagatttttgtccccaagggttcttttgtgtaagaactcagggttgttagttactggcaaagtgaacatatctcacaaaacaagtgtttttattttttatttttttgcttgtttgagacaaacagcctaaagtgagatttaataaagaatattttctttgttagtttagtttggacccagttcttaagaaaacaaacaaacaaaaacaaaaaacaactatcctgcatctcccctgccctcgtgcctccccttccattatcacatagcaaagtatttgattttcatyctgtttcatcaaaacccttgcacttgatcacacgaggtattcataggagtcaactcctggcttaattattttgattcaccgtgttagaaagggaagttagagtaggcgtaggggctgagcacattagaaggtacagaggcggagcatatttcaagaatcccccctcccacaa

SEQ ID NO: 104878 - DNA, 620 bp, Homo sapiens
ttaaatacaagccatatataccaaatctaagtgctatctatgacttattttaaggttctaagtatttccctgatgtgttctttaaaaattttagaagactacatggttgaattaaacataacctatataatggcaattttagtgacttgctaactggaatttagttcccaagaatgttacccacgtttcttattcctcagaataataaaataatcagtcaacacatgttttttgagcacttactgaacacaaaaccttcttcttggcattggggatacatcaatgaacaaaacagatagaatcactccttgtaagaagctacatcctaagagaacgagtatgaatccttccgacttgggttagaagtgcatcccgactgattatgagcagtgtgaacctgggttgactggtcacttagcagttctgaccgccagcctcatcatctataaatcagtcttaatacttacctcatatgctcacactgtgaagattaaacttgatattgtacacaaagctcttagcacagtacctggaatgtaataaagccttgacatgttyttcatgtctctatttatttattttatcctgacagttaacaaaggtttctggatcagaagcag

SEQ ID NO: 104879 - DNA, 599 bp, Homo sapiens
tgtgagttttgaaatgaggcagtccacagtctttaattcacataagacaaaactgaggttatggctgcttaataaaaagaaataatgaaaacgacaaatttggacttcaccagaaaagtaggactatgatagagcctccactrttcaggcttttgggtagcgctccggaaaactcattctgttgacagagctagcattaaacaggatcagaggaactggtacaggttaaactaacttttaaaagactgataccataagcaaaaagtcaatatgttcatttgaattaagtatttttaactttaaggcaaacaggaaaatcacactggttgatctgcttgtcctcttcctttagaaaagaaaaaaatctttgatggggacagtattgttaagaggattttagtggtcggtattattgagttacgagggccaatgaacctgtcagtgaacttgactatgttatacagatatgacttcaatccactgcaaacaagcttttgcccccaaatctccaacaaaactgatactgcgaaggtcactaagaatcttcttattggtgtatgcaatgttcagttctcagttcttattttatcacttgacct

SEQ ID NO: 104880 - DNA, 535 bp, Homo sapiens
ctgtgttagtttatcctacaaactaagaatggcttctacagttctaaatcattggggggtgggacgtcaacaaagaatattttgtgacatgaaaattatgaaattcagatatcagtgcctatgaataaagtttcattgaaacgcagccaggtttgttttatgtgttggctgcttttgcactacgacagttcagctgagtggtttcagcaaagacccatggcccacaaagtttaaaatacttaaccttctggctctttacagaaaatgtgctaactcccggtttagccatgctgaacacagcactgaatatgttcccatactttcatacctttcctcatccagtttcttcggtcgaggctgctgtccctgcatcttacttgttctcagagttttgctttttcagttcttgtaacaccgtcatcatctcaaatatgtcactgtatcatacttaatcacacccaggtctttcctttagctaaaagaaatrtaagggccatgactttcagtcatttcattttctgcaacatgcttctat

SEQ ID NO: 104881 - DNA, 550 bp, Homo sapiens
ctctatcttcaaatacaatcctcaggcaataggtaatctattttctgtctttatatattttatttaattgacattttgcataaatgggatcacacaatatatagtcttgtgtgtctggcttcgtcacttaatgtttcccaaggttcccccttactgcagcaagtatcagcactttattccgttttgttgctgcataacattgtattaatatatcacatttgtttatctaatattggttgatggatgtttgactcactcccaatattggctattatgaataatgttaygagcattcatgtacaagtttttgtgtgaagagatgttctcaattcccaaggaaattgggtaaaaatataccttgaagtggagttcctgggttatatagcaaccttgtatttaacattttgagaaactgcaaaactgtttccaaaggaatgatacattttagaatcccagcagcaatgtctgagggatccagtttctccaaatccttaccagctttttattgcctatctttcttattctagttaccaagtgagtgtgaagtggt

SEQ ID NO: 104882 - DNA, 642 bp, Homo sapiens
tttgttcttttgtatggtgtttagtagtccaacatgcatatgtaccacattttctttatccaatccaccacggatgggcacccaggttaattactgtgctatagtaaacagcactgttatgaacataaaagtatatgtctttttgggagaacgatttattttcctttggatatatactcagtagtgggatttctgggtcgaacggtagttctgttttacattctttgagacattaaaagctttaatttctttgctttccacagtggctgaatccatttacattcccaccaacagtgtataagcattgccttctctccacagccttgttttgttgttgttgttgtggttgttgacttgttttggttttgttgatgatttttgacttttaatagagacctacaggattatgacataatgggaccatctttagacaagcaaagatggaagagcataatgcctgggggtggggtaattagttgcgatacgagctacgcagcatgcaaggttgrcgtattgaaatggaggatgcacatacggctgtgattgctttgccaagtggacttgaaaggtggtcattctttgctgtgtataacgggcatcctggttctcaggttgccaaatactgctgtgagcatttgttag

SEQ ID NO: 104883 - DNA, 591 bp, Homo sapiens
atattctttctgagtaatggcgccatgttgagtgtttagcttactgttggcttctgctcattctgggcattcagtagaaggataatcatatgagcataccatgtacccaatgatgcagaagaagctggcctaatggaatttgacaggccagctgaagggtcagtcacagtgccaaatggcaaacaatacccagtgagactggtaattttttcttcaattttttttcattaattaaaaatcraagatactgtttttaccataggcgggattacatagataagagaacgaagatataaatgttaaaatgacccatcctaccattataccaaataatgtacttggagatttttggtttcttgtctctgcaactttggtctgcaattctgcaggttttagttttcaaacaagaatgtttctatcagggaaacaatagcaatcttattaaaagaagtagatttgatacttttttggggatattttggtattcttgagcctttatattcgaatactcttccggtcatgatagatataggtatagatatagagatagacatagatggagatggacatgtattatcaaggaaagtttta

SEQ ID NO: 104884 - DNA, 582 bp, Homo sapiens
ggttcctcaggtttagaagtcctggtccctaaagtgagaacactggcctgagaacacagcaagtgttccattatattacaaagttatgattgccaccatgacactttaatttcttctgttcagggaacaacaggagaaaggaggagtctcagccatgacaggtttgtaattcatatcagaagctggatatagggctgcttttacacaaagcagttgggatatttacagaacacagttgatccacttcggtacctcttggtactctcttgctttgttataaayttgcatgcctgtgtgcagcaacccaagctgagaagagtgcattctcgagggcttatacccttcagaatgaaggttgaatctaaaatgtgtctcttattaatagtatatagttggatcatgatttgtgtgtgtgtgtgtgtgtgtgtgtttctttaatctcagtttttttattggaatgactaatccatttataattcatacaattattaataatgtgggattcatatctatcaagttcctagttgtttcctatatgtcttaggtcattaagtttctctattcctgtcttctattaaatag

SEQ ID NO: 104885 - DNA, 497 bp, Homo sapiens
tgtgagttatggattgcattttgtactggattcacatttagagagcatacatttctttcatcattttatgtttacttaattcagaaatattgagtttataatggtttatagattataaacacatggcttctaaaactcrtttggcccttaaaagagggacctcttcttaccccatcaccactttctataagtcaccctaataccaccaaagttttatttgcccatgtcagtcagtctggcttattaaagcctccttctctctgctagtcatgccacccttcctaaagtcaaatatgtaagaattttgactaaagagtaattaatttggtcaatatttattgacactcaacaatgttccaacaactatggggagaacaaagatgagtaaaatacatacatagagattttagtagttcaattataccctaacttatagacaaaatggacaccccgtagctaactgagacactcaagttagagcagaaccaggttgagtg

SEQ ID NO: 104886 - DNA, 570 bp, Homo sapiens
catctagtaagtatatctacctggataattcagcatgtcaaaaataaaacccttcacctcacccagtcctccaaacctgattatcatcctgtatttacatgttctgtcccccagatttggttaatcatttggttaaatgattcatccaagatcacataccaaatagatattctccacactctcatcagagtgatctttctgaaaggcaaatgtcatcccattctcttgcttatatcctttaaactattgttcttaattggtcataaaaggtccttcaatatctgrtgcatagctatactctagcttcattttgccacacttgtacttgttcacttcattccagccttactgagaaatgaatttatttgtagttccctaacatgcaatgttcttcatctctatgaatctttgttcagactcttctctctgcctggacaccttccatcctggttcacattccttctcctacttcaaaattcagattcatatcaaatgtcacttctttgagcaagcctcccttactctatcaattgggattaaatgctcttcctctgcacttctatggcagtc

SEQ ID NO: 104887 - DNA, 615 bp, Homo sapiens
ttttcctaatcccatttgataaaagctaggtaccaggaagattaatttgtccaagcacatggaaccagtggtagagttgggacttgaccctcaaagcctctgaagacctttctagctctgaaagtctatggaattgtacaatctcattgcctatttgtgaagkctttattttcaataacatgacatttgtttcatgattagtgggaaatctatgttaaagtaccctaattgtggagtggctgtcacttcttgctaaagagcactgtactgggcctcatgctttttgaaaccaggaacagtcatcaggcatagaaattaggacaaaagggtttcaaactgcctatacacaatcaccttgggcaatcaataaatcagtatatatatgtacatacacacatgctatacatacacacacatctcaaatgattagccctatactatctgttcctatcaccttaaagtattactcatttaatttatttcttcctcagactattactataagagggcagtaatttcttagcttcattgcttaaaagagtacctaaggtacatagtacatgttcaataaatatttttcaaattaatgaatgaataagagagatacaagcagaa

SEQ ID NO: 104888 - DNA, 644 bp, Homo sapiens
cattacaactcatctatatttggactttttattttgcaacatgtgtacttgaatatggaatactgaatacgacaaaaaccaacaaaaaagttggctaagatctcctactgaaaatagctggacaaaatgccaattaggtaaagggactgcttcagataccaaattagtactttaagtgcagtaactacctggaacactgagtatgattaacaaaatgaagcaaggatcgaaggtaaaatccttgttattcatcaatgagatagaatattgcagtaaactatgacctcatgctactgattttttttttaaaatacagaagggcatgatattaacctcaagaaaagtaataayataattcagaatacactggcccagctagtttgaatcaagatcccagcaggttctccaataatcaagggaaacaagagtctaccgtaggataggcataactctgtgatcagtgtttctaaggattagtcactagacagccagttccttattctagggctttctagaagtcacacacctatatttctatttggaaagggaaaccattttccttgcctatctcaaatagctgttcattgagttaaccatcaagtatctaaaagaatgtcggaaatcagaccatcacctttcctccc

SEQ ID NO: 104889 - DNA, 644 bp, Homo sapiens
cattacaactcatctatatttggactttttattttgcaacatgtgtacttgaatatggaatactgaatacgacaaaaaccaacaaaaaagttggctaagatctcctactgaaaatagctggacaaaatgccaattaggtaaagggactgcttcagataccaaattagtactttaagtgcagtaactacctggaacactgagtatgattaacaaaatgaagcaaggatcgaaggtaaaatccttgttattcatcaatgagatagaatattgcagtaaactatgacctcatgctactgattttttttttaaaatacagaagggcatgatattaacctcaagaaaagtaataacataattcagaatacactggcccagctagtttgaatcaagatcccagcaggttctccaataatcaagggaaacaagagtctaccgtaggataggcataactctgtgatcagtgtttctraggattagtcactagacagccagttccttattctagggctttctagaagtcacacacctatatttctatttggaaagggaaaccattttccttgcctatctcaaatagctgttcattgagttaaccatcaagtatctaaaagaatgtcggaaatcagaccatcacctttcctccc

SEQ ID NO: 104890 - DNA, 619 bp, Homo sapiens
ctatgcctgcctagtctttgttctgctagcaactacctgtcctgcagcaaatgacttttctgccttttcattttccatatatttgaagaaggattattgttcaggattatcactgaagttccttgcaactctggcctctgattctagatgacaggaattgactctgttactttaaaaaaggagagcagtagatagtcktgcttaggaagctcaaaggcaaacgtcaagtttggccatagcataagacgtgtcctcttaggaggatgtttccatttcaaaccattgaagggtctggaatgatgagatcaaattcaggtttcctttgtgaagtattgtgatggcttgtaatgcttgccccatgaaataatggctgtaggtgatttttagaaaaatacatttaagaagagggcctgtaaaggcctgctttcagggaacagcaaacacatttctgcagccagtgacaaactcctgacattacggctatataatggaaagagtgacacaaacttaattttagtgttgcaagtgaaatatcataatttttggaaacaaatccttatagctttgctaaggtattaattgcaggaaattactgcatatccttttgaagtattatgtc

SEQ ID NO: 104891 - DNA, 555 bp, Homo sapiens
accctcccttagatattttagtgaaaatattggtatttttgtcttgagagattcttctctaatcagtgctcttatggaaaatctttataggatagcatagacccagctctgttcctcagagttttttctcctacctacactcacaaacatggtttgatgattctcaagtcacatacacctaccaccccaaaatgtattccttgaaaagcaactgtagcagtggggtagggccaccctttccttcarggcataatgaatctctagagaaggagaacatgaagaatacatatccacagacaccatgattctgaaacactctccaaaaaggggtgtgccccatttgtttaggagagcactgaactattttgaaataattacatttaaattcactggataatgtccactatgtactaagcactttacatcattttctctttgcaataccctcttttaataagaaaaccaaaattaggccatttttttttatgttactggggtctgagttagatcttttaacatcaattctcttattccagggcctattttaccatatca

SEQ ID NO: 104892 - DNA, 555 bp, Homo sapiens
accctcccttagatattttagtgaaaatattggtatttttgtcttgagagattcttctctaatcagtgctcttatggaaaatctttataggatagcatagacccagctctgttcctcagagttttttctcctacctacactcacaaacatggtttgatgattctcaagtcacatacacctaccaccccaaaatgtattccttgaaaagcaactgtagcagtggggtagggccaccctttccttcagggcataatgaatctctagagaaggagaacatgaagaatacatatccacagacaccatgattctgaaacactctccaaaaaggggtgtgccccatttgtttargagagcactgaactattttgaaataattacatttaaattcactggataatgtccactatgtactaagcactttacatcattttctctttgcaataccctcttttaataagaaaaccaaaattaggccatttttttttatgttactggggtctgagttagatcttttaacatcaattctcttattccagggcctattttaccatatca

SEQ ID NO: 104893 - DNA, 581 bp, Homo sapiens
aatgtacccagccatacatttcataaatgatggaaagagcttgggtctaagggttgtttgaacatggatggtaatgaatagtacagtggaaagaacttgcagtcaggaaagcccatgtggaatcctgtcttttgccatttgttaagctccatgattacaaatcaattacctaacttctgagttgtagccttcttatctgtaaaaggtgattaattatcctgctttgcagaactgttgaggggattgaaataatatagtatatacataaagcactgtgtagagcacctgatacatttgtggtgtatcaggaacttagtaaattagttccactataactactatcactaagaaaaagcctaataaggaaactattgtctcartagattctgaggacaagttcagggtgaccaacaacacaacaaccataataaaatgtttctatgtagagactgacagtggttggttgtcaatacgggttgtgcaggtcagaaattctctgccatggggatacttatgtgagtgaggcttaggatttgagagcgtaccttgagcaacccagggaatattctgtgtcacaatct

SEQ ID NO: 104894 - DNA, 607 bp, Homo sapiens
catgaaaatttccccaaactcactagagaggctaatattcaaattcaggaaatgcagagaacccctgtgagatactgtagcagatgaccagcctcaggatacatagtcatcagattcctcaaggtcaacatgaaagaaaaaatttcaaagataactagagagaagaggcagattacctacaaagaaaactccaacaggtgaacagtggaccttttggcagaaccctacaagccagaagagattgagagcctatattcagcattcttaaagagaagaaactgaaaccaagaatttcatatccagccaaactaagcttcctaagcaaaggagaaaaactatccctttccagataagcaaatagtaagagtattcattactttcttatgagaggtccttaaggtaatgctaactgtggaaatgaaagaccattacttgccaccacaaaacacacttaagtacatagaccactgatactataaagcacctaygcaatcaagtctgcattataaccagctaacatcataatgacaagatcaaatctgcacatatcaatattaatcttgaatgtaaacatgctaaatgccccacttaataggcacagagtggc

SEQ ID NO: 104895 - DNA, 516 bp, Homo sapiens
atagacattttatctctcacatcatcgcaggaggaagggtacaatataatattttgagagcgagagagaccactttcacaaaacttttattactttattacttctattgttataattgttctattttattattaattattgttaatctcttactgtgcctaatttataaattacactttatcacaggtatttatgtataggaaaaaacatagtattaatayagaaagggttcagtactatccatggttttaggcatccactgggagtcctggaatgtatcccctgggataaggggagatgcctgtacaaggaaactgcaagtgactatttccaacagcttttttgtttgttagtttttacctggtttgcaagatgagagtgaccaaacagcttgtgacccaatttcccgtactgttccagtcctttccaactgcttggggtcagcaccaggaggtgtcttgtttggtgtagtcatttttaaaatattctatgtagaaaacaagaatgcacacattg

SEQ ID NO: 104896 - DNA, 609 bp, Homo sapiens
aatgcacaaaatactggatatatctcaaagacaccagtgcatggagatctttatcatcaatgcatgttgcttaagtaccatcttaattaggaagctggcatgaaaagacagaaaatatacgcatatatayacacacaaatacgtatttattctttgtaaattgtatatatttagaaaatagatacatagcaattgtaatgaaaactaaaacacacctaagttggatacataagtgcattgtggtctaaggcaaaactctccctacagctaccctatgagtaggcctcaggaaacaacgtaacctctcattattcagatgaggaaactgacgacctaggaagtaaagacctgtagtggtcactgcagggtcttctgacttctaatccaaaatgctgacttctccctctggtcctcaaaagaagtcacctagcactctgtgataactttacagctccgactggaagaagaagaagaagaagaaaaaaaatagcctgatttattccctttttacttaaaaaacaaaatccacacgctaagaatattcctgttgttggtgtgaagggagtgatttcacatttgacaaaatgatgccaactcagacgggtgttg

SEQ ID NO: 104897 - DNA, 613 bp, Homo sapiens
agctgggatgtcttttacataatacagcatctagaaaggaggaaaaagagaaatgagctgcttctgtatgttgaagtctttattgcttgggctagatactcctagaaagtttgattttctagttgagtgaatttttacccaagaaaacacttaagaaatttaaagattaaaracgttgcatgaagacatagaacaataatgtgagaaaatatttggggaaatggaaaagtatggtatttgttcgactagagtcaaatggttttaaatttactctttctggcttccatagcacagacatttatagctggagacacttagtcaccattccacatggggacatgaatcctatgcctattctataattcgtgaattgcagttcttctgggagaaaatggttctggcaccataaaaacagaccccatttcatggaacgttactttacaattaagccctttgcactagcttctccatatgctcacagatgcttttttaaaatcacagaaaatgtgacagcctctgatgatgacagattctgtaggaagttggactaaataaagcatgaggttatctgcttggtcacagggtgtttaggggtcaggacacccatttttaa

SEQ ID NO: 104898 - DNA, 501 bp, Homo sapiens
atgcatagatcgatatatgtgtgtgatattattttatatatctatatgtttttatctatggctcctggcttatgattcccatagcccttgttaatagtcttttattataattttatggtgcttttggcctcaggagcagacctcagaaaacctttcacctatacaaggcaggactataacrtgtttccacctttgtgattgagggtcataagacctcatttcagaggaggtcctgtcccatatcctagaggaattaatgctgcacagagagatcaagaagaatctgaacagataggcctcactgggttttcccactcagcctatcagcattagattataaccttttcgtccaatcacattactacatggttgtccatgcttcagtcatgcctatccaatgaagttttcataaaaggcccaagagaacaggatttgaagagcttccagatagtgaacatgtgtaggatcctggcaggtggcatatccaggcagagcatgaaa

SEQ ID NO: 104899 - DNA, 501 bp, Homo sapiens
atgcatagatcgatatatgtgtgtgatattattttatatatctatatgtttttatctatggctcctggcttatgattcccatagcccttgttaatagtcttttattataattttatggtgcttttggcctcaggagcagacctcagaaaacctttcacctatacaaggcaggactataacatgtttccacctttgtgattgagggtcataagacctcatttcagaggaggtcctgtcccatatcctagaggaattaatgctgcacagagagatcaagaagaatctgaacagataggcctcactgggttttcccactcagcctatcagcattagattataaccttttcrtccaatcacattactacatggttgtccatgcttcagtcatgcctatccaatgaagttttcataaaaggcccaagagaacaggatttgaagagcttccagatagtgaacatgtgtaggatcctggcaggtggcatatccaggcagagcatgaaa

SEQ ID NO: 104900 - DNA, 501 bp, Homo sapiens
atgcatagatcgatatatgtgtgtgatattattttatatatctatatgtttttatctatggctcctggcttatgattcccatagcccttgttaatagtcttttattataattttatggtgcttttggcctcaggagcagacctcagaaaacctttcacctatacaaggcaggactataacatgtttccacctttgtgattgagggtcataagacctcatttcagaggaggtcctgtcccatatcctagaggaattaatgctgcacagagagatcaagaagaatctgaacagataggcctcactgggttttcccactcagcctatcagcattagattataaccttttcgtccaatcacattactacatggttgtccatgcttcagtcatgcctatycaatgaagttttcataaaaggcccaagagaacaggatttgaagagcttccagatagtgaacatgtgtaggatcctggcaggtggcatatccaggcagagcatgaaa

SEQ ID NO: 104901 - DNA, 612 bp, Homo sapiens
aaaacacacttgtctttcctgatctaaattattgctcttcttcatttatatgatgtactagcaaaggcttgcttccaacaagtttgttaaaaagaactaaggatacttaaatgctggattgaataactgagctgatttgatcattaatctttgcaggcatatgaggggttactataccctatagaaccataagccatcagtataagagattcaaagtaaaaaaaaaaaaaaaaaaaaaaaaaaagtggccattgtcctttctaactgaatcyttcagagcaggacccacaatgttatgactatgttccagaatcaggtatggaatgccttacaaatgctttcagagagaacacaagccaaactaatgtgtcaaaataatggcagaaagtaaactagacttgagtcaaataattcagaaattctcaacaaattcaggggtaagtgaaaaaaatgtggaagcagcaatctacttttattgtacattgcaaaactttctaggaatcttaaacttgagatccagaaaatggcatttaaggggagtagggcaatacatgctcagtttatagtcagtctcttcccacatgtgacctctcatgaccattgcttggtcat

SEQ ID NO: 104902 - DNA, 629 bp, Homo sapiens
tttttttaatcatgcaggagtacttcactctggtaggtattaactcagtcatttctagtaggccaggagattaaaaaaaaaaaaaaaggcagaggatgaaagaagagagacccacagaaaagaaaaaaagacacagcagaagagtcacaaaaagaagaaagagcaagtgacacgtatggtattttttatttttcckgactacatttgaaatttctgagttgcaaaaactgaatccctcatgtctcaaagcccctccaggtagttgaaaacagtcaccgtctgcctcccagaggaggttgatccttggcttttatcaactacagtaaactctatcttagaatatatttgttacaggtatcagaattccctccctggaattatattttaagatctatgtatctctatctttttcaaaggtacaataaaagaccatgttttaaaaaaaacttcttgtacacttcaactttattttttatcccctaaatgtgattgcctagatccacataagattgttaaaaactggaagctctttgagggcaattgtttttagtaatagtagcagtagttgtaatatttcttacaaaactttattaaagtatttgcttggtaatagatattatattttacaa

SEQ ID NO: 104903 - DNA, 629 bp, Homo sapiens
tttttttaatcatgcaggagtacttcactctggtaggtattaactcagtcatttctagtaggccaggagattaaaaaaaaaaaaaaaggcagaggatgaaagaagagagacccacagaaaagaaaaaaagacacagcagaagagtcacaaaaagaagaaagagcaagtgacacgtatggtattttttatttttccggactacatttgaaatttctgagttgcaaaaactgaatccctcatgtctcaaagcccctccaggtagttgaaaacagtcaccgtctgcctcccagaggaggttgatccttggmttttatcaactacagtaaactctatcttagaatatatttgttacaggtatcagaattccctccctggaattatattttaagatctatgtatctctatctttttcaaaggtacaataaaagaccatgttttaaaaaaaacttcttgtacacttcaactttattttttatcccctaaatgtgattgcctagatccacataagattgttaaaaactggaagctctttgagggcaattgtttttagtaatagtagcagtagttgtaatatttcttacaaaactttattaaagtatttgcttggtaatagatattatattttacaa

SEQ ID NO: 104904 - DNA, 629 bp, Homo sapiens
tttttttaatcatgcaggagtacttcactctggtaggtattaactcagtcatttctagtaggccaggagattaaaaaaaaaaaaaaaggcagaggatgaaagaagagagacccacagaaaagaaaaaaagacacagcagaagagtcacaaaaagaagaaagagcaagtgacacgtatggtattttttatttttccggactacatttgaaatttctgagttgcaaaaactgaatccctcatgtctcaaagcccctccaggtagttgaaaacagtcaccgtctgcctcccagaggaggttgatccttggcttttatcaactacagtaaactctatcttagaatatatttgttacaggtatcagaattccctccctggaattatattttaagatctatgtrtctctatctttttcaaaggtacaataaaagaccatgttttaaaaaaaacttcttgtacacttcaactttattttttatcccctaaatgtgattgcctagatccacataagattgttaaaaactggaagctctttgagggcaattgtttttagtaatagtagcagtagttgtaatatttcttacaaaactttattaaagtatttgcttggtaatagatattatattttacaa

SEQ ID NO: 104905 - DNA, 553 bp, Homo sapiens
cactttgccaaagaagatatacagatggtaaataaacacatgaaaacatttcaacatcattagccattaagaaatttcaaattaaaaccacaatgagatatcaccatatacttgtcagaacagctaaaataaaaaatactgtcagtattaaatgctggccatgatgtagagaaactgtayccctcatatgctgttgatgagaatgtaatatggtatggccactctggagacagtttggcactttcttatcaggttgtgtgcattgactatatggcccagaaaaattaaaacttgggttcacacagaaacctgtacacgaatgttcacagcagctttatctgtaatagagaaaacgtggaaacgaggcaattgtcctttaatgggtgaatgaatgagcaaaccatggtgcacccacacaatgaagcactactccacaataaaaaggaactgactattaatatatgcagcaacatagatgaacctcaaggcagtttatattaaaaaagccaatctcaaagggttatatactcgtataataccatttacataacaa

SEQ ID NO: 104906 - DNA, 448 bp, Homo sapiens
ttatttgactatgacagctcttacctcacagaaaaagaaattaatatgggattctgcaagctcccagtgatgtccattccaaggaagtgaccacagagtgggtttgtggaaccattggaccttctatgagcccaccctgggccagaacttcatgtattacttagctcccatatgcccatgcaacaatggggctatgatgactcttcagatgcctttaaggaagcactagggcaatcagtaccatatatactgcgacagtgctgcaggtttctgccttctggaaaactagccccttctccagttcagtggatttcaggttaggaaactggcttaggttcacaaactggacaaaaagattttttttttttttttttttggkgaggggaggcaactgtgtttagtctcctaatcaaccatccttagtttctttagcctgcatcgattgagc

SEQ ID NO: 104907 - DNA, 658 bp, Homo sapiens
tagatagttttacaggtgaaattctaccatatagtaaatggaaaagatatttaagttttatatgaagtcttgtagaccacataaaaagagtgaatattctccaacccaatctatgagatgaatacaaccttgacaacaaaacgtatcaaggatggtcctagaaaggaaaattacaggccactctcatgcatgagcattaataggaagattctaatagcaaattaaatctaatagctaactaaatgaagtaagggacagaaacataatcaaccatgagtaaattgcatttattcttggactgaaaggtggttaagtataagaacacttataaatacaatttattacctgattaaaaagaaatcatatcatcttaaaagatgacaaaaattcaacagacacttaggattgaaacaaagtgaaaagatactttaaaaatttaggacagtaagggaacgtcttaacctgataaatggtgtctaccaaaacatcattctcagtagaaggaatgttggagatatttccttaaaattgggaataagccaaggaaatcaactatcatwacttctcctcaactttgagggtcctagccagtgcagtaaaataagtagatgcataagtattagacaaactaccaccacaataaaacaacaacaacaac

SEQ ID NO: 104908 - DNA, 588 bp, Homo sapiens
caagcttgcaggagcaactttctccaaaatccctagaaataaagttctgtcacctttgtgtgcaaatttgcatataaggtctcctggttttttccacttccayggcacactatctgaaaggattttaggagtctttacaaataaataaaacaatgcaacttaaagaagaagattaattcatcaagatactctaaatgccaggtagaaatgacaacaggggatccatactggcatcttgaaaggactttttgaacaatagcagtttcttaaagcagattccccaggatggaaggtaatcacttgagaaactttccaacatttacaatggcgttccaagtagtttgaaagtcagtagttttgagaaaaaaaaattgacattgagatgcaatttgtggtaagatctaattaatttttttgctcctaagaataatttattatttacacttcttattatatatgtattttagcttcattagttggcaatgctggaaaaaattataccttcaagtcctatttatcaaattaatggtgcaatttcatagtgacacattccacattcattaaaccaagtacagtaaaaatgcattt

SEQ ID NO: 104909 - DNA, 621 bp, Homo sapiens
tttgggaaagtcactatatctttctgggatatagtcctgtgtataatgaatgatcaaattatactcattataaaattataaatgttttataaaattataaaaaaattagcaggtgaatcattctgtaagcttacattgaattccatttttaacaacggctaaagtagagattctctagttgaaagagttcagtcacagacgtgatctgcctggtttctcctttcctttccttcccttccctgttacctcctggcagcccctgagcacaaccccaggagttgtgcttttctctttatcttgtgaacatttttgatggatattactttagcattttatttttaatcactagccaggaccatttaatttttaatccatttctattgtttataaactgccatttcaatttctatagttcaaagctgtaggcttcatagctggtataactctctattctrtatatgtgtaaagttgatttttacccatggagtcactcagttttctgtggttaactttgctttggtcctatttgttggaatatctgatgataatggcggttaccaagagtgtggttgccagtaactgctcttacaatggagaaatgttatatgtatctcatttggt

SEQ ID NO: 104910 - DNA, 553 bp, Homo sapiens
atttgagcaaaagagtaagaatgtgaaacggcagaaaagacagatggctaaaggagagaacagaaatagtgactacagccttcaagtagaagaataaaaactaatagttatgtagtrtttcccatgtacgcagccctccttatatatgaacttaatcctcattacaactctaggatgtagacaccgttattaactgaattttacaaataaagaaataaaggcttaggttgataagtgacaagcccaaggtcacatagtatgtagtaaagttgggatttgattccaggcagaccaactccgaagtcctcactcttaacaatctcttctctaagcctgtaacccacacaggacaatagcagggcaatgaaattgtatggtccaataagtaattcaattattgaaatagctaaaaacagaatttaatgtgagccccttttgttactgaaatctgtgaagagtatcttcatctcatggtaaggtggtctgatttcctttgtttgaatttttttggtgctagcttcagttataaacatgccaatatttttacagggtt

SEQ ID NO: 104911 - DNA, 553 bp, Homo sapiens
atttgagcaaaagagtaagaatgtgaaacggcagaaaagacagatggctaaaggagagaacagaaatagtgactacagccttcaagtagaagaataaaaactaatagttatgtagtatttcccatgtacgcagccctccttatatatgaacttaatcctcattacaactctaggatgtagacaccgttattaactgaattttacaaataaagaaataaaggcttaggttgataagtgacaagcccaaggtcacatagtatgtagtaaagttgggatttgattccaggcagaccaactccraagtcctcactcttaacaatctcttctctaagcctgtaacccacacaggacaatagcagggcaatgaaattgtatggtccaataagtaattcaattattgaaatagctaaaaacagaatttaatgtgagccccttttgttactgaaatctgtgaagagtatcttcatctcatggtaaggtggtctgatttcctttgtttgaatttttttggtgctagcttcagttataaacatgccaatatttttacagggtt

SEQ ID NO: 104912 - DNA, 553 bp, Homo sapiens
atttgagcaaaagagtaagaatgtgaaacggcagaaaagacagatggctaaaggagagaacagaaatagtgactacagccttcaagtagaagaataaaaactaatagttatgtagtatttcccatgtacgcagccctccttatatatgaacttaatcctcattacaactctaggatgtagacaccgttattaactgaattttacaaataaagaaataaaggcttaggttgataagtgacaagcccaaggtcacatagtatgtagtaaagttgggatttgattccaggcagaccaactccgaagtcctcactcttaacaatctcttctctaagcctgtaacccacacaggacaatagcagggcaatgaaattgtatggtccaataagtaattcaattattgaaatagctaaaaacagaatttaatgtgagccccttttgttactgaaatctgtgaagagtatcttcatctcatggtaagktggtctgatttcctttgtttgaatttttttggtgctagcttcagttataaacatgccaatatttttacagggtt

SEQ ID NO: 104913 - DNA, 610 bp, Homo sapiens
taagtgaatgccccggtcccagttcacactgagggtgatgcaagattatgagtagagaggcctcttgcttgggtattttgaaaacaaaaagttccctggatgattccagtacactcttatagtaaaaaatataatatatatatttaaaaacagaatgcatccactttttcttgagtttggtgtctgtgtgtgtgtgtgtgtgtgtgtgtttaggagtgaaagtgtggaggtgagttctaacttgtgctgctcattgttctggggaagcagstgggagagatgctgaatcctggaataagctgatctgacaaatttccttactcattcttttaagacctggtttagacatatcctttctgaaggcttttctgattcacccaagcagacttgatccttttcctcttttgaccccactctaccactagcaacttattaaggggcttccaatcttgtaattaaatgcttatctgtctcctccagtccatagtcttccttcatgggctggcttcatacttttctctttaacccccatcttctgtaaatgtttgctgattaaatgaggtggaatgggcacgggaatagttcccaacctagggactgctgatcctcc

SEQ ID NO: 104914 - DNA, 481 bp, Homo sapiens
ttggaaaggtgcaccgaaacatgccagcactagagataaatcaaaacagaattctaaaaaamgttcaagtaacctacaggaaggcagaaaaagcaaagctggaaaacagaagaaataagcagagaacaaaaaacaatatggcagacttcagctttattacatcaataattgaaggcaacaccttcaaaatggcaaactatagatggaggacaaattactgatggccagtgttttgggatttagggagggatgggagtagaggtggcaatacagaagtagcccaagggagatctctgtggtaatggaatgtctgtgttttgatcacagtggtggttacacaaatctgccattgtgataagacaacatagaattatataaacatgttataccaatgtcaatttctggtttgatactatactatacaattttgtcatctgtaactattgtgggaaactgaagtgtacataggaccactctgtcc

SEQ ID NO: 104915 - DNA, 481 bp, Homo sapiens
ttggaaaggtgcaccgaaacatgccagcactagagataaatcaaaacagaattctaaaaaaagttcaagtaacctacaggaaggcagaaaaarcaaagctggaaaacagaagaaataagcagagaacaaaaaacaatatggcagacttcagctttattacatcaataattgaaggcaacaccttcaaaatggcaaactatagatggaggacaaattactgatggccagtgttttgggatttagggagggatgggagtagaggtggcaatacagaagtagcccaagggagatctctgtggtaatggaatgtctgtgttttgatcacagtggtggttacacaaatctgccattgtgataagacaacatagaattatataaacatgttataccaatgtcaatttctggtttgatactatactatacaattttgtcatctgtaactattgtgggaaactgaagtgtacataggaccactctgtcc

SEQ ID NO: 104916 - DNA, 609 bp, Homo sapiens
atcaaaacagaattctaaaaaaagttcaagtaacctacaggaaggcagaaaaagcaaagctggaaaacagaagaaataagcagagaacaaaaaacaatatggcagacttcagctttattacatcaataattgaaggcaacaccttcaaaatggcaaactatagatggaggacaaattactgatggccagtgttttgggatttagggagggatgggagtagaggtggcaatayagaagtagcccaagggagatctctgtggtaatggaatgtctgtgttttgatcacagtggtggttacacaaatctgccattgtgataagacaacatagaattatataaacatgttataccaatgtcaatttctggtttgatactatactatacaattttgtcatctgtaactattgtgggaaactgaagtgtacataggaccactctgtcccatctttgcaacctctgtgaatctagaattatctttaaataaaaaattataaaataagtaacaatattaaaataggaggagaagacagagaaatagtaaaaagcagaataaatcatttaggtgtaagtagaagaatttttttgaactgaaaagataataaagaaggg

SEQ ID NO: 104917 - DNA, 583 bp, Homo sapiens
ctctgtgttgcccaggctggagtgtaatggtgtgatctcagcccactgtgacctccgcctcccgtgttgaagtgattctcctgcctcagcttcccgagtagctgggatyacaggtgcctgacatcatgcttagctaattttttgtatttttagtagagatggggtttcaccatgttggccaggttggtcttgaacccctgaccttaggtggtctgccctccttggcctcccaaagtgctgggattacaggcgtgaaccactgcacccagcctatccttggttttcttagcttgcagctgcttcacttcaatatccacctgtacaatcacatgaccttttttttgtatgaccctctgtgtcttcacatggttttcttataagaacactagtcattggatttagtgcccaccctaacccactatgactgcatcttaattacatctgcaaagatcctatttacaaacaaggttacattctgaggttctcagtgagaaggaatttttagatggcactattcaacttaatacaatctcttaccatttgtataagtttctcagagaatatgttctttcatttaaaaata

SEQ ID NO: 104918 - DNA, 576 bp, Homo sapiens
gaagttcacaaacctcctaaactttacagatctcagattaacaacttcttggctattggaaaacagaagaaaagagtcatgtaaagaggttacttggagggacagagccagcacaaagaccacaccacagggaggaacaaataccccaacaaccttctcctctttccaccccatctcatgccagctttccctattggtgtaattcatgcagattggcttctcaggccagagaacagggtgaggaaggctggagagtgaatctggaggcaagctaaagacatccacctctcaacaatctgccaatctgcctatatctatacctcatccacctgcttcccacctctttgctctacrtagtcaagaatgatttatttgagtgagagtaagtcagaaactagaaagtactcaacccccttccagcatcaagggatatttctaccccatggaaaattttgcctcaccccactgattctacattctccagtaataattaaatctacttgatgacagatttttcaattaaaataaaggtatcatttatatgagtatttgtttaatgttttgtatcaatggcca

SEQ ID NO: 104919 - DNA, 623 bp, Homo sapiens
tagaaggtaaatggtttttcatcctatttgatagtttgtttttttttttcaaaagcatgtattttctaaatagtactgaartttggagtaaaatcacttggcttgacatattgcctcatctttaatggttattccaggctatgcatttcttctctttcaagaagagagctcagttcaggcactcattgatgcttgtattgaagaagatggaaaactctatctgtgtgtttctagccctactatcaaggacaaaccagtaagtaaataccacatgaacttcaggctacaaatgcaaatttttcaaaaattgttttgaaatgattgttaattaataaaagaacaattaaactaccatgttgagttttagtttttgaaacatccagataatttatagcaggagtccccaacccctgggcagtggaccagtactggtggtccatgatcttttaggaaccaggccacacagcaggagatgagtggcaggcaagccagcattactgcctgagctctgcctcctgtcagatcagagatggcactctattctcataggaatgcgaaccctattgtgaactgcacgtgcgagtgatctaggttgcatgttctttatgagaatctaatgcctg

SEQ ID NO: 104920 - DNA, 616 bp, Homo sapiens
aacatttgtaaaactttctttactcagtgaacaagtattttccaaatgactaatgcatgatataagaaaatactgcactggtaaatgataaaatcagagtacaaaaaataaatagaatactttcaggtaacagtgtacaggaagtacattgatattatttaatactccatatagtaattgacacaaaaattactacttttgcattttgatgtagaatcaaagaagaatattctaaaatatctgaaaaggttattgaaataattttcccatttccaaatacatatctgtgtagggccagattttcttcatgtttttcaaccaaaataacgttacagcaggttgaatccaaaaacaaataagaaaagctatgtgtcttattagttcatttgagttgctataataaaataccgtaaactgagtgtcttataaacaaacaaacaaamaaaaaaaaacattgatttttcacggttctggagtctgggaagtccaagatcaaagcactggcagatttgttgtctgttgaaagcttgttcctcatagacagcaccttctagctatgccctcatgttgcagaaggggcaagggatctatctagggcttcttttatacaagcatc

SEQ ID NO: 104921 - DNA, 570 bp, Homo sapiens
ttggctatttacatgcttttagatgcatttttatttatttatttatttatttattttaatatgaagttatttccattttccaattgcaggcttttcctcttaactgggctttgtattctatctcctattttctgaggcatttttttttcacatttaaccactttttatttactgacttattctgttgatgatgatgacgatgatgacaatgawagttgtatcagtcaggacaaagtcaggaagacagaacccatgccaggtagttcagtagaggaatataacatgggaacctacttgtaaaagtgaaaaatgagatgaaaaaccaaatgggtcatagtaagacaacccagagcttagcaacaggtgaaaggtgttatcatccctatagctggaagtacaaatgggacacaatgatgcttctcaagttcagagactgaaagtcttcaaggagagctcacaccatggagaagggacaggttctgttgagatctagcatggaacagacagaaagagagaggaagaaatataaatatcctgatttctccttttctttcttcctagtgttctgct

SEQ ID NO: 104922 - DNA, 535 bp, Homo sapiens
cacagcagagtctctatcaaataataaatagagtagaaaaaaacaaaatagtatataatttggaatgcatatttatattttttcattggttaaataatagctttattatmacagaggagattattctaacaaaagtattttaggggcattgccatctaagaagacataatattgaaaaggagagataattattttattttttaaagacagacatacttgaagtatgctcaagtaacataattatatcatttaaggctgacactgttttacctagcaaacttagtctcttttaaaaaatcatcatataatgataatcagacagatatgatttaataaatatttgagaataaaagcactgaacaattttaatggatctgtaattgtaattcccaagtatctttcctctctcaactaattgggtaatgacactgctagaattaattcaaggtcatcagcgtgcacaaagtacagatggtttcaccattttacgggtgtacaggggattcaacattactgttgcctgctgcttttcaaa

SEQ ID NO: 104923 - DNA, 535 bp, Homo sapiens
cacagcagagtctctatcaaataataaatagagtagaaaaaaacaaaatagtatataatttggaatgcatatttatattttttcattggttaaataatagctttattataacagaggagattattctaacaaaagtattttaggggcattgccatctaagaagacataatattgaaaaggagagataattattttattttttaaagacagacatacttgaagtatgctcaagtaayataattatatcatttaaggctgacactgttttacctagcaaacttagtctcttttaaaaaatcatcatataatgataatcagacagatatgatttaataaatatttgagaataaaagcactgaacaattttaatggatctgtaattgtaattcccaagtatctttcctctctcaactaattgggtaatgacactgctagaattaattcaaggtcatcagcgtgcacaaagtacagatggtttcaccattttacgggtgtacaggggattcaacattactgttgcctgctgcttttcaaa

SEQ ID NO: 104924 - DNA, 535 bp, Homo sapiens
cacagcagagtctctatcaaataataaatagagtagaaaaaaacaaaatagtatataatttggaatgcatatttatattttttcattggttaaataatagctttattataacagaggagattattctaacaaaagtattttaggggcattgccatctaagaagacataatattgaaaaggagagataattattttattttttaaagacagacatacttgaagtatgctcaagtaacataattatatcatttaaggctgacactgttttacctagcaaacttagtctcttttaaaaaatcatcatataatgataatcagacagatatgatttaataaatatttgagaataaaagcactgaacaattttaatggatctgyaattgtaattcccaagtatctttcctctctcaactaattgggtaatgacactgctagaattaattcaaggtcatcagcgtgcacaaagtacagatggtttcaccattttacgggtgtacaggggattcaacattactgttgcctgctgcttttcaaa

SEQ ID NO: 104925 - DNA, 553 bp, Homo sapiens
agaataaatgattgtttgaaaatgtaaaaaaggaaagttggaagattcaacaatacatcaagcttttaagaccagatagcttaaaaaatgacggaaggaaaacaaagagcttggaatgagtcaaggaagtagtgacatgtacgtgtgttaaacactcaaatggtagttgaacaaattgagagcaagagctagagactttagcatcatcatttagtgaaaatggattaattcttctaagaggtagtttatagaaaccgagaaccagcgactgagtttttggcctcactctcarttaagagtgtctgtgaaaaaatgaaaaccagataagacagaaaaaaaaagattataagaaaaagaggataaaactggaaaattaacctggtgatctagaggggagaatgtgtctaaaaaagagatgttttagagaaaaacaaagtacataaaagacagagtagtctggagttccaaaaagaaagtaattagtggaactgtttatagcctgtctactaatcaattgcagaggaaaacattgccactgaattctaattgctaa

SEQ ID NO: 104926 - DNA, 525 bp, Homo sapiens
tatgaaaatatgctcactcattagagaaatgcaaatcaaaaaccacaatgagagactatctcacaccagtcagaatggctattattaaaaagtcaaaaaaataacagatgctggtgaggttgcagagaaaagtgaacacttatacattgcgggtgggaatgtaaattagttcagccattgtggaaagcagtgtagtgatttctcaaagaactcaaagtagtgttagtagtattaccattcaatctagcagtcctgatattgagtatatacccaaaggaatataaattgttcttccataaagacacatgcatgtgtatgctcatctcagcgctattcacaatctcaaagacatggagtcaactcaaatgcctgtcaatggtagattggataaataaactgtggtgcatattcaccatggaatactacacagtcatccaaaagaatgagatcatgtgctttatakcaatgtggatggagctggagaccattatcctaagtgaactaccacaggagcacaaaacacaa

SEQ ID NO: 104927 - DNA, 604 bp, Homo sapiens
gaaccttcttggaattatgaggcatttcccagacccacttcatgtcccagaatctctgttttctaataattttcctaccaaatgcacactgtcatacacacccaccaccctgtcctgagacttgctttcttctagagaaattccagagcctcttgccttttctactcattttctatttcttgcctctatttctttttctgtctttcttattcatttggagttaattctataaaagaatagaaaactagtgtgaagttatgttgcagaatatgcccatgttttaattatttgacaatatccatatgaacagatgttgcttttgaagaaaaataatacgaataaatatgtaagcctttgcttctttgtctatcctcatcaattggtaaataatgtatagataaattatttatattggtgatctagaaacatatataaattaagactgaaagaattaatatcaaatttgttcaaatacacaaatatgtaaacaaacatagaagagtttactgtraagagaaaagaataagtcatataatacatgaagcaagaaaacatttgtttgaataaaggatctaagcataatacaggaagtccatgctttatc

SEQ ID NO: 104928 - DNA, 567 bp, Homo sapiens
agctcaccatacaagtgatttaggataattttattatagaaataaaatgcatccaccataatagtcaaattattcacgatcttgagggctttaactcttgctagtatcaagtttctggcaatatgcagagatttttgtttgtttgtttactggtgtacccccaaacacctacaacaataactgacacagagtaggcrttcaataaatagttgttgaatgggtggatggatgaatctgcctcagaattgatatgacaaacaagtgtgtcatgacaccagaggcggagaacaactgcggttagaaagcacattgacactgaaggcttttcagcgaaggcttgacaggatcatatgcatgtttctgaaagatcactctgcctgctgtgtgaaggatggagcggagaggaagagctcagcagtggggagacccgttagggggccgaggcactgatgcatgcaggggatgatgagcctctgaaccatgacagtggtgacggggctggagagaaaggaagacattcaagaaatatttaatagaactgaacagaacttaatcaaagaatgtctt

SEQ ID NO: 104929 - DNA, 567 bp, Homo sapiens
agctcaccatacaagtgatttaggataattttattatagaaataaaatgcatccaccataatagtcaaattattcacgatcttgagggctttaactcttgctagtatcaagtttctggcaatatgcagagatttttgtttgtttgtttactggtgtacccccaaacacctacaacaataactgacacagagtaggcgttcaataaatagttgttgaatgggtggatggatgaatctgcctcagaattgatatgacaaacaagtgtgtcatgacaccagaggcggagaacaactgcggttagaaagcacattgacactgaaggcttttcagcgaaggcttgacaggatcatatgcatgtttctgaargatcactctgcctgctgtgtgaaggatggagcggagaggaagagctcagcagtggggagacccgttagggggccgaggcactgatgcatgcaggggatgatgagcctctgaaccatgacagtggtgacggggctggagagaaaggaagacattcaagaaatatttaatagaactgaacagaacttaatcaaagaatgtctt

SEQ ID NO: 104930 - DNA, 558 bp, Homo sapiens
gttcgatcttttgactgtggcaataaactatcatctgcctatccttggtctgacacagtatcccacctggagccattacgacttataagacaaatccaaattttggrgagttgagttctatttcatttagtatcacccatggtcatactgcaatagccagataaagatcagactacagagaatttgtaactcatttaagcgagtcttccccatctccctttctctaagctcatcacagccacaattggctccctcagtagtcacagaggaagccaaagtaatcaggtaacacatacaaaagtaaaaagtaacaacaaagagaagttttacagaaagagacgtctagtaacacaggaaagtgtaaggtaaaggggtagttgtgaatcaacatggaaatgtccctggaatgcactaataaccttcaatgtgaataattctcctgtgtatatttgaaatttgatgggatatatctaacgtgtggattagcaatatactaattataggtttatcctacagtaaccagtcattatgaaaaggtgcttaagtcttgctaagatt

SEQ ID NO: 104931 - DNA, 497 bp, Homo sapiens
ttatttatgcaaatacaaaaatctaaacattctcatttcttgtaagtattttgactgatgagaagataagagaattaagacattgagacacaaaaccatttttaacgacctggagcactctactgctctagaacaatcttaattaagaacatatgctaattattcacctctcagcataaaagcttattaaaaccaattggctgcaaatgaaagatgaagcttatgcatttctcttgctttatatagcacactgcatttttctttcattccatgtgtatgtgaaacacaaacagcctccgagggacttttattatgatctgttgctatgaagaagatactgccgggtgcagtggcattatgtgacatttgcacagccagaaacaaaactgtagcctaacagaagaggtcaagagcacagtttgaggagtgccaagrggataattttatcttttaaatgctttggctttgaaagttaatgattcaggccatggaattca

SEQ ID NO: 104932 - DNA, 630 bp, Homo sapiens
ttatattcgttgtttctgtgtagtgctgctctttaccaggctaataaatcctggtagacatgcaagagcttgctcytaatccaaaataaacaaaatgtgttttactgagaaaattgcagacatatcaaagggtagtttgacagcacgggtacagaatactatcaagacattttcttctgttttacatacatgggtaattcttgcttgaatgcaagagggctgaataccagctttatttaatatattttgtgtcaacttctgtatacagatttttttttcttgaggtgagagaagaggaaagaggagaacgttaattccagatagctttaagcaaatgttagaaaggcgaacatttataggtttccaaatatcttttggctagctgacatttacaaacacggagctaggtaagcttttccccctagcaatattaaggctctggcagcaagtaaaggatatgtgaagtgaaatatgcctttcaaacatagtaaagaagaagactgtttgtaaccaccgttggtgaaaatcacgagaaccaagtctttcttgttattttaaacatcctataaaagcattgcaaaagtttatattgctggttaaaatatttgggactattttgtccatttccac

SEQ ID NO: 104933 - DNA, 630 bp, Homo sapiens
ttatattcgttgtttctgtgtagtgctgctctttaccaggctaataaatcctggtagacatgcaagagcttgctcttaatccaaaataaacaaaatgtgttttactgagaaaattgcagacatatcaaagggtagtttgacagcacgggtacagaatactatcaagacattttcttctgttttacatacatgggtaattcttgcttgaatgcaagagggctgaataccagcyttatttaatatattttgtgtcaacttctgtatacagatttttttttcttgaggtgagagaagaggaaagaggagaacgttaattccagatagctttaagcaaatgttagaaaggcgaacatttataggtttccaaatatcttttggctagctgacatttacaaacacggagctaggtaagcttttccccctagcaatattaaggctctggcagcaagtaaaggatatgtgaagtgaaatatgcctttcaaacatagtaaagaagaagactgtttgtaaccaccgttggtgaaaatcacgagaaccaagtctttcttgttattttaaacatcctataaaagcattgcaaaagtttatattgctggttaaaatatttgggactattttgtccatttccac

SEQ ID NO: 104934 - DNA, 630 bp, Homo sapiens
ttatattcgttgtttctgtgtagtgctgctctttaccaggctaataaatcctggtagacatgcaagagcttgctcttaatccaaaataaacaaaatgtgttttactgagaaaattgcagacatatcaaagggtagtttgacagcacgggtacagaatactatcaagacattttcttctgttttacatacatgggtaattcttgcttgaatgcaagagggctgaataccagctttatttaatatattttgtgtcaacttctgtatacagatttttttttcttgaggtgagagaagaggaaagaggagaacgttaattccagatagctttaagcaaatgttagaaaggcgaacatttataggtttccaaatatcttttggctagctgacatttacaaacacggagctaggtaagcttttccccctagcaatattaaggctctrgcagcaagtaaaggatatgtgaagtgaaatatgcctttcaaacatagtaaagaagaagactgtttgtaaccaccgttggtgaaaatcacgagaaccaagtctttcttgttattttaaacatcctataaaagcattgcaaaagtttatattgctggttaaaatatttgggactattttgtccatttccac

SEQ ID NO: 104935 - DNA, 630 bp, Homo sapiens
ttatattcgttgtttctgtgtagtgctgctctttaccaggctaataaatcctggtagacatgcaagagcttgctcttaatccaaaataaacaaaatgtgttttactgagaaaattgcagacatatcaaagggtagtttgacagcacgggtacagaatactatcaagacattttcttctgttttacatacatgggtaattcttgcttgaatgcaagagggctgaataccagctttatttaatatattttgtgtcaacttctgtatacagatttttttttcttgaggtgagagaagaggaaagaggagaacgttaattccagatagctttaagcaaatgttagaaaggcgaacatttataggtttccaaatatcttttggctagctgacatttacaaacacggagctaggtaagcttttccccctagcaatattaaggctctggcagcaagtaaaggatatgtgaagtgaaatatgccwttcaaacatagtaaagaagaagactgtttgtaaccaccgttggtgaaaatcacgagaaccaagtctttcttgttattttaaacatcctataaaagcattgcaaaagtttatattgctggttaaaatatttgggactattttgtccatttccac

SEQ ID NO: 104936 - DNA, 585 bp, Homo sapiens
acttatttcttgtggtttcagccactgatttcagaatatgcatgaaaaatatatttcttctgaatatttgatttcatgatcccaagtagacacatctctgtattgggtttcaacaagtccacagaagttaaatacccacttttagccagctttgattttcagaagtttaattctgacatttagtgatatacaatatgtaaaacaacctggcactatatctgtcatatcataagtacttggcaaatatttcagtttactctttctcataattgaataatggctcaatagtaaaactctgtagggaaaaatttaacctyttatttatcagttacaaatagtttaagacagataatacccctttccttgttagctttaatgatgagtcattaaaattgtgagcaatgtatttattttgaggaaactattttttactaaggatttttttttttttagaattttatgagtcttcaaaataactagaaaatcttaaagtgttaccaaacagaagtggacatttaataaacacctcaactttaatacttacagaaaatcatttgaaggctgtcactcctctgggtattataa

SEQ ID NO: 104937 - DNA, 495 bp, Homo sapiens
aattccaagccaaatctacacaggagtgaaaaattctgtttagataaatgcaactattcaaacacatgctttcaaataacacttcctccttagtgctgagggccatcttgatactttgttaaaatgattcaatcaagagacagaatagagagattgagggagagtgtgatgctttctttaatgccctgatcctgagttagatgtatcagcagtgtgtcctggagctttttctaaacctcctgtttccacatctaccaccttctatcacactggattctttacatagtttccaccacgacactgtaaatgttaaggatgtcaaatcaagattgaatcttggtttttccattgcctttatattatagcaaagtacctggtacatagtttatagttaataactatcatctaagtggattrgttaccctacattatcttcccaaataaatgccaatttcaaataaataccaaattttgccaactctctattcaaaccca

SEQ ID NO: 104938 - DNA, 561 bp, Homo sapiens
aattccaagccaaatctacacaggagtgaaaaattctgtttagataaatgcaactattcaaacacatgctttcaaataacacttcctccttagtgctgagggccatcttgatactttgttaaaatgattcaatcaagagacagaatagagagattgagggagagtgtgatgctttctttaatgccctgatcctgagttagatgtatcagcagtgtgtcctggagctttttctaaacctcctgtttccacatctaccaccttctatcacactggattctttacatagtttccaccacgacactgtaaatgttaaggatgtcaaatcaagattgaatcttggtttttccattgcctttatattatagcaaagtacctggtacatagtttatagttaataactatcatctaagtggattggttaccctacattatcttcccaaataaatgccaatttcaaataaataccaaattttgccaactctctattcaaacccacatctttcattttcaggaaawgacatattctctttaatgaaaataaggacataaagtatcacctac

SEQ ID NO: 104939 - DNA, 643 bp, Homo sapiens
tttttttttcctgaggagtaggtctcaacaataggcttaaaatatttagtaaaccatgctgtaaacagatgtactctaatccagactttgttgtttcatttatagacaacaggtaaagtagatttagcrtaattcttaagggctcaggatttttggaatggtaaatgagcactggtttcaacttaaagttaccagctgcattagcccctaacaagggagttgtcctgtaccttgaagctttgaaggcaggtgttgatttctcctctctagctataaaagtcctagatggcatcttctttcaatagaaggctgttttgtctacattaaaaatctgttttctaatgcagccaccttcaccaattatcttagctagactttctggataacttgctgcaagctctatatcagcacttgctgcttaaccttgaacttttctactgcggagatgatgtattttcttgaacttcgtaaagcaacctctgctagcttcaaacttttcttctgcaacttcctcacctctctcagccttcatagaattgaagagatttagggccttgctttgaattagtcttttacttaaggaaaagttgtacctggttgaatcttctagacagagcacttaaactttctccatatcaacaac

SEQ ID NO: 104940 - DNA, 585 bp, Homo sapiens
caaccactaatctttcttttactataaacagtttgaatgttctagaattatatataagttgagtcaaatattatgtacttttgtttttcactcagcataattattttaatttttatccacattktgtgtataatagttcatatctttttattttggggtagttgtacactgtatgtccataccgcaatttatttctccattcacctgatgattggcatttggattgtttccactttttagctattgcaaataaattgctacaaacatttgttttcaagtctttatatagacacatgctttcatttctctttcataaatacataggagcaaaatgactaggtcatgtgctaggagtatgtttagctttttaagaaactgccaatacagtttttcagggtggctgctagatgacatgatcttatatgtagaaaatcccatagtctcatcccaaaagcttcctaagctgataaacaatttcagcaaagtctcagaatacaaaaaatcagtatgcaaaaatcactagcattcctatacatcaacaacagtcaagctgagagccaaattaggaacaaactcccattcaca

SEQ ID NO: 104941 - DNA, 641 bp, Homo sapiens
ttgttctctttgtttagtattgctttggctatttgggctctttattttttgtttccatgtgtattttagaatagttttttttaagaataattctgttaaaaatgtcattggtaatttgataggaatagcattgaatctgtcaattgcttggggcagtatgcccattttaatgatgttgatcctttctatccatgaatatggaatgtttttccatttgtttgtgtcatctctgatttctttcagctgtgttttgtaattctctttgtagacatctttcacccccctrgttagctatgttcctagatattttatttttttgtggcttttgtgaatgggattgcattcttgatttggctgtcagcttggacattgttggtgtatagaaatgccactgatttttgtatcctgaaactttgctgaaggtgtttatctgatccagcagcttttgggcagagattatggggttttctagatataaaatcctatagtctgtgaaaagaggtagtttaacttcctttcttcttattttaatggttttaattttgtttccttgcctgattgctgtaactagggcactatgtggaataggaatggtaagaataggtattcttgtcttgttacagttcacaaggggaatgctt

SEQ ID NO: 104942 - DNA, 504 bp, Homo sapiens
tgttttgtaattctctttgtagacatctttcacccccctggttagctatgttcctagatattttatttttttgtggcttttgtgaatgggattgcattcttgatttggctgtcagcttggacattgttggtgtatagaaatgccactgatttttgtatcctgaaactttgctgaaggtgtttatctgatccagcagcttttgggcagagattatggggttttctagatataaaatcctatagtctgtgaaaagaggtagtttaacttcctttcttcttattttaatggttttaattttgtttccttgcctgattgctgtaactagggcactatgtggaataggaatggtaagaataggtattcttgtcttgttacagttcacaaggggaatgcttgtgaacagtttttgcctgttcagtatgatgttagctagtggtwtgtcatagatggctcttattattttaaggtacattctttcaatgccattttgttgatggttattat

SEQ ID NO: 104943 - DNA, 539 bp, Homo sapiens
ccgtgtcagttgttcccctctttgtgtccatgtgtactcatcatttagctcccacttttaagtgagaacatgcagtatttggttttctgtttctgtgttagtttgctaaggataatggccattagctcaattcatgttcctgcaaatgacatgatctcattattttttatgaatgccaagtattttataatttcccttttaacttctcatttgatccacagatttttcagaagtgttatttaatttccaaatattatggcattttcagattgttatcattaatttctaattcaattacattatagtcagagtacattgtataattttaataattttaagtttaggcttgctttgttgggttgagtactctacaatgtcagttrtgtcaagatggttgattgtgttgtttaaggcttatatactcttattattttgtgtctacttaatctattaatttattaaaataaagtgttgaatctgcaactataattctggatttgtctccttatggtgtttttcagctttgctttatgtgtttt

SEQ ID NO: 104944 - DNA, 657 bp, Homo sapiens
cattctggaaaactcatcttatcttaatagtggcagagtcagtgactcagagcagcccacatgggacaagggaactcatgacagctgcagctgaaagagtgagagaagagacactttctttttctaagcataaaatgcctatgatggctcctcaattcaactaaccctttagcagagcctctatatactaggtgtataaaatagttgttggcagcttgtttaaaacatacaaagaaaaagtaaaaagaaaatacattttctttagccatagagctaagatgatatggggttatttagtgccacctctattattaaatcaaatataatttaaaaacaagaatggtccatttcaatgtcaaatgartttcattcagcacatgtctgttctttactctgcatgttaggttttatgccttctggagaaaaatttaagtttagagtgaaactagtcctatatataaacatatccgaaaacgagaatatgtaggaaaatccccaaatgtctaagatttccgtttctgtcataaatactgtcattaattaaaatgtactgggcagccaccagatgcacagaactattccaggaacaatataataataagatttgacatgtgtctctaaacaaaaaacaagcttagggtttaaatatttcaggca

SEQ ID NO: 104945 - DNA, 568 bp, Homo sapiens
tgactgcatttttggtctgtctgtgccagctctcagggcctccctttcatgaatgtatccatctgccccagaatcctaaacatttcaatcaatactcctctctgcttggagttaagaagatgtcaaggaataagatacctggaaacctaaaatgcaagtgtggtaatgcatggtcactttgccacagtgagtgcgctcagcttcatgccaaggagtgcagcctgccttcttgccagcagtccagacattcatcaaacagaccacacagcagaagcagcaggcacagaagcagaagggatctgtccaccagaagagaaatcttccacacatccatgggaaaaaaaaatatatacatgatgggaagaatagactaacgctgacagtagtggcagagtgtttgtgatgagrtaaagtaattgaaactcagcagtaatgctgactgggaacagaaatagcggggaacaacacatcattcagtgtaaactcagagaagcagaccacacaaataacagaaacatcagtcattgttttttggacttaggcagaccaggaaatcaagaccattaga

SEQ ID NO: 104946 - DNA, 590 bp, Homo sapiens
aaatgaaatttgcatattttaaaatcttaatttggttcctttaaagttaaaaaaaaactccatgagaaattcagacttttaggtattcttatagtgtaccctgcttttatgtttcccttaaaaaggaaaagcaactctcatccggaagcagyacaagttactgaaatacatcaggtctgggagccaatcagacctagttcaacaatcaaatctgtcagtaattttcttaactttataccatacgctatattgatggagctggaagcaaaccacaagtaaccctttgattttatcagtccatttctctgaaaaagttttaaatcaaagtgttaggcctactccagtatttccatacctctcctattctaagagcacatggataggtaaagccaaatcaaataaactctgaccataaaccattttgctatgatttacagtaacaatcacaattatgtatttgaagtcattgaatattaagagaagcataggccagcaaaaggaaatgtatttttaatctttatcaaaaacagaagatgttctcagccttaatcctttaggtttggcctagaaataagaattcatattgactc

SEQ ID NO: 104947 - DNA, 590 bp, Homo sapiens
aaatgaaatttgcatattttaaaatcttaatttggttcctttaaagttaaaaaaaaactccatgagaaattcagacttttaggtattcttatagtgtaccctgcttttatgtttcccttaaaaaggaaaagcaactctcatccggaagcagcacaagttactgaaatacatcaggtctgggagccaatcagacctagttcaacaatcaaatctgtcagtaattttcttaactttataccatacgctatattgatggagctggaagcaaaccacaagtaaccctttgattttatcagtccrtttctctgaaaaagttttaaatcaaagtgttaggcctactccagtatttccatacctctcctattctaagagcacatggataggtaaagccaaatcaaataaactctgaccataaaccattttgctatgatttacagtaacaatcacaattatgtatttgaagtcattgaatattaagagaagcataggccagcaaaaggaaatgtatttttaatctttatcaaaaacagaagatgttctcagccttaatcctttaggtttggcctagaaataagaattcatattgactc

SEQ ID NO: 104948 - DNA, 415 bp, Homo sapiens
gtttgaatttttatagcaaccatcttacygctgtaactgtgttaactttgaaactcaaacactatagaagattcattgtttcacaacattttaaaattggtttggatccagcaatttctaaaacctggctaatttacttttgcatagtgaaaaagagcaattagcaaagaatactttcctccacagccatagtctgttcatttctgggacagtgtttgtggctctgaatcaaaaaacatcagaataaacctaatgatatttcagaagtttcagggatgaacacctaagaaatgagaggcatagttatatttcattctgtaactacggagcagacgggatgtatcactcaaatttataaaatcacgaagggtataaatagatgaccactgattcagtcaccataccttgaaaacct

SEQ ID NO: 104949 - DNA, 512 bp, Homo sapiens
tacaatggtactctcttctttaattccttttacattttggtaaacacagaagcaaccagattataatataaaaatgggtatctctttcacaagcttactttcttaactgtcatgtatgtggatatctttttttcttcagccaaataataaagtccatcttgcatagaccatactttttagaccctcacatagtgcctgacatataaaagtacacagcaaaaatttttacttattcatttgtcaaatatttattgagcacttattatgcggcatctcytaagttggtgccaggaatacagcacttggacacagactcagtctctctatccctctaaaatttacagtctaggagacttaaagcaaatatttgtttaacagtcactcatcaaatatttgtggagcactcactgtaggtcaggaacaaatgattacttaatatttctatatttacaattgtaatcattgttcttaataaagtaaacaaggtgccgtgagttcatatatgtgatgca

SEQ ID NO: 104950 - DNA, 491 bp, Homo sapiens
tgactgatattttaaaatatgtgttctctttttttttcagggcttcccgtagtagtcagatatattggcctgaagtgaaagaaagggatttagtttcaatgttctgcatatggcagatcagttatctcagcaccatttattgactcccagcacmatagggagtattttccccattgtttgctattgtcaactttgtcaaagatcaggtggttgtaggtatttggctttatttctgggttctctattctgttccattggtacatgtgtctctttttgtattagtaccatgctgtttttgtcattttggttattgtagcttcatagtacagtttaaagttgggtagtgtgatgcctttaggtttgttcttcttgcttagattgctttggctatttgggctcttttttgatttcatatgaattttagaatagatttttctagttctgtgaaaaaataatattggaagtttgataggaatagcattgtatctgtc

SEQ ID NO: 104951 - DNA, 496 bp, Homo sapiens
tctcagcatccaaagcatctgaaactatgtgctggagatccttaaataacaggctaaggaatttctaggcaattaagctaggcacatgataccatgcccagctaacgtttttgtttttttgtagagacagagtcttgctttgttgccaaggctggagtgcagtggtgcaatcatagctcactgcagccttgaatcctgggctcaagcaatcctcctccctaattctcctcccacctcagcctccctaatagttatgattacatgtgtgtgccactgcacatagaaagctggattaaaaggccaagcaaaaaaatattctgtaaagttatgtttgcctcttggttcaagccacttatcagaaataaattctctggtcacagaacgcagatttygagcccagaatatatctcatatttccagtacactccccagtgtaaaagaaagaatcaataattacaaggctaaaagtgatgggtgatcataagtccatgtcatg

SEQ ID NO: 104952 - DNA, 629 bp, Homo sapiens
gagaaaggactctgctcttcctgtcttcctctattatttgtaataattttcagtaggctgccctcttttcataaagcaggtagaggtgtttaatggctcttgaagcaaagcagagcttatgaaattcctctgactggtcacattctggamtaagcccaaacacgacagtcctctccaggcctgaaaattgctgaatactgtctaaaacaatgtgacttccccaaacaccggtggccgggctaaacacaacctctgatggtctgtgggtctcaattaattccattgctttgagtagtgcaagcctatagcgtcctctgtcctcccctctcctgcacagaattgctatatctttgggcagatagccacactggaacaggctgtgacattttcttgccacatagttagctatttgttctgttgtcagattagtctttgtctcacacaccccaggcagagcctgggcacacgttgcttcctcataggcagtctcgctgaacaatgctaatgtgtctggagacatgttggagggaggattttctttgatcctcttcatttcttctttcataaccttcgctatttccagagcacagtggatcccactggtgattgtttttcgaggaaactgagca

SEQ ID NO: 104953 - DNA, 629 bp, Homo sapiens
gagaaaggactctgctcttcctgtcttcctctattatttgtaataattttcagtaggctgccctcttttcataaagcaggtagaggtgtttaatggctcttgaagcaaagcagagcttatgaaattcctctgactggtcacattctggactaagcccaaacacgacagtcctctccaggcytgaaaattgctgaatactgtctaaaacaatgtgacttccccaaacaccggtggccgggctaaacacaacctctgatggtctgtgggtctcaattaattccattgctttgagtagtgcaagcctatagcgtcctctgtcctcccctctcctgcacagaattgctatatctttgggcagatagccacactggaacaggctgtgacattttcttgccacatagttagctatttgttctgttgtcagattagtctttgtctcacacaccccaggcagagcctgggcacacgttgcttcctcataggcagtctcgctgaacaatgctaatgtgtctggagacatgttggagggaggattttctttgatcctcttcatttcttctttcataaccttcgctatttccagagcacagtggatcccactggtgattgtttttcgaggaaactgagca

SEQ ID NO: 104954 - DNA, 608 bp, Homo sapiens
tgtaagtgtaggtggcaggggctaggagaggggggagacaggaaaatatagtagtggtgtcctgctatttaaaaaacaaacccttttcaragagtcccttattctcattatccttaagagaggaggttggattgttttccctaccagcctgcctcctgctgtatcttacaatgaaatcttcagccacaactgcgtttgctgtctcttcctatgaaataactctcagaatgcttaatttgacttcctataggttgagtagaaatgggctgagaggcagggagccttaacataatatggggagacaaagaggactataaaacaagaaggtaaatggtgtgagctcaagtgtcttgggtattgctagattctttccagtttgaacatcccttattactggtttcctgaagtcttcttatgtccctgctctgcctgtagtttgctgagaatgaggcttctgcattgttggatcccaattttacctaagcatggagctttgacttttctaactaattctttaattttttgatacttggccattagactctgacatattaccttatagaatgaattcagcaaataaattataattcatgatattaattttcatt

SEQ ID NO: 104955 - DNA, 608 bp, Homo sapiens
tgtaagtgtaggtggcaggggctaggagaggggggagacaggaaaatatagtagtggtgtcctgctatttaaaaaacaaacccttttcaaagagtcccttattctcattatccttaagagaggaggttggattgttttccctaccagcctgcctcctgctgtatcttacaatgaaatcttcagccacaactgcgtttgctgtctcttcctatgaaataactctcagaatgcttaatttgacttcctataggttgagtagaaatgggctgagaggcagggagccttaacataatatggggagacaaagaggactataaaacaagaaggtaaatggtgtgagctcaagtgtcttgggtattgctagrttctttccagtttgaacatcccttattactggtttcctgaagtcttcttatgtccctgctctgcctgtagtttgctgagaatgaggcttctgcattgttggatcccaattttacctaagcatggagctttgacttttctaactaattctttaattttttgatacttggccattagactctgacatattaccttatagaatgaattcagcaaataaattataattcatgatattaattttcatt

SEQ ID NO: 104956 - DNA, 585 bp, Homo sapiens
gtatatgtgtgtacatatttacacatatgtttttgtttatatatttacacatatttttctgtatgtatatatattattttagagagcatgttataatatccactaatactattatcattcttttttaaaaatatatttataatctaactctaaatatgaatatttaaaaacatatttttatgtaatgagatccattgctcaaaatggttttctagtctcaccatcttcctttatctctactcagactttttctgttttgtttttctcgtggcccaggctggaatgcagactgcaatcatagctcaygacagcctcaaactcctgggcttatccttcagcctactgagtagctaggactcggggtgtgtgccaccatcatgctaatttttgaaacaattatttttggtagagatggggtctcaatcttgctgtgttgcccaggctggccttgaactcctggcttcaagtgatcctcctgccttggcctcccaaagtgctgggatttcagatgtgagccactgcactggccagaggttttgtttgtttatattgagtacttttgtgcatattagtctcagtaaggaa

SEQ ID NO: 104957 - DNA, 592 bp, Homo sapiens
tcatgttgttataaaatatttaaatatcactggtaaaacaaataagtaaaatctataaattatgggaagatattacctaatcttttgaaactaactttaatacctgtctcctaaacatattagtaaagccccacacttaatagctcagtttcttttaggcccatgtcccgcttactcccatccccagctcctaataagttgaccacacctcctttggagaaaaggggcctcagctgaggacaggaaccaatctccaatagcattataaccaaatctgcactttttaaaactacatttcaaataatagccattctgacttaggtgagatggtatcttattgtgattttaatttgcacttctctgatgacccacgacgtggagtatttgttcaygtttcttggctgcatgtatgtcttcttttgagaactgtctattcatgtccttggtccgctttttaatgggttgtttgttcttttcttgtcaaattgcttatgttctttatagattccagatattagaccttcactggatgcatagtttgcaaatattttatctcgttctgtaggttgtctatttactctgctgatagttt

SEQ ID NO: 104958 - DNA, 566 bp, Homo sapiens
tgtcctttaagatgtcttaggtatttttaaatgtcgtttctttgccctcatgcttgaatgataatcagtaattccaacttgtaggttctaggacagcttcaaagaaagatggcatttgacatggttctttaaagataataagagctttgatagaggatgagagatgagccctctgtgttgatggaacagcatgtattaactcagaatgaggttggcaattctttactgaaatgtagtttacaagagaatacttattgtgaactgagtataggaaggaaccttccctgaccattctctatattcctcattacttacaatagtatctataacatagttatcaaggtgttgaatgatggcataacttaaaagttgcttagaaatagataatgccaaaacgaatttaatgttagacttcaaatattactattcagtgttttcatgtatatcatgggtatttgtaagatcattctggcatctattctgtgatagatggatgggttggtrtggcgctgcagaaagggaggcagggaagaagtcttatttaatagtccaggcaagactgatga

SEQ ID NO: 104959 - DNA, 614 bp, Homo sapiens
cccacagtgctttgcctaactgtcttagagtctaaggtaaaagaaatattcagtaatgctgatcttgcctttatttaaaattttgatattttgttcatcatcaattttttgcattcattttttaaaaatactgctttaaaatattgtttatctcaattcctaagttttttggcaccctttaaaatttttcagacaatgcaaatgccccacttgcttcatctcagtccaggccttgccattctgcttctattttcatatgtttagaacacttttttttttttttttttttacctagtatgaggtgagtctaaatctggcttaagccaatggaggataccagaattatccaaagaatagataaggcccctaccatctggctttataaggccctggaaataaaatatcctgtttacttttttatgacaccaaaaatatcaaaacacaacaggaggcatgttaagcccagagtttacactgggaagatttgatttagtttcattgttygcagatttttgtttgctttattgtctactttcagttttgtttctatttatgtctttcttttggcagcaagcaatggataatctcaattagtggttcaggagagatgaaga

SEQ ID NO: 104960 - DNA, 595 bp, Homo sapiens
aacagaatagagaatataagtctatcagtagagaacataatgagtctaagactcattatatatggsaatttagtatgtaatataatggcatttcaaataattaggtgaaagacagactacttactaaattgtgttagctatggctattcatatgcagaaagtaagacagatatttttcacactttattttacagaaatgtgaatttcaggtggattcaagatttccatatttaaaaactaccaaaaatagaaaagtcttaatatgcattatctagaacacaaaatatagaagtcatatgacatttttactacaatgaaatgtaaagattttatagtaataaaagacattaacaaaatttaaaagcatgcaaagaatatgaataatatttgatatatctgattcaaatgattaatattcataatatgttagatcttgaaaatcatcaatttaaagataaaacccaacatatagacaaaaaatacataatccatgagatgtccaactttatcattaattagacaaatccaaaattatttttaaaacgatttactattttttattcattagattacatgaaatttaaaagtgttaata

SEQ ID NO: 104961 - DNA, 595 bp, Homo sapiens
aacagaatagagaatataagtctatcagtagagaacataatgagtctaagactcattatatatggcaatttagtatgtaatataatggcatttcaaataattaggtgaaagacagactacttactaaattgtgttagctatggctattcatatgcagaaagtaagacagatatttttcacactttattttacagaaatgtgaatttcaggtggattcaagatttccatatttaaaaactaccaaaaatagraaagtcttaatatgcattatctagaacacaaaatatagaagtcatatgacatttttactacaatgaaatgtaaagattttatagtaataaaagacattaacaaaatttaaaagcatgcaaagaatatgaataatatttgatatatctgattcaaatgattaatattcataatatgttagatcttgaaaatcatcaatttaaagataaaacccaacatatagacaaaaaatacataatccatgagatgtccaactttatcattaattagacaaatccaaaattatttttaaaacgatttactattttttattcattagattacatgaaatttaaaagtgttaata

SEQ ID NO: 104962 - DNA, 598 bp, Homo sapiens
tagaacaactgtttaattcagaccaagtagcacttaccagaaaggaggaagggcagataaaaaattctcgtgtgacctttctgattacatctcttgagtgtgtaacagccattacacacttagggtccttatacacttagttggcaattcattgagagcatgaccatgtcattaagctgactgcttttgagtttagatcttgtttcagaaactgctgaaaagcagggccagctacataatttacctggaccaaatgtaaaacagccacctgggatatcaatctccccttagcatgggtcactgccctcacccatagaggatgggagacccctcagggattactacttctgtgctagaacacccttggcatctagttcagggtgggcaacaggcccccaacaagygtcctgccaaatgcactgtggtgcttccagctagtagccagatggatagttaggataccatgaggcaccccaccctctccagtgcccagggcacctcagtgcagagagtggaggcagactgtgagttcctccatcctactcccacctcacaggacctgtatccatctcttctggaggatagcagaggtatggag

SEQ ID NO: 104963 - DNA, 447 bp, Homo sapiens
acatagcgtgggcaagatcacagggttaagatccaaacacaagtctttgtgactccaaatcccacactctttcgcrctctccttcatgttcaggagagtatgtttcttgagttctctctgcagaagacatcattgtgcaaagaaagctctgagcagagcagggaaacctcctcagatttttcagcctgttagaatccagacagtgagaaagctgctgctttgatgagctacaactgcattctgttgctgagaacctcagttccccagtgtgtaaagagggtgagggtaggaggaaaagcaacacagttccaaaagaatagtggagttgaatactgaattcaaggacagatacagaaactcacattgactcattcattaatgaatgaaaggtgaatataagaagggtatattagattaccctaaataatgttctaatcaaaccaaggg

SEQ ID NO: 104964 - DNA, 471 bp, Homo sapiens
gaattctctagagtaaagcatcaggtagtgtcagccagtagagggcaccagcattgcagaatgtgtcgtctgttgttcagacagctggagtccttggcatgtagcaatttttgtcagccgttttcagaagggaagcagttggcttttaatgctggcaggcggtcattggtaggtgactgctgtattatggagcaaaactttgtaggtgatcattggtagttgactattgcgtagcagaactttgcccattactttaagataaacaaataaaaagcatagctcattcctaaatcttaaatcctttgcttgtcagtgatactaccccacaccccacaaacctctttcagcttttacttataagggccactctggaaaattccatgccatagggggracaagatatgacaaaatcattaaaaaggtaaaggaggatagaagagtgtgtcccattaaagaaaatatcttcagtat

SEQ ID NO: 104965 - DNA, 529 bp, Homo sapiens
cagcttcgttaattcctgttatctgaccagtttagttacctattcctgagaagctaagtcttagtggaaaaaaaaaagatttgtctgggcacggtggctcacgcctgtaatcccagcactttgggatgccaaggcrggtggatcatgaggtcaagagatcgagaccttcctggccaacatggtgaaaccccatctctactaaaagtacaaaaattagctgagcatggtggtgtgcacccatagtcccagctatttgggaggctgaggcaggagaattccttgaagccaggaggcgaaggttgcagtgagccaagatcacgccacttctgttcaacatggtactgaaagttctagccagactattaagcagggaaataaagtcatccaaattggaaagaaagaagtaaaattatttctgttcactggtgatatgatctgataagtagaaaaccctaaagacaccactaaaaattgctagaactaataaattcagtaaagtagcaggataagaagtcagtacccagaaatc

SEQ ID NO: 104966 - DNA, 614 bp, Homo sapiens
aatctgaaaaagaaatttaaaaagtaatcctatttatagcagctacaaataaaataaaatacctagaaataaccttaaccaaagaagtgaaagttatctaccatgaaaattataaaacattactaaaagatattgaagaggacgtcaaaacatggggaagatattctatattcacagacagaatcaacattgttaaaatgtccatattaygcaaagcaatctacagattcaatgcaatccctattaaaatgtcaatgacattcttcactgaaatagaaaaaataatcctaaaatttatgtagaaactcaagatacaaagactaaggatagctaatgactatcctgaacaaaaagaacaaagctagaggcctcacactgccttatttcaaattatactacaaagctttagtaaccaaaacagtgtgatactggcataaaaacagacaaagataccagttaaaatacaaagcatagaaataaatgcatgcatttacagtcaacttatttttgacaaaggcaccaagaatatacaccgagaaaagaaaagtcttttcaataaatggtgctggtaaaactagatatccatatgaagaagaatgatattagactatcat

SEQ ID NO: 104967 - DNA, 537 bp, Homo sapiens
gtttggaaactcagatccctccaggagccagagaggtgataatagcagatgtgggtactctggaaattgcagtaaccagagactgcagatcccatccagagcaggcagttgatactctgctccactccattattaccaaggtgagaatgtgggccaactgtgtcagaggattcaattacttaagcwaagctagaggctggctgcagtggctcacacctgtaatcccagcactttgggaggccaaggcaggtgggtcccttgagcccaggagttcaagatcagccttggtgtcagagcaagaccccctctcgaaagaagaaagaaggaaggaaagaaagaaagaaagagagaaagaaagaaagaaagaaagaaagaaagaaagaaagaaagaaagaaagaaagagggaaggaaggaaggaaggaaagaaagaaagagagaaagagagagagagaaagaaagagagagagacgaactagaaattttattttcactgtaatttcaaatattaagtaatttaaaaacctttaacactgtac

SEQ ID NO: 104968 - DNA, 438 bp, Homo sapiens
gaaaactggacattttagatgtattgttgcaatgctggtatcagattctcctgttcccataggtttgttgtagctgatttgttgtttttgctattgtttttcttgtttctgtttattcatttagtgacttccctggactaattctgtagattttgtattctcagcagtgtatggcttttgagttgagttctctagtcattttttttttcttaagttcttgtttttatttttaagkctggcttcctaggggtcacactgaaatcaatatgtggtcagccaataatagatcagatttttttaaaaaatgccctgcctttttatctctaccctttgcaagaggaatctgtatgagaaggcaagccatcacactacaggcaatttatgaaacagccttcgctctcacttcctgcttgtacatggcctcaaagtcagccagag

SEQ ID NO: 104969 - DNA, 438 bp, Homo sapiens
gaaaactggacattttagatgtattgttgcaatgctggtatcagattctcctgttcccataggtttgttgtagctgatttgttgtttttgctattgtttttcttgtttctgtttattcatttagtgacttccctggactaattctgtagattttgtattctcagcagtgtatggcttttgagttgagttctctagtcattttttttttcttaagttcttgtttttatttttaaggytggcttcctaggggtcacactgaaatcaatatgtggtcagccaataatagatcagatttttttaaaaaatgccctgcctttttatctctaccctttgcaagaggaatctgtatgagaaggcaagccatcacactacaggcaatttatgaaacagccttcgctctcacttcctgcttgtacatggcctcaaagtcagccagag

SEQ ID NO: 104970 - DNA, 438 bp, Homo sapiens
gaaaactggacattttagatgtattgttgcaatgctggtatcagattctcctgttcccataggtttgttgtagctgatttgttgtttttgctattgtttttcttgtttctgtttattcatttagtgacttccctggactaattctgtagattttgtattctcagcagtgtatggcttttgagttgagttctctagtcattttttttttcttaagttcttgtttttatttttaaggctggcttcctaggggtcacactgaaatcaatatgtggtcagccaataatagatcagattttttwaaaaaatgccctgcctttttatctctaccctttgcaagaggaatctgtatgagaaggcaagccatcacactacaggcaatttatgaaacagccttcgctctcacttcctgcttgtacatggcctcaaagtcagccagag

SEQ ID NO: 104971 - DNA, 609 bp, Homo sapiens
cctctgcttctgtttctgaaagacattgcagagagttggcattattccttctttaaatgttttatagaattccccagcaaactcttctaggcctggtgtcttctgttttcaaaggttattagatattaattcattttctttaatggatataggactattcagattatctacttcttcttgtatgagttttgacagattacgtatttaaggaatttgttcatgtcacccacattattaaatgtgtaggcacagagttgttcataatattccttattattcttttaatgtccctggaatctgtactaatgtaacccctttcattgtgatattagtaattgtcacctcttttttacttagcctaattagaagcgtattgattttattgatcttttcaaagaaccatcttttggttttgttgatttttctctattgatctactgttttcagtttcactgatttccactgtaatttttattatttattttcttctgtttattttagaattaacttgcggggtttttttttaatrttttcctaaggcagaagcttagaaaattgatttgagatcttttttcttttctaatacatgcattcaatactagacatttc

SEQ ID NO: 104972 - DNA, 540 bp, Homo sapiens
cctcaaacagacaaatcaagaagcgagtaactgaccctaatgagacaatgatatatatgtgagctctgacatgaagaattagaaaatagtacttgtaataaaactataagataacagaaaaaagcaactcagaaatctatcagagaaatttaaaaatagattgtaataataaaamattataattaaaatatcaaatagaaatactgaaactggaaaaatacctttgtgaaactgaaaaatacatttgaggcttttaaaagcagaatggactaaaaagaaaagagaggccttttgaaggcgtgctaattgaatatagacagtcagaaaataaaaaaaaaaacaatacaaaggaacaaagaactatatcttatgggatatagaaaatcagctcaaaagagcaaatctgagaatcattgagattcaaaagagagctgataaatagtaagggctagagtgctgattcaaagaaatgataatacaaaactttccaaaccttgagaacgatagaaatactcaggtacaagagggtcagagatcacc

SEQ ID NO: 104973 - DNA, 562 bp, Homo sapiens
atgcatacatacaataaacacagtacttatagggttgggtactatctgtggcttcagttgtccactgcagtcttggaatttatcctttaggagaagactaatgtgtaagtatttactgagcacctactatttgtcagacactagtatacatactagtgataggtgaacatgtcagtgaacaagtcaagcaatatcactaattttgaggagcttacattttagttggatgcgatgatatggagataaattataaacaagcaaataggtacacaaacaggataatttcacayagtaatgaaggtcatggcaacatttaaacagcataatgtaatatgaccatctcagcgaatggtgagggtttgcttagatcaggtggcttcaaaaggtgacacttgatctgagaactgaattatgagaagaagccttgtgaagatctgaagcaaaagtgtcccaaactgaagttagaagccaagagttctgttttgtaccttcaaagtttgacatgctaagacttatcagtgtgacttgccaagtagataattgggtacatgactggcagtca

SEQ ID NO: 104974 - DNA, 537 bp, Homo sapiens
cagagaggggaacaacccacactgggcctgctaagggagtggggtggggagaaggagaacgtcaggaaaaatagataatgcatgcttggcttgatacctaggtgataggttgaaaggtgcagcaaatcaccatgacacacatttacctatgtaacaaacttgcatatactgcacttgtaccctggaacttaaaataaaataaaataaaataaaataaaaaagagaaagagagatctattttcaacatgtgargacatagcaagaaggtggctgtctacaagccagaaagagagccatcaccaaaaaccaccatgctgtcatctggatcttggactttccagcctccagaactgtgagcaaataaatttctagttttctttttttttttaagttagctaagaacatgaatagacaactcacaaaagaagacatataaatggccaacaaacatgaaaaaatgctcaacatcactaattatcagggaaatgcaaatcaaaatcatggtgagatataacttactcctgcaagaatggccat

SEQ ID NO: 104975 - DNA, 395 bp, Homo sapiens
ctgagaattgatagaaatttattatacacatcagtttgggaaaagtaggtatctttatttttctgagtcttccaatccaataacacaacatttatccacrttttttcagatcttttaaaatttattttgttagttgtcaatactgtacatgtatttcacatttatacttaagtaatttatttttgaatgcttaattgtactgtatttaaaatttcaatggccacatatgtatccattttgagaatatagaaatatgattgacttttatatgtttattttatatactttgcccatgctgaactcatttattagttctaagagatttttatagattccttagaattttctactgaaatcatcaagagatgcacaaataaagatagttttatttcttc

SEQ ID NO: 104976 - DNA, 511 bp, Homo sapiens
ttgtagcagacctgcagaagaggggcctgactgttaaaagaaaaactaacaaacagaaagcaataacattaacatcaacataaaggacttccatccaaaaaccccatccaaaggtcatctgcctcaaagatcaaaggtagataaatccacaaagatgaggaaaaaccagtgcaaaaacgctgaaaattccaaaaaccagaatacctcttttcctccaaatgattgcaacttctctccagcaagggcacaaaactgggtggagaatgagattgatgaattgacagaagtaggcttcagaagstgggtaataatctcctccgaccttaaggagcatattctaacctaatgcaaggaagctaagaaccttgataaaaggttacaggaactgctaactagaataaccagcttagagaggaacataaatgaactgatggagctgaaaaacatagcatgagaacttcgtgaagcatacacaagtattaatagctgaatcgatcaagcagaagaaagg

SEQ ID NO: 104977 - DNA, 511 bp, Homo sapiens
ttgtagcagacctgcagaagaggggcctgactgttaaaagaaaaactaacaaacagaaagcaataacattaacatcaacataaaggacttccatccaaaaaccccatccaaaggtcatctgcctcaaagatcaaaggtagataaatccacaaagatgaggaaaaaccagtgcaaaaacgctgaaaattccaaaaaccagaatacctcttttcctccaaatgattgcaacttctctccagcaagggcacaaaactgggtggagaatgagattgatgaattgacagaagtaggcttcagaaggtgrgtaataatctcctccgaccttaaggagcatattctaacctaatgcaaggaagctaagaaccttgataaaaggttacaggaactgctaactagaataaccagcttagagaggaacataaatgaactgatggagctgaaaaacatagcatgagaacttcgtgaagcatacacaagtattaatagctgaatcgatcaagcagaagaaagg

SEQ ID NO: 104978 - DNA, 511 bp, Homo sapiens
ttgtagcagacctgcagaagaggggcctgactgttaaaagaaaaactaacaaacagaaagcaataacattaacatcaacataaaggacttccatccaaaaaccccatccaaaggtcatctgcctcaaagatcaaaggtagataaatccacaaagatgaggaaaaaccagtgcaaaaacgctgaaaattccaaaaaccagaatacctcttttcctccaaatgattgcaacttctctccagcaagggcacaaaactgggtggagaatgagattgatgaattgacagaagtaggcttcagaaggtgggtaataatctcctccgaccttaaggagcatattctaacctaatgcaaggaagctaagaaccttgataaaaggttacaggaactgctaactagaataaccagcttagagaggaacataaatgaactgatggagctgaaaaacayagcatgagaacttcgtgaagcatacacaagtattaatagctgaatcgatcaagcagaagaaagg

SEQ ID NO: 104979 - DNA, 583 bp, Homo sapiens
tccagggtgagggatgtcatgtaaaatggagaaccctgtcctgatccagcacttctgtgactaatgaaagctatccagtcctggggatcagtattaggaagctcattttcttttcacactaagttacatattataacttacctctatcgattatgtaggtgatacttagatttcttgtctgccttagttcttgtcttatttcccaattcattacctgttagaaaagaataccttttcattagaaactccaaatctcaggagctacacctttgattaaaaaaaattatataaaaatgttmgataagaaatttgagcatttggtgcatgatactttattatgtgtggtcacatgcgtcagttctctagatttgctttgtttttctgcacttcaggccatcacttcaagagaacactatgaataggtgctggatctaatgacctttcaatggaatggccacttaattcaatccaggaaatgtttgagagtcaagtagatcaagggagacatttaatgacatggggacaagcatggtaccccagggatattccaggaattgagaccctattgtaccttcaaacctga

SEQ ID NO: 104980 - DNA, 325 bp, Homo sapiens
tatcatttattttgatgttcacctcaacacaataaatacttttgaaattttttttcttgtttgcaaaagtcaaatccagcatccaaaataaagacttgctgcctgaaaagtcttttcagattgcctggcaattacaatatatcttaagcacaggcaatatccgtggtttaagtggctactttgaaragctgatgccccttcagatgcataaattataatttagtaaaaataagtcatcttgtgtctttatagtagaatgatttataatccttcaggtatatacccagtaatgggattgctgggtcaaatggtatttctggttcta

SEQ ID NO: 104981 - DNA, 325 bp, Homo sapiens
tatcatttattttgatgttcacctcaacacaataaatacttttgaaattttttttcttgtttgcaaaagtcaaatccagcatccaaaataaagacttgctgcctgaaaagtcttttcagattgcctggcaattacaatatatcttaagcacaggcaatatccgtggtttaagtggctactttgaaaagctgatgccccttcagatgcataaattataatttaktaaaaataagtcatcttgtgtctttatagtagaatgatttataatccttcaggtatatacccagtaatgggattgctgggtcaaatggtatttctggttcta

SEQ ID NO: 104982 - DNA, 743 bp, Homo sapiens
gagtatcccacagtaaaaactagaaggaagcaaactgagaaaccagtttgcattgtgtgcaaactgtctcccacagttaaacttttcttttgattcagcagttggagacactgtgtttgtycattctgtgaatgcacttttgggaactcattgaggccaatggtgaaaaaagcaaatatcccaagataaaaactggaaggaagctatctgagaaactgcttcatgatgtgtgcactcataagtcagtgttaaacatttctttacattcagcagtttggaaacactgtttttgtagaatctgtgtaaggatatttggaaatgcattgaggtatatggtgaaaaagaatatatcttcaaataaacttagaaagaaactttctgagaaactgctttgtgacatgtggatttatctcacaaagttaaaactttttctcatacagctctttggaaacactgtttttgtccattctgcaaatggacatttgggagctcattgaggccaatggcgaaaaagtgaatatctcagaataaaaacaagaaggaagctgccttagaaaccataatgtgatgtgtgcattcatctcgcatagttaaacctttcttttgatacagcagttcagaaacactttttgtccattctgcaaatggacatttgggagctctttgaggcccatggcaaaaaagtgaaaatccgaggttaaaaactggaaggaatctatctgagagcccgctttgtgatgtga

SEQ ID NO: 104983 - DNA, 562 bp, Homo sapiens
ctgaatatatttcctttttcaccataggcctcattgcactcccaagtatacctatgcagattctacaaaaacagtgtttccaaattgctgaatcaaaagaaaggtttaactctgtgcgatgagtgcacacatcccaaagcattttctcagatagcttctgactagttcttctctgaagatacttccttttcactgtaggcctcratgtgctcccaaatatcccttcccagattcagtaaaaaaagtgtttctgagctgttaaatcaaaagaaggatttacgtctggatgaatgcacacatcagaaagaagtttctcgtaacacttctttccagtttttatctgaagatatttgttttccaccataggctttttgtactacctaacatcactttgcagaatatacaaaaacagtgtttccaaactgctcagtcaacagaaaagtttaactcgctgagatgaatgcacacatcacaaagctgtttatctaaaagctattttctagtttttatcggaagatatttcctttttcaccataggcatcagtgtactcacaaatatccc

SEQ ID NO: 104984 - DNA, 562 bp, Homo sapiens
ctgaatatatttcctttttcaccataggcctcattgcactcccaagtatacctatgcagattctacaaaaacagtgtttccaaattgctgaatcaaaagaaaggtttaactctgtgcgatgagtgcacacatcccaaagcattttctcagatagcttctgactagttcttctctgaagatacttccttttcactgtaggcctcgatgtgctcccaaatatcccttcccagattcagtaaaaaaagtgtttctgagctgttaaatcaaaagaaggatttacgtctrgatgaatgcacacatcagaaagaagtttctcgtaacacttctttccagtttttatctgaagatatttgttttccaccataggctttttgtactacctaacatcactttgcagaatatacaaaaacagtgtttccaaactgctcagtcaacagaaaagtttaactcgctgagatgaatgcacacatcacaaagctgtttatctaaaagctattttctagtttttatcggaagatatttcctttttcaccataggcatcagtgtactcacaaatatccc

SEQ ID NO: 104985 - DNA, 562 bp, Homo sapiens
ctgaatatatttcctttttcaccataggcctcattgcactcccaagtatacctatgcagattctacaaaaacagtgtttccaaattgctgaatcaaaagaaaggtttaactctgtgcgatgagtgcacacatcccaaagcattttctcagatagcttctgactagttcttctctgaagatacttccttttcactgtaggcctcgatgtgctcccaaatatcccttcccagattcagtaaaaaaagtgtttctgagctgttaaatcaaaagaaggatttacgtctggatgaatgcamacatcagaaagaagtttctcgtaacacttctttccagtttttatctgaagatatttgttttccaccataggctttttgtactacctaacatcactttgcagaatatacaaaaacagtgtttccaaactgctcagtcaacagaaaagtttaactcgctgagatgaatgcacacatcacaaagctgtttatctaaaagctattttctagtttttatcggaagatatttcctttttcaccataggcatcagtgtactcacaaatatccc

SEQ ID NO: 104986 - DNA, 562 bp, Homo sapiens
ctgaatatatttcctttttcaccataggcctcattgcactcccaagtatacctatgcagattctacaaaaacagtgtttccaaattgctgaatcaaaagaaaggtttaactctgtgcgatgagtgcacacatcccaaagcattttctcagatagcttctgactagttcttctctgaagatacttccttttcactgtaggcctcgatgtgctcccaaatatcccttcccagattcagtaaaaaaagtgtttctgagctgttaaatcaaaagaaggatttacgtctggatgaatgcacacatcagaaagaagtttctcgtaacacttctttccagtttttatctgaagatatttgttttccaccataggctttttgtactacctaacatcactttgcagaatatacaaaaacagtgtttccaaactgctcagtcaacagaaaagtttaactcrctgagatgaatgcacacatcacaaagctgtttatctaaaagctattttctagtttttatcggaagatatttcctttttcaccataggcatcagtgtactcacaaatatccc

SEQ ID NO: 104987 - DNA, 432 bp, Homo sapiens
tgcttcaaaaaaacactacaaaaactgcttccaaactgtttccaaaccgttcaatcaaaagaaacgtttaactctgtgagaggaatgcacacataacaaaatggtttctcagaaagcttctttgtggtttttatctgaagttatttcccttttcacaagagacctcgtgtgctccaaaatatcccttgcaggtccttcaaaaaccgtatttccaaactgatcaatcaaaagaaagctttaactctgtcacacgaatgtacgcatcacaaagckgtttctcaggaagcttctgtctagttcttctctgaagatatttccatttccaagatagacctcagtgcgtgcccaaatatcccattgcagattctacaaaaactgtgtttccaaactgttccatcaaaagaaggacttaactcagtgagatgaatgccc

SEQ ID NO: 104988 - DNA, 550 bp, Homo sapiens
aacatgttatatctgtatttgtatctataactacagctgtatgtatctacatttctatatacttagtgatataaatatagactggaataaatacaaagacccatatgattcttggataaaaaagatttagtatcataaagacaaatcctttccaaattcacttatgaattcacaacaatatacagtttcattagtataatttaaaatttttaaataaattccaagattmatttaaaggaatatacatgtatacaagcagtcaagaaagaagcaagagtgcactaagataacatgctattaaaatacatttttaaacttagtcactaaaactgagcagtactgatttggagtactggaatttaggtttatgggatctcaaaagcacagagctcaaaggagacccctgtatgcatgagagcttaggaagtgctttagaaggcattaccaaaccatgggcaaagttactttagtgtcttagtcttactaggtttgaaaagccagagaaaatactcaagaacatcatataagagcaaaacaaaaggacagggag

SEQ ID NO: 104989 - DNA, 226 bp, Homo sapiens
ccactgtagctgccacaaaatgatccctcaaccaccgcygcccaggaacaaagaaagaattctgtccttccgcgctctcagatcaatttccaacatcaggtgagactttgatgggcactattcagttcccatatccctgaaatagatgcagtaaaaacagaaactgcctatgtgtttcccaataagacacatatggaagcctgttttcccacgacaggaaggggtt

SEQ ID NO: 104990 - DNA, 226 bp, Homo sapiens
ccactgtagctgccacaaaatgatccctcaaccaccgctgcccaggaacaaagaaagaattctgtccttccgcgctctcagatcaatttccaacatcaggtgagactttgatgggcactattcagttcccatatccctgaaatagatgcagtaaaaayagaaactgcctatgtgtttcccaataagacacatatggaagcctgttttcccacgacaggaaggggtt

SEQ ID NO: 104991 - DNA, 226 bp, Homo sapiens
ccactgtagctgccacaaaatgatccctcaaccaccgctgcccaggaacaaagaaagaattctgtccttccgcgctctcagatcaatttccaacatcaggtgagactttgatgggcactattcagttcccatatccctgaaatagatgcagtaaaaacagaaaytgcctatgtgtttcccaataagacacatatggaagcctgttttcccacgacaggaaggggtt

SEQ ID NO: 104992 - DNA, 580 bp, Homo sapiens
caagacagagtggtactgacatgaaaacagacaaatagatccctggaacagaatgaaattccacaaatagacataaatgtacaatcaactgatttctgaaaaggctgcaaattcatttcaattcaattcaattcaatgggtaaagaaaagtcttttcaacaaataggyctataagaattggtaaatataaagggaaaaaggaactttgacattcatcttatgctgcacccaaaattaatttgaatgaaatgtgaacctaacataaaaactaaaattgtaaaatttctataggagaaagcttctttcataaaaaaaaaagcttctacaatatcttcacgatctgagggtgggcaaagatttcttagcaaggacgctgaaagcactaaatgtaatagaaagaaaaatatatttaccttgaggggtggaggaagatggttgaatagaagcctacactgtttgtccttcctacaggtacagcaaattttaacaactatctgcacacagaaaagcatcatcacaagaaccaaaaatcaggcaagcaatcacagtatccaattttaacttcatattgtggaaagag

SEQ ID NO: 104993 - DNA, 580 bp, Homo sapiens
caagacagagtggtactgacatgaaaacagacaaatagatccctggaacagaatgaaattccacaaatagacataaatgtacaatcaactgatttctgaaaaggctgcaaattcatttcaattcaattcaattcaatgggtaaagaaaagtcttttcaacaaataggtctataagaattggtaaatataaagggaaaaaggaactttgacattcatcttatgctgcacccaaaattaatttgaatgaaatgtgaacctaacataaaaactaaaattgtaaaatttctataggagaaagcttctttcataaaaaaaaaagcttctacaatatcttcacgatctgagggtgggcaaagatttcttagcaaggacgctgaaagcactaaatgtaatagaaagaaaaatatatttaccttgaggggtggaggaagatggttgaatagaagcctacactgtttgtccttccyacaggtacagcaaattttaacaactatctgcacacagaaaagcatcatcacaagaaccaaaaatcaggcaagcaatcacagtatccaattttaacttcatattgtggaaagag

SEQ ID NO: 104994 - DNA, 558 bp, Homo sapiens
tggctcagctaagaaagtgcctgcaccatccctcccccaaccccaggtagtgcagctcacagcaacaaaagtgactccttccttctgcttaaggagaggtgagcaaasagtaaagaggactttgtcttgcatcttggacaccagctgagccataataggatagggcactgggaaaagttgtgcagcccccattccaggccctagctcctccatgacatttttagacattcctggatgggcccagaggaaatgcactgccttgaagaaaaggacccagtcctatcagtactcattatttgctgacttatgaagctttgggccctgagtaaccaacaacacccagggagtacaccatgggtcttgacctctgagatgtgctggcttcaggggtgacacagcacattcctaggtgtggtggctatggtgaaagactctttctatttgagaaaagcagagggaaaagtaaagggaactttgtcttgcaccttaggcaccagtgcttggccacagtggggtaaaacaaaaagcagactcttgggattcctgagttcaggccta

SEQ ID NO: 104995 - DNA, 616 bp, Homo sapiens
ctgtgctaaaagcagcaagagaaaagacataaataacataaaatggagctccagaatgtctggcagccaacttttcagcagaaaccttacaagccaggagagagtggcatgacatatttaaagtactgaaggaaaaagcttttacccctataatagtatatccagtgaaaatatccttcaagtatgaaggagaaataaaaaccttcccagacaaacaaaagatgaggaatttaatcaacaccagacctgtcctaaaagaaatgctaaaggaaattcttcaatctgaaagaagaggacattaatcagcaagaagaaatcatytgaaggtataaaattccctggtaatagttaagtaagtcgaaaaacacagaacagtataacactgtaattttggtgtgtaacctactcttctcttaagtagaaagactaaatgatgaaccaatcaaaaataactaaaacagtgtttcaagtacaataatacaaagaggagcaacaaaatgttaaagagctggggatgaagttaaaatgtagagtttttattcgttttatttttgtgtttgtttatgcaatcagtgttgttgtcatcagtttaaaataatggattataagacagtat

SEQ ID NO: 104996 - DNA, 616 bp, Homo sapiens
ctgtgctaaaagcagcaagagaaaagacataaataacataaaatggagctccagaatgtctggcagccaacttttcagcagaaaccttacaagccaggagagagtggcatgacatatttaaagtactgaaggaaaaagcttttacccctataatagtatatccagtgaaaatatccttcaagtatgaaggagaaataaaaaccttcccagacaaacaaaagatgaggaatttaatcaacaccagacctgtcctaaaagaaatgctaaaggaaattcttcaatctgaaagaagaggacattaatcagcaagaagaaatcatttgaaggtataaaaytccctggtaatagttaagtaagtcgaaaaacacagaacagtataacactgtaattttggtgtgtaacctactcttctcttaagtagaaagactaaatgatgaaccaatcaaaaataactaaaacagtgtttcaagtacaataatacaaagaggagcaacaaaatgttaaagagctggggatgaagttaaaatgtagagtttttattcgttttatttttgtgtttgtttatgcaatcagtgttgttgtcatcagtttaaaataatggattataagacagtat

SEQ ID NO: 104997 - DNA, 616 bp, Homo sapiens
ctgtgctaaaagcagcaagagaaaagacataaataacataaaatggagctccagaatgtctggcagccaacttttcagcagaaaccttacaagccaggagagagtggcatgacatatttaaagtactgaaggaaaaagcttttacccctataatagtatatccagtgaaaatatccttcaagtatgaaggagaaataaaaaccttcccagacaaacaaaagatgaggaatttaatcaacaccagacctgtcctaaaagaaatgctaaaggaaattcttcaatctgaaagaagaggacattaatcagcaagaagaaatcatttgaaggtataaaattccytggtaatagttaagtaagtcgaaaaacacagaacagtataacactgtaattttggtgtgtaacctactcttctcttaagtagaaagactaaatgatgaaccaatcaaaaataactaaaacagtgtttcaagtacaataatacaaagaggagcaacaaaatgttaaagagctggggatgaagttaaaatgtagagtttttattcgttttatttttgtgtttgtttatgcaatcagtgttgttgtcatcagtttaaaataatggattataagacagtat

SEQ ID NO: 104998 - DNA, 566 bp, Homo sapiens
atgattaaagacactgttttacctttaaaaagcaactgaattaaaatttacttcacatatgtttatagattttccaaaaattccaaggcaaactcaaactgcatagaaagttaattttttctaaattcatccatgagtatatgggtatggtttactatcacttatgcatacctcttattagaataagagcacattctaaaaaatttccaattggcaccatttattatatcaccatttatgygataatctaataaatagcatctaatgaaaaatacatttaccttggaaaactatacacatactatatgagagaataattaagatgatgattgcaataaaaacagtactgtacattagtttcctaaatgttatggtataaattaatgtccaaaggaaatacttttcattcatcaaagatttgaaactacaaattattaaacatgtgtgctaagaagctatttgtaactgattttaggctctgtgtatttttatgttcattgaagcacttttttaaaagaacaacacgtgcttgtttaccaccactcgctgttcaactctctgaaaac

SEQ ID NO: 104999 - DNA, 566 bp, Homo sapiens
atgattaaagacactgttttacctttaaaaagcaactgaattaaaatttacttcacatatgtttatagattttccaaaaattccaaggcaaactcaaactgcatagaaagttaattttttctaaattcatccatgagtatatgggtatggtttactatcacttatgcatacctcttattagaataagagcacattctaaaaaatttccaattggcaccatttattatatcaccatttatgtgataatctaataaatagcatctaatgaaaaatacatttaccttggaaaactatacacatactatatgagagaataattaagatgatgattgcaataaaaacagtactgtacattagtttcctaaatgttatggtataaattaatgtccaaaggaaatacttttcattcatcaaagatttgaaactacaaattattaaacatgtgtgctaagaagctatttgtaactgattttargctctgtgtatttttatgttcattgaagcacttttttaaaagaacaacacgtgcttgtttaccaccactcgctgttcaactctctgaaaac

SEQ ID NO: 105000 - DNA, 534 bp, Homo sapiens
catttcatgttcttcacaagcttcacatataccagttcataaagcctaacaatattctcattcaacatacaatagttaatgacccattcgcttgccatttgtcttttcctctgccaatctttatttttctcagtacttacccatcctgttacccaaaagaggcatattctgcaatattcactttagatgtagccagttcaaatcaatgcaaaggaaggatcttccagagtgtagacaaagggccataataaaagatgaattgggcagcccctgctagggaacagtctctgggcctaattaaggaatatttcctatcctcaggttaaggagccttaccttgttctacccagcaggatttgctagccttctcctttctaatcagaatgttattacagttatttgtaactcttatagctgctccaaattgtgctgtgraacatagatcagggcagatagcttatctttttagttcacagatattaaatcaagagaatccacatctagatgtcatgtaggagccacctactatgcatc

SEQ ID NO: 105001 - DNA, 557 bp, Homo sapiens
tatagctgctccaaattgtgctgcatagtaaaatacatactgaattttaaagataaataattaactgttagttatttgagaaatctccaaattgctctccagtggctgaactaatttacattcccaatggattcattcacacgctaaacatcagcatcacccaatatacctttgtaacaagcctgcacrtatacctcttcattctaaaataaaggtttaaaaaaagaaataaaatatctcattaataatttttatattgatcacatgttgaagtggtaatatttttaatatcctgagttaaataaaatttattattaaaactgattcatctgtttctttttactttttaagtatggcttctagaaaactttaaattgcatctgtagctcacattgtatttctattggacctccctgttctaatgtcagtgtgttcatgattaaccactattaagattatgttctttctggtaatgtattgtgtttgcatgccttctcagtcacacaaatcgtaatagctgacttacttctgttactcacagcctcatttacctagag

SEQ ID NO: 105002 - DNA, 463 bp, Homo sapiens
gctttcagacaaacaaaaacaaaattcaacgacarcagacctgtactaaaagaattgctaactcaggttgttaaagtagggaaaaaaaagtatgctactacatggaaatgtatatttacacaaagagataaagaatgacaaaaaatgtttaaatggtaagatttaaatccaaccatatcaataaacacaacaaatacaaattgtatgtaaatattccaattagaaggtatagatggtcaaattggattatttaagaaattaaggcccaactagatgtggtctaccaaaaactcactttaaatataaatacgccagttaaaagcaaaagaacaaagaatatatattaggcaatgaccaatcaaaactggattatctgtattaataactgacaaagtagatttctgaacaaggaatgtgccagggataaagaatgatattatataaggagcaaatgatgaattca

SEQ ID NO: 105003 - DNA, 546 bp, Homo sapiens
tataattttacatcccaactacattgcttttttattcaatctgagagcatctgtcttttagtgtgtgagaccattcggggtttgttccttgtaaaccttttgagtttttccaccttgacctcagataatttccccccacaaaaacactgacctatgctcagatgaagactagaggacctgctgcagagctctgaagttctctggagccctctccccctggatactttgccaccttagcctacccaatttctagctctgtctcctcaactcagggataccaccaacctcctcctcctgggatctgcttccctctagcatggcctggaaactctctcctgggaggaaaytggggcaatcctagtcctcacctcatttgtttctcctctcccaggaattcttgtcttttattacctgatgtcccatgtcttggtaaaccattgtttcatatattttgttcagtttttttgttcaggcagaagagtaagtccagtccctgttaccacagaagggcttccaccttgattttccaacaggaaaattgaaatg

SEQ ID NO: 105004 - DNA, 531 bp, Homo sapiens
cttcataccctagtgaaggatagaaaagaaaatttggaaaagatgaatgaattccaraggccattaatagtgggctgcagattaaatagactacattatgaagaagggaagctatttttttcaaccatataactcagtttaaggtacaagaagactcctgagatataaaacagaatatttcatatgaaggagtaagaatggcctcatttttctggccaaatttgacattaactaaaataggaaaaaatgaatctgtgtcttccaattatgttaaactcacatttggttaatttgaaaggttaaccaaaaaatgtagctacaggaaaatatgagaggctgatctaatgggattatttgtttcttggtgtgaaattattttggtttattactatcttattatatttcccaatatcccttttcctctttctcctaatagcttacttctcctgagctcccacctctgattcagttctccttggttagggttttctacttacctatatgaaatttactaaagaaaggcagtaagta

SEQ ID NO: 105005 - DNA, 570 bp, Homo sapiens
tttccctgggttttcatcaccctcatttttctttcctgcttgacaataaagaaaaatgatcaacctcatttttctttcctgcttgacaataaatctggtgtttattatcaaacagttgaattattctatgattttagaaggaaaggttcctatacacagaactttttagtatctttattgtctatcagctttgtgaaattgttattacattgtcttctaactcaacctgagacattgacattaaccctatgccctacggggctctgctcctccttttggcacagatgaatccatcactggttagtgggtggagcaacaatctgggactctgaaatcyaaatcacagcctggactaacgtatccgtgtgagggtgcaactgattcgcagaacatgcgtggggcagctgattcatttagcctcagcatttccattttaaggtctaatcctcatctattagtgcctctgtcatccatgtggaattttgtagcttttccaattttaagtcctggcttagagttcttgctaagaaatatggtaaaagaaccatatatatatttcctcccactgca

SEQ ID NO: 105006 - DNA, 579 bp, Homo sapiens
gtctcttcttatcaaggcactgatcccattcatgaggtttccaccctcatgacccaatcacctcacaaaggccccacctcctaatgmcatcacgttgggaatttgggcttcaacacatgaatttggagggaaaacatgaaatccataacaattgccgattcttgcccccccactaggcagaatggaaccatgtgggactaaggcacagagaaggtcattagcttacctatggcccccagccagccttctcagcccagcccagtgccttctctgccatgccatgttggtcttcgcagccacatccattcctgtctgcctccatgattacacttataagaatctgtgctattatcattactttcttccatatgccaccctctactctccccaccccaattctacttgccttggattccaccaggacttcttttactcttcacctcctctcctatcctcagcaaggagactttctttgtccttggattgcctttgagtccttgtgtcttctcccaagagctgtttgcccacatgtatttatttagtccaccaatgtgtgttgaacacctactacatgccaga

SEQ ID NO: 105007 - DNA, 579 bp, Homo sapiens
gtctcttcttatcaaggcactgatcccattcatgaggtttccaccctcatgacccaatcacctcacaaaggccccacctcctaatgccatcacgttgggaatttgggcttcaacacatgaatttggagggaaaacatgaaatccataacaattgccgattcttgcccycccactaggcagaatggaaccatgtgggactaaggcacagagaaggtcattagcttacctatggcccccagccagccttctcagcccagcccagtgccttctctgccatgccatgttggtcttcgcagccacatccattcctgtctgcctccatgattacacttataagaatctgtgctattatcattactttcttccatatgccaccctctactctccccaccccaattctacttgccttggattccaccaggacttcttttactcttcacctcctctcctatcctcagcaaggagactttctttgtccttggattgcctttgagtccttgtgtcttctcccaagagctgtttgcccacatgtatttatttagtccaccaatgtgtgttgaacacctactacatgccaga

SEQ ID NO: 105008 - DNA, 579 bp, Homo sapiens
gtctcttcttatcaaggcactgatcccattcatgaggtttccaccctcatgacccaatcacctcacaaaggccccacctcctaatgccatcacgttgggaatttgggcttcaacacatgaatttggagggaaaacatgaaatccataacaattgccgattcttgcccccccactaggcagaatggaaccatgtgggactaaggcacagagaaggtcattagcttacctatggcccccagccagccttctcagcccagcccagtgccttctctgccatgccatgttggtcttcgcagccacatccattcctgtckgcctccatgattacacttataagaatctgtgctattatcattactttcttccatatgccaccctctactctccccaccccaattctacttgccttggattccaccaggacttcttttactcttcacctcctctcctatcctcagcaaggagactttctttgtccttggattgcctttgagtccttgtgtcttctcccaagagctgtttgcccacatgtatttatttagtccaccaatgtgtgttgaacacctactacatgccaga

SEQ ID NO: 105009 - DNA, 590 bp, Homo sapiens
acataaaaatcaaaacttaaagagaaagtctgattattccctttataaagggactcgcctcaagtatctattctgtaaagtaaaggaagatgtctatgggtctttgactataaattttaataagagatataaaaccttaatagacggatcatggaattagaaggaatcatagaggtcattttctcctactttccacccaataaagaatcccctttgcaaatccctgacagatgaacatgcagccttggtatgaaaacttcaagggacaggaagctcattagcctcacaaggcagccctttctattttgaatctctctaatcgttttttaaaagtttctccttatatagaggctgaattctttctccccattacttgcatccattgatcttagttccatgttctggagctacatagatcaaatctaattctcttcctacatagcaaaccattaccttttcaagaggagctgtggcattccccctcctcaactctcctctttctctagcaaaatatcctcagcttcctcgcctccttttcacttgrcatggtttctggggccttctttcccctggtactaccctcttgctgc

SEQ ID NO: 105010 - DNA, 572 bp, Homo sapiens
agctgcatgtggctactgaatacttgatatgtggctagtgctactgaggtactggcttttaaattaaattcaaatttatttaaatactgaggtatttatttttaaataaattcaaagtagctacatgcaactagtggctattatattggacagcacagttgtagaatagtactgtaaatgaatgccagtttttggtcagggaactgaggcaaatggagatattaggaayaagaatggagatattaggtgtgactcttctatataagaaatcttgttgcaagaaggaaaaaaggcatcataggttgtatgtcatgaggtgaagttaaaggctttttcaggagaagtaagttctgagtgggtgtgaaggagaagggaagtcaggaagcaggacctattgacactaaggaaggaaggacaagtgaaaatgtgtgttggaaagtccgagaagtataatacaggcatacagatatatataattgtggttaaaatattagtaaaagaaaatttaccatcttagccatttctaagtgtacagttcggtggcattaagtacattcacactgttgtacaac

SEQ ID NO: 105011 - DNA, 516 bp, Homo sapiens
gaattctaaaataagtcttttcctgtgcataggtttatccaaatttctttctcaattttatttattgctgttgacgtttaattgctaaaataatcttaagggagccacagaaatgggtggggcactcaagaactgtgctatggtctttctgcatgtcagcattagaacagattatttcaatcccatgtttgtgtggaaagcatgcaaagagaagatagattgacaagcctgattggtatgttccaattcttttgcttccatagcaatttagtatatggaagtcaaacttctttaaaaatcctagtttgcagaaaagaaaggctgagtgctggcagcagaaggtacatgatactggggaactctactctttmctccagttgacaagcaagcaattagatccatcgagctgcggatctatgttctcaaggacccaaggaagtcagcttttggaaggcaataaaatttttgtttttaatatgcagtgtccttcagtgaaaatgacaaggaggctgaagt

SEQ ID NO: 105012 - DNA, 597 bp, Homo sapiens
tgagttcaaaaacaaacaagtgaaagtgccgagggataaaatgggctgaaatcgatgagcagcagtgcggccgaccctctggtaaaaagctgccttttgtaagaatcccctgattgtgggggatggggcctgcagatcgtgagcttagaggccaacttacaccattcgaacagagtattgttttctctggggtataaggcttactgtgattccagacgtgtcgccatggcagcggtgggggagggagagaggaaaggaggaacagacgggggtcaccaaggtcctaattctcatgcaagggcccccayggctcagccctgtctccctgagaagtccagtgttgtgctgcatcttctttcaagacaccactgatgtcaatccagttcaatttaatagatctcgagtgcctactaagtgtaggtctttcacttctaattaacattagcatctgttaaaatacctaacctctgcttggttctagaaaactaaaagggagaaaaagacctagattccacgctctcaacatttatcttgtcctattcccagactgtgtggctatacaggttaaagatacatagccacacggagggaatataa

SEQ ID NO: 105013 - DNA, 640 bp, Homo sapiens
gttggctgtgcaaatctctaatgtgccatttctctgatcagataaaggtttgtcaattgaccaacctgtgtcaatatcatggtagtgaagcaactgtgacccgaatgtcatagatatctctgcttttctctgaaagagtctgcttttaaagaaatatgaaattacaaaaacatcaccttttatcagaatataacttctggttaaattcgttttaaggtcaagaagaaaaataaagagaaacatgaagtatttaatagtttcaaggctgatatttaactatcctatcactcatttcactggggacttaggctgatgaaagtgtttcttcaattgccaacattttctctaggttgtttcctaaaatctttaagaaagattagttatggaaactaatctttagtttaygggaatgaagacttattcttcatttagattcagacttagttgtaggaacaaatacttattcttcatttcactaaaccaaaaatccaacctcaagttatttacattctcacttgttgaaaatattgggatcgtatgtagttttatattctatctttttcacttattacagcgtggacatttccctatgttatcaaaaactcttctaaaatacttcaatagccatgaaatattcttt

SEQ ID NO: 105014 - DNA, 652 bp, Homo sapiens
taagattctatgaatacgaccactgtcaggaatagataagtttcacacagaaggttacgtgatggaccactgacaaaggcagaaagaaacccagaactccagctgagaaccctgaactgaattgggactgcagaggccagccctccacctcaaaggcaggacctacaaccatccttgcccaccctccaaccctgagctctttcataaagacacacatacagagtaccactggctgtggcagccagggctggagcaacaaaggycatgaactgtgactgctgcctgtgtcacttctcttgtgggtctgcagcttctgtgtgtctgcatgtgcgtgttggcattcctggtccttggtgtttgcatgtgggctctgctctgggcaggaggcagcagaacaagggtggaattaaattagacacatcagcagcgtctaagcctagtgccctggatcatcattccgccttccctcaccccgctctgctttttctttgttccatagcacttataactgtctaacatactatgtaatttacactcattcatgatgcttaatgtctgctagaacgtaagctgcacaagggcagagttcctattcttttttatccgctcacagatttaagtgcctagagcagtggctggcacacagcaggca

SEQ ID NO: 105015 - DNA, 652 bp, Homo sapiens
taagattctatgaatacgaccactgtcaggaatagataagtttcacacagaaggttacgtgatggaccactgacaaaggcagaaagaaacccagaactccagctgagaaccctgaactgaattgggactgcagaggccagccctccacctcaaaggcaggacctacaaccatccttgcccaccctccaaccctgagctctttcataaagacacacatacagagtaccactggctgtggcagccagggctggagcaacaaaggccatgaactgtgactgctgcctgtgtcacttctcttgtgggtctgcagcttctgtgtgtctgcatgtgcgtgttggcattcctggtccttggtgtttgcatgtgggctctgctctgggcaggaggcagcagaacaagggtggaattaaattagacmcatcagcagcgtctaagcctagtgccctggatcatcattccgccttccctcaccccgctctgctttttctttgttccatagcacttataactgtctaacatactatgtaatttacactcattcatgatgcttaatgtctgctagaacgtaagctgcacaagggcagagttcctattcttttttatccgctcacagatttaagtgcctagagcagtggctggcacacagcaggca

SEQ ID NO: 105016 - DNA, 652 bp, Homo sapiens
taagattctatgaatacgaccactgtcaggaatagataagtttcacacagaaggttacgtgatggaccactgacaaaggcagaaagaaacccagaactccagctgagaaccctgaactgaattgggactgcagaggccagccctccacctcaaaggcaggacctacaaccatccttgcccaccctccaaccctgagctctttcataaagacacacatacagagtaccactggctgtggcagccagggctggagcaacaaaggccatgaactgtgactgctgcctgtgtcacttctcttgtgggtctgcagcttctgtgtgtctgcatgtgcgtgttggcattcctggtccttggtgtttgcatgtgggctctgctctgggcaggaggcagcagaacaagggtggaattaaattagacacatcagcagcgtctaagcctagtgccctggatcatcattccgccttccctcaccccgctctgctttttctttgttccatagcacttataactgtctaacatactatgtaatttacactcattcatgatgcttaatgtctgctagaacgtaagctgcacragggcagagttcctattcttttttatccgctcacagatttaagtgcctagagcagtggctggcacacagcaggca

SEQ ID NO: 105017 - DNA, 504 bp, Homo sapiens
aggagattcaacattggttagcagtaatcagggaaatgcaaaactgtattgatctggattggttactgtatggtagatgcacctgacagtggtaatctgctcataccctaagaataatcctgtatggcagatgcacctgaatgttcaggttttggcgctaaggaatccaggagtagccaacctggagatccattccttatctaagaggaacatctgtgtccctggcccagcccctggaagcatgccatactagagatcgagaccctttgttacgggttaaacgaagattgccaggtggaggttgttagggggagagtgttaagtgaaaattttgtgtaaactgaatgctttctgaaagtggttgcagtttttctgyccagcccaccaccactggactctctcccctgtatagaagctcctgataacaccccatgtctcattctctggttctgggtctcttctttggcctcttgaacctggtgccatccccgttggagtcaatag

SEQ ID NO: 105018 - DNA, 629 bp, Homo sapiens
ctggaattacaggcaagcaacaccatgcctggctaatttttttgtatttttagtagagacagggtttctccatgtaggtcaggctgatctcgaactcccgacctcaggtgatccgcccgcctcagccacccaaagtgctgggattacaggcgtgagccaccatgcccagccgaggatcaaattttaacatgagtttttgtggggacaaaacacatccaaaccatagcatcagcatcatggtattccaaatcttagattatgcttactgttttgttgcattagaattttggggatggctgtgtagaaagatggttttattagtgaagcatttccaaaacttattatcaggagaacccttaatttytcattttagttactaatcttatcacaatcacattttgtaagtacagattattcagtttataaacatatcaagatataggaaaacatatagatatataaatatattgatatattgctatacttattcctaataattctctgtaaccctatatgaatgtaaaagagaataagaatgacttatgcattcatttttttcagcaaaattttattgcatactggattatattccaattatgtggcaccactcaaaacaagagtacatataa

SEQ ID NO: 105019 - DNA, 615 bp, Homo sapiens
gcagggcatactggagaataaaaggagctatgggccaggtacagtggctcatgcttgtaatcccagcacttggggaggccaaggtgggtgaatcacctgaggtcaggagtttgagaccagcctgaccaacatggtgacacccagtccctactaaaaatacaaaaaacaaacaaacaaacaaaaaatagccgggcatggtggccagcacctgtaatcccagctacatgagaggctgagtcaggagaataacttgaacccgggagtcgaaggttgcagtgagctgaggtcatgccattgcactctagcctgggcaacaatagcaaaactccatctcaaaaaaaaaaaaaaawtagaggacctatgatgttgacaatcatccctgcaccctttgggtctttaatggtgatacaactctctgccaaccacctggctcacaattaggatactattttgattttttttttgtcctggccaaggataagggacagtttcagaggtttcctcttggccttccccactatgatggtctcatgtgcaggtcaaggattctatgtagaggctactccaactgccagattcgacaattttcattagacatttaggaactggagaaat

SEQ ID NO: 105020 - DNA, 395 bp, Homo sapiens
tacaaatgtgaaactacactagaggtccttcatcaggtggagatgattgggtttagagtcagcataactgtcattgggcaaagaaatgatgcaatgactgaggttgagggtgtaagtcaaagccagtccagacagggtaagtgatgaattctagagaaagaatttagtagtgtggagcaaagatgcactttcyaaattgtacggagcctgatcccaagctgttccaacagtagacttcaggaataaatgccagtaggctagtagaaacatttttcagaaatatagaaatatttttcagtagccaaagggccgtgataatcctgagtatctgagaattctgtcttccctgcaatataacaacattgtgaaaggcacatttcaactactcataaatc

SEQ ID NO: 105021 - DNA, 633 bp, Homo sapiens
aactactcataatgacgtacccaggattgggtaatttataaagaaaagaggttaaattgactcacagttccaaatggctgagaaggcctcaggaaacttactatcatggcagaaggggaagaagcaagtcttaggtggaagcaggcaagagagagtgggtttgtaaaggtggaactgtcagacacttataaaaccatcaaatctcatcgtatgtcactcactatcatgaaaacatcatgggggatactgcccccacgatccaattaccttccaccaggtaacttcttygacacgtggggattatggggattataattcaagatgagatttgagtggggacaaaaagtttaaccatatcacttgtcttagatttcaattacactaacatttactgtcaggtattgagggtttcaaatgaataaaacatggtatgtttccagtttatagttgagtgagagtatgactataatttatgccaggcaataacaatattacacaaaacacctcaacatataattatttaataatgtaagtacaatgtgaaaggtataaggggatcgtgtaatagaatgagaggaataaacactgtgctccccttcatttacccagtctcattacacctgtctctttatt

SEQ ID NO: 105022 - DNA, 598 bp, Homo sapiens
atgaatattaggattgttttttcaagttctgtgaataatgatggyggtattttaacaagaatttccttgaatttgtcgaatgcttttggcagtatggtcattttcacagtattgactctatccgttcatgatcatgggatgtgtttccatttgtttgcgtcatctatgatttctttcagcagtgttttgtagttttcctgtagaagtctttcacctccttggttaggtatattcctaagtattttattgtttttgcagctgaaaaataatacttttaaactgtatgcatagtacacagtttgacccagattaagaatgaaaatgcttctattagccatatatatgtcctctgtgtgcccctgaatctccctcctttctccctcttaggaataaccactgccacgaattttgtgttagtcatctctgtgacttaaaaaatactattttacttcatattgtttccccttaacaatatgaggtttaactctgcatgttttaagtttacctaaatgataataccttatgttttcttcaacttatacttttattcagtattatttttcagtgatccagccatggcattaaatgtgactatatt

SEQ ID NO: 105023 - DNA, 658 bp, Homo sapiens
tcttacggctttatttacgttgcacctatgattttcttgtttcttgaggacaatgttaattaagaaggaaaattggctgatcttgagtaagtctttctctcccaagattcacatcactaatttgtacaatagtcttgatttaaatagtctgtaaagttctattaagttatactatgttgtataacccctacttaatattattagtagttcaatatatttaatcatgaattaggattttcaggcttatgggtgcagacagtttagtatctgtgaagcatttaggtacctggttgatacacatttgagtttggtctgaatcttaatgcatcatgttctcaaatattaaagactattgaatttggttgttcttggatgatcttcactctgtatatcccaaatgtaatagtcatccttttaaaaatgacctttgattttatttgtttgtttttgttcacaaaatgtgaaggcattgatgaaaactctgtctgtggagttaggcagccttctttcatacccaattccaccacttcgtgactrtgaattttggcaagtcactcaatttttctaagggtattttctcatctgttgaaacaggaaaattaaaaaattatgaagtttaaaatttttacatattaagtgcaccacattttaagtgtga

SEQ ID NO: 105024 - DNA, 611 bp, Homo sapiens
gccccgactaccagtcttacttccacaccatcgaggagctccaacagaaggtgaggtgtgggatcgcttgggtgtgctgggtctgagatggcagaggcaagacaggaggaatccatgtaargctcagagaactttgggttcttggtttctcttggacatgatcatagacaccacacgtggagaaggagcctagggcatgatgctttgtgtgtgaactgtcttcctgttctcctcagatcctgtgcagcaaggccgagaatgccaggctgattgtacaaattgacaatgccaagctggctgccgatgactttaggatcaagtaagtcaggcggaggagggccagggtgactccttccccaccctccatcccaatgcccaaatacttgttgagtgagggaatcattgtcatttcttccttgctagattctctacagtaaaattttcattacaatcgaagctgatggaagatggaagggaaaactcctcattaatccaagcatatatgtttgtcttccttcatttatttccctaaaatggaggataaggcagcctgagttcattaaccaggagcaaaatgaggtgatttgaaggatgaactgagcaagacagcc

SEQ ID NO: 105025 - DNA, 529 bp, Homo sapiens
tgtctttaaaacagcagataaaatactgagcaaatgttaaatttagacttcacaaacaagaggactttctgcatatctgctttgtttaccgtatattcacacacatctaaaaatttcaaacaaggtagattgcaattaagacagagtttttcttagyatcagtttttatatctttaaaatggggatagtgcaaatctaatatgttagtcgtgacacttaataatgtcaataaaagtgctaagtaaaatttaggatattttatgagttgtgagctctttgtactaccaagtcaaaaacaattattctttgtaatagcagtacccaactcagaaatgtggtaactgtctttctaaattacattgattgtttatactgcaaaatttaaaacacatgatattttaagtagcacaaagaaattacatctataaatatccctaaaatggtaaaatgtagcaaaatactttctcatactacagagaatatcctagtttataaaaagtcaaagtaaggttgtacaatgaacaaaaat

SEQ ID NO: 105026 - DNA, 632 bp, Homo sapiens
tattttatatagaataaaaggaataattgatgtaaaattggaggatataaaaatcatttccaagaagctggaataaagcaggccgaggggccatcagttaccttaaaaaagtccctcaacaaaatttcaccctgatcattaaaaccatctctactggcattttccttaattgtcttatctttttgtatagatcataatttccaaaattatgtccttgattgaatatatgtgtaccgcctttggcattctttgcctccacaaaaattgagaagattcaaaagcaggatgtaaactgagcattggccttttgattttaacaaraagaacaagggacagtgctttgtagtaattcaaggaaaaatttaaaaattacttttatagccagaaacctaagattcactatgtggttgtgttggtagaagtgagatgatactgggaatgtttttggtacctacatagacccacatctaacattgcaaggtgcaaggaaagagtaaaattagcagtcccagctcacaaggcaaccacttcccaatctcatccctactcattatcacataaggagggacctcacaagcatacctgggacacacagcacagagacccaacctccattcacacacccctgaaac

SEQ ID NO: 105027 - DNA, 529 bp, Homo sapiens
ccataatgctatagaaatttatttggtttcttcagaaactagaatccctaagggccatagtctgtctcccatagataggccgaaagctgtgattctactttctgtccttatttattagtgtgtagttggatggtacattatctaacatcagaagccagtgggcaactttccaatctgtgctactaatagagataaatgtgtagcagaggtggcaaactggctaagcgcctaccaaaggcagcccgagggtaagttctgtttagccatttattaaaggcaacatagctaggtgcaggttgtactctgtcaatacaagcaacttggcaccagactcacatcactaaatcataccaccacgatttgagtttgtgacccctggcagacactataagtaaattaatatgagtgattagcataaggacaaccagagctcaggtaggtatggagytagccagatcctacagctccagcccttgcgagccctagccattgtactctttagaagaagcctcttcttttggtggtgtga

SEQ ID NO: 105028 - DNA, 530 bp, Homo sapiens
tgggtagttaattctttaagatggattaaaaacatcagtctcattctctagtggcatcttgtctctactgttcacttstcttttgattctgacacaaccatctaaccccattcttcagacatgggtgctgacatccaacagaggctcggcttgtctgtgtttcttttctctttgttcctgggcacgtctgctaggaacttctaaggcaggaagaagcccagcattacacctttccccagactgtatgcggcatactaatgcttgctccctgggcacttgtaattgcagatatggactgtttatgacagtgatgaaagtggatgaacagctgcagctgccaggcaaaagataatgcaggaatgagaatgtcaaagtggctatatctgaacttaaattaacctttcttgttgctcttctttttctctccttttccattcaattttccaccccagggttcccagcatcttcctcaagactttgatctattttgctatattgactgagttgactgctccggtagatggatagtg

SEQ ID NO: 105029 - DNA, 530 bp, Homo sapiens
tgggtagttaattctttaagatggattaaaaacatcagtctcattctctagtggcatcttgtctctactgttcacttgtctkttgattctgacacaaccatctaaccccattcttcagacatgggtgctgacatccaacagaggctcggcttgtctgtgtttcttttctctttgttcctgggcacgtctgctaggaacttctaaggcaggaagaagcccagcattacacctttccccagactgtatgcggcatactaatgcttgctccctgggcacttgtaattgcagatatggactgtttatgacagtgatgaaagtggatgaacagctgcagctgccaggcaaaagataatgcaggaatgagaatgtcaaagtggctatatctgaacttaaattaacctttcttgttgctcttctttttctctccttttccattcaattttccaccccagggttcccagcatcttcctcaagactttgatctattttgctatattgactgagttgactgctccggtagatggatagtg

SEQ ID NO: 105030 - DNA, 530 bp, Homo sapiens
tgggtagttaattctttaagatggattaaaaacatcagtctcattctctagtggcatcttgtctctactgttcacttgtcttttgattctgacacaaccatctaaccccattcttcagacatgggtgctgacatccaacagaggctcggcttgtctgtgtttcttttctctttgttcctgggcaygtctgctaggaacttctaaggcaggaagaagcccagcattacacctttccccagactgtatgcggcatactaatgcttgctccctgggcacttgtaattgcagatatggactgtttatgacagtgatgaaagtggatgaacagctgcagctgccaggcaaaagataatgcaggaatgagaatgtcaaagtggctatatctgaacttaaattaacctttcttgttgctcttctttttctctccttttccattcaattttccaccccagggttcccagcatcttcctcaagactttgatctattttgctatattgactgagttgactgctccggtagatggatagtg

SEQ ID NO: 105031 - DNA, 530 bp, Homo sapiens
tgggtagttaattctttaagatggattaaaaacatcagtctcattctctagtggcatcttgtctctactgttcacttgtcttttgattctgacacaaccatctaaccccattcttcagacatgggtgctgacatccaacagaggctcggcttgtctgtgtttcttttctctttgttcctgggcacgtctgctaggaacttctaaggcaggaagaagcccagcattacacctttccccagactgtatgcggcatactaatgcttgctccctgggcacttgtaattgcagatatggactgtttatgmcagtgatgaaagtggatgaacagctgcagctgccaggcaaaagataatgcaggaatgagaatgtcaaagtggctatatctgaacttaaattaacctttcttgttgctcttctttttctctccttttccattcaattttccaccccagggttcccagcatcttcctcaagactttgatctattttgctatattgactgagttgactgctccggtagatggatagtg

SEQ ID NO: 105032 - DNA, 605 bp, Homo sapiens
ctaagaaaactggctagccacatggggaagaaggaaatattggactcctacttcttaccatgtacaaacattaactcaagatgaattaaagacttaaacgtaagacctgaaactataaaaaaatcctagaagacaaccaagaaatactcttctagacactggcctaggcaaaaaatttatgatgaagatccccaaagcaaatgccacaaaataaaaaataaacgaacaggacttaattaaattaragagtttctgcacagcaaaagaaactgtgaacagagtaaacacaacctacagaatgggataaaatatttgcaaactatggatccaacaacagattaatatccagagtctatgaggaacttaacaagagaaaaacaaaagtcccattaaaaaatggccaaaggacatagacacttctcaaaagaagacatacagcagccaaaaacatataaaaaatgttcaacatcactaatcatgagaaagatgcaaatcgtaaccacaatgagataccaccagtcagaatggctattattacaaaatttaaacataacaggccaggcacagtggctcacacctgtaatcctagcactttgggaggccga

SEQ ID NO: 105033 - DNA, 605 bp, Homo sapiens
ctaagaaaactggctagccacatggggaagaaggaaatattggactcctacttcttaccatgtacaaacattaactcaagatgaattaaagacttaaacgtaagacctgaaactataaaaaaatcctagaagacaaccaagaaatactcttctagacactggcctaggcaaaaaatttatgatgaagatccccaaagcaaatgccacaaaataaaaaataaacgaacaggacttaattaaattaaagagtttctgcacagcaaaagaaactgtgaacagagtaaacacaacctacagaatgggataaaatatttgcaaactatggatccaacaacagattaatatccagagtctatgaggaacttaacaagagaaaaacaaaagtcccattaaaaaatggccaaaggacatagacacttctcaaaagaagacatacagcagccaaaaacatataaaaaatgttcaacatcactaatcatgagaaagatgcaaatcgtaaccacaatgagataccaccagtcagaatggctattattamaaaatttaaacataacaggccaggcacagtggctcacacctgtaatcctagcactttgggaggccga

SEQ ID NO: 105034 - DNA, 609 bp, Homo sapiens
acttaaatctaagacctcaagctatgaaacttctataagaaaacattaggaaaattytccaggacatttggaaacttcttgagtaataactcacaagcacaggcaaccaaagcaaaaatgggcaaatgtgatcacaccaggttaaaaagctcctacaccataatggaaacaatcaacaaagtgaagagatcacccacagaatggaaaaaaaaatttgcaagctacgtatctgaaagggcttaataaccagaatatatgaggagctcaaacaactttattttttaatctaataattggatttcaaaatgggaaaaagattagaatagacatttctcaaaagaagatatccaaatgacaaacaggcacatgaaaatgtgctcaatatcattgatcatcaaagaaatgcaaatcaaaactacaatggcatatcatctcacccaagttaaaatggcctttacccaaaagtcaagcaataacatatgctggtgaggatgtagagaaaagggaattctcatacactgtttttgggaatgtaaattagtacaaccattacggaaaacactttggaagtttctcaaaaaactagaaatagagataccatatgatcca

SEQ ID NO: 105035 - DNA, 609 bp, Homo sapiens
acttaaatctaagacctcaagctatgaaacttctataagaaaacattaggaaaattctccaggacatttggaaacttcttgagtaataactcacaagcacaggcaaccaaagcaaaaatgggcaaatgtgatcacaccaggttaaaaagctcctacaccataatggaaacaatcaacaaagtgaagagatcacccacagaatggaaaaaaaaatttgcaagctacgtatctgaaagggcttaataaccagaatatatgaggagctcaaacaactttattttttaatctaataattggatttcaaaatgggaaaaagattagaatagacatttctcaaaagaagatatccaaatgacaaacaggcacatgaaaatgtgctcaatatcaytgatcatcaaagaaatgcaaatcaaaactacaatggcatatcatctcacccaagttaaaatggcctttacccaaaagtcaagcaataacatatgctggtgaggatgtagagaaaagggaattctcatacactgtttttgggaatgtaaattagtacaaccattacggaaaacactttggaagtttctcaaaaaactagaaatagagataccatatgatcca

SEQ ID NO: 105036 - DNA, 582 bp, Homo sapiens
taaaaacctgtttgttgaataaacaacacagaataacacataaatacataactcattgctctaaaagtaagaaagactgatayaagctaagaagcaagacaactgaaaattgttctagtggactaatacaaaacttcagataggaagggttgaaatagatggcaaaaagctaaatcacaaaacatattcacttttaaagatgcctaaagttagcaattttgtttttaaaggttacatttctggtctggaagggaaaaagcttagaagtcgtcagtccatgctccaacaataaaagctagaaaaactgaaaaatcaacaactcttcttagatactcagagaagtaaggttgcagggcaaaccactcctcccaaaattggagatatgcacgtaggtacagagaatcacaacttaatggaacagaaacctaaaccgggtagaaaactttggaccgtaattgatgaattgttggaggcttacagtggaccatttgaaagttaaaaaatgaggaccccacacatttttgtaagttttatttacaggagctccaccaagttctcacagtgagtattagagaaaaatcc

SEQ ID NO: 105037 - DNA, 582 bp, Homo sapiens
taaaaacctgtttgttgaataaacaacacagaataacacataaatacataactcattgctctaaaagtaagaaagactgatacaagctaagaagcaagacaactraaaattgttctagtggactaatacaaaacttcagataggaagggttgaaatagatggcaaaaagctaaatcacaaaacatattcacttttaaagatgcctaaagttagcaattttgtttttaaaggttacatttctggtctggaagggaaaaagcttagaagtcgtcagtccatgctccaacaataaaagctagaaaaactgaaaaatcaacaactcttcttagatactcagagaagtaaggttgcagggcaaaccactcctcccaaaattggagatatgcacgtaggtacagagaatcacaacttaatggaacagaaacctaaaccgggtagaaaactttggaccgtaattgatgaattgttggaggcttacagtggaccatttgaaagttaaaaaatgaggaccccacacatttttgtaagttttatttacaggagctccaccaagttctcacagtgagtattagagaaaaatcc

SEQ ID NO: 105038 - DNA, 582 bp, Homo sapiens
taaaaacctgtttgttgaataaacaacacagaataacacataaatacataactcattgctctaaaagtaagaaagactgatacaagctaagaagcaagacaactgaaaattgttctagtggactaatacaaaacttcagataggaagggttgaaatagatggcaaaaagctaaatcacaaaacatattcacttttaaagatgcctaaagttagcaattttgtttttaaaggttacatttctggtctggaagggaaaaagcttagaagtcgtcagtccatgctccaacaataaaagctagaaaaactgaaaaatcaacaactcttcttagatactcagagaagtaaggttgcagggcaaaccactsctcccaaaattggagatatgcacgtaggtacagagaatcacaacttaatggaacagaaacctaaaccgggtagaaaactttggaccgtaattgatgaattgttggaggcttacagtggaccatttgaaagttaaaaaatgaggaccccacacatttttgtaagttttatttacaggagctccaccaagttctcacagtgagtattagagaaaaatcc

SEQ ID NO: 105039 - DNA, 623 bp, Homo sapiens
ctccatgcgtctctaactcagtgattcttaaccagtcgacacttgccagtatctggagacagtagtggttgtcacagtttggtagggaatggtgttactggcatctaggcggtacaggccaacaatgctgttaaatatcccacagtggcacagacccactgcaaagaattaccttgtccaaagtcaaaagtgtagagrttgaaagaacctgctcaattggtaagaatttcttttcttctttttacctattcattagcatacctatcaaaattgacaaaaatttcttaatatcatttaatactcaacccataatcacttgctccaatcatctggaaatatctcattacaattggtttgttgaaattatgccttatatgtctggcagcatcactatgaagtgcatatatttataattttcactaataacaaggtaaatataaaactgattaattaaaaatctttcataagaattcaaaggacacagaattttgtgaaatgtagtatttttacttaagtgtcttttttctttctatttctacccccagtctattatttcataaaccagtggatacataagtagtttcttgggggataatagattacttacacattttctatgtagt

SEQ ID NO: 105040 - DNA, 623 bp, Homo sapiens
ctccatgcgtctctaactcagtgattcttaaccagtcgacacttgccagtatctggagacagtagtggttgtcacagtttggtagggaatggtgttactggcatctaggcggtacaggccaacaatgctgttaaatatcccacagtggcacagacccactgcaaagaattaccttgtccaaagtcaaaagtgtagagattgaaagaacctgctcaattggtaagaatttcttttcttctttttacctattcattagcatacctatcaaaattgacaaaaatttcttaatatcatttaatactcarcccataatcacttgctccaatcatctggaaatatctcattacaattggtttgttgaaattatgccttatatgtctggcagcatcactatgaagtgcatatatttataattttcactaataacaaggtaaatataaaactgattaattaaaaatctttcataagaattcaaaggacacagaattttgtgaaatgtagtatttttacttaagtgtcttttttctttctatttctacccccagtctattatttcataaaccagtggatacataagtagtttcttgggggataatagattacttacacattttctatgtagt

SEQ ID NO: 105041 - DNA, 585 bp, Homo sapiens
cacatttattgacttgcatatgttaaaccatccctgtgtccctggtatgaaacccacttgattatggtggattatctttttaatatgctattggatttggttagctactattttattgaggatttttgcatctatgttcatcaagggtattrgtctgtagtttttgttgttgttattgttgttgtatcctttcctggttttggtcttagggtgatagtggcttcatagaatgattgaggaagaatttcttctttctctgtcttgtggaatagtgtcaatagtattggtaccaattctttgaatgtctgatagaattcagctatgaatccatctggtcctggacttttctattggtaattttttaaaaaaattaccatttcaatcttgctgcttgttattggtctgctcagggtttctatttcttcctggtttaatctaggagggttgcatatttccaggaatttatccgtcttctctaggttttctagtttgtacacataaatgtgttcatagtaaccttgaataatctttgtctgtgttattctttgtaatatctctcattttgtttctaattgagcttatttg

SEQ ID NO: 105042 - DNA, 683 bp, Homo sapiens
cttgcacttgatgtagctgcgaaatcacgaagatggccaagttcttctgcaagccactaccatgaggaagaagcattaagtccggtctttgggaaatagcggtggttacatttttgctttttaaaatcatacccacaacatctgtcatgtcatattctcttacattgtatcaagtcagactttaacaatggtgtattcttctatttcayaatttcactggatagccatatagaattttgcagctattaaaatgaaacacagtttttgtttttaaatttttttgtttttagattttttcagtatttgaactggattctgaaattctgtttttctaatgataagcttcacatattaaatagtctgtgctgagacagttgatttgagagaagattattgagtgtgttcttttacatgtgcctcctcatatccacttaaattttagtgggctaatccattattttccctatattgtgccagtactttgtattatcactcaatatttaaatatgaatattctagttttaatctagtgagtgactaacgtctctctttctctctatgtatatctatcttttttagcctatttattaagaactttattgttaacaaaattctggaaagaaaggtactactgcattttggaatgcatttggattttggcacccaaaatatctggattaaat

SEQ ID NO: 105043 - DNA, 683 bp, Homo sapiens
cttgcacttgatgtagctgcgaaatcacgaagatggccaagttcttctgcaagccactaccatgaggaagaagcattaagtccggtctttgggaaatagcggtggttacatttttgctttttaaaatcatacccacaacatctgtcatgtcatattctcttacattgtatcaagtcagactttaacaatggtgtattcttctatttcacaatttcactggatagccatatagaattttgcagctattaaaatgaaacacagtttttgtttttaaatttttttgtttttagattttttcagtatttgaactggattctgaaattctgtttttctaatgataagcttcacatattaaatagtctgtgctgagacagttgatttgagagaagattattgagtgtgttcttttacatgtgcctcctcatatycacttaaattttagtgggctaatccattattttccctatattgtgccagtactttgtattatcactcaatatttaaatatgaatattctagttttaatctagtgagtgactaacgtctctctttctctctatgtatatctatcttttttagcctatttattaagaactttattgttaacaaaattctggaaagaaaggtactactgcattttggaatgcatttggattttggcacccaaaatatctggattaaat

SEQ ID NO: 105044 - DNA, 353 bp, Homo sapiens
attgacgcaaaccccctacttacagtaaatcatttgaaacatatagacaatgctaatctcctcacatcacaagattctatgacagcttgacatctgggtctataagaatacatttcctcaagtggcaaaatttataacaaagctgctcttattaatgggtaagttaagttagaatttttaactactgttaattcacctctttaaaaaggtgaatagcataaatgctggcatcctttagctgtaaatgaaatacgatctgttccttcatgatctggccctgttgtctctcatctgctatcccaccccacctcagatggcatttctygaggacaaggaccttgccctatttatgt

SEQ ID NO: 105045 - DNA, 577 bp, Homo sapiens
gcataaacaaatgagcctagatgtgctccaatgaaacttaatagacattaaatttttgtgccatgaaaaattatttttcttttgatatttttggaccatttaaaaatgtaaaacctatgcttagcttgaggaccatacaaaaacaggtggtgacctggatttggtctacccgctgtagtttgctgagccagctctctatataactcacaatctaatcacattaaaaatcttggcagtggaccacccaaaatcagccacactcatgacaggagaggcctctcaatatcaataggcgactccttccttcaattttctcttggtgattccccatcacacttgttgaccatgcttcttcagtggactgtcaccttttggagaaaggggagaggatgatctcattcatatttacacactgkgcttctggcacattgcacgtctcttaaatgtgtttaaaataaatggtggatgggtaaatttatgtttctccctttcagagaggtttcttcttcttggtttttaagaatgccttgccaccaagtcatgccaccgctgaaaagaccctttgggcttgaatttc

SEQ ID NO: 105046 - DNA, 577 bp, Homo sapiens
gcataaacaaatgagcctagatgtgctccaatgaaacttaatagacattaaatttttgtgccatgaaaaattatttttcttttgatatttttggaccatttaaaaatgtaaaacctatgcttagcttgaggaccatacaaaaacaggtggtgacctggatttggtctacccgctgtagtttgctgagccagctctctatataactcacaatctaatcacattaaaaatcttggcagtggaccacccaaaatcagccacactcatgacaggagaggcctctcaatatcaataggcgactccttccttcaattttctcttggtgattccccatcacacttgttgaccatgcttcttcagtggactgtcaccttttggagaaaggggagaggatgatctcattcatatttacacactgtgcttctggcacattgcacgtctcttaaatgtgtttaaaataaayggtggatgggtaaatttatgtttctccctttcagagaggtttcttcttcttggtttttaagaatgccttgccaccaagtcatgccaccgctgaaaagaccctttgggcttgaatttc

SEQ ID NO: 105047 - DNA, 527 bp, Homo sapiens
tgcactctcactacttctatccaacattataccaaagatcctaaaaaagaaagagaaataaaagcatacattttgaaaaggaagaagtaagcttttaaaaatagacaatataattgtgtaggcaataaatagtacaggatctacataatagttactagaactwataggagcatttagcaaggttcaataatacaaagatgtaaaatatcaaatatatttctacatactatcaatgaatgcctcaaatttaaaaatcataataatagtttaaagaaactatttgcaatagtttaaagaaactctgaactattgaaaaatataactaacaaaatttatgtaagatttgtacggtggaaattataaaacattggtgagataaattgaaaacacttaaaaatggagtcatacaactttcatgaagtagactactcagtattttcttatgtgaattttcttcaaactgatttataaacaaattcaatgcaatactatcaaaacttcagtattttttgtttatttttagaaat

SEQ ID NO: 105048 - DNA, 660 bp, Homo sapiens
tgataatgtttctaaccaagtcatgaaacttttcttcctctctaatgatattatatatatatgcacatgatgtatataactatataaaaattataacattatatatagttgtattaatccatttatacactactataaagaaatacctgagactgggtaatttataaaggaaagaggtttattaattgactcacagttctgcatgatgactgcggaggcctcaggaaacttacaattatggtgcaaggggaagcaaacacatccttcttcaccaggtggcaaggtggcaggagagagaagtgcagagcgatgaagaaagagccccttataaaaccatcggatcttatgacaagtccctcagtatcacaaagacatcatgatctaatcacctcccacaaggtccctctcccaacatgtggggattacaattcagttgacaattcaagatgagatttgggtagggatmcagagccagaccatgtcaataattactatatatatatatatatacacacacagacacatacacacacacatatacatacatacacacacacagacatacacacacgtatgagacctcttattggttttgtttttggagaaccatgactaatgaaacatatgatacatattttatcactacatgaaagtcccagt

SEQ ID NO: 105049 - DNA, 660 bp, Homo sapiens
tgataatgtttctaaccaagtcatgaaacttttcttcctctctaatgatattatatatatatgcacatgatgtatataactatataaaaattataacattatatatagttgtattaatccatttatacactactataaagaaatacctgagactgggtaatttataaaggaaagaggtttattaattgactcacagttctgcatgatgactgcggaggcctcaggaaacttacaattatggtgcaaggggaagcaaacacatccttcttcaccaggtggcaaggtggcaggagagagaagtgcagagcgatgaagaaagagccccttataaaaccatcggatcttatgacaagtccctcagtatcacaaagacatcatgatctaatcacctcccacaaggtccctctcccaacatgtggggattacaattcagttgacaattcaagatgagatttgggtagggatacagagccagaccatgtcaawaattactatatatatatatatatacacacacagacacatacacacacacatatacatacatacacacacacagacatacacacacgtatgagacctcttattggttttgtttttggagaaccatgactaatgaaacatatgatacatattttatcactacatgaaagtcccagt

SEQ ID NO: 105050 - DNA, 585 bp, Homo sapiens
atattgcttccttgagattcctaaactactcaaagcctggttccgttgttataatcattgcatagtgcattttgccattctaaaaatatttctggccaggcacggtggctcaagcctgtaatcccagcactttgggaggccgaggcaggcggatcacttgaggtcaggaattcaagacgagcctggccaacatggagaaarcccgtctctactaaaaatacaaaaattagccgggcgtggtggccggcgcctgtaatcccagctactcaggaggctgaggcaggagaatcgcttgaatttaggaggcagaggttgcagtgagccgagatcgcaccactgcactccagcctgggcaacagagggatactctatctcaaaacaaaacaaaaacaaacaaacaaacaaacaaattatatatatatatatttcttcaagtagtcactatgttgctagctgcttaagatgctgaaatctttcaccaaacaaatttaccaaaagtataattgttaattcacaccaaagtttttgtaaaaaatgtttttcattgtttctctcccaaatatccaacgagacaaaagtggcaca

SEQ ID NO: 105051 - DNA, 585 bp, Homo sapiens
atattgcttccttgagattcctaaactactcaaagcctggttccgttgttataatcattgcatagtgcattttgccattctaaaaatatttctggccaggcacggtggctcaagcctgtaatcccagcactttgggaggccgaggcaggcggatcacttgaggtcaggaattcaagacgagcctggccaacatggagaaagcccgtctctactaaaaatacaaaaattagccgggcgtggtggccggcgcctgtaatcccagctactcaggaggctgaggcaggagaatcgcttgaatttaggaggcagaggttgcagtgagccgagatcgcaccactgcactccagcctgggcaacagagggatactctatctcaaaacaaaacaaaaacaaacaaacaaacaaacaaattatatatatatatatttcttcaagtagtcactatgttgctagctgcttaagatgctgaaatctttcaccaaacaaatttaccaaaagtataattrttaattcacaccaaagtttttgtaaaaaatgtttttcattgtttctctcccaaatatccaacgagacaaaagtggcaca

SEQ ID NO: 105052 - DNA, 591 bp, Homo sapiens
agcaaaacaaataatgaagaatgaatacaataaagaatacaataaattgggaattgtgaagtgtgttagagggtgatacacgctatggagaaaaaagaaaaaaatagaacagcataaagacagtttggagtgctagatgaagggactgactgcaattttaaataagttggtcaagatatggcttattgggatgaggtcattggcgcacacactttggggatgcaaagttagtaataatgatatctkggaggtgatatttccaagtaaaggcaacagccaatgcaagatacgtgaggcatttctgagggacagtgaggagtccagtatgattagagctgaatgagggttacagataactgatgttggaaggtaccagggatgtgtgtgtgggcagggggagctgggggtgaagtcaaggacaagggcacaggtcatgtaaagctgtgtaggccattgtaaaggttttggctgtcattgctaaagaatgggaggccaatgcagaatgttgaaaatagaagtagcatgatttatctagtgctttaaaagaatgctgtgttgagaatagactgtaaggaaacaaggataaaagaa

SEQ ID NO: 105053 - DNA, 586 bp, Homo sapiens
tacccaaaaggaaatcaaacgagaaattataacagaaagattacagagaagtctccacacatttgagaactaaatatgatacatctaaaacattcagaataaaaatggaagcctcaaatacatttttaaaagacagaatgaaaattaaaaagaaatrtatcaaaacgtgtagggtagagctaaagcagagctgacagggacatttaaagcatgaaatgaatacattcaaacacagaaaaagcctcaaatcaataatatcagcttctacctcaagaacttagggaagaaatgagcaaataaagccaaaacaattaaaaggaagtaaataacaaagataataacacccccatgcctcagccgaagctcgaccggtgcaacttcatctaattcacctgtatcttgcccatcccagctccactgaacccaaatatgtcatgctttcatacaccagtgagcccatgagtgtgccacttcctcagcttagaatgcacacccaccattgtctacttggttaattattcatcaacctgcaagatttcaaagccctcagaagggttctttatcacaggctacagcacactgcaga

SEQ ID NO: 105054 - DNA, 586 bp, Homo sapiens
tacccaaaaggaaatcaaacgagaaattataacagaaagattacagagaagtctccacacatttgagaactaaatatgatacatctaaaacattcagaataaaaatggaagcctcaaatacatttttaaaagacagaatgaaaattaaaaagaaatatatcaaaacgtgtagggtagagctaaagcagagctgacagggacatttaaagcatgaaatgaatacattcaaacacagaaaaagcctcaaatcaataatatcagcttctacctcaagaacttagggaagaaatgagcaaataaagccaaaacaatkaaaaggaagtaaataacaaagataataacacccccatgcctcagccgaagctcgaccggtgcaacttcatctaattcacctgtatcttgcccatcccagctccactgaacccaaatatgtcatgctttcatacaccagtgagcccatgagtgtgccacttcctcagcttagaatgcacacccaccattgtctacttggttaattattcatcaacctgcaagatttcaaagccctcagaagggttctttatcacaggctacagcacactgcaga

SEQ ID NO: 105055 - DNA, 457 bp, Homo sapiens
gcatgtacaaaagggaccatcttttcatgtggctttgtgtccgttcctctccttgcgtgtgctcttattttcagataagatgatttgtaaaataatgtggcacttctgttaaggctcattatatagatcatttttacaactatctgaattccaaaaaagtttttcaataataataataataataaggcttgctttctccacttatgcaataaaatctatctcagaattcaatctatcccaggtcagaccaagagcatagtattaaattatctggtgatgaattatggacatgtaggtttttattaattgggaaagatttgatactccrtcactgtatctataattttgtaatctgagagaccaaggtaagcaagacggatagagttaaatctgttttctcttaacttgagactcctactaaattttgaattgctcttgattaggctcttgagtgtcc

SEQ ID NO: 105056 - DNA, 609 bp, Homo sapiens
aactctaaactgatcctttgttctctcacttccattttgcctgtgaagtatstaaattgctctgcgcatccagattcaaaacacagaactttttggattccacaaaacgaaaccactcacacaaaacctttcacacaattgagacttcactgaggatttggtaagggacaaagaggcaaggctttacattttgtttcctaaaataagctatttaaatcatataattttatttctgttctccatgacagtactaacatgggcatggtatggaggagcttctttctctctctctccatctctctccctcattgtctctttctatctccttcttcccccttcctcacacagtgcccagccttattggatcatctcttctttattatgcagagtaattcattcctgaaggagtttccatttccaaatttcagacttggcattcagcaaaacaaaagctacccatcccacctccctgcccagttaacaggactggctttctttaaaggcattttacagattatgttttgtaatacgagcatattcctgtggttccatccactatccctaatcttcccccaaaagacatgctgatgaattaagttttctgcttct

SEQ ID NO: 105057 - DNA, 609 bp, Homo sapiens
aactctaaactgatcctttgttctctcacttccattttgcctgtgaagtatctaaattgctctgcgcatccagattcaaaacacagaactttttggattccacaaaacgaaaccactcacacaaaasctttcacacaattgagacttcactgaggatttggtaagggacaaagaggcaaggctttacattttgtttcctaaaataagctatttaaatcatataattttatttctgttctccatgacagtactaacatgggcatggtatggaggagcttctttctctctctctccatctctctccctcattgtctctttctatctccttcttcccccttcctcacacagtgcccagccttattggatcatctcttctttattatgcagagtaattcattcctgaaggagtttccatttccaaatttcagacttggcattcagcaaaacaaaagctacccatcccacctccctgcccagttaacaggactggctttctttaaaggcattttacagattatgttttgtaatacgagcatattcctgtggttccatccactatccctaatcttcccccaaaagacatgctgatgaattaagttttctgcttct

SEQ ID NO: 105058 - DNA, 609 bp, Homo sapiens
aactctaaactgatcctttgttctctcacttccattttgcctgtgaagtatctaaattgctctgcgcatccagattcaaaacacagaactttttggattccacaaaacgaaaccactcacacaaaacctttcacacaattgagacttcactgaggatttggtaagggacaaagaggcaaggctttacattttgtttcctaaaataagctatttaaatyatataattttatttctgttctccatgacagtactaacatgggcatggtatggaggagcttctttctctctctctccatctctctccctcattgtctctttctatctccttcttcccccttcctcacacagtgcccagccttattggatcatctcttctttattatgcagagtaattcattcctgaaggagtttccatttccaaatttcagacttggcattcagcaaaacaaaagctacccatcccacctccctgcccagttaacaggactggctttctttaaaggcattttacagattatgttttgtaatacgagcatattcctgtggttccatccactatccctaatcttcccccaaaagacatgctgatgaattaagttttctgcttct

SEQ ID NO: 105059 - DNA, 609 bp, Homo sapiens
aactctaaactgatcctttgttctctcacttccattttgcctgtgaagtatctaaattgctctgcgcatccagattcaaaacacagaactttttggattccacaaaacgaaaccactcacacaaaacctttcacacaattgagacttcactgaggatttggtaagggacaaagaggcaaggctttacattttgtttcctaaaataagctatttaaatcatataattttatttctgttctccatgacagtactaacatgggcatggtatggaggagcttctttctctctctctccatctctctccctcattgtctctttctatctccttsttcccccttcctcacacagtgcccagccttattggatcatctcttctttattatgcagagtaattcattcctgaaggagtttccatttccaaatttcagacttggcattcagcaaaacaaaagctacccatcccacctccctgcccagttaacaggactggctttctttaaaggcattttacagattatgttttgtaatacgagcatattcctgtggttccatccactatccctaatcttcccccaaaagacatgctgatgaattaagttttctgcttct

SEQ ID NO: 105060 - DNA, 487 bp, Homo sapiens
ggccctctatcttgaaactcttctcacccctttttctcataagcacggctctttctggacatcttcttatgtttttaccctttctgaacagattctttcactggattccatttatcttctggttccttaaatagaattgtttctttagcttctgtacttcagctwcttccctgctgctctgagccttccatgcctgacccacttcctaaatttactcccagaagattaatccctggttttttattttaagctctctttctctctctctctttctcatgagacagaaattacctaccattcatttttagcagccacaaggacatcaaatctcaaaaatgactgcttctggtttctcaaaatgaatatagccagaatttatcttcttatcgtgtatctgaacaggctttgttttcttggaaatccttctgcccactaataggagttcacccacacaagcttgaaatctcagagagcaatttgtgtgttt

SEQ ID NO: 105061 - DNA, 624 bp, Homo sapiens
agttttaggctacaaggttcatctgtgagtttttcatcttgtcgcaagtctgcacaaagttttccaatatatttatcgaaaaaatctacatcagtcaatcaacacagttcaagttggcattgttcaagggtcaactgtatactgttttaagctgttgaatttatggcattatgttaatcaggttttggtactggaaagtgggctgcaggtacaatggagatataaaagggtggggaagttttggaactgagaagtgagtggagaaaaattctgaggagcatagtagagaaagtctaaatcactgagataaggcctaaatcttcatcagactgctagtgataatctgcactctaaagatgttaccccagtgcaggctcagaaggaagtgaggarcatgttattggaaaccagaggaaggaagttacttgttaagtagtggcagaaagcttagtgaaattgtgacctgcagttatacagaaagcagaatttgtaaagaaagaacctggccatagctagggagatttctgagtaaaatgttaaagtatgtacccctgtcttcttgctgtttatagcaaaataggagaggaaagagataaattaaaggaagaactgttaaacaaaaag

SEQ ID NO: 105062 - DNA, 549 bp, Homo sapiens
tggccgaaacaaatgccagatatgtttaataaagtgtattctttccttggattatttttctcttctctttatgttcacatgatattagattgttttttcatcattacctctttttcctcraaaagaaatagtattaatggctgatatttaattcattttcacagtagagaacatgtcatctcctcagttttgctacattcactcaccacttatatgtaatttaatattttattttaaagtaatatgaaatttaatacaatatttttaaaaggaaactataaattactaccataaatagaaaaacaatatattatgctataaattataagttacttgtggaaacaaatgttatcacatttaacttcagatgctggtgcccacgaaatgttcttagcctgaggttgtctctctcctttttcatagcccttactagagtatttattgtttccttgttcatttttgccccttcccaaaatatgctaaaagacttcatttttcttcaagatgcagactcagaacctacactaatgcccaacagtcagcagatcc

SEQ ID NO: 105063 - DNA, 600 bp, Homo sapiens
aatttacatcatacctctactgcttcattcatttcccccatgtcattatttttttttttattttcagcccctttattgcttaccattgtaactttaaggaatatatttagatgattttttccatcaactatgtaaagtatcccttaactctccaccacataaaatgagtatatcagccttctgttttacccctttagttttcttcccctttgaagtctactttatctgatgttaatatagttactcctgtaaaaaatatatttgcacagtatatattttccatccttttacttycaacctatatcattatatttgaagtgagtttcctgtaaacaacatatagttgggtcatgtttttaaatccactctgcactcttttgtgtacttagaccatttatatttgagataattactgacgtgttggagcttaagtgtgccattttatttttctctgttgtttttcatccattttcttttttctgcctttctatgggttatgtgagtagtttttagagtctcattttacctacagtgtttttgagtatatctgttttatagttttttagtggttactctaggtattatattatataaacataa

SEQ ID NO: 105064 - DNA, 470 bp, Homo sapiens
acataagtaacaaacctgcacgttgtgcacatgtaccctagaacttaaagtataataataaaattaaattaaatttaaaaaaggatcttwctgtttgcttgggtgattaatcttgacgatcaagaagaagttggattgctgcttcacagtggggacaagaattatggctggattctcggggattctgagggcgcctttttgtgcttccattcccagtagcaaaagttaatggaaaaatgatagcaaccaagagaaggcaggaccagtatagattgaaggtctgtgtcatcccagcaggtaaagagcaaaattagctgagatgctgaatgaaaagaaaacatgggacggagaatggagatagaaattataaacgcttacctactatgacatcctgaccacttacagaaacaaggactgtagcagacatgcatattttctgtcttgcgtattgtgttgtgtgttatctgtgc

SEQ ID NO: 105065 - DNA, 480 bp, Homo sapiens
agatgccattgtggattctgccaacttcagytgatttagtcctaggaagaaacttaacagtctcagacatgctaattatcagaatgaaacagagttaaagctgagtagaaatttggctgtccattagacactgccttgggcaacataggcagggtaggcgtccagctaagtcacttaggcattatatggatccagttaaatcatgtaggcattgtattgagcaaccaaagtggggtaggggttcagctaagccatgtaagcactaccacgggtaacaagcccacaagcccggcctcagcattcccatcaatatcataacacaatgtaattgcacacagatataaagagaaagatatacattaatacatacatttgaattaaagataactatttaaagacctttgcaagtgcttcatactaggataggtccttgaaaatttttctttaggccgggcgcagtggctcacgcctgtaatccca

SEQ ID NO: 105066 - DNA, 480 bp, Homo sapiens
agatgccattgtggattctgccaacttcagttgatttagtcctaggaagaaacttaacagtctcagacatgctaattatcagaatgaaacagagttaaagctgagtagaaatttggctgtccattagacactgccttgggcaacataggcagggtaggcrtccagctaagtcacttaggcattatatggatccagttaaatcatgtaggcattgtattgagcaaccaaagtggggtaggggttcagctaagccatgtaagcactaccacgggtaacaagcccacaagcccggcctcagcattcccatcaatatcataacacaatgtaattgcacacagatataaagagaaagatatacattaatacatacatttgaattaaagataactatttaaagacctttgcaagtgcttcatactaggataggtccttgaaaatttttctttaggccgggcgcagtggctcacgcctgtaatccca

SEQ ID NO: 105067 - DNA, 480 bp, Homo sapiens
agatgccattgtggattctgccaacttcagttgatttagtcctaggaagaaacttaacagtctcagacatgctaattatcagaatgaaacagagttaaagctgagtagaaatttggctgtccattagacactgccttgggcaacataggcagggtaggcgtccagctaagtcacttaggcattatatggatccagttaaatcatgtaggcattgtattgagcaaccaaagtggggtaggggttcagctaagccatgtaagcactaccacgggtaacaagcccacaagcccggcctcagcattcccatcaatatcataacacaatgtaattgcacacagatrtaaagagaaagatatacattaatacatacatttgaattaaagataactatttaaagacctttgcaagtgcttcatactaggataggtccttgaaaatttttctttaggccgggcgcagtggctcacgcctgtaatccca

SEQ ID NO: 105068 - DNA, 480 bp, Homo sapiens
agatgccattgtggattctgccaacttcagttgatttagtcctaggaagaaacttaacagtctcagacatgctaattatcagaatgaaacagagttaaagctgagtagaaatttggctgtccattagacactgccttgggcaacataggcagggtaggcgtccagctaagtcacttaggcattatatggatccagttaaatcatgtaggcattgtattgagcaaccaaagtggggtaggggttcagctaagccatgtaagcactaccacgggtaacaagcccacaagcccggcctcagcattcccatcaatatcataacacaatgtaattgcacacagatataaagagaaagatatacattaatacatacatttgaattaaagataactrtttaaagacctttgcaagtgcttcatactaggataggtccttgaaaatttttctttaggccgggcgcagtggctcacgcctgtaatccca

SEQ ID NO: 105069 - DNA, 570 bp, Homo sapiens
ttcttggagatattcagtatgctttgaataaaataacttcctgttttaattttcttttgcttgcaactaaatctgccagcagtacagttctggcccttttagaagtcactatatagaaggctaagttagccagaagccttgagaaactaatgcaattattacaaatgtcctattttcaatgtaaacaacaataaggatgaaatctaatgtgtgggctatataggctaaatgtgtggcttgagttggttattgtgtactggtacttggccaaaagcaatacactctakgtaccagagtaatcaagacaagagtggcactttaactatggtttgaaatatacatagaattttgctctgtggaatctgaaagtatataaccaagaaacttctaggataactctagtattgtcggggaaagggcacacggattctttatgaggagcagaacataggaaaacaccctatttatgaggagaaaacataggaaaacaagagaaaagaaaagaaaaagtactagagaaatttgaatattctggtaactctagacacaacaaactttaaacaaagccaa

SEQ ID NO: 105070 - DNA, 570 bp, Homo sapiens
ttcttggagatattcagtatgctttgaataaaataacttcctgttttaattttcttttgcttgcaactaaatctgccagcagtacagttctggcccttttagaagtcactatatagaaggctaagttagccagaagccttgagaaactaatgcaattattacaaatgtcctattttcaatgtaaacaacaataaggatgaaatctaatgtgtgggctatataggctaaatgtgtggcttgagttggttattgtgtactggtacttggccaaaagcaatacactctatgtaccagagtaatcaagacaagagtggcactttaactatggtttgaaatatacatagaattttgctctgtggaatctgaaagtatataaccaagaaacytctaggataactctagtattgtcggggaaagggcacacggattctttatgaggagcagaacataggaaaacaccctatttatgaggagaaaacataggaaaacaagagaaaagaaaagaaaaagtactagagaaatttgaatattctggtaactctagacacaacaaactttaaacaaagccaa

SEQ ID NO: 105071 - DNA, 570 bp, Homo sapiens
ttcttggagatattcagtatgctttgaataaaataacttcctgttttaattttcttttgcttgcaactaaatctgccagcagtacagttctggcccttttagaagtcactatatagaaggctaagttagccagaagccttgagaaactaatgcaattattacaaatgtcctattttcaatgtaaacaacaataaggatgaaatctaatgtgtgggctatataggctaaatgtgtggcttgagttggttattgtgtactggtacttggccaaaagcaatacactctatgtaccagagtaatcaagacaagagtggcactttaactatggtttgaaatatacatagaattttgctctgtggaatctgaaagtatataaccaagaaacttctaggataactctagtattgtmggggaaagggcacacggattctttatgaggagcagaacataggaaaacaccctatttatgaggagaaaacataggaaaacaagagaaaagaaaagaaaaagtactagagaaatttgaatattctggtaactctagacacaacaaactttaaacaaagccaa

SEQ ID NO: 105072 - DNA, 570 bp, Homo sapiens
ttcttggagatattcagtatgctttgaataaaataacttcctgttttaattttcttttgcttgcaactaaatctgccagcagtacagttctggcccttttagaagtcactatatagaaggctaagttagccagaagccttgagaaactaatgcaattattacaaatgtcctattttcaatgtaaacaacaataaggatgaaatctaatgtgtgggctatataggctaaatgtgtggcttgagttggttattgtgtactggtacttggccaaaagcaatacactctatgtaccagagtaatcaagacaagagtggcactttaactatggtttgaaatatacatagaattttgctctgtggaatctgaaagtatataaccaagaaacttctaggataactctagtattgtcggggaaagggcacacrgattctttatgaggagcagaacataggaaaacaccctatttatgaggagaaaacataggaaaacaagagaaaagaaaagaaaaagtactagagaaatttgaatattctggtaactctagacacaacaaactttaaacaaagccaa

SEQ ID NO: 105073 - DNA, 497 bp, Homo sapiens
agaacataggaaaacaccctatttatgaggagaaaacataggaaaacaagagaaaagaaaagaaaaagtactagagaaatttgaatattctggtaactctagacacaacaaactttaaacaaagccaaaattctagctatgttaacataaattctcacattaaagactcatttatctcagcttccattacctgatgcaacatgtctggcttccagcaaaatattgtaagacattcttaagggcaagacataacaaagcatcagagttagactaagacacgacacagatattgaaattatctgacagaaattataaaataattatatatgttaagaattttaacrataaaggtaaagaatatacaagaacagatggtaatattagtagagaaatggaaatgctaagaaaaaaataaaaaataaaatactaaaaatcaaaaacactgtaaccaaaagaaatgtctttaatgagttcattggcagaccgtacacagcagg

SEQ ID NO: 105074 - DNA, 631 bp, Homo sapiens
ctgtgctgcctggatttagaaaaagagcaatgagagtaatgtaaaaccatccttctcactgtcttcaatgaatctttycttatttgtgcttcacccaggtgctgttatgtctcacctcgtttctctagctctgatgaaggtatttttgtgcatggatagttgttcaaattgatgtttttgcagggaatgagcactggaaagtcctattccataattttactgatgcgatgccctggcttttctccacatctctgaaatctaaattctaggcacacacgcttggcctctttggcatcccttgtattggctattccctctgcaaatgtcttctccaaaatatctgcatgactatctaacttactaccatctaagcccaaatgtcatcttcttaatgagctataccctgatgactttatttaaaattgcaaactatcccttctcccaaccctccaaaatccccactttgctttatttttgttgaatttatcactttttaaatatactgtgcagaaaagagttaacatagcaggactaactgctgttctttgaaaggcctgcttataggtttgttccttggctggtatctgggaacttggtttttggagagtttctaaaacttaactaacagcta

SEQ ID NO: 105075 - DNA, 631 bp, Homo sapiens
ctgtgctgcctggatttagaaaaagagcaatgagagtaatgtaaaaccatccttctcactgtcttcaatgaatctttccttatttgtgcttcacccaggtgctgttatgtctcacctcgtttctctagctctgatgaaggtatttttgtgcatggatagttgttcaaattgatgtttttgcagggaatgagcactggaaagtcctattccataattttactgatgcgatgccctggcttttctccacatctctgaaatctaaattctaggcacacacgcttggcctctttggcatcccttgtattggctattccctctgcaaatgtcttctccaaaatatctgcatgactatctaacttactaccatctaagcccaaatgtcatcttctyaatgagctataccctgatgactttatttaaaattgcaaactatcccttctcccaaccctccaaaatccccactttgctttatttttgttgaatttatcactttttaaatatactgtgcagaaaagagttaacatagcaggactaactgctgttctttgaaaggcctgcttataggtttgttccttggctggtatctgggaacttggtttttggagagtttctaaaacttaactaacagcta

SEQ ID NO: 105076 - DNA, 610 bp, Homo sapiens
actcagaaaaagacaggaaaatgtgggaacttttggaacttcctagagacttattgaatggctttgatcaaaatgctgatagttatatggacaatgaagtccargctgaggtggtctcagagggagatgaggaacttgttgggaactggagcaaaggtggctcttgctatgctttagcaaagagactggtgacattttgacccttccctagagatctgtggaactttgaacttgagagagatgatttagggtatgtggggaaaggaatttctaagtggcaaggcattcaagaggaagcaaagcataaaagtttggaaaatttgcagcctggcaatgtgatagaaagaaaaatccattttctggtaagaaatttcagcctgtggtagaaattatcataaataagaatgagccaaatattaatccccaaaacaatggggaaaatgtctccagggcatgtcagagaccttcaaggcatttccttctatcacagacctggaggcctaggagggaaaaaaggctttctgagctgggtccagggcccactggcccttggtgtgtgcagcctcaggacaatgtccaagccactccagccatggctaaaaggggccaa

SEQ ID NO: 105077 - DNA, 580 bp, Homo sapiens
agaaatcttaaagggaatgagagagaaacaataccttacctataggggaaaaagcaatttacatgacagcatatttctcactgaaaacaatagaagaagacagaaagaattagcacaacattttttatttcctgaaagaaaaaaaaaaaaaactggccacccagaaatcaagatattctcagataaagaaaaactaagaaaatgtgtcactcatagacataacctaaaataatgatgaaatgaagttatttaaacataaataaaatggtaaaagaatgaaactttgaacatcaagaaggacagcactttgagaggctgaggcaggaggattgcttcagcacaggagtttgagatcagcctgggcaacatagtgaggtcccatgtctacaaaaaattttaaaattatccagatgtggtggcaccatgcctgtagtaccaggatatagaagaactcaataacaccattcatcaataggatstaatcaatatttatataacactccacccaacaacagaagaatgcacattcaagtatccataaaacagataccaagttagaccatattctgggccacagagc

SEQ ID NO: 105078 - DNA, 622 bp, Homo sapiens
catcatacctatggtgagcaactggatgtatttctcctgatatcagcaatagtgcgataatgtcttcttttacttctcctagtcaatactaygctggagtatctagttagtgcattaaggtaataaaagaaaagaaaactcagtttacatgcttggtgttcttcccaaacacccatgaaatcagtctaattatgagaaaaacatcaggcaaattctaatagagtaatattctataaaacatttgaagattactcaatactattgaggtaatcaaaaacaatgccagagaaaagtatagccaagaaaagcctaaggagacacgactacttcatgtaatgtggtaacttagatgatattctggaacagagaaaggatacgaagaaaaaactaagcaaagctaaaactatagcctttagttaataataatgtattcacgcttatctcttaattgtaataaaagttccatattaatataaaatgttcataatagagaacactgggggtggagtatacaggaattctatcttatctttataatttttctataaatctaaaactcttctaaaattaaaaaatatagaagtagaaacaagagtaatcgtgtataaaagtaaatcatact

SEQ ID NO: 105079 - DNA, 622 bp, Homo sapiens
catcatacctatggtgagcaactggatgtatttctcctgatatcagcaatagtgcgataatgtcttcttttacttctcctagtcaatactatgctggagtatctagttagtgcattaaggtaataaaagaaaagaaaactcagtttacatgcttggtgttcttcccaaacacccatgaaatcagtctaattatgagaaaaacatcaggcaaattctaatagagtaatattctataaaacatttgaagattactcaatactattgaggtaatcaaaaacaatgccagagaaaagtatagccaagaaaagcctaaggagacacgactacttcatgtaatgtggtaacttagatgatattctggaacagagaaaggatacgaagaaaaaactaagcaaagctaaaactatagcctttagttaataataatgtattcacgcttatctcttaattgtaataaaagttccatattaatataaaatgttmataatagagaacactgggggtggagtatacaggaattctatcttatctttataatttttctataaatctaaaactcttctaaaattaaaaaatatagaagtagaaacaagagtaatcgtgtataaaagtaaatcatact

SEQ ID NO: 105080 - DNA, 597 bp, Homo sapiens
tttcctccacaaaatacagctttacagaaccatttcaaaatatgtcaaagaaatatattttggggtggtctgctgtttgtcttgtgatgctacaccagagtcaggttggaattggtattttatagccacaaaaagtctgttttgtccaccttatgatctctattttaatgttaatgctggtcagttgtgcctaatctttaaaagggaggatktatgacgcaatgtgcccaacccctattcccatgatggctacaaattttatatttttgaggtttctctgaagtcgccttggcccagaggccacaaagactgttaagttatcttacttaaggactagttattgtttaccttgaaaacttgagtggtccattcagatggttgcagggcttagtgtaaccaagtatttcaactttaaaataaatcttagaacttatttttccccatttctctctagttttatagagagaacactaactgagaccctaaccatagggatgtagcctgactagaatattataggacaggcgtctgagcagctttcagaaagggagtacccaaacaaaaaagcttaaataaagttcaaacaattattcaaag

SEQ ID NO: 105081 - DNA, 597 bp, Homo sapiens
tttcctccacaaaatacagctttacagaaccatttcaaaatatgtcaaagaaatatattttggggtggtctgctgtttgtcttgtgatgctacaccagagtcaggttggaattggtattttatagccacaaaaagtctgttttgtccaccttatgatctctattttaatgttaatgctggtcagttgtgcctaatctttaaaagggaggatgtatgacgcartgtgcccaacccctattcccatgatggctacaaattttatatttttgaggtttctctgaagtcgccttggcccagaggccacaaagactgttaagttatcttacttaaggactagttattgtttaccttgaaaacttgagtggtccattcagatggttgcagggcttagtgtaaccaagtatttcaactttaaaataaatcttagaacttatttttccccatttctctctagttttatagagagaacactaactgagaccctaaccatagggatgtagcctgactagaatattataggacaggcgtctgagcagctttcagaaagggagtacccaaacaaaaaagcttaaataaagttcaaacaattattcaaag

SEQ ID NO: 105082 - DNA, 400 bp, Homo sapiens
tagctatctcatactttctgagaaattaattaggtaattcacataaaatcctcattacagtgtcctgggccatggtaaccacttaataaaagttagctattaacaatactaaggtaggaaatgggaggaaggggcataaaaatttagaaaacatgaggacgtgatagaaaacagctgccaytgtcatgcaattccgacttacaacaatagctaccactgaggaacacaacttcgcaccagtttctgtgattggcatgtaacacgtgatcatattgaattttcacaaaccaggagacagttaataaaatctctgattcaagatgaggaaaatgagcatcagaaccatgaaataacctgcctgaagctatgagtcaagttagtagccgagtcagagcaagct

SEQ ID NO: 105083 - DNA, 580 bp, Homo sapiens
gttttataaaaaatagtctaagtagcatgtgcaaaattctagaggcctcaggtccagagtcctggtctcaggtacaatgataattgcgcctagatcctcttgtccccctatgtttcattgtgttttttctttctttctttaaagtgacttgatgggctgtttgaagaaggttgctcttctgctgtcattcagttragaactggacttggtgcagtatttcagaaagagcactactgtacatcagatagtgggggattgagtcctagtatggccctcaccatgcactcaccattacactttgggaagcccttcaatgacctgtaatggcatcagcttttcagtagtataacgaggaaatggaactacatgataattaaactataattgtgactaatgagggcaattttagaatattaagtcaagtgaaacttgacttaatagattctatgttgtcttcctttttttttttaattacactttaagttttagggtacatgtgcacaatgtgcaggtttgttacatacgtacacatgtgccatgttggtgcgcggcacccattaactggtcatttagcattagg

SEQ ID NO: 105084 - DNA, 478 bp, Homo sapiens
cagtcctaaaaccagcaatgtccccagcaaacctactgggaaggtagaactcatctttttctttccatgtctctcttcacagaatgcactggaaacaccatcagggcttataggctctggcagcagaaaggttgaaarcgggatccatttagtttgggcttattgaggtgtacgtgctttgtagtggttttgtgtttaattactggttgtgtttaattactgggaaccaccctagggtaggaatggccttcagaatgttagtactgcttacatcattgacccaactcagcattctctcatgaagatacaggaccttgcttgtaccatactctgatcacgtcctactgcaactggccccggaagcacaaggatagtagaagagaaacaaggtttggcatatatcgaatcagaagtcaatttgtggaaatgtcttcaaatagtcaaatgtacacaactgatggcagaattgatggaattc

SEQ ID NO: 105085 - DNA, 619 bp, Homo sapiens
tttttccctttgctcttcagaattgtgatcattaaaaaatgttttcgtgagaacaaaaatctgttgggattttgagcgtaattaagatgatcaatttggggagaactgakacttttataatattgtcttactattcacaaccataatacatttctccattaattcagctctttaaaaaatgtttaataaatttgtccaatttttctcatagaggaagctatccagattttctaaggtgaaggcaaataaatattatcagaaatatttagtatcaattgagatactaaagaaagctgagctaagtctattccagtaaagcatttggcttcaggtgggcatgaagatagtttggtatttgggttaggccctgctggaaagcaagcctattttaattgcttatagatatcagacacatctgtatcctcaattgttagacttttaaacaggtattgcggaaactagtacaaagagaattaatcctttttctattaagcctgttgtaattgtcttaagacctttcttggcttcaattttagtgggagtattgaggaagtttaagaaaaggtttagaagaatccatctgaactcacacagctctgttccaattagtttgttcatg

SEQ ID NO: 105086 - DNA, 619 bp, Homo sapiens
tttttccctttgctcttcagaattgtgatcattaaaaaatgttttcgtgagaacaaaaatctgttgggattttgagcgtaattaagatgatcaatttggggagaactgagacttttataayattgtcttactattcacaaccataatacatttctccattaattcagctctttaaaaaatgtttaataaatttgtccaatttttctcatagaggaagctatccagattttctaaggtgaaggcaaataaatattatcagaaatatttagtatcaattgagatactaaagaaagctgagctaagtctattccagtaaagcatttggcttcaggtgggcatgaagatagtttggtatttgggttaggccctgctggaaagcaagcctattttaattgcttatagatatcagacacatctgtatcctcaattgttagacttttaaacaggtattgcggaaactagtacaaagagaattaatcctttttctattaagcctgttgtaattgtcttaagacctttcttggcttcaattttagtgggagtattgaggaagtttaagaaaaggtttagaagaatccatctgaactcacacagctctgttccaattagtttgttcatg

SEQ ID NO: 105087 - DNA, 619 bp, Homo sapiens
tttttccctttgctcttcagaattgtgatcattaaaaaatgttttcgtgagaacaaaaatctgttgggattttgagcgtaattaagatgatcaatttggggagaactgagacttttataatattgtcttactattcacaaccataatacatttctccattaattcagctctttaaaaaatgtttaataaatttgtccaatttttctcatagaggaagctatccagattttctaaggtgaaggcaaataaatattatcagaaatatttagtatcaattgagatactaaagaaagctgagctaagtctmttccagtaaagcatttggcttcaggtgggcatgaagatagtttggtatttgggttaggccctgctggaaagcaagcctattttaattgcttatagatatcagacacatctgtatcctcaattgttagacttttaaacaggtattgcggaaactagtacaaagagaattaatcctttttctattaagcctgttgtaattgtcttaagacctttcttggcttcaattttagtgggagtattgaggaagtttaagaaaaggtttagaagaatccatctgaactcacacagctctgttccaattagtttgttcatg

SEQ ID NO: 105088 - DNA, 529 bp, Homo sapiens
atggggagctttggtgcaaagattgccagttagaggagtcttgtgttgggcaggaatctcccagctccagtagccctgctgatctcagtcattggcygggagtagcctgggaagagggtggcctcagagagaacactgggatggatcccaaagatgcagcagctgaaggtggtccgctaactactttccttgcagcaggttctctcttgaaatatttgagtagtgtaccaccgtagaggccgcagaaggccataggagcaaagtttgctttgtaaaaatcaaagttgaactccccagctggccctattattcaagaccacatagggcttgaaaactgaatatatgcggacgtgtgtgtgttattattatggtttttgtgtgtggttttagcaggaagtctttcaatctgttgtttggggagggtgggtcttcatgaaaaattgatgcattttctttcccctacagaaagatcagaagtgggatgctggggaggcgttatgatattaaacactaggtccttgggaagggt

SEQ ID NO: 105089 - DNA, 328 bp, Homo sapiens
acagcgaaacagccgcctgacaggagaattcactgtggaacccgtgcccgagggtgcccagctctcttttggcaactttgcccaactcggccatgagtccttctactggcagctgccggagacataccagggagacaaggtgggccccagccaagcaccagggtcagccgtgactcagacatgagttcacctctgcgccgtctctcagcaggcaggcacctgccacctgcatggccatatcgtggttaggcacgtggcttttgcagtcccatagacattggtytgaaccccagctctgccgcttgccagccagacaccatttgataaa

SEQ ID NO: 105090 - DNA, 386 bp, Homo sapiens
ttacaaaaaaaattagctgggtgtgtggcttgtgcctctagtcccggttacttcaggggctgaagtgggagaattgcttgagcccaggaggtcaaagctgcagtgagccgagattgcactactgcacttcagcctgggtgacaaattgagagcttacctcaaaaaaataaaaagaaataaaaataagatatcaattactcatgtactatgtcagcatgtaccatccatgagaaatggcttgttgccaatatggtcgaagccttctatgtacttctacccarttagactcactccccttccctgggatgagtactgtacctaacttggctttatttttctcatacatttcttagacttgtaatacatacgtgtgtattctcaaacaa

SEQ ID NO: 105091 - DNA, 513 bp, Homo sapiens
tttaggctcacataggtaattctttttaacacagacagagctgtccacaaatagaattctgatgaatgaaattttcttcatcttatgcatatatgtgttctgatacctttaattgtgctttcatttttattttctatttaactcaaatctgccactaccattaggctcctcattcatgcattcactcactgaataaatgtttgtggagaatatagtgtgccttacatggagctaggcactgggaatataaaaagyggtgctccttcctggggcttagcccaagcaggttcttggctttgtacagaaaagaattcaagggcaagccagtggtgttagatagcatgttttattaaagcagcagaggtactgctccttgccaagcagggctaccccacaaacagtgtgtccagagtagcagctcaggggcagttctgcagtcatatttatgcccacttttagtgatacacaaattaaggggcagtttatgcagaaatttttaggataagagtggta

SEQ ID NO: 105092 - DNA, 574 bp, Homo sapiens
cttgggtgctaaaaaaaattgaaaacatatattcacataaaaacttgcagataaatgattataacgttattcaaagtataaatgtggaaacaacacaacacacatttgcatcaactggttaatggatgaaccaatgtggtttgtccatgcaatggaatattatttggctgcaaaaagaacaaagttcttatgcatgttgcaatatgaatgaaccttgaaaacattatgctaagtgaaagaatccaaacacaataakacatatattatatcgttcaatttatataaaatgttcagaataagcaaaaccgtaagaaagaaaatgtactcatggttttcagagactgtggttaaggtgaatggggagtgctaatgaccacgaggattttgcggaaaggtgatgaaaacattctggaattggataatggtcattgtttaacaaaactttgtgactatactgaaaatcaatcactgtatactttcaaggggtgaactgtatgatatgtgaattatacctcaataaaactgccatttttctaagtgctcatgcagttctttgaattgcttcaaaaactat

SEQ ID NO: 105093 - DNA, 605 bp, Homo sapiens
acaatctgcaaagctaaaatgtatctgtgcctgcatccaaggagtgaatttagaaaacttggtttattttatgattactatgggatagagtgcttgaaattaaaatgctaggtcaccaatccaagaggaaggtgctggaattaggaacagtatgatatttgataacagggcagggtgtttaagtacgaggcagccctggtggctttataatttgctgtttcatttctgtgtggctcctgcagccactagctggcatgaaagggtccctctggtattttgaaccaaaaaggaaataaaactcactcacacttcactacagataacctgaatattttgaatttggttcatggcaagagaaatgtgtactttggatttattttaataatagtggtgatatgttggctgagttatctcctttacgatttggaaacttgtgaagtagttgtctgagtttaagaaaagcaatatatgcctacgggaaataatttttatctcatctgaaaataattggaatrtatgaacaacacttaaggagaaaatgtctcttggcaagtaatataactcaaatagagattattgattttttattgaagaattaaaagttt

SEQ ID NO: 105094 - DNA, 455 bp, Homo sapiens
gaatgtgggtttaggaaaaaacaagcaacctcttggcctcttttgggccttggtccattgaactgctgtaacagaayaccagagacttggtagtttataaacaacaaaaatttatctcttacagttctgcagttcaagatcaaggctctggcagatttggagcctgttaagggctggcttcctggttcatagattgctgtcttttcactgtgttttcacatggcagaaggaatctatggggtttcttttataagggcactaatcccattcatgatagttccacctttaggatctagtcacctctcgaaggccccatctctaaacactatcacattggaaattaggttttaacatatagattttgagaggacacaaacatgcatttttaaagcattcagtcttcttagacctgactctacttatactcaaaagatgtcattcatatggttgaattc

SEQ ID NO: 105095 - DNA, 643 bp, Homo sapiens
ataaataaagtctttctttcatatttcagaaagccttcatcaagaataggcattctgaattcaggtttggaaaagcacgtcaccaaatctatagcaaacatctctcatattcacaagggagcagatttgagcacttgtatacattattcactaaacaaaatttaatatatacaaaatcaagaaatgtttgcataatatgtatgcagagatatcaaaacagtcctgttttatacagtctgtcttcataatatttttaattttacaggatttacattgttctcatctagctagagtaaaatggaagggaattttcacattaacaaaactatctacaaatgatcaattcatctattttgcaatagcaggaattcccaagttttaagaatatacgtatggattttggaacagtatttttcttcattaagtactaagaaacttaarcgctagaattaatgtatttttagagctcattaaaagccacagtagtaattatttggcacgtatgttggaaaattattcagttgaatataatgaaatatatttatgtatgacattaattagacaaatataggcacatcagctataaaagacatggcactaataactaaatcttgaattaacaagagaaatcgtttgtcaggac

SEQ ID NO: 105096 - DNA, 648 bp, Homo sapiens
tgttcactctgcatatggtttattgaagctggatttctggactcatgactttgtcaggtcagtatcataaattattagatatagactttaatttgctattgaggtaccgaggatacatatgctgtttttgagagatgaaaacagtaattgtgctggaaaaatagaaagctaaaaaaaakaaagaaagaaagaaagaaagaaagaaaccttgagctacataaaagtaaggagctcttttagcctttgccaccttctcaaacacactgactctatcacatgaaaatgaacaaccctaactttttttctggattataatacatacccaaagggaagagcgacccaaattttccattgaactataaaaatggagctggaggttttctgtttttttgttttgttttgttttgttttttgagacagagtctaactctgctgcccaggctggagtgcagtggcatgatcttggctcactgcagcctccgcctcctgggttcaagtgattctcctgcctcagcctcctgagtagctggaactacaggcacatgccaccacgcccagctaatttgttttgtatggaggttttctgttactttctctttaccaattctaatcccctcaaaatgtatcattttgtaagttcttcatgtc

SEQ ID NO: 105097 - DNA, 401 bp, Homo sapiens
agtgtggcacctccctccaacacacacacacactctctctctctctccctcctgcttttgtcatatgatgtgcctgcttcccctttgccttccaccatgattgaaaaagctccctgagaccatccccaaagcccagtgatttgggtgctatgcttcctgtacagcctgcagaatcatgagccaattaaacytcttttctttataaattaccagtctcaggtatttctttatagcaatgcaagaatgggctaaaacagccagtaattcatacctacttgttgaagaatcagtttcactcatatttagagaccctgctccaccttcactgcatatcaacaatgtagcaccccacattcatgaatcccctgtgagcatttcagtgacatttccccaaaccactt

SEQ ID NO: 105098 - DNA, 401 bp, Homo sapiens
agtgtggcacctccctccaacacacacacacactctctctctctctccctcctgcttttgtcatatgatgtgcctgcttcccctttgccttccaccatgattgaaaaagctccctgagaccatccccaaagcccagtgatttgggtgctatgcttcctgtacagcctgcagaatcatgagccaattaaacttcttttctttataaattaccagtckcaggtatttctttatagcaatgcaagaatgggctaaaacagccagtaattcatacctacttgttgaagaatcagtttcactcatatttagagaccctgctccaccttcactgcatatcaacaatgtagcaccccacattcatgaatcccctgtgagcatttcagtgacatttccccaaaccactt

SEQ ID NO: 105099 - DNA, 597 bp, Homo sapiens
ttagtgggcacacaaggcaggaaaattaaattaattttaattcaaatgctctgtgactctctgaagtttttccaattacaaagatatgtctcatgattttaaggagccaggagagcatataatacttatgtaaaaaaagttgattatttcgttgcaagtaagtccttaatgagggttaaactcattatagaaactgtcttaagacaaataaaaccaagtcaagtgaagttaatatggggttacttgtttatttggtaaatttcccacagggaaaattttaaatcttacaagtttaatgatgcttttaaagaggtattatttatgaagttagtttcataattattgcataggctagtaaaattgtactgaatttgaagacagaagaactgaagtaagattctgagtctgtcaattacaaacgatgtgacttagggcarcttattcaacttgtctgaatctcaggtcactttctgcaaaatgaccagattataccacatagatcttaagattccatcagtattttcaaattcaacaatgatttgttttcaacttgtttcagggcaaaataaatcctctaaagactgaatgagaaagaat

SEQ ID NO: 105100 - DNA, 582 bp, Homo sapiens
cctgatcagcaggggaattgtgaaggaaggactcagctgttcttccctgttggttccaaccagcctggggggatcctggagtgggaagtcccaaaaggggcctggctgctggcccaaagacctagactcaagaatgttgctatgttaggccaggctggcaaaagtatctacatactgacagcagaagcaagtcctctggctggcattctaaagagaggcacgtgggtcacactgggaccaaggcctggcagcaaggagtaaacacagtcatccaggtcacaggatagctcatgggaggcccaggccttcagggctccccactatctcaggggccagcaaagctggttagagcaccccagggccccattctggactctgtccctgtyctggtcattgtttagtccctgttaatagttattaatagtgctgactactatagcaatagttcttaccctaacaacagtaatatgtcattcctatcataggcacctgatagacactaacccaagatcttattccgatctgatagatgagaaaactgaaattcaaagagattgaattgctgtcttcgattagtagcta

SEQ ID NO: 105101 - DNA, 602 bp, Homo sapiens
agttctcaattgaataggaaaaaaaaaaaaaaaacaaaacagtacattaaagttactaagatctatgtgaagaaaaaatcttctatttgtgaaattataaataaggaaatttacaggctagttttacaagtcaaataaggaaattatgtgctagttttgctcctgtacttcaaactgcaaaagttacagtcacagtgcatgatatgtgccttgttaaaatggaaaaagtattaaatttgtgggcagacattccaaattttggcagtggggtttggtactacccgtggtttcaggcatcccctaggggtcttggaacatatrataaggaaacatataataacatggattaaggggagactactgaaattattttactacttcccagatgttgataagctattagaacactttaagtccatttatcctctcccacttttgtgttatcattgttaacttttcactccttcttatttatttatattaatacaaatacttattgtattttcagtagagacagggtttcaccatgttgaccaggctggtctcaaactcctaaccttaagtaatccacctgcctcagtctcccaaaaagctgggattac

SEQ ID NO: 105102 - DNA, 654 bp, Homo sapiens
cattatgaagagtaaattctgaaaagtgcataccatagagtctagtacgcatcatcagtaaatggtagctgatacacttgtttaaaaaactttagtaatgattgacttaatgatatattggggaaaaacttgccctgtcgtcctatctatatttcttgccagacacatgtaggacaaagggtcactccrtaaaccatctgtgagctttcaactgatcatcagaataatgagccatccccaagaccaagtgccacccctgggccaactaagatctcccggggtaatgcatcaatccatttcccagactttgtacagccatagagacggttcccagctccaggagataggtgtagggtgcgataatcaaattacagaaagttggatattcattctggttccacctcttatgaggctgactttacatttcatcaatacctcaacaaagagttgttgtaatatttaaggaaagcatgtctataaatttcctacttagcacagtttcttgcacgttatacatttgataattatttattccttactttccatccctattgtattaaggtggaacagatgttgtctctaagttattacgaagctgtcacttttgaggggctaggcaagaggaacaacttcagcaaactttaaacattttga

SEQ ID NO: 105103 - DNA, 615 bp, Homo sapiens
aatatatattaggtcatctgtgaataagtatcatgttacatcttcctttccaatacgaatgctttttatttgctcttcttgcctaattgccctagttagaactttcagtgagtaaagtggtaagagtggacaattttgccttgttccygatcatacggaaacagctttccatatttgatcattaagtaatacgttacttaatgatgcctctatcaggttgagaaagttctcttctattgacagtttgttgactggataatctgaattgacctatcttcatgaaagggtgttggattttgtcaattgcttttctgcttctattgggatgattatgcggttttgccctttattctattaatatgtagtattatattaattgattttcatatattaaaccaacactgcatgtctggaataaactgcaattgatcatggtgtataatccttttcatgtttttagatatgtttgctagtattttgttgagtatttttacatctgtatttataacagatactattctgtatttttctttcttgtgatgttttttgtttgattttggtatcagggtaataatggccttacagaatgagaaatgttcattaaaaatgttcctt

SEQ ID NO: 105104 - DNA, 550 bp, Homo sapiens
atggaacgctgcacagttctctcacatcctgtgggagatctctatctggctgaacctatagcaccatttcttcctcatagayctcaacactggcagaatgtcccaggccctcttagcaactggcaattgagtcgtgtagtcttgcacttgtagtcttgacaagtgatatttttgaaatctcttttctttggtttggggaagggaaaagacccctccatttccttatttgaaaggaagagaattaatgtcttagcacaagcactggacatgtcctaaggactgtgatctcatggttctctcttttgcttctcacatgttgtctacatgtagagtgaaggcaattgatgggggtaatggaggttcttctaattcttagtggggtatgtatgtgtgtgtgtgtgcgcatgcacacatgtagagtggtcttctttaataataagagtttctgttgaggttgtagggaatgcctcttgatcttcatctgttcaggggaatagaaacaggaaaacaagagtcaaccaaatctgcctggtttcctttttcagtttgg

SEQ ID NO: 105105 - DNA, 573 bp, Homo sapiens
ggacttgtaagagccaggctattgttagaggagtttgttgagttattcattttgcgttctctaatcagtagccaagtagcaaataaacatttaaacctgcaaggaaatagaataaaattaacaaacataatataaacattggtttaaaatacataatgttgtttctccttttaaaccacattattttctcccaaatctcccttcccctgcatgattactgtgtctacctgcctcaattccccatgtaaaaagcaagaccttcaaatggaggattcaaaaggacctttcaggctggcaatgaacttgaagtccagtaatgttttaaatatgtccttatccagatatgagtatctatctacctacctatctacctatatatctcatcaatccatgaaacttagmataatactgataaattgaattaaataaaccaaaattacaaacaacactttctaaaacatcaagggattcctggaatagacataaaaattagtaaattagtgagaggacacaattatagaagaaagcatagaatgtataatattgaatgtgtgacttttatagttaacagtg

SEQ ID NO: 105106 - DNA, 575 bp, Homo sapiens
aactgagggttggcaaaagttaaatcaattgccaaraataatatatctaataagtagagaagcttagggcctttttctttgttgcatttacactagataaccagaaactattaggattgtgttatgaccacatggtctgggaaccaggtgggagggggagtcttttctgctccctgagctttgtggagtttgcttgcgcagaaataatgcctatacttccgcctatttctgttcttcacctgcccagactagctccaaacatcaaatctgataaacacaacactctggcaacataatgtccattaagtgagtgcagaaaagaccatctggtttctgcttacatgcatcttttttatgttgtctggatcatctcattctccctttcctgtttctagctacaggtggtgatgggagaagtaagaattacactctcaccttaacagagtgatgggctgtgaatgaatgatgcaaaaatcattcactgtccaaaatcacatggtataatttgcatgaaggtactaatggcacaattcacttcctccctgctctaatcgtttcactctgccattataaca

SEQ ID NO: 105107 - DNA, 561 bp, Homo sapiens
acattttgtatggacctgtaatatttaattggacataaaatctcgtgaagagctaaaacatctgtcattaataatcattttatgattcgttaatgaggagtcataaagtatttttaatataataaacatgcaaatttacatataacaattttagtttaagattcaaactactttttgaaattatgaarttttttaaggatttattggacatagtgccatgatagaaattataatcacaattctgaatcccagaatctgtatagattattgctatggtttgaaagtgttctccaacatttgtttgatggaaacttaatccctaatgcaacagtgttgagagataggactcttaagatgtaagcaggtgataaggcttgacctaataaataaattaatgccttaattttagtagtgggttagttacctccagactgagtcgcttataaaaggatgagtcttgccccttcttccctctcttgggtattttctcctcatgttataccttctgccatgggacaatgcagcaagaaggccctcaccagatgccagcaactggatata

SEQ ID NO: 105108 - DNA, 561 bp, Homo sapiens
acattttgtatggacctgtaatatttaattggacataaaatctcgtgaagagctaaaacatctgtcattaataatcattttatgattcgttaatgaggagtcataaagtatttttaatataataaacatgcaaatttacatataacaattttagtttaagattcaaactactttttgaaattatgaaattttttaaggatttattggacatagtgccatgatagaaattataatcacaattctgaatcccagaatctgtatagattattgctatggtttgaaagtgttctccaacatttgtttgatggaaacttaatccctaatgcaacagtgttgagagataggactcttaagatgtaagcaggygataaggcttgacctaataaataaattaatgccttaattttagtagtgggttagttacctccagactgagtcgcttataaaaggatgagtcttgccccttcttccctctcttgggtattttctcctcatgttataccttctgccatgggacaatgcagcaagaaggccctcaccagatgccagcaactggatata

SEQ ID NO: 105109 - DNA, 653 bp, Homo sapiens
atgaatgtcacatgaaagagcacttgtcactgtacatgtaagaaattattagcaatgcatgacttcatgcccagagaacactttgagaatcagtgaaaagttctgagtgtgtgaaaatggaaggtcactcacaaatgatattgctcaaactcctagagccaggatctgccaaagatgataatgataataataataaataatgtattcacaggaacaataatataataattcttattgacaataattgtctattattatcattgctattattttagttaacataatttctggggcttcctaagtgtcaggtaccttgctaagaacattagatctttgttcctccaaagaaacccatagcatagatggggaaactaagatttgtgcaatcaagtaagttgtgaccctggattcaaacctacatttttttactttaaattatttcctagggcatagtattctaggtaatcaataaagaatctaaaatgacttcatataatttttgtctatgaattgtacatctccttaactgaaacatgagctcattgacagcayacaatgtgtgaatctggttcattgttgtatccccacagcctaggacagtgttctcagtgaatgaatgaatgtctattattagaatcagcacactaatagga

SEQ ID NO: 105110 - DNA, 596 bp, Homo sapiens
tgtatgtcatctgtgcataagtggatatgacctccccgagagacagtttaaagaagagtagaagtctagcactgagccttgtgatgccacaatagctaaaggccaagtggaggaaggaccaaaggaaaccagttgggaagctgtttaataatccaggcaagtgccagtgaaaatctgatctggcatgatgacagtagkaccgtaaagaaagggaagaataaaaagaacgttattatttatttttttaacacaaaggaaaccagctggtatgtgagtaatttctttgtgtcttccagtgattcccaaagcccactatccatcaccattaccttgggatgcttttagtaatgcaatttcctaacactcactttttcccactctttcccctgaaaactggattcaataggtttgtgatgtaatcaaggaactggtaactttacaaagctctaccattggtgtcaatgagcagccagatgtgagaactgttggtctaggtgacccatttcaactccattccagctcagtgatttaagtgacattaattgaagttgaagatattcaaaatattactttccttatgcaatcagcagatgaaa

SEQ ID NO: 105111 - DNA, 607 bp, Homo sapiens
agttctcttaatagtagccatgaatgctaaaatataaagttaatgtgatacgtgattatttcaattcataggtttggaaactgggactatgaaatatgaggcaactttccaaggccatttttgcatcaagtgctattgtgacattaggctgggtcttcttaagtcacagttgttttcttgcctcctgtcatatagtgtggagttctccatagtatagcatgacaggaagcaagagatctatatttatggagatctccaaatgtcagtagataacacatgttttgcttatactgacatcaaaaaccctgtctccaaaacaatctcaratgagattctcatgagaacacaatttgtttggagaaattagcatgggaatataagttaaaataaacatttaaaaactgtacgtttattttatttttaaataaaaaacatttcactgttagatctattttcaacagtagaagtatgcacaagtttatagaagaattctagtaacataaattttgtttaccaataatgaagacctttgtctttatgaagattacaagtatcctgtgatttatttaaccagtaactctgtatttaagtaaaaacttgtttattt

SEQ ID NO: 105112 - DNA, 625 bp, Homo sapiens
ctcccaggctcctgtgtgcatttcagcctctctgaccaggctcagaggcagcttcagaggcagccaggggtgcagggcaggtctctctccttaaagaggagcagttgtctgatccagcaatttcatttctgggtatatatttcaaaacaaagcaggatttcaaagggatatttgtacccccatgtgtgtagagcaggattatacacaaaaaccaaaaaatccaagagtccatccgctgaggagtggataagcaaaatgtagagtagccatacaatggaatattattcagccttcaaaaagaaggaaagtctgacgcatgtgacaacatggatgaagagtccatctgctgaggagtggataagcaaaatgtagtctatccatacagtggaatattattcagccttcaaaaagaaggaaagtctgatgyatgtgacaacatggatgaaacttgaggacattatgcaaagtgaataaggcaggcacctaaagacaaatactgtgtcacactagttacatgaggtatctaaaacaggaaggggagagatggttgccaggggttgggggagaggggaaatggggagttgtttaatctgcatggagtttccgttttgcaagataatagggt

SEQ ID NO: 105113 - DNA, 402 bp, Homo sapiens
gaattctttgtacaacaccacctaagtcttctggactaaaaaagtataaagcttataaaagctcataaaactagttaaacagtctaaaattaccaagtaaaactacctattcagcattaaacagttttaatataatttaaaatgaataaggaaattgcattgatgatctatttgggcaaaaaaaaaaaatagaatgtacaaatatagtgtgctctaatcaaatacttttcaaaatycttctttggatttactgttcaaaattatatttgattaagactctaccctcctatgataattgattactgttccattaagtatacaaatttcaacaaatataaaattatcaatatagcattttttttaattttatgagaaatatgtgtagatttggcataacttcta

SEQ ID NO: 105114 - DNA, 379 bp, Homo sapiens
tacaataatatttcattgtgactttgtgttgagtaaatacgttgagcatattttctgaaggttaattttagataacatctaaaaaatgactgtgcaattcatttattccttttgatctttgatagtctatattttcattattgatttatagttattctttatgtttatatgtcttcttttggttatttgtactgcaaatatcttgtcctagtctttggatttccacttaktctttggaaattgtcttttgatgaacagattttttaaaattttaataaagtctaatttataagtccttttcctcatggcaaataattatgttctgttgaggaaatattaacctatccaaatgtcatctctatgcaaaactgcagaaaat

SEQ ID NO: 105115 - DNA, 582 bp, Homo sapiens
agtttattttttgttagatactatgttctgtatatgtttactaagtcatttgttaattttgtttttcagatcttccgtatcaatatcgagagttttttcttatttaaaaaartcatccattgagagaattgttttcaaatcttctgctatgggctgggcgtggtggctcatgcctgtaatcccagtactttgggaggctgatgtgggaggatggcttgatcacaggaggtggatgttggagtgagctgtgattgcatcactgcactccagcctgggtgacagagccagaccctgtctcaaaaaaaaaaagttgtctatgatgattatataactaattgtttcatccctttaggctgttcatttttaaacacatattttagaataatgctggtgacaatgaaatttagaaatgtgttatcttcctaggagtttgattccatcgtcattatgaaaagtttttctttattcttagtaatgtctccgtccttaaagtttactctgaccaatattaaaataaatgccttaaatttttattggctatggatttcatggaaaaatttttacattaaaactttctaaata

SEQ ID NO: 105116 - DNA, 589 bp, Homo sapiens
tattattaccatataatagtgtctacctagccaatggtctgcttaatttaaataatggtcaattcaccaatattttccaggacaaaaacttctgacaatttactatatctgtctagttaatattattttctcctgccacaaacccctacactaaaattgcaaaatctaaaatagcagtagtatctttacatatttttgccactgtgctttttggtattgtwtactaccctgtaatttctgatgctatcactgaggaatagggacaatgttagtgagtctgatttgagtctttttgtctggtagactagggggcaggtgggtgggggagggctgattctgtaaaaaaaatcctgaagctaagcagaagcccaaactgagagagaagggacatagtctgagatagaagtcataggttagacaccagaggtccagggttaaaaaagtgcccgtatggaaatagaatggaaagaaacagaacatttgggaatggagaggttggctgtaaaacaggtagagatgaggcaacagcatttcctaacaggacaaaactggttgatatccaaattctggaagtggtgttcaattgact

SEQ ID NO: 105117 - DNA, 578 bp, Homo sapiens
acatttgggaatggagaggttggctgtaaaacaggtagagatgaggcaacagcatttcctaacaggacaaaactggttgatatccaaattctggaagtggtgttcaattgactaagcctagcgagattaaaagttgcagactatctaaatacccctttcagaacctgaatgagtaaaagtaataccctgacatatgctttccatgggacatagtatgcttttttttatttctttttttgaaatagtgttatctcctttggcaaaaggaaacatttcagattgaaatccaactagaaaggtacttaaaaaaaaaagggcaaaaactttatttaatcataactaccccccttcagcgcagcctgtgattatataataataataaayaggttttgggctcatcaggtagtacccaagacaaagcacattcgtttttgaaattgaagtctttcctctgattataatttttcaatattcctcaatactattagcatgttttccaaattcctagaaaaatctcagcatatcatcatggtccgacataatcttgccaatttctgtgtccagaacctcattttcta

SEQ ID NO: 105118 - DNA, 602 bp, Homo sapiens
aaggagagggtatgtggctagaagttaaagggaaaaagcaatactggcctaaattattatgaaattgagaagaaaatataacccacagttctaagaagtgcaattaactccagcgtggccatgtgcatgtgtgtgcacatgtctaggtacttcagtcaagttgttggatgccaaaaaacgaacaggctttgaaaagcagggagagcggggatayacacataatgtagaggggaatatcaaaaagaaatatgggtgactcctcatcagagctaagagagacccaaaacaatagactgctttttggaagttgagttttggtgaagcttttctttctgatttgtagaatactgcctttctgtatcctcacatgactcttcctagacccagagatagatgaaagagagagcgcaagagagagagaaagacaatgctctggagtctcttcttatatggacactaaccttattggatcaagaccctcccacttaggacctatttaaccataattacgtcctcagaactctcatctcctaagacagccatgtatgggtttagggcatcaacataacatatttaggggacaaaaactttcagtcaataac

SEQ ID NO: 105119 - DNA, 637 bp, Homo sapiens
atatatgttactggatttggggggtgttgctttttctggtgggaaacctctgtggctggtggcgcctttgcccaagttcttgtcctgcgtccagcaggaatgaggtatacagagatgtggagggtgagcaagacgaaggggagctttattaagctttgcaatagctcagaggagacctgcagttggtagctcctcctccgtaggcaggttgtcttctggagtgttcagctgtcaacagagaggccctgtggttggtggacyctttctgcagctggtcgtccggttgtcttcccaagtctcagcagaaaaggtagctccttttggcagctggtcattccatcgtctctctgtcctctgccctgctctggctgagcctggggatttttatggacatcagagggcaggaagtgcgtgccagttggtctatgggcagcaatgggcaggcctgaaaacggcaccacaagtccctcctctggtccacgggcctggcagcctggccccaagccttcaggtccttcctggcctgaagcgggggccttactggggacctgctctcttccacccaggaaactttgcctcctgctgccattcatggcacctaggcttggccccaactttgctcctatatcagagcagg

SEQ ID NO: 105120 - DNA, 549 bp, Homo sapiens
agggaagaggagccagccacaggctacaggctgtttgttcactcttttacttgaaccaggcattctgccttttaaatattccaccttctgccatgagttacactcttcaatattcaaatattcattcctcagagcattcaaaggtctatgtgtgccctgccatgatggagcatggcttcagctctcaaacacaactctcagccaaaatattcatgactggtgcctcccatatactcatcaatcccccatatatggtctgcatggtgtcccccagagctcacatgttggaaacttaatcctctatgtgacagtgttgagaggcrgggcctaataagagtgattgggttatgagactctgcccccatgcatggattaatgtcactatctcaggagtagtttagttatcttgggggtgggttagttatcttgggagtgggcttgtattaaaagcaagctcagccccttttgctctctttctttctgaaagtcttgttctgctgccttcagtcatgagatgacacagcaagaaggctctcaccagatgcagac

SEQ ID NO: 105121 - DNA, 549 bp, Homo sapiens
agggaagaggagccagccacaggctacaggctgtttgttcactcttttacttgaaccaggcattctgccttttaaatattccaccttctgccatgagttacactcttcaatattcaaatattcattcctcagagcattcaaaggtctatgtgtgccctgccatgatggagcatggcttcagctctcaaacacaactctcagccaaaatattcatgactggtgcctcccatatactcatcaatcccccatatatggtctgcatggtgtcccccagagctcacatgttggaaacttaatcctctatgtgacagtgttgagaggcggggcctaataagagtgattgggytatgagactctgcccccatgcatggattaatgtcactatctcaggagtagtttagttatcttgggggtgggttagttatcttgggagtgggcttgtattaaaagcaagctcagccccttttgctctctttctttctgaaagtcttgttctgctgccttcagtcatgagatgacacagcaagaaggctctcaccagatgcagac

SEQ ID NO: 105122 - DNA, 549 bp, Homo sapiens
agggaagaggagccagccacaggctacaggctgtttgttcactcttttacttgaaccaggcattctgccttttaaatattccaccttctgccatgagttacactcttcaatattcaaatattcattcctcagagcattcaaaggtctatgtgtgccctgccatgatggagcatggcttcagctctcaaacacaactctcagccaaaatattcatgactggtgcctcccatatactcatcaatcccccatatatggtctgcatggtgtcccccagagctcacatgttggaaacttaatcctctatgtgacagtgttgagaggcggggcctaataagagtgattgggttatgagaytctgcccccatgcatggattaatgtcactatctcaggagtagtttagttatcttgggggtgggttagttatcttgggagtgggcttgtattaaaagcaagctcagccccttttgctctctttctttctgaaagtcttgttctgctgccttcagtcatgagatgacacagcaagaaggctctcaccagatgcagac

SEQ ID NO: 105123 - DNA, 549 bp, Homo sapiens
agggaagaggagccagccacaggctacaggctgtttgttcactcttttacttgaaccaggcattctgccttttaaatattccaccttctgccatgagttacactcttcaatattcaaatattcattcctcagagcattcaaaggtctatgtgtgccctgccatgatggagcatggcttcagctctcaaacacaactctcagccaaaatattcatgactggtgcctcccatatactcatcaatcccccatatatggtctgcatggtgtcccccagagctcacatgttggaaacttaatcctctatgtgacagtgttgagaggcggggcctaataagagtgattgggttatgagactctgcccccatgcatggattaatgtcactatctcaggagtagkttagttatcttgggggtgggttagttatcttgggagtgggcttgtattaaaagcaagctcagccccttttgctctctttctttctgaaagtcttgttctgctgccttcagtcatgagatgacacagcaagaaggctctcaccagatgcagac

SEQ ID NO: 105124 - DNA, 520 bp, Homo sapiens
cagtatgctgttgttttctttcttgttcttcctttgggtgtttagttttattattttactgacattgtactttgtttaaaagcggcaaaaaagatgaacagatgtgttcaatccagaagtaataagcgtctaatttcaaactattttgtttttttttaaggcatggggtctttctctgttgcccaagctggagtgcagtggtgtaatataattcatagtagccttgaactcctgggctcaaatgatcctcccacctcagcctcctgagtagctaggcctactactatgatgtgctgccatgactagctcattttttaatgtttttgtaaaaatggggtctcactatgtagactaaactggtctcaaactactggyctcaagccacctattgcctcatgttttatgtttttacattttcttcctttttgcaggaaaaactcaaatgaggattttaggaataaaaccatgaaagtttttttttttaaaggttttcaactgggccctgtcctgtccttaatca

SEQ ID NO: 105125 - DNA, 580 bp, Homo sapiens
acagtggtttgatcgctgctcactgccaccttgatctttaaggcttaaaaataggatttttttttcttttttgagacaggatctctctcagttgcccaggccaaagtgcagtggggtgatcatgctcactgtagccttgatctcttgggctcaggtgatcttcccacctcagcctttggagtatctgtgactataggtgcttgctacaatggctrgctaattgtttacttttttgtagggaagaggtttcactatgtttcccaaactggtctcaaacttcagggctcaagcaatcctcccaccagcctcccagactgctgggattacaagcttgagtcactgcacccagctggacattgatttgtggatgagctggaaggactacttgtgaaaatcaagcactttaaacccttcttgggacaaagctggggaaaatgttcaacaaattaagtctaattactagaagaataatgtgcatgtgactattattgacttaacataagcagcagcccatcaccaaccttccctgaactgtgaggggtcgtctgtctttttccccatgcttctgtcacttcatggc

SEQ ID NO: 105126 - DNA, 580 bp, Homo sapiens
acagtggtttgatcgctgctcactgccaccttgatctttaaggcttaaaaataggatttttttttcttttttgagacaggatctctctcagttgcccaggccaaagtgcagtggggtgatcatgctcactgtagccttgatctcttgggctcaggtgatcttcccacctcagcctttggagtatctgtgactataggtgcttgctacaatggctagctaattgtttacttttttgtagggaagaggtttcactatgtttcccaaactggtctcaaacttcagggctcaagcaatcctcccaccagcctcccagactgctgggattacaagcttgagtcactgcacccagctggacattgatttgtggatgagctggaaggactacttgtgaaaatcaagcactttaaacccttcttgggacaaagctggggaaaatgttcaacaaattaagtctaattactagaagaataatgtgcatgtgactattattgacttaacataagcagcagcccatcaccawccttccctgaactgtgaggggtcgtctgtctttttccccatgcttctgtcacttcatggc

SEQ ID NO: 105127 - DNA, 551 bp, Homo sapiens
ggtcaggtctttgagtaagcagacatggaccctacagctgggtggaaggctgggagctccmctgttacatgtaaaggagaaagggaaatggagcttcatcatggaactctaaatggcatttttgaaacacggaaaagcaaggaatcttgaagagtgaaagaggtctggcaactggcaacatggccatgcacagccctcatctcctcagtaaaatctgctactgatgagaattacttatgggttcactgtatccatcaggtgagggacagcctaagaactctgacttgaccactacccaatctatgcacctatacactgctggtgagagtgtaaattagtctaacatttgtggaaatcagtgtggcaattcctcaaaacagaattaccatttgacctagcaatcccattactgggtatgtacccaaaggaatataaattgttctaccataaagacacatgcacgcgtatgtttattgcagtgctattcacagtagcaaagacatggaatcaacctaaatgcccatcaatggtaaactggataaagaaaatgt

SEQ ID NO: 105128 - DNA, 614 bp, Homo sapiens
gatcaatgatatctgccaacttatcatgtaaacacagtaaccaagctttctcagactattaaagtacagtccatgttggtcagtaacattttaaatgattctgccaagaacaaaaagcaaaggtcattggaatggtttctatttagtttgcttttttttctttctttcctctacctcaatactgctcttgcctagagtctcggccttcccaagaccagcgtcagtttgataaataactgatagctgtgtgtcttttaaaacaaccacaaactattttattctgttgctattttggcaaaaagttgcaagaggagraaaaaagaaatttgactaaactttagaaggaaacccagaaacaataatagctagaatataggactcatttaagtagctgtcacataaattaagctcaaaaccatagcatgcactacataccaggcactattttaagattttcccctgtaattattattcatttaattctcatgtgcctgtaagataaatgctaatattatccccattttgcagaggagaattctgggggaaagggtatgtaagtaacctgcttgaggtcatacacagtagcccacataggactaagaatctaaaattgt

SEQ ID NO: 105129 - DNA, 614 bp, Homo sapiens
gatcaatgatatctgccaacttatcatgtaaacacagtaaccaagctttctcagactattaaagtacagtccatgttggtcagtaacattttaaatgattctgccaagaacaaaaagcaaaggtcattggaatggtttctatttagtttgcttttttttctttctttcctctacctcaatactgctcttgcctagagtctcggccttcccaagaccagcgtcagtttgataaataactgatagctgtgtgtcttttaaaacaaccacaaactattttattctgttgctattttggcaaaaagttgcaagaggaggaaaaaagaaatttgactaaactttagaaggaaacccagaaacaataatagctagaatataggactcatttaagtagctgtcacataaattaagctcaaaaccatagcatgcactacatacyaggcactattttaagattttcccctgtaattattattcatttaattctcatgtgcctgtaagataaatgctaatattatccccattttgcagaggagaattctgggggaaagggtatgtaagtaacctgcttgaggtcatacacagtagcccacataggactaagaatctaaaattgt

SEQ ID NO: 105130 - DNA, 448 bp, Homo sapiens
ggatctttttctactcccaaatcaacaacaaatatttttgagtgcccactatgtgccaggctccattctaggtgtttgggatgcatcaatgaacaacgatccctttctcccatagagctcacattccagtgggggaaacatataataaacmccattaataaataatgcagatagggccaggcacagtgactcatgacagtaataccagcactttgggaggcagaggtgggaggattgtttgaggtcaggagtttgagagcagcctggaaaaaatagtgagaccttgcctctacaaaaaaaaaaaaaagttttaagttagccaggtgtagtgtcaggtgcctgtagtcccagctattcatgatgatggcctaatgcaacatttctcaagctggttctgagaaacacacctattctgtcagatattaatagatgttctaaagaagaattc

SEQ ID NO: 105131 - DNA, 534 bp, Homo sapiens
ctcttggtctcaggtttggatgatgaggtggacagacaaaatggacctgggaatgggggaagaagaacatgcgtggaggactgggaaatactgagttcagatttggacaagctgaggttgacaagcctgtgggatatgcccagatccctgctggggaaagatccagtaggcagctgcatgccttcaattgtaagaattcagcactacaagagagaaaagatatcggaggcagatcttttaagaattcctccaatttttttgcaagaagagatggagccagttacaagagaaaagatgtgtcaggaagagcagagagagagttaaaaaggaccaaacacaaggaccaacacttgactccagactactaactccctgtgtgwccctgtcccacagctggaacaagaaagtaccagaagatgcagggatctcctggggctgccctcctttgctgagaatagagatctgtgccccaggcagccaacctagtctcctcaggggactgtggtcttatcctactaaatgcccataaccata

SEQ ID NO: 105132 - DNA, 609 bp, Homo sapiens
gaacctatgctacatactgatctgcgctatttttgtcttctcttgcaagtggcccacattgagaactggggaaagagtgtgtgtgtgtgcatgtgtacaacagaaatacatataattccacttaattgctttcttggagaaattccaagtaagacattatttaaaattatttcaatttccaagtaaaattatttagaggaataattcacattattcctctaaaatgtttatgttggacactccttgttcatatccacagaagaggcaatgatgagagacattattgcagaagcataatgaagcattctagattgtcatttcccttttgtaatattgcatttaccttcatttacaataccattaattcaaaacactattcaaattcctgagcatttaaaatatgtacacagattctctagtcaatatcagataacatgatggtatcttgggttttatttcattttgaaaactcayataaatctaattaaaagaaaacattgtaacaatacagatcttaagaccaatagaagactctatttttgtgttaatttcctgctgtcatgagaagaggttttcaagtaacaacaaccaaaggtcccccgcatgtca

SEQ ID NO: 105133 - DNA, 605 bp, Homo sapiens
aaacaaaatgaaacacagcgaaacaataagaagacttactagaatctttttaaaaagtatttgaacttgccttttggtaaggtttacatcctttgcattcatctttgtacactttcatgtgtgattaataagtcttttaacatctctcaagtgaagtctttcagttttctcagtttttcactggtttcctttctgaggaacttctctggtatcagattgcccctaggtgctgtgtaggtgakctcaaggtaatttgtttaaccatggggcttaatcatttgttatttgatagttacatttagactaaggtttttttaatgcttggcaccactgacattttgtgctagataattcttttgggtaagggctatcctgtacattaaagaatggttagtagcgtctccggcctctaatcagtggaagtcagtgacacacccacacccccaggttgcaacaaccgaagatgtccccagacattgccaaatgtctcttggaggtaacattgctgccagttgagaaccactgtttaaggagccccagagttgagattttaatcctccaaaaactacattcttcatttcagaaatatgtgaaaatcattatgc

SEQ ID NO: 105134 - DNA, 599 bp, Homo sapiens
gaatatccaagttaaaatgtcatcctaccaattgcgttaggttaaatcagtttctatggtagtaggaagamataagggtagtggagacctacttttgagagtgggcacctagatttaatccttaagtctatagcctgggtgctgtcattatctttctgctgagcaattatattttaattgtccagaatatcaatgtttttatacaatacaataagagtcagtgtactttgcagcacttgttctctctctgttggaataatctcaaaaggatgaagagtttactcttcaattccgtgctgaaacacagagctagaaattgatgctagcaactgcttcatctgatctttctctttctctctctttcccctttgtttctgccccagaagaaggagcttcacctcaaaaaagttatttttgacttgatatatttactgtattaaaaaatgataattaaaaaatgattagaaagtgaaactatgccaaagatgaaagtacggatcttttaactttattttgaattacaactgctgtaccaaggaccccagggcaagcctccttagctcattttgagtgatttggtttatttgcagcattttaaa

SEQ ID NO: 105135 - DNA, 543 bp, Homo sapiens
taaaacccactctcacaacattacttagaacttatgaaattatagatttttaggagagtcataaggttgctttcttatttatcaatagaaaaatatatataaagcaaatatttaaacctgattagaagcgtgctgggttaggacagatgatagaggcagaaactcctagtggtcactgttgctttctcacagatgcccattgcaagctcagtggtttcacatatctctacccccaaacaacttatttcaaygtgtaaggcagtaattctataattcaggaaaatgttacctaaaagccagatccaggtacgggattttaatttttttctgtgttgaaatagtaattcgggtttagcacttggttgatttccgaaagttggcacaactctggacttcgatcctgcatttacatacattgttggactttttgacaagttggggtactggcatgcattttaatcacttggagaacagagtcaaacaaaaagcatgtgaacttctgggttgagctggtgcaaaggcaaagtagcaactgtgacatta

SEQ ID NO: 105136 - DNA, 430 bp, Homo sapiens
ctgaggactccagtactgagaatccatgaatgaagaattcctgggcaaagcaggcactagaagaagtttcaggggcattgaacaggaagatgcttaacacagtgggcagagatgataaagacaaacccaagtctgacatagccaacatggaaagaaaatagtacatgggcycatgcaaggagggctctgtcttgatgataaaaagaatggtgccatttcctagaatagcaataagatacatgctgcagatggggatagagatccagatgtgtgcatattctagccctggcatcccaaccaagaagaaggtggtgatttcaacatatgatgtgttgataatggacatgattcattcatagggctctgctatgaaaaatacagatacacctgacctcaggtgatccgcttgcttgtgttggtaaaataggca

SEQ ID NO: 105137 - DNA, 430 bp, Homo sapiens
ctgaggactccagtactgagaatccatgaatgaagaattcctgggcaaagcaggcactagaagaagtttcaggggcattgaacaggaagatgcttaacacagtgggcagagatgataaagacaaacccaagtctgacatagccaacatggaaagaaaatagtacatgggcccatgcaaggagggctctgtcttgatgataaaaagaatggtgcmatttcctagaatagcaataagatacatgctgcagatggggatagagatccagatgtgtgcatattctagccctggcatcccaaccaagaagaaggtggtgatttcaacatatgatgtgttgataatggacatgattcattcatagggctctgctatgaaaaatacagatacacctgacctcaggtgatccgcttgcttgtgttggtaaaataggca

SEQ ID NO: 105138 - DNA, 538 bp, Homo sapiens
atcatctgaccttaagatagggaagttattctagattatgtaggcatgttcaatgtaattacaaacatccttacaaagtggaagtaggaggcagcagaaaagtcattgtcagagggatgtgatgtgagatagactgcataggccattgcaggccttgaagatagcaggaggccgtggaccaaaacatgttggcagcatccaaaagatggaaaagttaagaaggtggattctcccctaaaggttacaggtgtgagctaccacrcggggccaaccttggacatcttttcccatctgccaataagtctgcacaagtggcgtgtggcagtccctctaatggctgtgcccgacttcccggtctgatcctccttgatggctcctttcttgggtttaactccgtgggtcgcatttcctgcacagccattggctgccggccactactgccacctttgtcttagagaatttaatttggtcattagtctacctattgtggtgcatggactagccccaccctccttgaggtgttcaggacaaagaacgc

SEQ ID NO: 105139 - DNA, 442 bp, Homo sapiens
attactctttattccaatattacaataatcctcgctctacaatcataacctaggaaaaaccaggccatacagacacaggagctgaggggacatagtgagaagtgaccagaagacaagcatgcgagccttctgttatgcccggacagggccaccagagggctccttggtctagcrgtaacgccagcgtctgggaagacgcctgttgtcaagcggaccatggtctagcagtagcgtcagtgtcaaggaaaaacaccggctacttagcagaccgggaaagggagtctccctttccccatgggagttcagagaagactctactcctccatctcttgtggagggcctcaggcccaccttcagttatccgaaggcataccatctccctgtgacgctgtgcttcagtggtcacactcctagtccgccttgatgttccatcctgtacacc

SEQ ID NO: 105140 - DNA, 591 bp, Homo sapiens
aatattacagagcttggggcttgtgctcattgctcctgtgaagccatggcatatagacgagatcatccaggggccaaaggctcatctctttcagtaacaggttttgtatttgaaatagccaaggctggtcaccttcaatgagaagcttgaccccatcaaggcccttaattggattatcactaaccgctcactaactgttctggtcttcagcttgaaatgwagcaacaaatttaaattccaaataggtgaaaaatatgttttaagccaaaaactgtatcctaataaggtatctcctctatcaatttggtactccacacaggagagcaacaaattagggggatttccaagtctaatacaggtgtgcttccagggagacaatgagtttcctcctcctgcctcctaaagtcatgccaggctttcaagagccctgcagcccaatgttgagctttaagagtataataaaaatatacctctgaattaatctcatagcttattatttggggtaaaatttggggtatttcacccagaatcaatctgcagtgaaaccattggcaacctggttcccaggttcagtcaaccaatatgcaaata

SEQ ID NO: 105141 - DNA, 634 bp, Homo sapiens
ttttaaatttacatttatcctccatatgagaaagaaacaagtgagaaaaataacctcttaataactacaggatcagccacatgttttcttaataaaggaaaccactacttttttacttactttagacacaagatatagcagcttttctccagaaatataaaaagcaattgctgatttattgataagtaaggctcataatgctaaaatatgagaaactttaatcttaagctcatgcaatgttaccgtaattgctagttggactgtgatatttactttcctaaaagtttgtagggacaataattatttgaaagcttaggctaactagtaaatattgggaaagrtgagttttccttaattttatatattgagataaaaacatggtgtgtgtgtgtgtgtgtgtgtgtgtgtagaacacagtgtagtttagtgtttctactgggagatagaatgagaatacatataataaagagagcccagtgatctggtcttagggtaagatgcttaaatattacccaaattgtagggctaatcatcctgtcttttaaaattacaataattactttgtttttatatttcacgatcatgaaacacaagcaatgattcatattggaggctttggagttagataaactag

SEQ ID NO: 105142 - DNA, 610 bp, Homo sapiens
gccttctcattggccctggtgcttcctcatgtggacctcggtggtgggttgttctccctcctcttgggaactatgagtaacaactatcttttctatggcagtcttctcctgatccactggcctcaccatacctgaataattaaaraaacctacattttaaaacatattggcagatttgtttaacccgtctatgcctgcatttttttttcttctgtaaaattgacatactaatagttatctttgtcatcttgttaatgaaaagtttctataagtgaaggtgaatgaagggctcagcacagtgccaggcctggggtaagaatcaacaactggtagcatcatcataattattctttatgaaattattattatcaataaagagtatccttctggaaagtatggaccaatctgatttacctctgcatctccactagttggcaaagagttggcactaaaaaatggtcattgagttttaaataaattaaatcatttattctttttaaagacctctatgactaatgttgaggacctaactaagccagtcagcctttatgattagaatgctataaattatcagcatctctgtagaatggctgagcaaaactacgagttt

SEQ ID NO: 105143 - DNA, 588 bp, Homo sapiens
cataccccttttttccaatcacatttttacatcactgtctatactttgttgaacataagcataacaatgaaccatttcccctgtattttggggtcttcattctaaagcctcccacgtatacatgttaaataaatgtatatgccttttctctaatcaacctgccttttgcaatttgatttttcagtgaaactttagaaggagaagttaatcccttgggccctacacagggaattatagaggagaaattatatatttcatacttcatataatactctaatattttgatgccattttatgtacatacaaaaccaaccctgacaatgtggacaaaggaaagggcactctactaggaattgaatacaaagaatcttatcataacrtagtcagttattgaagtagaattttttaaaggtatttaatccttttaggattgtttactagatggtagataatttctagaacgctgactgatatgcttctatgattttgtgtaattcagaaaaagatgctctttacccagaagcattcaagtacattttgtctaaccatcactactattatcctcactaaatagtagttcgcaattaa

SEQ ID NO: 105144 - DNA, 588 bp, Homo sapiens
actaacatccatagtttatattagggtttagtccctgtgttgtacggttctatgggctttgctaaatgtattatgtcatatttcccgttacagtatcttaaagaatattttcactgccctaacaatcttcaggggcttatttcccctcagctagcagtgacatctttargtacaagtacacaccacctataacaacttaatttcttgccttctgggcaagccagggcagtgactgagggcagcgacaatgtcacctatcttccattcagaagcctgtgtttgttgcagggtccagggttcctgggtccagcctatgtgccccaacgatgttctcctacacttgaagacaatgaacttccaggcacatcacaaatgccaggtgctctgcaaagctgtcctgattcctcttagccacatgcattgccacattttctttattctaaggtgtcaggcacatgatcatggtgttcatcaggctgtctgatcgtccgattatatgtcagtctcccagactagatcatgggctttttaagggcagaatctctgtcttagtcatctgtgtcttcctcagggcctgtacttgccatt

SEQ ID NO: 105145 - DNA, 588 bp, Homo sapiens
actaacatccatagtttatattagggtttagtccctgtgttgtacggttctatgggctttgctaaatgtattatgtcatatttcccgttacagtatcttaaagaatattttcactgccctaacaatcttcaggggcttatttcccctcagctagcagtgacatctttaggtacaagtacacaccacctataacaacttaatttcttgccttctgggcaagccagggcagtgactgagggcagcgacaatgtcacctatcttccattcagaagcctgtgtttgttgcagggtccagggttcctgggtccagcctatgtgccccaacgrtgttctcctacacttgaagacaatgaacttccaggcacatcacaaatgccaggtgctctgcaaagctgtcctgattcctcttagccacatgcattgccacattttctttattctaaggtgtcaggcacatgatcatggtgttcatcaggctgtctgatcgtccgattatatgtcagtctcccagactagatcatgggctttttaagggcagaatctctgtcttagtcatctgtgtcttcctcagggcctgtacttgccatt

SEQ ID NO: 105146 - DNA, 588 bp, Homo sapiens
actaacatccatagtttatattagggtttagtccctgtgttgtacggttctatgggctttgctaaatgtattatgtcatatttcccgttacagtatcttaaagaatattttcactgccctaacaatcttcaggggcttatttcccctcagctagcagtgacatctttaggtacaagtacacaccacctataacaacttaatttcttgccttctgggcaagccagggcagtgactgagggcagcgacaatgtcacctatcttccattcagaagcctgtgtttgttgcagggtccagggttcctgggtccagcctatgtgccccaacgatgttctyctacacttgaagacaatgaacttccaggcacatcacaaatgccaggtgctctgcaaagctgtcctgattcctcttagccacatgcattgccacattttctttattctaaggtgtcaggcacatgatcatggtgttcatcaggctgtctgatcgtccgattatatgtcagtctcccagactagatcatgggctttttaagggcagaatctctgtcttagtcatctgtgtcttcctcagggcctgtacttgccatt

SEQ ID NO: 105147 - DNA, 609 bp, Homo sapiens
tcttcatagatctcacagtagaaatctaacttcctatttctttaaggaaacaaattctaccagaaaaaaatcatttcaacttcttgctgcgaaaacctcagatttctgtgcccttgaatgcatccattctgcctggcatcccaccaaaatgaaaggaaagtcccttcttcagtctaaagccaaccttccctctgcctcttcagaactctcatccttttgattgtcttctttctgtctggtgccttcaacctctctttttctaccaacttgtgaataccagattttcaatatgttccagacttccccgttaaaaaacaaagacaaaaattacaccgtttactccacttttacttctagctactacmttccctgttcctaccttcataacaagtcttcttgaaagagttgtctacactgactctcttctgtcttttatcccttcattatgcctcaacccttgaaaaattgccttactctgccctgtatgaaaactgcttttgtattgtcatgaataacttccttatcacttaattcagtgacaatctttgattctctttagctttaatcctccgtaacagcatctgacactttggtgctgcacagaaaata

SEQ ID NO: 105148 - DNA, 396 bp, Homo sapiens
cttgcccagccattccaatttcaattctgtggctgttagaattctacttcagtgaagctatgcggacacatatctagaaagtatgtgtcaggaaatgaaaatctgacacatccwgtcaattctccaagtgtaccttgattgaggaatagaaaatatttggcctagtctacattcgtagaaaataacacccaatacacaaatatctactgtaactatgtatcattgtacgaaaacaagccatgaataatcacatacataagtctatagactgtaaacacgtggtgatacatccttatgcagcatatccatgcactcccaactgcccgatctcactgtgtcctcaggagtcacaagagcatcgttatccctatcattcagagacctaattcaaccctg

SEQ ID NO: 105149 - DNA, 396 bp, Homo sapiens
cttgcccagccattccaatttcaattctgtggctgttagaattctacttcagtgaagctatgcggacacatatctagaaagtatgtgtcaggaaatgaaaatctgacacatcctgtcaattctccaagtgtaccttgattgaggaatagaaaatatttggcctagtctacattcrtagaaaataacacccaatacacaaatatctactgtaactatgtatcattgtacgaaaacaagccatgaataatcacatacataagtctatagactgtaaacacgtggtgatacatccttatgcagcatatccatgcactcccaactgcccgatctcactgtgtcctcaggagtcacaagagcatcgttatccctatcattcagagacctaattcaaccctg

SEQ ID NO: 105150 - DNA, 636 bp, Homo sapiens
tgcagggctgaaagctagaaattgtgtcaaattctgctgtaagggtatgatgtgcaaagaacaatgtatgacaaccgtagagactacaaacaatggcactggagccacggacttcatagwtcacaactgcgcctgtacatattttattgtaggcattatatatttaaagcatgacaaatgtaccattgtacattatgtgctgcacaaatagaagctcctcccactcattcgccttttgcatttctcttgatgatggaaacatagttgagtttcatttttttctcttctcttaaaacactgaagattcctaaatcataaaggaaacacacacacacacacacacacacacacacatacacacacaaggttatcaaaagagtaacagaaaatagaaggcaataatacaagatgagaaaatgagatcttgttcacttaacattttggcttctctctgaggacacaaaagcaaggattaccttcaatacaaactgagggtatgaagagaactacaccaacactatgcctataaattgttgtctacctaattttaatgcagataagtgctggcttattgatttgcacaattttccagcaaaatggaaatcccacgtgaatatgttctttgtgtgcagaaaa

SEQ ID NO: 105151 - DNA, 636 bp, Homo sapiens
tgcagggctgaaagctagaaattgtgtcaaattctgctgtaagggtatgatgtgcaaagaacaatgtatgacaaccgtagagactacaaacaatggcactggagccacggacttcatagttcacaactgcgcctgtacatattttattgtaggcattatatatttaaagcatgacaaatgtaccattgtacattatgtgctgcacaaatagaagctcctcccactcattcgccttttgcatttctcttgatgatggaaacatagttgagtttcatttttttctcttctcttaaaacactgaagattcctaaatcataaaggaaacacacacacacacacacacacacacacacatacacacacaaggttatcaaaagagtaacagaaaatagaaggcaataatacaagatgagaaaatgagatcttgttcacttaacattttggcttctctctgaggacacaaaagcaaggattaccttcaatacaaactgagggtatgaagagaactacaccaacactatgcctatamattgttgtctacctaattttaatgcagataagtgctggcttattgatttgcacaattttccagcaaaatggaaatcccacgtgaatatgttctttgtgtgcagaaaa

SEQ ID NO: 105152 - DNA, 556 bp, Homo sapiens
tactgactttgtacctctgtcagggaataataacaaactttatatctctccattactcaatacttcttttcctccagttgtctaaagaagttccaaatatgtttctaaatctcwcaaatgtaaattaaattaaattaggagctggctatgcctttttaaagcaagaaacataaattggtgtttttttgtagtaaggaaaatgttgtgtactgaaaggatcgattaaatttgaagtcttctatttcatggatagaacaatttttaaagcatttgcaatgaattcctggattctggtttgcagaaatattcattatttgccaaatgggtaatttgcactaaaaccaaagttgatgttacttcagtgcccccttaaaggaatgtgatgttttatcaggcttagaaaaactgctaccgaaatagacataaatcccttctatctgtgaccttctatggcaaaggtttgtactctttaatctgtaataatacaagtacttggcatattttaggtgcccagtaaataaatgaatcactggaaagactataccccttacactcc

SEQ ID NO: 105153 - DNA, 538 bp, Homo sapiens
ttgctacagttttctgtggtttattatacaaataataatatatcaatataatattttatctgtattccagtgaaaaacctacatttcaccsccaaagcctccttaaatcctgtcaatcaggttgctattttcaatatggagacaacaaaatcttaataatatttcagtatattttccatgcttatgtgaatccttcatgagctacgcatatcaataatgggaaagaaaaatacttatttgcatttattttacctattttaatcatcctgtattaaagaccattgtattaaaatccaaggaatctaggaattggtctaaaatatgggtcagtaaaatactaatattctttagcaaaaatagaaaactatgcaattgtaatactgtagacattatgaaattatttcagggttacttttacagccttgaaatagccctaaaaataacacaaaaacgttatgttgacaacttgagtacaagacaatcatattctggtgtcactgtggcgttaattagtgggccagtgtgtgcagcaaaatga

SEQ ID NO: 105154 - DNA, 541 bp, Homo sapiens
atttggcatgtttttgcagtagctggtaccagttgttcctttctatgtttagtgcttctttcaggagctcttgtaaggcaggcctggtggtraaaaaatctctcagcatttgcttgtctgtaaaggattttatttctccttcacttatgaagcttaggtcagctgtatatgaaattctgggttgaaaattcttttctttaagaatgttgaatattggctcccactctcttctggcttgtagggtttctgccaagagatcagctgttagtctgatgggcttccctttgtggataacccgacctttctctctggctgtccttaacattttttccttcgtttcaaccttggtgaatctgacaattatgtgtcttggggttgctcttcttgaggagtatgtttgtggtgttctctgtatttcctgaatttgaattttggcctgccttgctaagtttgggaagttttcctggataatatactgaagagtgttttcttacttggttccattctccccaccactttctggtacatcagtcaaatgtat

SEQ ID NO: 105155 - DNA, 541 bp, Homo sapiens
atttggcatgtttttgcagtagctggtaccagttgttcctttctatgtttagtgcttctttcaggagctcttgtaaggcaggcctggtggtgaaaaaatctctcagcatttgcttgtctgtaaaggattttatttctccttcacttatgaagcttaggtcagctgtatatgaaattctgggttgaaaattcttttctttaagaatgttgaatattggcycccactctcttctggcttgtagggtttctgccaagagatcagctgttagtctgatgggcttccctttgtggataacccgacctttctctctggctgtccttaacattttttccttcgtttcaaccttggtgaatctgacaattatgtgtcttggggttgctcttcttgaggagtatgtttgtggtgttctctgtatttcctgaatttgaattttggcctgccttgctaagtttgggaagttttcctggataatatactgaagagtgttttcttacttggttccattctccccaccactttctggtacatcagtcaaatgtat

SEQ ID NO: 105156 - DNA, 541 bp, Homo sapiens
atttggcatgtttttgcagtagctggtaccagttgttcctttctatgtttagtgcttctttcaggagctcttgtaaggcaggcctggtggtgaaaaaatctctcagcatttgcttgtctgtaaaggattttatttctccttcacttatgaagcttaggtcagctgtatatgaaattctgggttgaaaattcttttctttaagaatgttgaatattggctcccactctcttctggcttgtagggtttctgccaagagatcagctgttagtctgatgggcttccctttgtggataacccgacctttctctctggctgtccttaacattttttccttcgtttcaaccttggtgaatctgacaattatgtgtcttggggttgctcttcttgaggagtatgtttgtggwgttctctgtatttcctgaatttgaattttggcctgccttgctaagtttgggaagttttcctggataatatactgaagagtgttttcttacttggttccattctccccaccactttctggtacatcagtcaaatgtat

SEQ ID NO: 105157 - DNA, 541 bp, Homo sapiens
atttggcatgtttttgcagtagctggtaccagttgttcctttctatgtttagtgcttctttcaggagctcttgtaaggcaggcctggtggtgaaaaaatctctcagcatttgcttgtctgtaaaggattttatttctccttcacttatgaagcttaggtcagctgtatatgaaattctgggttgaaaattcttttctttaagaatgttgaatattggctcccactctcttctggcttgtagggtttctgccaagagatcagctgttagtctgatgggcttccctttgtggataacccgacctttctctctggctgtccttaacattttttccttcgtttcaaccttggtgaatctgacaattatgtgtcttggggttgctcttcttgaggagtatgtttgtggtgttctctgtatttcctgaatttgaattttggcctgccttgctargtttgggaagttttcctggataatatactgaagagtgttttcttacttggttccattctccccaccactttctggtacatcagtcaaatgtat

SEQ ID NO: 105158 - DNA, 554 bp, Homo sapiens
cctgttttaaatcctctgtgtcttgtttytcgctttcttcccagaagattgggtctggttgtgtctgtttcagtgttttatttaagagctgagacattaattagtaatttgaaattgaacttctgcaatagcctgttaaccctaagaaccctcctaattgtctttttgttttgggcatggtaaaggtcatgatggcagagattctctcagggtttattagtagtcccctcagggaattcatatgtcctaactacttaacttgaaacaaacaaaattataatttatctgtggactttttgtcctttcagagcaagctgttgtaacaggtggacagtgtcttctctgcattttgtcagcggggatgaacacaacaaaccatctatatactgaattaagttagatccatttggaaattcagtgtcatctaaatctgcctttaatatttgagaaaaataggtaggactcatggaatagcccttggggcagaccatctgtgtatattggtgatctgcccaagtaaaggcaaaaagatactggctattctgctctacagg

SEQ ID NO: 105159 - DNA, 643 bp, Homo sapiens
cttttctccagggccagatacttgtggatgtcccatcatagttatgggttcgctggcccagccacaggcatttgttcctgttcatggtggtctcctaccagaagcctaaacctgagcagatgacctacaaatgtgagtgtgccaaggaggcagaagcccaggaagctcactggcgctgacctgctgatgtccaggtcttcacctggaccagttagggcaatggtgaggaccccggcctgtgattcacgatcttcaatgataatgtgacctggaaaagtactgtgccttcaaatgtttacagcagcgttattcatataaccaaaaagtaaaaatgactcaaatrgtcgtcaactgatgcatggataaatgaaatgtgtgtatccacaccacggaatattatttggaaataaaaaggaatgaagtactggtacatgctacaacatggatgaaccttcaaaatattatgctaaatgaatgaggacagacataaaaggacaaatatatgacttcataaacaggcaaatctataaagacaaaaagtagattagtggttgcttagggcagaatggagagtgatggctaatgggtgtgttgtttcttttggggatggtgaaaatgttctaaaattgattgtgatgattgt

SEQ ID NO: 105160 - DNA, 634 bp, Homo sapiens
ggtttcatggaaggcaatttttctaagggcaaggggatagtttcgagatgaaactgttctacctcagatcatcaggcattagattctcataaggagcacataacctaaatgccttgcatgcacagttcacagtagggtttgtgctcctatgagaatctaatgctgcggctgatcggacagggggcagagctcaggcattataatggtggctcacccaccgctcagccaccgctcacctcttgctgtgtggcccagttcctaacaggccacggactggtaccagtccatgacccaagggttggggacccctgatataaggagcagttaaagacattgggaatatttagtacagagaaaataagtctcagctaggactcartatttgaagacctgtcatacagaagatggtatcagcatacctactctataaggctacaggagttaagaccaattggaggaacttaagtagagacaggtttactttatcctaagaaagaccttctaacagtctgaagtcagcaaggctatctcacatctagaattctgctttgttgcagttttgcaatattctctggaagggactttatcttccttaatatagtaccacaaacacagttgaatattctaaaaagta

SEQ ID NO: 105161 - DNA, 639 bp, Homo sapiens
tatatcttgcacataccagcatacctcattaattttaatgtaaccatccattggcttctcttctctccttagaaattcaaaatcaactggtagaacaacaaaaatgcctggagcagcaaacggagatgcgagttcagcttctccaggatctgcaagatttcttccgaaaaaaagctgaaattgagacggaatattcccggaatctagagaagttagcagaaaggttcatggcaaaaacaagaagcactaaggatcatcaacaatacaagtaagagatttgaatctaattcacctttccaagggtgatatccatactgcctttgccacctttgtggattttttatttttctatttttgtctgagtagtggttgtagagcatattctcataaataaaagcagccctctacatttgtaacttatgggcatcagtttatcattttaaactagtgtaatctgttgacacttttgtctttccamtacatatatatttatggatagctttatatgccagaagagaaggtatatgtttgtaaaattcttgattatagaaacccgggagttgatatctgctataggtaggacagatttaaaataggtttttgttcaagcaaagacctcaaattttctctagtgaattt

SEQ ID NO: 105162 - DNA, 628 bp, Homo sapiens
tgagttcatttatttatccattcaacaaagcatctttaaaatgcctggctaggggagcagagctaaaagacatgtccctgcctgcaaggagctcattacagtaattaacagttactacgctaaatggaactggaaggctggagatcttaactctacctaggggatgaggaaattgttctcagaaaggggaacacttgaagtgagacttgtaggagaaggaggcattcatctaacagaaggacaatgagctattccaggaaaggagagcatgagcatgttcagggaaaggaaagagtttgatatgattggaccagggatcgtatgggagtgggtgatgggatgtgaagctagaaaggatggtcatgtaagaagggactttgtacgtcttgctaaaatgtgaggatgtgtattttgtaagtcaragtcaagggcttgataaagttgatagaaacctagggctaagagtcaaacagatttggatttaaatcccagcccttctgcatacttgctttgtgatcttgggagatcattccagagattcaagagcaggctctccattcttgaggaagcaagaaaggcaaaattgggcagaaggagaggctgcacctgtgagtgctctggggctggc

SEQ ID NO: 105163 - DNA, 606 bp, Homo sapiens
cctttagaactgctgtggagtcattagtgagcataatgcttgttttccttggggagaagattttgagacttccgcatgtttcaataatrtccccatgtctgtatggagatccaaataaatgctgtgtgcctgatagttttggcctcttaaacagccatatcttatacagtttagtcaatgacaaaaaatcatttacccaaattattctgtctgataaggagtttggagcaggtaatttcaggaatttttttctgtctaaatggatataataatcaagaagacacttgtagaaataattccatgcagagctatagggaacagcttcaagacttaaatcttaattacatcagaaccagttatagacatagttgcctaaactcaaaagttttcaacaggttaaaaaaaaaaaaaagtgaagcattttaaaaataacaatattcaactattcaaatactgattattttagatttatgcctttaaaattctaaatgaagcctattggtcaaaataatagtgattcagcttttaggttctgaaatcagatattctgggtatgaatcctggctttaccactgttgggagctgtgtggacttgggaatatttgt

SEQ ID NO: 105164 - DNA, 525 bp, Homo sapiens
tgaattctctcctctccggaattcccagtgtgtgtctaccatctccatctctctgtgctcagaggaaggagcctcaggggacaccctagtttctctccccatctttacccttccactccctttcattctcttggttcttccatcaacacatgaaatctgagttcatctgggtttcttctacatgtgttttttgtttgtttgtttgctggcttgcttaactgtatcattcactgatacagagaatttatttggattgatctatttaccatcttttctaattttcatttccactgggcaaacatattttacaaaatattcaacatatacttggatttttcactattatagcgcagccagggcaagggacttctggtccaccccatastccctttttaaaggatatgatctcactgttatattaacaaagaaaattaagttataagtttactctttctatatgtcacccatgtaacattttacatcatcagccttttctccatcttatgaataaatccattgaaatta

SEQ ID NO: 105165 - DNA, 581 bp, Homo sapiens
aattttagctacagtctcagttttaaccccgtcttcatccaagaaagtggttgttgaactctgcctgggctaggcttgggaccagacaccagtgaggctgtgatcttgcagacatccagcacttccctttaccccaaagcaatctaaaaatcttgctccaacaccttatctatccagtgggccatctagcatataggtaactcagccatggctgagaaagaaaataaataaacaactttgctgttagctatcatttcttacacacacacacacacacacacacacacactcacctgcacacacacacactaattcacacacaaacatagacacacatacctgtaccacamtcactcatatctaccacctcctctccactcttcaacactcacatgtttccacacaggcggtgtgatgcaatggaaagatccttgactttggaattaaaccaaatggccatgtgattttgggcatattcgctaaagtctcacaggctccatatctttctgtttttttttttttctttgagataaggtcttgttatgttgcccaggctgcagtgcagtggctattcacaggca

SEQ ID NO: 105166 - DNA, 587 bp, Homo sapiens
aaaaagggttagcagaaagcaagggattcaaaaagggcatctcagcagccaaaggaactccaggttttccctcttaacagatgaaactgagagacacagatttaactacaaataggcagataaacaagaaagcctttgcaatgaagtacaggcaatgaagactttgaagtgctcatagaagaaaatccaaactcccaagcaaagtaagcaaggctggcttaccacttccctcctcacccagtrtttactccaacccagaccatccctggcctcctgccctctcctgcctctgtgtctctgctcacctcatttcctccaccacgaaggctgtgcctctttctccctaacatccggccaaaacaaccttattccttacatctggcaaacccagtactaaagtcgctctcatgggtacaaaatagtagttagaaagaataaataagacctactatttgaaagcacaacagggtaactgtcatcaataataacttaattgaacaatttaaaataaaaagtctaattgcgttgtttgtaactcaaaggatggatgcttgagaagatggatattccattctccacgatgtgcg

SEQ ID NO: 105167 - DNA, 406 bp, Homo sapiens
aggaattcccaggagaagaaagtcaaaggtcatttaagaacaatattgtctaggatttgattcagtagttagccattgcctrttttctttcatgctacagcttctctccatgttacactaaagccttctgtaaactgtgttacatagcattaggtcagtagtacttcggggttttttttttggttttgttttgttttttgagacggagtctcgctctgttgcccaggctggagtgcagtggcaccatcttggctcactgcagcctcccggtcccaggttcacgtgattctcccaccccaacctcctgagtagctgggattacaggcgcccattaccacgcccagctaatttttgtatttttagtagagacggggttttgccatgttggccaggctggcctcaaact

SEQ ID NO: 105168 - DNA, 406 bp, Homo sapiens
aggaattcccaggagaagaaagtcaaaggtcatttaagaacaatattgtctaggatttgattcagtagttagccattgcctgttttctttcatgctacagcttctctccatgttacactaaagccttctgtaaactgtgttacatagcaytaggtcagtagtacttcggggttttttttttggttttgttttgttttttgagacggagtctcgctctgttgcccaggctggagtgcagtggcaccatcttggctcactgcagcctcccggtcccaggttcacgtgattctcccaccccaacctcctgagtagctgggattacaggcgcccattaccacgcccagctaatttttgtatttttagtagagacggggttttgccatgttggccaggctggcctcaaact

SEQ ID NO: 105169 - DNA, 596 bp, Homo sapiens
ttgagagacccacagatgccctttcactttcagtggaagaaatctagaccagaacagagtagagatctctcagcgtgcagatggctggcagaggcaatgaggagaagggaagtgagctgggcttcagagttgtgtagacccagaccctagtcctgttcctgtcctcactagctgcatattgttgggccttcatacacaacctataaaaataaagcaatggaaatgccacacagactgctgagatcataagaggagagaaaagtttcaatatgagctccacagccagtgaattatatacccatcccaactcaacatttattcattctttccaatgaagttatctattatccctacttccctgttataataatattttaactataaaagktaatgttcttttattaataaagcgaggaagcatccaggaaattgcctaatggtgcataagagttcaatcatttttaatcccttcctaccttttttccttcctattcaaatgtaagaatacagaagtaaaaaagtagaatcaggatgaaaattcaagtttctgacttctcatacaatggcttttctcgtgtgtgtgtgtgtgcgcgcgc

SEQ ID NO: 105170 - DNA, 596 bp, Homo sapiens
ttgagagacccacagatgccctttcactttcagtggaagaaatctagaccagaacagagtagagatctctcagcgtgcagatggctggcagaggcaatgaggagaagggaagtgagctgggcttcagagttgtgtagacccagaccctagtcctgttcctgtcctcactagctgcatattgttgggccttcatacacaacctataaaaataaagcaatggaaatgccacacagactgctgagatcataagaggagagaaaagtttcaatatgagctccacagccagtgaattatatacccatcccaactcaacatttattcattctttccaatgaagttatctattatccctacttccctgttataataatattttaactataaaaggtaatgttcttttattaataaagcraggaagcatccaggaaattgcctaatggtgcataagagttcaatcatttttaatcccttcctaccttttttccttcctattcaaatgtaagaatacagaagtaaaaaagtagaatcaggatgaaaattcaagtttctgacttctcatacaatggcttttctcgtgtgtgtgtgtgtgcgcgcgc

SEQ ID NO: 105171 - DNA, 513 bp, Homo sapiens
tccccaatgcctgctttactggaattgttcggccccatccttcccccacagtagagtgagccaatttaaattttcaatgcagttcttcagcacttgtgtgatgataatcagcttacaggtcaaggaccttggcaattcaccaaggagattgttacatttgagcaattcaccattacaatccatgggcccagaggttccaggagcctgcttccagccacctccaccaggatgccaggcatgtgagtgaagctagcttggaccctgcagtccagcccatctgccagctaagtaccacagttaaagccacaagaagctgacctgcctagccaagctctgtcccaatttgtaaccaacaaattccatgatgtaaaatagtgattgttttaaaccaccaagttctgggaagtagcttgttacttagcaacagataactggaatagtgctcttggtaagaaatggcaggaggggagcaaactatrcacagtgaatgaaggagggagggccaagccaaga

SEQ ID NO: 105172 - DNA, 582 bp, Homo sapiens
gtctcaggtacatctttatcagcagcatgaaaatggactaatacaccaagtgacatccttatcttattttttaattcaaggggaaacattaatatttccctaataagtataattttagtttagttgtttagtattaatagataccttttatcagaataaggakgttcccttttattgcttgtttgctgagagatttttaaaattttactaaagaagagacttagatttgttttatgtatttaggtcttattccatctgctattaatttatgcatgctgtgatgtggacaattgtctcaaaaccatttattgaatagtctgtccttctctattgtcaatattcccctagcatatacacagtttccatatatgcacagatttgtttcttgcttctctgttctattcatgggttatttacctatcttacactagtgctacactgtcttgattattatgattttataatatattgatatctggtacggaaattactgcctcttcctctcccccaacaactcccattttcttctccttctgtgaaactgtcttggctatctgtttcactttatcttgtaaatttaaa

SEQ ID NO: 105173 - DNA, 519 bp, Homo sapiens
gctgcatttctgggacctccaggggtggccaggacaagatgctgaactttgctgaaagcaagtttgcctttaggccttcaggctttccattttagtggcttctgcctccttctgagggcctacaatggacaccccatccctacaccggccctacatgctagacttacccacttctctgcctaacttgtccctcttaaccaaggagcctactagccttcagtccttttctctttcrcttcccaaaatatcaacccttgacctcagaaccctgctctctacaatcttacaaactcatttacactgtcttgatcatcaatgagttgagcatttcaatttctcaaaaacatttaattccttacaccataccccatcccttttaagtaggagacacaatgctttactcagaataaaacatcccatctaacataaatgttagaattatgggcatttgagaaaggtagcatgcttacgattctctgatcttggtcttatttcacaaatctgtacttttgcacaagc

SEQ ID NO: 105174 - DNA, 615 bp, Homo sapiens
ccttttggtttacatttacctcatatcatttgcctattttattcttatttttaaaatttattttacaacctatattgtatcaagtgagtggttgttaactctctttctrtaactttctaggaaataatttagtagcatcattcaacgattcttaatagtaaaaaatatgcctagtacatagagtatacagaagtccttgatcatcgtctgggtccaaaccattttatcataatcaacaatttaagcatggtggagctacatgtagacttcacaggtcttcatttgagaacagagggccctgccttagcaaatgagtgggcaaactctcacaattttaagcaaagaggattagttttgactcagcattgattttctgtgtcaaacgattatttcctgtgctttatctgttaatttggcatggtgttaaaaaaaaaaagaaatagcctatatattaggtttgaatatgtgatatggttttgtggtaaacatcaaaatgatttgctttaatttgaattattcacatgtgttttatagtcaagtaaatcattgtttaattttgcatctttttattttagattttctaatttttaatttttgtttttttttcagacaggt

SEQ ID NO: 105175 - DNA, 615 bp, Homo sapiens
ccttttggtttacatttacctcatatcatttgcctattttattcttatttttaaaatttattttacaacctatattgtatcaagtgagtggttgttaactctctttctgtaactttctaggaaataatttagtagcatcattcaacgattcttaatagtaaaaaatatgcctagtacatagagtatacagaagtccttgatcatcgtctgggtccaaaccattttatcataatcaacaatttaagcatggtggagctacatgtagacttcacargtcttcatttgagaacagagggccctgccttagcaaatgagtgggcaaactctcacaattttaagcaaagaggattagttttgactcagcattgattttctgtgtcaaacgattatttcctgtgctttatctgttaatttggcatggtgttaaaaaaaaaaagaaatagcctatatattaggtttgaatatgtgatatggttttgtggtaaacatcaaaatgatttgctttaatttgaattattcacatgtgttttatagtcaagtaaatcattgtttaattttgcatctttttattttagattttctaatttttaatttttgtttttttttcagacaggt

SEQ ID NO: 105176 - DNA, 615 bp, Homo sapiens
ccttttggtttacatttacctcatatcatttgcctattttattcttatttttaaaatttattttacaacctatattgtatcaagtgagtggttgttaactctctttctgtaactttctaggaaataatttagtagcatcattcaacgattcttaatagtaaaaaatatgcctagtacatagagtatacagaagtccttgatcatcgtctgggtccaaaccattttatcataatcaacaatttaagcatggtggagctacatgtagacttcacaggtcttcatttgagaacagagggccctgccttakcaaatgagtgggcaaactctcacaattttaagcaaagaggattagttttgactcagcattgattttctgtgtcaaacgattatttcctgtgctttatctgttaatttggcatggtgttaaaaaaaaaaagaaatagcctatatattaggtttgaatatgtgatatggttttgtggtaaacatcaaaatgatttgctttaatttgaattattcacatgtgttttatagtcaagtaaatcattgtttaattttgcatctttttattttagattttctaatttttaatttttgtttttttttcagacaggt

SEQ ID NO: 105177 - DNA, 487 bp, Homo sapiens
ctccttcccactttagcgaagggcagstttttggcttggggcgctctgctaactgaaacaaacttgtcagtccttctgcaagttcagggatatctccagctaccaaatccccagccttagacaggtggcaggctcatgctacctcctccttaccactgagcaaggggtgcagggtgtcccctcaccaaccctctatccagggctggattaacaaagcagcagtggcactcacgagggggtggctgctagagggtccagccactttcgttaggggccttttgtatataggaacagaagctcaggaagagatgggaaacactccttataattttctcctccaaccttcctcactgcattcccacagtgatggctacagttcagtacacgttatctaaggggcaaggaacactgcaaacgacacaagggcactctttttgtaaatgaagccgctggggctcagagtggggtaagaagctcccaaatagcc

SEQ ID NO: 105178 - DNA, 591 bp, Homo sapiens
tagggcaggaccctctcactgtgtggtcaccctttattttctcagctcttatttaaaaagaagaagaaaaaaagaatgtctggacaacagctaaggcaggcatccagaartaggaacacttttctgtaagtatataatataatcattcaatcaatcactcactcactcaaccaataaaaggggaaggagaaaggctaaccctgctgggaactgtgatgtagcaggttggtctagacagataggccctggtggtgggcctgcccagtgaccttgactctgactccatgatcccttaacacagaagtagttcctttccctctcttgctcgggaatggaagcacccttaacccccactcattgataatgctctcagatcagaactttttgtgttaaaaacccaacaagtgttttcctacatgagtggccctttctcttcttccttcaggtggggagggctctggattcttcatgtccataaacctggtcagtctcctgctggtgcacagaggctcaggccctctgctcaggggaggggctgtaccctgtctggctacagtgcagtggatttgcagcagattgtccctccaaccc

SEQ ID NO: 105179 - DNA, 591 bp, Homo sapiens
tagggcaggaccctctcactgtgtggtcaccctttattttctcagctcttatttaaaaagaagaagaaaaaaagaatgtctggacaacagctaaggcaggcatccagaaataggaacacttttctgtaagtatataatataatcattcaatcaatcactcactcactcaaccaataaaaggggaaggagaaaggctaaccctgctgggaactgtgatgtagcagsttggtctagacagataggccctggtggtgggcctgcccagtgaccttgactctgactccatgatcccttaacacagaagtagttcctttccctctcttgctcgggaatggaagcacccttaacccccactcattgataatgctctcagatcagaactttttgtgttaaaaacccaacaagtgttttcctacatgagtggccctttctcttcttccttcaggtggggagggctctggattcttcatgtccataaacctggtcagtctcctgctggtgcacagaggctcaggccctctgctcaggggaggggctgtaccctgtctggctacagtgcagtggatttgcagcagattgtccctccaaccc

SEQ ID NO: 105180 - DNA, 591 bp, Homo sapiens
tagggcaggaccctctcactgtgtggtcaccctttattttctcagctcttatttaaaaagaagaagaaaaaaagaatgtctggacaacagctaaggcaggcatccagaaataggaacacttttctgtaagtatataatataatcattcaatcaatcactcactcactcaaccaataaaaggggaaggagaaaggctaaccctgctgggaactgtgatgtagcaggttggtctagacagataggccctggtggtgggcctgcccagtgaccttgactctgactccatgatcccttaacacagaagtagttcctttccctctcttgctcgggaatggaagcacccttaacccccactcattgataatgctctcagatcagaactttttgtgttaaaaacccaacaagtgttttcctacatgagtggccctttctcttcttccttcaggtggggagggctctggattcttcrtgtccataaacctggtcagtctcctgctggtgcacagaggctcaggccctctgctcaggggaggggctgtaccctgtctggctacagtgcagtggatttgcagcagattgtccctccaaccc

SEQ ID NO: 105181 - DNA, 516 bp, Homo sapiens
tgaatggttgggccaggattcaaatccagttctgctgacttcaaagccaatatattttcctttatgcatatatgttctacctgcttaaattttgattttaaaaaataaaaaaagggaaccaggccaggtgtggtggctcaagtctataatcccagcactctggggggctgaaacaagcagatcacttgaggttaggagctcaagaccggcctggccaacatggtgaaaccccatctctactaaaaatacaaaaagttagccaaatgtggtgatgggcrcctgtaatcccagatacttaggaggctaaggcaggagaattgctggaacctgggaggcagaggctgcagtaaggctggattgcactactgcattccagtctggacaacagtgcaacagtgtgagatgccatctcaaaaaaaaaaaaaaaaaaaaaaagggaaccagtttgcactgaaggtgggatagatcttttcatcttgtgtttcttccttttacaatttgagtcaagcaaaaata

SEQ ID NO: 105182 - DNA, 459 bp, Homo sapiens
tccatcaaggggacagtaacatgagaaggactggaggcaagacgagaaagtgacaggaaaggcctggtgggggcggagggaggacaaaggacatttgcctgataagagctaaaggaacaggttatgtgaaaataaacatattcaggattgatataggaagtaacaagtttgtgtggttttataggaaaagttccataaggatctctgtatcccgtgttagatggctagatgtcacagcatataccatgatgggctcaggccactgcaatagaatttatatctctgatctgataccacagtttgtttgtttgtttttagtgataggatctcactctgttacccagrctggagtgcagtggcatgatcatagctcactgtagcctcgaactcctgggctccagcaatcctcctgccttagcctctcaagtaactaggactacaggtgtgcaccacacctgg

SEQ ID NO: 105183 - DNA, 633 bp, Homo sapiens
gaagcatgagctgtaatactgaaccaatagaagacgaactaacagattgcagggcatccgtttggcaaaaaacttatgcagttatctaaatgatagttatgaagacaatatgtataacacattatattctgagtgaaaagaacagaaggtgatttcaaaactgcattgggataatagtaatataggaaatagtgagatgaacaaagatttcaaaggaacaaaaataaagaaaaattttgctttttatattggtaggcgtatgggtgaaattccaattttaattttaatttcatagttataaaattgttcataaaaaaaggtcccccatagacagttgggctttgggacaaactaacagaaacagagtaggaagaaaattcatcttccttcaatcccctttctctgcttaaaacaaaacaaaaaagagctttgtcatgttcaggtgtgcaacgaattcttttyccaaatctggaactttacatctgctattaaacaggagtcagtttccatgtaacatgttgacaatcccccaagtgtgttggaataattttttttaatgaggagatttgaaattccatttcaattgccaacctgcctctttcaacttctaaaaacaaagtaaaacaaaacaaa

SEQ ID NO: 105184 - DNA, 633 bp, Homo sapiens
gaagcatgagctgtaatactgaaccaatagaagacgaactaacagattgcagggcatccgtttggcaaaaaacttatgcagttatctaaatgatagttatgaagacaatatgtataacacattatattctgagtgaaaagaacagaaggtgatttcaaaactgcattgggataatagtaatataggaaatagtgagatgaacaaagatttcaaaggaacaaaaataaagaaaaattttgctttttatattggtaggcgtatgggtgaaattccaattttaattttaatttcatagttataaaattgttcataaaaaaaggtcccccatagacagttgggctttgggacaaactaacagaaacagagtaggaagaaaattcatcttccttcaatcccctttctctgcttaaaacaaaacaaaaaagagctttgtcatgttcaggtgtgcaacgaattctttttccaaatctggaactttacatctgctattaaacaggagtcagtttccatgtaacatgttgacaatcccccaagtgtgttggaataattttttttaatraggagatttgaaattccatttcaattgccaacctgcctctttcaacttctaaaaacaaagtaaaacaaaacaaa

SEQ ID NO: 105185 - DNA, 571 bp, Homo sapiens
tattttgttatatatgccttccactcaacatatgaacaattaacttacatgctttttcaataaaacagtgaaaacattaacacctttttcaaagcagacatacacaattgtcttctaaatgggtgatggcagcagaatctgtggaaactgcaatgtctgaagtgcctgggaggccacagccaatgctggaaagtatacagctgttgcagccacgtgaagcaggaccatcactcagcctcctcttcctccctgtggctgtgcatgtttctaaaattaggacttgtgaacaggtgctcccttcactttccctctgtcatccatcaaatgtttttttctgcrtagaaaacacaattccaggcactgtggaacaagagctgcagagtcctgctcgttatggagattgtgaaatgcggcaatgactggaaaatgtcagtagctcaggcaggcctctggctttgtgagtaatagaagcctctcaaccttggagtccactgggaggttgtcagtcaaagcacttaccagggcatgctcagtgcaaacgccctcagaacaatactttcttggtgaccaa

SEQ ID NO: 105186 - DNA, 630 bp, Homo sapiens
actgtaagtgcaattaaacctcttttggttcccagttttgagtgtgtctttatcagcagtgtgaaaatgaactaatataccaagctatcacatcactgagtgtgatgggccatcagcactgctgtgatgtcctgcaaaagtggaattatttcttgacttgacctcactcttatgtacttgagaagctgagttctcttctcgcatgttctaataaacaagtcttataagtctggctctggttagcccacatgttgaacctcttacttgcaaccccactgatgtgtctcccctatgcctggacataagagcctctcaatctcacattcatccaacagcatctctaggtgtatactcacttgtagccaaagtaaattttacaccatgataaaaattagtgtaaagactttacagggaaccaaagtgcctgggaattctgatgagtaactactgagtggttttttttaatctctttattcaatagacktaaaagtttaacaattgaagattttaggtgcctcgcttttacattatgatttttaactagtgcatgcacaaatatgctttggcacacaataccctttccagagccatcaagatttaagtcatatttttaaggacagtgttaaaatg

SEQ ID NO: 105187 - DNA, 555 bp, Homo sapiens
aactaatttactctaaaaagcaataaaaccactcaaatttgctgcattaccacattttgtcaataagaaaccatcagcatgttatctaggacagctaggtttacttaacttttctgccaatctcagaataaattttcctctgccacacctgtagacatttcacttcttacaaacataactttgaagttgtaactctgggkgtgtgtgtgtgtgtgtgtgtgtgtgtgtgtgtgtgtgtgtgtgttttgagacagagtctcgctctgtcgcccaggctggagtgcagtggcgcgatctccgctcactgaaagctctgtctcctgggttcatgcctttctcctgcctcagcctcccgagcagctggtaccacaggcgcccgcctccacacccggctaattttttgtatttttagtagagacggggtttcatcgtgttagccaggatggtctcgatctcctgacctcgtgatccacccgcctcggcctcccaaagtgctaggactgcaggcgtgagccaccgtgcccggccagctctgggttttttgtttgtttgatt

SEQ ID NO: 105188 - DNA, 555 bp, Homo sapiens
aactaatttactctaaaaagcaataaaaccactcaaatttgctgcattaccacattttgtcaataagaaaccatcagcatgttatctaggacagctaggtttacttaacttttctgccaatctcagaataaattttcctctgccacacctgtagacatttcacttcttacaaacataactttgaagttgtaactctgggtgtgtgtgtgtgtgtgtgtgtgtgtgtgtgtgtgtgtgtgtgtgttttgagacrgagtctcgctctgtcgcccaggctggagtgcagtggcgcgatctccgctcactgaaagctctgtctcctgggttcatgcctttctcctgcctcagcctcccgagcagctggtaccacaggcgcccgcctccacacccggctaattttttgtatttttagtagagacggggtttcatcgtgttagccaggatggtctcgatctcctgacctcgtgatccacccgcctcggcctcccaaagtgctaggactgcaggcgtgagccaccgtgcccggccagctctgggttttttgtttgtttgatt

SEQ ID NO: 105189 - DNA, 573 bp, Homo sapiens
attacttgctttgtccatgttaaattatgtattttttaaagactgttaagaaggattacttaccatcatctccccaggaacctagaggacctgtgtatcccctgagccttcagacacccccattgctaaggcagagctgggactaaaggcttgtggccatcagcagacctagcgcagtagccaaggccctgcacgcctgcctttggtggccagacaccagcttagacacaagactacactggaccctggggaatgtggagcttggaatgcaaacaagcacctggcaaccaggacaggctaccagggamtagagaaccaggaggcttcattgggtaacaaagttctttccaagcattctcttgcattccacccggggaacaagacagcaccgggtttcacactggcaaggcaggaggctgtgtgctgccagaacgaccagcagggggcgcaaaggccacgccaggcacctgctggcctcagagaaaacagaaagggaaccaggaagcccactcctgctgtcctttctctgcaaggaaatgtgccagggcactgcagcccagacagtcggcagta

SEQ ID NO: 105190 - DNA, 632 bp, Homo sapiens
ttgcccaccattcctcatcctcttctgcttggagaccttgatgtggaagaagcaaactgtcctggttgggggaagcccatgtaggaagaaaatgaagtttccatctaatagccagtaaggatacgagtcctgccagtagccaygtgagtgagcttggaagtggatggatcttctgaggcttgccaacagccctgtgattgaactcagaagcagatccattctgggtcaagcctcgagatgactgcagccctggctgacacttagattgccatcttgtgtgagaccctgagccagagaatctcattagccgtacccaaattcctaacccatagagactatgacctcataaatgctgatttaagccttaagactttggaggaatttgttatgcagaagcagatacctaatacacctaggaaagcacgttaaacatttgggatgtgaagatttgctgcagattcataaaggactcgcttgaattttcaatgctacttccctccctcagtgcctccaaaggacttgcaacagcagaagaagtcggaggaggtgtttttcctccttttaatttaaaaagtatccattaggtattctctaaacgtttcgtattaaacagtttccattattaggtaatc

SEQ ID NO: 105191 - DNA, 632 bp, Homo sapiens
ttgcccaccattcctcatcctcttctgcttggagaccttgatgtggaagaagcaaactgtcctggttgggggaagcccatgtaggaagaaaatgaagtttccatctaatagccagtaaggatacgagtcctgccagtagccatgtgagtgagcttggaagtggatggatcttctgaggcttgccaacagccctgtgattgaactcagaagcagatccattctgggtcaagcctygagatgactgcagccctggctgacacttagattgccatcttgtgtgagaccctgagccagagaatctcattagccgtacccaaattcctaacccatagagactatgacctcataaatgctgatttaagccttaagactttggaggaatttgttatgcagaagcagatacctaatacacctaggaaagcacgttaaacatttgggatgtgaagatttgctgcagattcataaaggactcgcttgaattttcaatgctacttccctccctcagtgcctccaaaggacttgcaacagcagaagaagtcggaggaggtgtttttcctccttttaatttaaaaagtatccattaggtattctctaaacgtttcgtattaaacagtttccattattaggtaatc

SEQ ID NO: 105192 - DNA, 579 bp, Homo sapiens
tgctgcagattcataaaggactcgcttgaattttcaatgctacttccctccctcagtgcctccaaaggacttgcaacagcagaagaagtcggaggaggtgtttttcctccttttaatttaaaaagtatccattaggtattctctaaacgtttcrtattaaacagtttccattattaggtaatcatctactgcttatctcagaataaattggaaagagctgaattttgtaacatatttatgctcctattcaaatcagaagaaacccacaaacctctattttagaatcaccagtgaaagtataagaacattttggagtttcagttgtcactggtgtgttcaataagtatttttcacaggcatacatttatttgttctgtcccaaagtatggcatagcatagtgctttacaaatactgaacatagaaccttataaaaagccattaggggaatattagctcaaaattcattgatttgagcataaatcaatttgaagattttgtgacctgtaccacatcttttaggctcagcaaaaatagtttccatgttgttatgaaagcctaggaaaattgtgaacagtttt

SEQ ID NO: 105193 - DNA, 610 bp, Homo sapiens
ttgctggaggcccactcctgaccctgttttcctgggtatcaccagcagaggctgtagaacagcaaaggttgctgcctattctttcttctggaagcttcatcccagaaggacacctgccagatgccaaccagagctctcctgtatgaggtgtctctcggccctactgggaggtgtctcacagtctggatacacgggggtcagggacccacttgaggaggcagtctgacccttagcagagctcgaacgccatgctgggaggtccgctgygctcttcagagccatcaggcagggacttttaagtctgctaaagctgcacccacagccgcccttttccccaggtgctctgtcccagggagatgggggatttatctataagtccctgactggggctgctgccttttattcagagatgccctgcccagagaggagaaatcaggcaatctggccacagcagccttgctgagctgcagtgggctcagcccaatttgaacttcctggctactttgtttacactgtgagcataaaaccacctactcaaacctcagcaatggtggatgcctctccccccaccaggctagagcatcccagatcaatctcagactgctgctgt

SEQ ID NO: 105194 - DNA, 610 bp, Homo sapiens
tgttttcctgggtatcaccagcagaggctgtagaacagcaaaggttgctgcctattctttcttctggaagcttcatcccagaaggacacctgccagatgccaaccagagctctcctgtatgaggtgtctctcggccctactgggaggtgtctcacagtctggatacacgggggtcagggacccacttgaggaggcagtctgacccttagcagagctcgaacgccatgctgggaggtccgctgcgctcttcagagccatcaggcagggacttttaagtctgctaaagctgcacccacagccgcccttttccccaggtgctctgtyccagggagatgggggatttatctataagtccctgactggggctgctgccttttattcagagatgccctgcccagagaggagaaatcaggcaatctggccacagcagccttgctgagctgcagtgggctcagcccaatttgaacttcctggctactttgtttacactgtgagcataaaaccacctactcaaacctcagcaatggtggatgcctctccccccaccaggctagagcatcccagatcaatctcagactgctgctgtgctggcagcgagaattccaagcca

SEQ ID NO: 105195 - DNA, 522 bp, Homo sapiens
tataatcctttggttttgctggatattaaggttgagtctcttcttgtaaatcatgactttgggaagcaggcagcaactcttggggataacgcgacccaactctcctacttttcagatgcagaaactgagaactagaaaggttaatgatttgccatagtcacacaatcagttaatgacaaagcctagcctagaaatcatgaagcttgactccttgatagtgagctggtaggtaaattctgccctgcctgcgcattaaactctctcgaatcactgaggtaccattttgtaaactattattgtaagtcattaaagctctttattcccaagcatcttagaaacagtttcaaaagtggtgccctaataggtcttgagagtaagtggagctgtccaaagaggtgttttttttttttttttttttttkggctggggaggccctcaagagaagttcaccagcaaaaataatctagttcattgtattcaaagcagcacaaaataccatatattctgaaaataagaatatca

SEQ ID NO: 105196 - DNA, 586 bp, Homo sapiens
caagtaagccaactgatttgtgtcatattaaaatrccctttattgtttaaaggccatgttctcatctctgcttctattcagacaaatagtttaaatttatgcaaccttataacctgtctgtttcagaggagtaaatggtttactctaattgtaaacatttaccccacaaatcaacaggaacttattccagtcagactatacaaatataagtacgtaagtgaacagtcataactaatctagttttttaacatatattttccattctttttttgtgcctttctgatcttgatcatgtggtcaatttttagataaagttcacattcctcaggcaatcaaggaatcctgtttttaccatctattttccattcattttcctgcctttctgatcttgaccatgtggtcaatttttagataaatttcacattcctcaggcatcaaggaatcctgtattgatggacccattgaatctattctacctactgttcaagaacaatttcataaactcccacatatttaccaaacacctatcataaatgtatcataggtacattttaattctggccaaacttatcctactattttccac

SEQ ID NO: 105197 - DNA, 586 bp, Homo sapiens
caagtaagccaactgatttgtgtcatattaaaataccctttattgtttaaaggccatgttctcatctctgcttctattcagacaaatagtttaaatttatgcaaccttataacctgtctgtttcagaggagtaaatggtttactctaattgtaaacatttaccccacaaatcaacaggaacttattccagtcagactatacaaatataagtacgtaagtgaacagtcataactaatctagttttttaacatatattttccattctttttttgtgcctttctgatcttgatcatgtggtcaatttttagataaagttcacattcctcaggcaatcaaggaatcctgtttttaccatctattttccattcattttcctgcctttctgatcttgaccatgtggtcaatttttagataaakttcacattcctcaggcatcaaggaatcctgtattgatggacccattgaatctattctacctactgttcaagaacaatttcataaactcccacatatttaccaaacacctatcataaatgtatcataggtacattttaattctggccaaacttatcctactattttccac

SEQ ID NO: 105198 - DNA, 572 bp, Homo sapiens
ctctggaaactgttcttagggcatacagcaaatgcaaacatattcaatcaagaaaatatactaaatatctgaagaagcatgagtctgtggcatttgacaggtgacatgacaggtgcccttcctttcctttcaagctcgacatcatgaacgctccattccaggcaggtgaggccaagaacaatgtgctctctctctctccagctcccatttgagggctgtagcatgcccccaggcggagcaagtcaacagcatttctcattcccccatccccgctctgtgttgcagaatcaataccgtaggctgaggacrcacatttgattcctcttattggcagagttccattgagactgcataatccaaataaaataataaatgtatatcagtgttgaaaagacaggatatgaagcaccaacaataattttgtctaatgtctggaaatcgtaacgcttatgtgattgtattaagagtgaaaacagaatggaggaaatgccaccacagctgggctacgaaggaggataaatgtcattatttctagcagaatcgcagagtcactggcacagagagaaggaagg

SEQ ID NO: 105199 - DNA, 468 bp, Homo sapiens
tctcagacaacatgaagaaaactacagataaatcatgaggattaatgacagagtctaacaatgtttctatatacaaaatcaataaacagatgtaacccattttcctatacaacagtaacaaacaggaaaaaaataccatgtacacagtaacaccaacaataccaaatacctcgaataaattttgaaaagagatgaaaaaaaagaaaacctctgccaaaaatatccctataaaatcattgttgggaaattttacaggagacaaaaatatattgaaaaataggtgtgtccwtggattagaaggctaaatattgtaaagaggtcaattctccataaattgatccacagatttaatgctatttcagttaaaaacctcttcttgtttttgattgtttattatttctgtgaaacttgacaagttcattctaaaatttataagtaaagcccccaaagaagaacagcgtggaaggg

SEQ ID NO: 105200 - DNA, 525 bp, Homo sapiens
aaagcaaccaatggacagtacatttctggaagacagataaaacaaagcagaaaaagccaaagcccaggatacacccaggaggaggatgcagagaaggttgaaagagaacccttgcaacagtgttttacaaggacatcacatctaaatggcttagcatggtgtaattgctcaataaatgttaactgttatgtcattattctggaactggtttttgtcactcaaggtcaacacatatatgcgtaatttattctttagtagagttgtataatattccataacttgttcatccatttccttatttaagaacctttcaatataaaaattagccaggcatggtggcgggtgcctgtaatcccagctactcgggaggctgaggcaggagaatcacttgaacccgggaggcagaggttgcagtgagctgagatcgtgccattgcactccagcctgggcaacaagaatgaaattatgtctcaaaaaaaaaaaaaaaaaaaamcccttcagattattttgtgggtttttttcctg

SEQ ID NO: 105201 - DNA, 492 bp, Homo sapiens
atgaaagatggactcagattaaggactgattgtactgtacctatacatgtgtccagatactttgctagcaagctcatctgcctttataatccaagataccacgtcccaaggctaggcctcgttatcaggtaaactattacttcaccgtcaataaggaaaggtgtgtcttagcaaaataaagttcagagtcccacaaaccacacatgcacaacattcaatcaaatgatgcaatgttatttacaatccttcagagaggagtctttcatgcagggaccatgggctcaaaactgatggtgctgtacaacaaatatggagwagccaaatattccgtccatccaaaaaagcacagatagtgaagctctgtcatttattagtggagtaatgttaggcaagtcatataattaatctgagtatagtgtcttcatctgaaaggacacagggagaaatcatgcccattttgcagtgtctcatgaagaataaatagtaggcaaa

SEQ ID NO: 105202 - DNA, 492 bp, Homo sapiens
atgaaagatggactcagattaaggactgattgtactgtacctatacatgtgtccagatactttgctagcaagctcatctgcctttataatccaagataccacgtcccaaggctaggcctcgttatcaggtaaactattacttcaccgtcaataaggaaaggtgtgtcttagcaaaataaagttcagagtcccacaaaccacacatgcacaacattcaatcaaatgatgcaatgttatttacaatccttcagagaggagtctttcatgcagggaccatgggctcaaaactgatggtgctgtacaacaaatatggagtagccaaatattccgtccatccaaaaaagcacagatwgtgaagctctgtcatttattagtggagtaatgttaggcaagtcatataattaatctgagtatagtgtcttcatctgaaaggacacagggagaaatcatgcccattttgcagtgtctcatgaagaataaatagtaggcaaa

SEQ ID NO: 105203 - DNA, 608 bp, Homo sapiens
gcatcattgtgcttttgggcattctcttagttatggccagactctgacaatgcactgagagatgttaacatattccctatggcttgttttgagcatgaggaggtgcaattccaaatagtaggaacraagtagattttatagacctgagatgagtggaataggatgcagggacaagtctccaaagcaagtaatgagttaaatcaaatgtcctcatcccttggccaaaacttgtagcagacaagaagtgctggatcagtaactaaaggccagccctggaacatatttttaatctaataaggataaataatttctgaatcatgaggctgaggtgttccatacctctatgccatagctagtattatagcttaggaactagagtatatcttagtgtacagaggaagccattagtgggaggcaatatggatatgatgaaagagcataggctttggggtcagaaaggcctggattcaaatgcctattccagcctttgataactgtatgacaattgtcgaatctcttaacatccaggcttttctttgcttttctataatatggaattaataatttctacctcaaaatattaaatgaactaatatgtttgcatctgc

SEQ ID NO: 105204 - DNA, 523 bp, Homo sapiens
tgggaactgaccagtttttagtcaccttcaccaatcctaccaacagccagcaaaacatccagtcaacattcttattaattaccaacacttatgtgttgaggtcacagtgaaggaccagtatatccataactgccagcatgcctgttagaggactatgacatataatcagacaagacacataactcagcatggccttgggcataagaaacatgaaaatttgccctacagaattggtataatccattaaatatggactttgggttagcagtgttaccatggcactctcttttgttagmaatactatcagtggctcagagcaggggtcagcaatccttttctgtaaagggacagatagaaaatattttaggctttgtggaacatgtaatctctgttacaattaaacaattctgctgttgtagcatgaaggcggccaaagacaatatgtaaatgaatgagtgtggctgtgttccaatcaaagttcatttacaaaaacaggtggtgatctatatttgccccacaagcc

SEQ ID NO: 105205 - DNA, 523 bp, Homo sapiens
tgggaactgaccagtttttagtcaccttcaccaatcctaccaacagccagcaaaacatccagtcaacattcttattaattaccaacacttatgtgttgaggtcacagtgaaggaccagtatatccataactgccagcatgcctgttagaggactatgacatataatcagacaagacacataactcagcatggccttgggcataagaaacatgaaaatttgccctacagaattggtataatccattaaatatggactttgggttagcagtgttaccatggcactctcttttgttagcaatactatcagtggctcagagcaggggtcagcaawccttttctgtaaagggacagatagaaaatattttaggctttgtggaacatgtaatctctgttacaattaaacaattctgctgttgtagcatgaaggcggccaaagacaatatgtaaatgaatgagtgtggctgtgttccaatcaaagttcatttacaaaaacaggtggtgatctatatttgccccacaagcc

SEQ ID NO: 105206 - DNA, 608 bp, Homo sapiens
acagctggaaacaattgatttgctcttacgtatttgtgtgacttgactcttcaaacacaaaggtatatttttattatctgatattttattaaaatatcttaaatggtaagattttttttttctttttctttcctattcccatagtcagattcttaactttggagtcactctcytatgtttgagtagccatacttgctttggggcaaaatattgggggatagttttttggagaaagaaaatctgggatgtttttgtagtttagtaatagcaagaatcatgtctgtttgctttaaaggcccaggaaggactgagatactaatggaggagatcgatagaatgggtgatgaagtatcataaatctaatgtaacactatcttctgtcagtgacctagaactatgatatcccgaggcagaagtctcccaggagatttgatgtgtgggtttagaggagtactttcccaccaaccgtaggcatgaaactatatgggaaaatatatcagagtaaattgaaatactttatagcatgccctcattcattcttacagctgtaaaattaaaatgtatgaatggccattttatgaatgaggaaaacctgaaatttgatgatt

SEQ ID NO: 105207 - DNA, 623 bp, Homo sapiens
tgaatcacctgtcaatagttgatctttcattttacattctggaggactaatctgaggaaacaagttaaagaagatgccatatctcatatcatttgttcaataaagcagaatttatttagcatctttgtgctagaggggatacaaagaggaaaaatattcaagttctacctcaaagaaatttcaatggaatggaaagtagaaatgagacaaatgcacatatatgcctgtaatgcaagatagaagattagtaccattaattccatggggttctaaatagtgagaaagttcatttgcttggaagaatgggaaaaatcttcccaaaagaggacattttagataggagtagaaaagctagtaggattttgctaaataggtgcaagtattcataggtgaaagaaagagcataagcgaagttcttacatagcaaagcayaaggcatgtagaggatacagtagaggattagaatacagagggaatgaagaataaaaaataataggactgaaaaggagagttagatgctataatacataggtcgaagcctttgcatttatataatagtcaatagtgagccttgatatgctggtgagctagggaatggcatgatcagagctgtgttatagaag

SEQ ID NO: 105208 - DNA, 623 bp, Homo sapiens
tgagcttatttggatcctctatcttcttgataatctcaccaatggtctatcaattatatttatcttttcaaagaactggccttttgtttgatttatcttttgttttttgtttgtttgtttgtttcagtttcattcaattctgctctaattttgttttttcgtttcttctgctggctttgggttttgtttgttcttacttctctagttccttgaggtgtgaccttagattgtctatttgtgctctttaagactttttgatgtaggygtttgatgctatgaactttcttttcagcaccacttttgctgtatcccagatgttttgataggttgtgtcactattatcattcagttcagagtcttttaatttccatcttgatttcattgttgactcaatgatcattcaggagcaggttatttaatttccatgtatttgcatggttttgagggttccttttggaatgtatttccaattttgttccactgttgtctgagagagtacttgctataatttgattttcttgaatttttttggaacttgttttgtgttctatcatatggtctgtctttgagaatgttccatgtgctaatgaatagaatgtatattttgcaattgttgggtagaa

SEQ ID NO: 105209 - DNA, 623 bp, Homo sapiens
tgagcttatttggatcctctatcttcttgataatctcaccaatggtctatcaattatatttatcttttcaaagaactggccttttgtttgatttatcttttgttttttgtttgtttgtttgtttcagtttcattcaattctgctctaattttgttttttcgtttcttctgctggctttgggttttgtttgttcttacttctctagttccttgaggtgtgaccttagattgtctatttgtgctctttaagactttttgatgtaggtgtttgatgctatgaaytttcttttcagcaccacttttgctgtatcccagatgttttgataggttgtgtcactattatcattcagttcagagtcttttaatttccatcttgatttcattgttgactcaatgatcattcaggagcaggttatttaatttccatgtatttgcatggttttgagggttccttttggaatgtatttccaattttgttccactgttgtctgagagagtacttgctataatttgattttcttgaatttttttggaacttgttttgtgttctatcatatggtctgtctttgagaatgttccatgtgctaatgaatagaatgtatattttgcaattgttgggtagaa

SEQ ID NO: 105210 - DNA, 591 bp, Homo sapiens
ctgactgaggctgtgaactaaaaacaaaattctaagcacccccaaccatctgaatggacccctcctttcagccaaggacattccaaagttaacctgaaaaactagttcaggccatgacgggaagcrggggatttggacatgcctcagcataccctccttcttttggaatttaggcacaactgaccagcattgacattaaaacagagactacgtgtgtgtgagacagggtctggctctgttacccagactacagtgttgtggtgcgatcatggctcgctgcagccttgacctaccaagattaagtgatcctcccacctcagcctcccaagtagctgggaccacaggcacacaccaccacatctggtaattttaaaattttcttgtagagacagggtctcactatgttgcccaggctggtcttgaactcctaggctcaagtgatcctcttgcctcagcctcctaaagtgttgggattacaggcatgagccactgcacccagcctaaaacagagatctcaaggcctttgtagcaataagacactaaattccaggctgactctagtatagcatcatgacagatagcaggccctga

SEQ ID NO: 105211 - DNA, 494 bp, Homo sapiens
cactgtatttccaaactgcttaaccaaaacaatggttcaactccttgagatgaatgcacacatcacaaagcagttcctcagaaactctctttctagtttgtattggaagacatttcctttttcaccataggccttaatatgctcccaaatatccctttggagattctggaagatcagagtttccaaactgctcaatgaaaaaaaaaagtttaactctgtgggatgaatgtacacattacaaaacattctcttagaaagcttcagtctagcttgtattggaagatatttcctttttaaacacaggtctccatgcaaatccaaatatccctttgcatattctacaaacactctgtttccaaactgctcaaatcaaaagaatkgttcaactttgtgatgtaaatgcacacaccacaaagcagtttctcagaaaatctgtttctagtttgtatcggaagatatttcctttttcaccataggcctcaatgcactaacaa

SEQ ID NO: 105212 - DNA, 623 bp, Homo sapiens
tgacttcaaaaaaaaaagcaaacaaatactgtctttctttgtgtcacatttcattggatggcatgatatttatgtgaactacataattacaagtgcaagcgacattaatagctttgatgtacaacttgacacytgataagcccatagctcaactaatgggatcaggagagcatgggcatcttggagggttcagcaggctgtggttatcaggcattctgtgttcctgatggatgagagcaatggttctccactaggggcaattttgccctccgagggacatttggcaaaatctgcaaacaagtttgcttgtcacaactaggcaaatgctgctggtatattataggtagaggccaggtatgctgctaaacaacctacattacacaggacagcccccacaacaaagaattatctggctctaaatgtcaatagtgctattaataggaaaacctgcaatagggggtgatcattcatctggcaagttgctaagtctgaggtttgttaagggagcttctaatacatgtatgtaagaattaagttcggcgaaactttaaaagaagtcttggaaattgtggaggtttctaaggaagcaaattaattcagttactcgccccctgtctggatcc

SEQ ID NO: 105213 - DNA, 637 bp, Homo sapiens
atctatttttttgggtcaattaggcttttgatgtcataggaaagaaaccatagcctgatcgaatgtcatgaagatttaccctatgttttctactaacagttatagatttagctcttatattttggcctatgatgtattgtgagttcatttttttttgtttatgccatgagaacgggatccaactctgttcttttgtaggtggataaccaatagttctagcatcctttctttttgaaaaagtttaattaaaaatttaagatccataaattaagaaatcaacactttagcatttccctttcaatgcagttacatgattgccttttccatttgttcaaatatttttttccttttcttagttgacatgtaataaytgtacatgttaatgggatatagtgtgatatttccatacatgtatacaatgtgtaataatcaaatcagagtagttagcatatccattatctcaaacacttaacatttcttcatgtcatgaacatttaaaatcctcttttctaccattttgaaaatatacactagactgacagggatctggcaagacagccaaatagaaacagctccagtctgcagctcccagcaagaccaacacagaagatgggtgatttctgcatttccaactgag

SEQ ID NO: 105214 - DNA, 645 bp, Homo sapiens
caaagagagttagactcccacacaataataatgggagactttaacacctcactgttaatatttgatcaacaagacagaaaattaccaaggatattcaggactcgaactcagctctggaccaagcaaacctaatagacatctacagaactctccaccccaaatcaacagaacatacattcttctgagcaacacatcacacttattctaaaattgaccacataattggaagtaaaacacttctcaccaaatgcaaaagaacggaagtcataacartctctcagaccacagtgcaatcaaattacaactcaagattaagaaactcactcaaaactgcatgactacatggaaactgaaaaacctgctcctgaatgactactgggtaaataaccaaattaaggcagaaataaataagttctttgaatccagtgagaacaaagatacaacataccagaatctctggaacacagctaaagcagtgtgtagggggaaatttaaagcactcagtgaccacattagaaagcaggaaagatcgaaaatcaacaccctaacatcacaattaaaagaactagagaagcaaagcaaacaaattcgaaagctaacagaagacaagaaataactaagatcagagcagaactgaagcagata

SEQ ID NO: 105215 - DNA, 645 bp, Homo sapiens
caaagagagttagactcccacacaataataatgggagactttaacacctcactgttaatatttgatcaacaagacagaaaattaccaaggatattcaggactcgaactcagctctggaccaagcaaacctaatagacatctacagaactctccaccccaaatcaacagaacatacattcttctgagcaacacatcacacttattctaaaattgaccacataattggaagtaaaacacttctcaccaaatgcaaaagaacggaagtcataacaatctctcagaccacagtgcaatcaaattacaactcaagattaagaaactcactcaaaactgcatgactacatggaaactgaaaaacctgctcctgaatgactactgggtaaataaccaaattaaggcagaaataaataagttctttgaatccagtgagaacaaagatacaacataccagaatctctggaacacagctaaagcagtgtgtagrgggaaatttaaagcactcagtgaccacattagaaagcaggaaagatcgaaaatcaacaccctaacatcacaattaaaagaactagagaagcaaagcaaacaaattcgaaagctaacagaagacaagaaataactaagatcagagcagaactgaagcagata

SEQ ID NO: 105216 - DNA, 620 bp, Homo sapiens
aatgcaagctgatgaaagaatccttatgctctaagtgaatattggcagtggcctggcagaagcccatatggacaggcggcggtggtggccatagggagaggttcctctgcccgtggaaaggggagggaagagtgaaaacattttgtgttgtggtttgagtgccagcttagctgcagtacaacagaatagcatgtaacttgctaaggtttttgactccaatctctggctctgagacagcatttctggatacacccagrgcctgggggaattcatcaccctgaagggaaggatcttgggcaaggcccagtgctatgctggattcaggtctgacactgacacagtgcacccagtggtggtgaccacagaggtgcttgcatcaccacacccccagtttcagatggctaagcacagagacagagacagagagagagagagagagagagaggcagagagaaactgactccatttgtttgtttgggaaaaagtaaagaaaatgaacaagagtctctgcctggtaatccagagagattttcttgatctaatctgagaccaccagagtaatacctctcaagtctgcaaaaaccacagtgttattgggcttagggcccacgtccctttga

SEQ ID NO: 105217 - DNA, 620 bp, Homo sapiens
aatgcaagctgatgaaagaatccttatgctctaagtgaatattggcagtggcctggcagaagcccatatggacaggcggcggtggtggccatagggagaggttcctctgcccgtggaaaggggagggaagagtgaaaacattttgtgttgtggtttgagtgccagcttagctgcagtacaacagaatagcatgtaacttgctaaggtttttgactccaatctctggctctgagacagcatttctggatacacccagggcctgggggaattcatcaccctgaagggaaggatcttgggcaaggcccagtgctrtgctggattcaggtctgacactgacacagtgcacccagtggtggtgaccacagaggtgcttgcatcaccacacccccagtttcagatggctaagcacagagacagagacagagagagagagagagagagagaggcagagagaaactgactccatttgtttgtttgggaaaaagtaaagaaaatgaacaagagtctctgcctggtaatccagagagattttcttgatctaatctgagaccaccagagtaatacctctcaagtctgcaaaaaccacagtgttattgggcttagggcccacgtccctttga

SEQ ID NO: 105218 - DNA, 546 bp, Homo sapiens
ggttaccagagcctgggaaagatagtggggggctggggagtgsagtggggatggttaatgggtacaaaaatattattggaaagaataagacctagcctttgattacccaacagggggactatagtcgataataatttagttgtacattttaaaacaactaaaagagtaaaactggactgtttgtaacacaaaggataaatatctgagggaagggatacccaagtttccatgatgtgattattatgcattgcatacctgtaccaaaatacgtacttcatgtctgtaccaaaatatatacacctactacatagccacaaaaattaaaaataaaattatttttaaaaagcccagactcatatagcttcagtggtgaactctatcaaatgttaaggaataattattaccaagtattcataagctattccaaaaaagtagaagaggagggaacacttcccaactcattctatgtggtcagtattatccttataccaaaatcagataaagatatgacaagaaaactacagaacattatctcttatgattata

SEQ ID NO: 105219 - DNA, 501 bp, Homo sapiens
tacatactcagtcaggacccctactcctaagacctcttggtctaactgatagcaaaatactctcatttattcagctgctactatatctcatggactctcacagaaagcttttatacagacaaagaaactcagagtcagagaagataggtggcttgctcgaaaggatttgggttagttgcaaarctcatgctttcttcactacacaatgcctcttagaaacagcaaatggaaggatatacaaagtgttattagtacttagaagcagggttaactagagagggtcagggaagtctttctgaaagagatggggttttatagcagaagagcaacaggatgactgtcacttgttctttggtctaataaacacattttgataacaagagctagtggtagaatgttttaaaaagagttgggggtctttgttacccaggccggtctcaaactcttggtctcaagcaatctttcagcctcagcctccaagtttctgggattactggtaca

SEQ ID NO: 105220 - DNA, 603 bp, Homo sapiens
gtgacatccaaagacctctaagaactaaagagaacccataaggagtagccagtcccttgtgcctcctccccccttcattmtccattcttaagttcacctggtgaagaaaggcactctattagagcttcactaatttattattctcaatctatccccaaattagtttctgctaagactgttgaatgcctcacttttttctacttcaatagatgcaaatcactttttgaaataatactgtgccttaccaaaatacaaaaaagcttcataaaagtatgacatttaaaatagaagactcagcaggatacagacaaaaaatagtagaaaatggaaataaagactatcccgaatttcaaagtatacaaatccaatgagaactgcagtttacactggaaaacaaagattttttttttaatgtttacaacagctttgaagccaaagtaagtcaaaactggctactatttagtattttactcaacgacaataaaacaagagttctagtctactatagcaactagtagaaataaggtcgccagctagtaaagattaaatcagttgtaaattattttgtggttgcctctaattctggtaagattttggaaaaat

SEQ ID NO: 105221 - DNA, 530 bp, Homo sapiens
atttatggcaaggggaaaaaaatgggattttaaacatgagagaaaagccttgtcatttaaggtcggatttaattggcataatttttkgggggaaaaacaaacaaacaaaaacacaaaacctttgccaaagtaaatttcctcaactgttggtagtagtacaatggtaactttggtggaaaccggaggcaggagtgaggagtatttgaaccttatcaaaatctcacccgtgaccctccaagtctactggaggccgatcatacccgctctgagaacagctggaacgcaagtcccacaggagagggccaccggcgcacacaagttgaggactgccgaggcgtctcctgcgaggtaaacacgaagtcgcttggttagtgagaagaaacccgaggtggcctctggggcagacagagcaggacctgcttctgccccttgccctcctcgtcctcctctctccagcggcggcgaccgcagtaacagcggcagtggcggctgctgccactgctctgccgctgccgagccggtcacctggg

SEQ ID NO: 105222 - DNA, 530 bp, Homo sapiens
atttatggcaaggggaaaaaaatgggattttaaacatgagagaaaagccttgtcatttaaggtcggatttaattggcataattttttgggggaaaaacaaacaaacaaaaacacaaaacctttgccaaagtaaatttccwcaactgttggtagtagtacaatggtaactttggtggaaaccggaggcaggagtgaggagtatttgaaccttatcaaaatctcacccgtgaccctccaagtctactggaggccgatcatacccgctctgagaacagctggaacgcaagtcccacaggagagggccaccggcgcacacaagttgaggactgccgaggcgtctcctgcgaggtaaacacgaagtcgcttggttagtgagaagaaacccgaggtggcctctggggcagacagagcaggacctgcttctgccccttgccctcctcgtcctcctctctccagcggcggcgaccgcagtaacagcggcagtggcggctgctgccactgctctgccgctgccgagccggtcacctggg

SEQ ID NO: 105223 - DNA, 554 bp, Homo sapiens
ggtcaaaatttgagaaactggcagtttcctcaaaagtgactgtgccatttacaatcctaccagcaagatgagagttccagttcctccacatccttatcatccgaggtagggtcattcttttctaacattagccattcttatgggtttagggtgattcctagctctactcygtgatgtgactctccagaagataaggaaggggatagtggtgggggtggggacaaagggagaaaagggacgataagaaatctctctcactgttgttacccctttttttttcctctttttgaactcatccttgggactcaacctctactttccttataatactttcttttaaccttaacatcctttttgcctccatacgtagctgaaatatggtaaatgtccaattctaaagtgcagtagtagctggctaggctaagtaaaatctgtggatgcatttttaaaacttcagtttagctagttttaggtagattttttacctcctcccacataaaacccttttatcagagctgctgacagaaacagaattggctggattgaattcactg

SEQ ID NO: 105224 - DNA, 554 bp, Homo sapiens
ggtcaaaatttgagaaactggcagtttcctcaaaagtgactgtgccatttacaatcctaccagcaagatgagagttccagttcctccacatccttatcatccgaggtagggtcattcttttctaacattagccattcttatgggtttagggtgattcctagctctactccgtgatgtgactctccagaagataaggaaggggatagtggtgggggtggggacaaagggagaaaagggacgataagaaatctctctcactgttgttacccctttttttttcctctttttgaactcatccttgggactcaacctctrctttccttataatactttcttttaaccttaacatcctttttgcctccatacgtagctgaaatatggtaaatgtccaattctaaagtgcagtagtagctggctaggctaagtaaaatctgtggatgcatttttaaaacttcagtttagctagttttaggtagattttttacctcctcccacataaaacccttttatcagagctgctgacagaaacagaattggctggattgaattcactg

SEQ ID NO: 105225 - DNA, 616 bp, Homo sapiens
cagtttaaagaaaagtatagcaaatcaatttaatcaaagttttacatatcaraagagctttcaaaaatgaagaaccaaagacccagggaaatcatctatttttataggtaggcttcatgaagaagggacagccatgtggaaatgtgattggacaaaaaggaatgatctcatggtaataggctgagaaagaacccagcaagacctgtcttcctggcctctaagctgcatttatttctcctgctgtgggacacacagtcttcaagggagaaggaaaagaatgacttttctaggttttatgacttgctttggggaagaggggctctagtttctgtgagttgccttggggaaaaggaattctggtttcagcttcagagtaatgagaggggagggagacaggagggtaggagaaggtcagcgaccttgcccttgattctgaagcctccaatctcctttagttcaaagtattcagcaggccgaggtgccatctgttggagtattgtgttctgaaccccaacaacatcacttcggaagactgaaatggcagatgttatatgccatggaggataaatattgctgttacaatctaacagtaatactagccaaaatgaaaaagaga

SEQ ID NO: 105226 - DNA, 616 bp, Homo sapiens
cagtttaaagaaaagtatagcaaatcaatttaatcaaagttttacatatcagaagagctttcaaaaatgaagaaccaaagacccagggaaatcatctatttttataggtargcttcatgaagaagggacagccatgtggaaatgtgattggacaaaaaggaatgatctcatggtaataggctgagaaagaacccagcaagacctgtcttcctggcctctaagctgcatttatttctcctgctgtgggacacacagtcttcaagggagaaggaaaagaatgacttttctaggttttatgacttgctttggggaagaggggctctagtttctgtgagttgccttggggaaaaggaattctggtttcagcttcagagtaatgagaggggagggagacaggagggtaggagaaggtcagcgaccttgcccttgattctgaagcctccaatctcctttagttcaaagtattcagcaggccgaggtgccatctgttggagtattgtgttctgaaccccaacaacatcacttcggaagactgaaatggcagatgttatatgccatggaggataaatattgctgttacaatctaacagtaatactagccaaaatgaaaaagaga

SEQ ID NO: 105227 - DNA, 616 bp, Homo sapiens
cagtttaaagaaaagtatagcaaatcaatttaatcaaagttttacatatcagaagagctttcaaaaatgaagaaccaaagacccagggaaatcatctatttttataggtaggcttcatgaagaagggacagccatgtggaaatgtgattggacaaaaaggaatgatctcatggtaataggctgagaaagaacccagcaagacctgtcttcctggcctctaagctgcatttatttctcctgctgtgggacacacagtcttcaagggagaaggaaaagaatgacttttctaggttttatgacttgctttggggaagaggggctctagtttctgtgasttgccttggggaaaaggaattctggtttcagcttcagagtaatgagaggggagggagacaggagggtaggagaaggtcagcgaccttgcccttgattctgaagcctccaatctcctttagttcaaagtattcagcaggccgaggtgccatctgttggagtattgtgttctgaaccccaacaacatcacttcggaagactgaaatggcagatgttatatgccatggaggataaatattgctgttacaatctaacagtaatactagccaaaatgaaaaagaga

SEQ ID NO: 105228 - DNA, 545 bp, Homo sapiens
agtagtgggttccttatcataagcccttttgctcttgctctctcactatgtgatgccccctgccatgttgttaggcagcaagaaggccttctccagaggccagcatcatgctcttggcattcctaggcctcagagctaaatacatttattttctttataaatcactcagtctgtggtattctgttatagcaacaaaaatattaagacactcttcctatttcccctactctccttcctccascctctttcttacacacaaaatgttactgaaataccaggagttcaatctaggttctgttacttgcacacagaaagccaatcacttagacaatgaatattgccaaggaagaaggctttaattgcatgctacagctaaggatatgggatatcagtctcaattccatctcctcaaccagccgaaattaggggattatatagcaaggaagaaatgtaactatgagcaggaaaacaggaactagggagggctaaggaagcaatcatgacaaataaggaatctggcatctggcatctcattgtctcgacac

SEQ ID NO: 105229 - DNA, 582 bp, Homo sapiens
agcccagccatatcagaatgacatctaccatgcatcagtcctcgtgtgtcttcagcgcctctttcacatgtctgtgtccttagagcttgctggaaccatctttgcttgtctctgtgtgttctgagtctgtgactatttggctctaggagtcttctcaacaaagtacaatttctgttgtctttttccaaaagactttatgaataaaatgaaaatatgagtaatataaaatcaaaatatattttgatttctcatttcaaaattatctacctctgtagtttaatagaactcaattattggccccagaagataatttttttccctaaagtattttctaaataataaccagtagttgacctacrtcctttatatatgtcacatagaagatctccacagtacattcttcaaattcagctcagataatccatggaatgctcaagttccctgtaacaaattgagctcctatagctctgtggacttataattgactaataaaagtaagacttgtttgctaatgataaagataatttgtaaaaaataaatcattttagtttgaccatgagacgcacacatccattatcatta

SEQ ID NO: 105230 - DNA, 582 bp, Homo sapiens
agcccagccatatcagaatgacatctaccatgcatcagtcctcgtgtgtcttcagcgcctctttcacatgtctgtgtccttagagcttgctggaaccatctttgcttgtctctgtgtgttctgagtctgtgactatttggctctaggagtcttctcaacaaagtacaatttctgttgtctttttccaaaagactttatgaataaaatgaaaatatgagtaatataaaatcaaaatatattttgatttctcatttcaaaattatctacctctgtagtttaatagaactcaattattggccccagaagataatttttttccctaaagtattttctaaataataaccagtagttgacctacatcctttatatatgtcacatagaagatctccacagtacattcttcaaattcagctcagataatccatggaatgctcaagttccctgtaacaaattgagctcctatakctctgtggacttataattgactaataaaagtaagacttgtttgctaatgataaagataatttgtaaaaaataaatcattttagtttgaccatgagacgcacacatccattatcatta

SEQ ID NO: 105231 - DNA, 504 bp, Homo sapiens
ctatcattgttgggcatttagggtgattccatgtccttgctgttatgartagtgctgcagtgaacatacgtgtgtatgtggctttataatagaatgatttatgttcttttgggtatatgcccagtaatgggattgctgggctgaatgacatttctgtcttcaggtctttgaggaatcatcacactgtcttccaaaatagtagaactaatttacactcccaccaacattgtataattgttcctttttctccacaacttcaccagcatctgtttttttttttttttttttttttgctttttgctttttaataatagccattctgatgagaacacatggacacatagagggtagcaacacacactgtggtatctcaaagggtggagggtgggaggagggaaaaggtcaggaaagataactaatgagtactaggcttaatacctgggagatgaaataatctgtacaataactccccatgtcacaggtttacctgtgtaacaaaccttc

SEQ ID NO: 105232 - DNA, 504 bp, Homo sapiens
ctatcattgttgggcatttagggtgattccatgtccttgctgttatgaatagtgctgcagtgaacatacgtgtgtatgtggctttataatagaatgatttatgttcttttgggtatatgcccagtaatgggattgctgggctgaatgacatttctgtcttcaggtctttgaggaatcatcacactgtcttccaaaatagtagaactaatttacactcccaccaacattgtataattgttcctttttctccacaacttcaccagcatctgtttttttttttttttttttttttgctttttgctttttaataatagccattctgatgagaacacatggacacatagagggtagcaacacacactgtggtatctcaaagggtggagggtgggaggagggaaaaggtcaggaaagataactaatgagtactaggcttaatacctgggagatgaaataatctgtacaataacyccccatgtcacaggtttacctgtgtaacaaaccttc

SEQ ID NO: 105233 - DNA, 541 bp, Homo sapiens
ctttattattttatttccttctgctaacattgaaagaatttgatatcctttttctatttccttgaggcrtaatactaagttgtttatttgagatctttcttctttttgctgttgatgtttattgctataaactttcctcttagaaatgcttttgctgtatctcataagtttcggtatgttgtgtttccatttttgtttttctcaagatgtttttacatttcttgtttaatttcttcattgacctattggttgttcaagagcatgttgcttaattcttttaattttcatttcttcattgacctattggtggttcaccaccatgttgcttagtttccacgtattcgtacattttctggaattccttctattgttggtttctagtgtcatatcattgttgtctgaaaaggtacttgatatgattctaatattaaatttgcaaagattcgtcttgtggtctaacctgttgtctatcctgcagaatgttctatgtgtccctgagaagaatgtgtattctgctgcttttgggtgaagtttctgtatg

SEQ ID NO: 105234 - DNA, 541 bp, Homo sapiens
ctttattattttatttccttctgctaacattgaaagaatttgatatcctttttctatttccttgaggcgtaatactaagttgtttatttgagatctttcttctttttgctgttgatgtttattgctataaactttcctcttagaaatgcttttgctgtatctcataagtttcggtatgttgtgtttccatttttgtttttctcaagatrtttttacatttcttgtttaatttcttcattgacctattggttgttcaagagcatgttgcttaattcttttaattttcatttcttcattgacctattggtggttcaccaccatgttgcttagtttccacgtattcgtacattttctggaattccttctattgttggtttctagtgtcatatcattgttgtctgaaaaggtacttgatatgattctaatattaaatttgcaaagattcgtcttgtggtctaacctgttgtctatcctgcagaatgttctatgtgtccctgagaagaatgtgtattctgctgcttttgggtgaagtttctgtatg

SEQ ID NO: 105235 - DNA, 541 bp, Homo sapiens
ctttattattttatttccttctgctaacattgaaagaatttgatatcctttttctatttccttgaggcgtaatactaagttgtttatttgagatctttcttctttttgctgttgatgtttattgctataaactttcctcttagaaatgcttttgctgtatctcataagtttcggtatgttgtgtttccatttttgtttttctcaagatgtttttacatttcttgtttaatttcttcattgacctattggttgttcaagagcatgttgcttaattcttttaattttcatttcttcattgacctattggtggttcaccaccatgttgcttagtttccacgtattcgtacattttctggaattccttctattgttggtttctagtgtcatatcattgttgtctgaaaaggtacttgatatgattctaatattaaatttgcaaagattcrtcttgtggtctaacctgttgtctatcctgcagaatgttctatgtgtccctgagaagaatgtgtattctgctgcttttgggtgaagtttctgtatg

SEQ ID NO: 105236 - DNA, 541 bp, Homo sapiens
ctttattattttatttccttctgctaacattgaaagaatttgatatcctttttctatttccttgaggcgtaatactaagttgtttatttgagatctttcttctttttgctgttgatgtttattgctataaactttcctcttagaaatgcttttgctgtatctcataagtttcggtatgttgtgtttccatttttgtttttctcaagatgtttttacatttcttgtttaatttcttcattgacctattggttgttcaagagcatgttgcttaattcttttaattttcatttcttcattgacctattggtggttcaccaccatgttgcttagtttccacgtattcgtacattttctggaattccttctattgttggtttctagtgtcatatcattgttgtctgaaaaggtacttgatatgattctaatattaaatttgcaaagattcgtcttgtggtctaacctgttgtctatcctgcagaatgttctatgtgtccctgagaagaatgtgtattctgctgctkttgggtgaagtttctgtatg

SEQ ID NO: 105237 - DNA, 583 bp, Homo sapiens
ggaggagaatgtagcaaagtaaactgaaaatttgtgaacagtgaagtgrgagcaaaactaagattgatgatataaaaggcaagacttgtatttccaaaagagaattgaaagaaggtgaaatatctgaaataaaaataaaaatgtgcttattgcatttgtcaacattaaagatggtattttgataccaataaataagttgtagagaaggttgtaaaagtcagacactagttacaggaagattaattgggtattgagtcatttcacacaagtgtaaatatctcttggttttgaagggaaaaggagaaatgtcacagtatttagatatgaggttgaggatttgtttttgtatctttttaacaggagtgggtagtggacattttcatgctaagtgtggtcctgcattagaaaatgcaatattgctgaagaacagaagtgaaattattggagtaataaaattatcaagatggtagaacagtagaatctatagcatacataaagtcattgaacataatatgatttctccattgaaacaaaataagataaaataagataaaagaaaaataaaagaagtagatggttacaa

SEQ ID NO: 105238 - DNA, 583 bp, Homo sapiens
ggaggagaatgtagcaaagtaaactgaaaatttgtgaacagtgaagtgagagcaaaactaagattgatgatataaaaggcaagacttgtatttccaaaagagaattgaaagaaggtgaaatatctgaaataaaaataraaatgtgcttattgcatttgtcaacattaaagatggtattttgataccaataaataagttgtagagaaggttgtaaaagtcagacactagttacaggaagattaattgggtattgagtcatttcacacaagtgtaaatatctcttggttttgaagggaaaaggagaaatgtcacagtatttagatatgaggttgaggatttgtttttgtatctttttaacaggagtgggtagtggacattttcatgctaagtgtggtcctgcattagaaaatgcaatattgctgaagaacagaagtgaaattattggagtaataaaattatcaagatggtagaacagtagaatctatagcatacataaagtcattgaacataatatgatttctccattgaaacaaaataagataaaataagataaaagaaaaataaaagaagtagatggttacaa

SEQ ID NO: 105239 - DNA, 434 bp, Homo sapiens
ccaaactactcctgccaaggagccattgctgtggttcctttggactggacttctgactctcccctaatttctactcatttctaargttaattctctttactctccaaccactccaatacatttccttccatttatgttctctagagtctgttttcattgctgacacctaaggtggtgcataattataagccagcgtgatttcatttcctatctgaagccttcgaaaaaaatggctctcaagcagtatctcagacacccaaatccaaggctttactttggtggccatggaaagacacctgaatgggtgggcgtgggaatagggtaagagaagtagaaaagaggaagggaaaagagaaagtactgcatatttcatacctactatagtctaggactgaggatacagcaatgatcaacataggcagaggctctaacag

SEQ ID NO: 105240 - DNA, 434 bp, Homo sapiens
ccaaactactcctgccaaggagccattgctgtggttcctttggactggacttctgactctcccctaatttctactcatttctaaggttaattctctttactctccaaccactccaatacatttccttccatttatgttctctagagtctgttttcattgctgacacctaaggtggtgcataattataagccagygtgatttcatttcctatctgaagccttcgaaaaaaatggctctcaagcagtatctcagacacccaaatccaaggctttactttggtggccatggaaagacacctgaatgggtgggcgtgggaatagggtaagagaagtagaaaagaggaagggaaaagagaaagtactgcatatttcatacctactatagtctaggactgaggatacagcaatgatcaacataggcagaggctctaacag

SEQ ID NO: 105241 - DNA, 535 bp, Homo sapiens
agaaccacaaaacactgctgaaagaaatcatagatgatacaaaaactgaaaaaatattccatgcttatggattagaagaatcaatattattaaaatgtccatactgcccaaagcaatctacagattcagtgctatttctctcaaactaccaaggtcagttttcatagaattagaaaaaaccattataaaattatatggaactaaaaaagagccagcatagccagggcaatcctaaggaaaaaaaaaaaaaaaaaagctagagacacagacttcaaagtatactagaaggcaaagttaaccaaaacaacatggtactagcacaaaaacagacacatagaccaatggaacagaatagaaacccaraaataaagcttcacaactacaaccatttgatctttgacaaagtcgacaaaaataagcaatggagaaaggataccctattccataaatagtgctgggataaactggctagcactatgcggaagaataaaactggactcctacctttcaccatatacaaatattaactcaatgt

SEQ ID NO: 105242 - DNA, 546 bp, Homo sapiens
gggaagctatatttataaagattttaactaaattgagaataggccctggattcaaatagaagagtaaggaaaagaaaatagggaaaacaggaccatttattaccattaccttttagaaaacacccaacactcttgcaccaagatgcaacacatttgatgagcgatctcatttctgcatcatgatgtttgcaaggagaagagtgtccagcatacagatatcactctcagagatagtctggggaattggttttcctctttgggaagccataaatcttgtggctgtttatcatgacctaacaggacctctctctgaaggaatggcaggcgcattctgactaatctctgacatcagcctgggctggctggtaacgtgtgtttacacagaactgtctgaaagctgtggcatgkgacaagtgtcacagccctgtcttctttgggcagcctaattgaccattgctacctaatacagtagggaaggggccccgtgccaggccagggagacctagatagggaaagggaagcaactgcttctgaggccaagtttga

SEQ ID NO: 105243 - DNA, 472 bp, Homo sapiens
ccatcatggaagctttttccgacctcattttccactgtgcttcttccttcaccaagagctcacactataagaggtatctatagtgaccaagtgctcctatacttacgagctctcatgaagatacagctgtatgyatgaaagtccaaaaaaaatctatatcaatatttaaatttaaaaagcaaatttttggaaacatgcactaaagggagaaaggtgtgttttctttcattacagtgatagaaaaagaaaagaaagaggactttttagagaattaattgtcaaagaaaccaatctgataccatgttgggaagctaagcagaaggctgtatcaagtgacaagttccaaagacaagtaccctttattgagagttatttgacctgccttaagtctcctcaattcaaatctggaatctctcaagggtgctcaaatgtgttcagcaagtcaactgtaataaagacaatgaatgggctc

SEQ ID NO: 105244 - DNA, 568 bp, Homo sapiens
actgggcttaagcaatcctcccacctcactttcccaagtagctggaactacaggagtaggccacatgctcgattaagttttgtattttttgtagagatgggtctcactatgttgcccaggctggtcttgaactcctgggctcaagctatcctccttccttagactcccaaagtgctggaatgggccactgcgcctggctcagttctttaatcttcagattaaaacttccagccatgcagtaaactttttcytagtggaaaacattatatgctgtctcattcctagattgtaaactctttgaaggaagagacttctttcttgaaacattaccagatcttgtctatatactgagactcaaattctgcctctctcttgggtcctgaaatggacacactggataccacccaaaagtttatgcatggcagacttatgctaaacaatctaaattagcattcaggatctttttactacacctcaattcaaccacttgtaattatgtatttatttttttttttattccactgagctaggcactgctggagctaaaaagatgagtaagacccagtta

SEQ ID NO: 105245 - DNA, 568 bp, Homo sapiens
actgggcttaagcaatcctcccacctcactttcccaagtagctggaactacaggagtaggccacatgctcgattaagttttgtattttttgtagagatgggtctcactatgttgcccaggctggtcttgaactcctgggctcaagctatcctccttccttagactcccaaagtgctggaatgggccactgcgcctggctcagttctttaatcttcagattaaaacttccagccatgcagtaaactttttcttagtggaaaacattatatgctgtctcattcctagattgtaaactctttgaaggaagagacttctttcttgaaacattaccagatcttgtctatatactgagactcarattctgcctctctcttgggtcctgaaatggacacactggataccacccaaaagtttatgcatggcagacttatgctaaacaatctaaattagcattcaggatctttttactacacctcaattcaaccacttgtaattatgtatttatttttttttttattccactgagctaggcactgctggagctaaaaagatgagtaagacccagtta

SEQ ID NO: 105246 - DNA, 647 bp, Homo sapiens
tcctggctagtgtttgttttgtttcgtttttgggcagcttacaagtggcgctctttctgcttaaaggcgagtgtgctcatgtgcaagcacagacactctacatgtgcgtacagcctgcttgtgtttgcgttttaggatgtgtgtgcaagagcagcagccacagcacccggggaggccgagtttgtcaccagcgggtgtgggcgtgtctggggcccccgtggggctaggacagagcaggaatgccacatggagggcaccggctccccagwtgtcactgccgagtctctgttgtgagtgctcagggggacactttaggacatagcttctcaagcaagaggtgggtagccaagtgtcccatctcagtgccactgggaggctcagcccgacaggagctggctgagggggacggagttgcagcaggggcagtggctggcccaggcaggcccggctgcacttttgacacctttgtaactgcaaggtgaaaactgacttttcatgattcttcccaacaaattcttacctttggtctctctctggacatattttaggaaagaaattatttcccaaatagttattcacacctatcactaaattatgtccttctctgatggcataaaaaaaaaaatcaaaactggctgggcacagtg

SEQ ID NO: 105247 - DNA, 286 bp, Homo sapiens
tgtgtattatattctatttccctctcctcmtttacatcttttttctttgtttttttgtttgcttatttcatgagtattaccaaaaaaagaggaaaagttaggtgtgccttagaaccattgaagaaagaagagaggagaaccagaaagcagaacataatccttaaggaggatttcctaaattaccaaattgtcctacaaatttgttaaatcaagtttagcctaaagctgcctccttacatgtttaagttcgacctaaagtttattctgtacatggtgaactataaca

SEQ ID NO: 105248 - DNA, 638 bp, Homo sapiens
aagggacaacatctaacttactgtgtagggggaacaggttgcagagggatgtgaggagcagagacagaaacaagatcatttaggaggcaattataatgattccctgccctctgggtccatacatctgcctgcctaacagatgtctccactttcatgacttaaagtacctcaaccttaacatattcagagttaaatccatagttgcctcccaccttctccacacctggtttttcttcttgttacctattgcagtaagtagcatcactgtgtatccagaaatcatactggaatcttggacattatttcattgttttccctcttttttatgctaacattaaatcagtcccaagtgcaataattataacttctttctctttggaatcttctccctcctcttcattccctctgccatgakcttaactcaagcctcatcatttcttgcctatttcaggcaatagcctctgataaatgccctagctcttgatttgtatccctctaatctcctctccgtatggctttcagagtgaactttccaaaatatgaacagattttgtcatttccttgcttaaataagaattgttaatatgatcttctctttgtaaatttccgttcctctattgtctttaagatttcaaact

SEQ ID NO: 105249 - DNA, 557 bp, Homo sapiens
aataaacttgtgttgaattatgtcgggttaatttattgtcacagacagcttctcttacctgacacttatgatctcctatttcatagaatcaaggtgagaatctagtgaagagtaccactttttgagcgtgtagtatataccagatattatgttaaatatttacatgtataaactaatgtaatagtatagtgaaagtattttggaaactataactattaattatatgaaaagattaataccttgtgcttgtacacattttcacattttcctgatctataggttctttataaatggattggaatamaatttatatattgagggcagtatagcatgatgtttaaagatgtgggctttaaatctgaatctcatccttgccatatactagctctgtgattttgtaaaagatgcttaatatctctatatcataattactcatctgtaaaacagggtggataaatgttcctacctaatagaaattttgtggagcataaattatttaatgcacgtgaagtgcttagaaaaatacctctcataaaccaatggttcaaaagagttta

SEQ ID NO: 105250 - DNA, 638 bp, Homo sapiens
cccgtaagtgacagggtcagggaaagtttctgcatcagttaccccctaggaggaaccccaaagtggggtgaggtgggaagggaagaatgggaattgcgggcacatgggactgcccgagccaatgcataaggcacccaccagagccacataaggagctgagatgttgaggagaggctcttacccaagccttcatctgcaggcacaaagtggagcagggtgagtggtcacccttggcaatgtgaccaacataagtgtgtgtgctaataccactgacccttgaacaggatgggcctgaactgtggaggtccacctatatgtggattttcttctgccactgccactcctgagacagcaagaccaactccttgttctcctcctcctcagcctactcaatatgaagacgacgagaatgaagacctttatgagggtccacttccacttaatgagtagtaaggatattttctcttccttatgattttcttaatcacattttcttttctctagcttactttattgtacaaatacagtatgtaatacatrtacaaagtatgtgttaatagactgtttatgttatcggtaaggcttccatcaactgtaggctatgagtagttaagttttggggagtcagaaggtatact

SEQ ID NO: 105251 - DNA, 536 bp, Homo sapiens
ttccaaattgtgatatcctcctttgtaaaccacaatgcttaacacagcatctggcaaggagcaggaacataataggtgcacgcgcrcacacacacacacacacacacacacagagtttatcctcattctacacatattccacatttgcaaatttgcctactgactaaaatttcttcgtgatacccaagtcgacaatgtggttctttcacagccattccccgtgaaaaggcacatgaaaaatggtggaagatttgccacccaacgtgcatgttcccagctgaggtagaagaaggggatgctctgccttcccgcatcagctcgcatactgcaagtgaatgtccttttggcagcctttaccgtgctgtgctttttgcatttttgtgctttttgtttgcaacttttttgtttgaggtggtccccgagcatagtgtggaagtgctgtctagtgtggctaagcacaagaaggctgtgtgtgcctcacggagaaaacagatgtgaaagataagcttcactcaggcatgaatgctgttggccat

SEQ ID NO: 105252 - DNA, 536 bp, Homo sapiens
ttccaaattgtgatatcctcctttgtaaaccacaatgcttaacacagcatctggcaaggagcaggaacataataggtgcacgcgcgcacacacacacacacacacacacacagagtttatcctcattctacacatattccacatttgcaaatttgcctactgactaaaatttcttcgtgatacccaagtcgacaatgtggttctttcacagccattcccygtgaaaaggcacatgaaaaatggtggaagatttgccacccaacgtgcatgttcccagctgaggtagaagaaggggatgctctgccttcccgcatcagctcgcatactgcaagtgaatgtccttttggcagcctttaccgtgctgtgctttttgcatttttgtgctttttgtttgcaacttttttgtttgaggtggtccccgagcatagtgtggaagtgctgtctagtgtggctaagcacaagaaggctgtgtgtgcctcacggagaaaacagatgtgaaagataagcttcactcaggcatgaatgctgttggccat

SEQ ID NO: 105253 - DNA, 536 bp, Homo sapiens
ttccaaattgtgatatcctcctttgtaaaccacaatgcttaacacagcatctggcaaggagcaggaacataataggtgcacgcgcgcacacacacacacacacacacacacagagtttatcctcattctacacatattccacatttgcaaatttgcctactgactaaaatttcttcgtgatacccaagtcgacaatgtggttctttcacagccattccccgtgaaaaggcacatgmaaaatggtggaagatttgccacccaacgtgcatgttcccagctgaggtagaagaaggggatgctctgccttcccgcatcagctcgcatactgcaagtgaatgtccttttggcagcctttaccgtgctgtgctttttgcatttttgtgctttttgtttgcaacttttttgtttgaggtggtccccgagcatagtgtggaagtgctgtctagtgtggctaagcacaagaaggctgtgtgtgcctcacggagaaaacagatgtgaaagataagcttcactcaggcatgaatgctgttggccat

SEQ ID NO: 105254 - DNA, 559 bp, Homo sapiens
gtattgggatataaccgaaagtatagaataaatatacacaagttcctgttgatatatagtaaatgattaaaaaatgaatggggaagaagttacattattttacagaaacattccaaactatttstgtagacattttactctacagaagttggagcttaatcctcctctccaaccatacgctaaacttagtgacttgtttccatgggacagaatagagaaagaaaagcaaaatagtagagttagagaggaaaaacttggcaaaaccacatgaaatgagtgatgaaggtgaacaacctcagtggtgtcgtgtgcccctaatttgatgtgacaaggaaagcactttatctctgtgaaattccttccccaaatcccatgagaaagacatcaaagaaacccaggtgggggtcttcctgtgggataacttgcctgtacacctcaagattctcaaggtcataaaaaacaggtaaagtgtgggggaagcatcacatacaagaggtgacagggcagcattgtggtgccctaattagatgttgaaatagaaagaggagattcatggaaa

SEQ ID NO: 105255 - DNA, 559 bp, Homo sapiens
gtattgggatataaccgaaagtatagaataaatatacacaagttcctgttgatatatagtaaatgattaaaaaatgaatggggaagaagttacattattttacagaaacattccaaactatttctgtagacattttactctacagaagttggagcttaatcctcctctccaaccatacgctaaacttagtgacttgtttcyatgggacagaatagagaaagaaaagcaaaatagtagagttagagaggaaaaacttggcaaaaccacatgaaatgagtgatgaaggtgaacaacctcagtggtgtcgtgtgcccctaatttgatgtgacaaggaaagcactttatctctgtgaaattccttccccaaatcccatgagaaagacatcaaagaaacccaggtgggggtcttcctgtgggataacttgcctgtacacctcaagattctcaaggtcataaaaaacaggtaaagtgtgggggaagcatcacatacaagaggtgacagggcagcattgtggtgccctaattagatgttgaaatagaaagaggagattcatggaaa

SEQ ID NO: 105256 - DNA, 495 bp, Homo sapiens
attagagctaatgagaggattgaggagaccgacattcacttccaattgcagttccaaattaacaccttctgcagatacacattccagaaatctcatgccctgtactttcttctacaccgttttctctcccctttgtttccattccagccatgcaggaagcagcgtctgtcctggcacattgcgacatgttgtccatacycgcttgttcttccctgcctgtgttctggtaacactgtgttcactgttgaactcttctaggtatgctttccccccactccagttgttggtgttttctgtctacatcctcttagtcctctataaatagatacttttatgatactcacgtgttccttattgagtgtacagttgagtactggtgagtacatgcacattgttgtaaaaccaatctccagaatttttcatcttggaaaactgaaatgctacactcattaagcaactctcccatattcccctcccctaggccctaagagccac

SEQ ID NO: 105257 - DNA, 495 bp, Homo sapiens
attagagctaatgagaggattgaggagaccgacattcacttccaattgcagttccaaattaacaccttctgcagatacacattccagaaatctcatgccctgtactttcttctacaccgttttctctcccctttgtttccattccagccatgcaggaagcagcgtctgtcctggcacattgcgacatgttgtccatacccgcttgttcttccctgcctgtgttctggkaacactgtgttcactgttgaactcttctaggtatgctttccccccactccagttgttggtgttttctgtctacatcctcttagtcctctataaatagatacttttatgatactcacgtgttccttattgagtgtacagttgagtactggtgagtacatgcacattgttgtaaaaccaatctccagaatttttcatcttggaaaactgaaatgctacactcattaagcaactctcccatattcccctcccctaggccctaagagccac

SEQ ID NO: 105258 - DNA, 547 bp, Homo sapiens
aataaaaatctgttgtttagggcagccmcctttgtcaatgctttcagctagatcttctgaataacttgttgtagcttctacatcagcacttgctgcttcctcttgtacttttacattatggagaagacttttctccttaagcctcatgaacaaacctctgctggcttctattttttcatctgaagctttctgacctctctcagacttcagagaattgaaaagacttagggcctttccttagattttgctttggcttaaagaaagatagtggctggtttgatctattcagaccactgaaactttctccatatcagcaaaaaagacttctttgttttctcaccatccgtgtgttcactataatagtacatttaatttctttcatgaacttttcttttacatttacaacttgctcaactcctcgatgcaagaggcctagctttcagcttatctttgctttcaacctgtgttcctcatcaagcctaatattttctaaattttgatttaaagtgagagaggtgggacgcttcctttcacttgagcatgtaga

SEQ ID NO: 105259 - DNA, 547 bp, Homo sapiens
aataaaaatctgttgtttagggcagccccctttgtcaatgctttcagctagatcttctgaataacttgttgtagcttctacatcagcacttgctgcttcctcttgtacttttacattatggagaagacttttctccttaagcctcatgaacaaacctctgctggcttctattttttcatctgaagctttctgacctctctcagacttcagagaattgaaaagacttagggcctttccttagattttgctttggcttaaagaaagatagtggctggtttgatctattcagaccactgaaactttctccatatcagcaaaaaagacttctttgttttctcaccatccgtgtgttcactataatagtacatttaatttctttcatgaacttttcttttacatttacaacttgctcaactcctygatgcaagaggcctagctttcagcttatctttgctttcaacctgtgttcctcatcaagcctaatattttctaaattttgatttaaagtgagagaggtgggacgcttcctttcacttgagcatgtaga

SEQ ID NO: 105260 - DNA, 612 bp, Homo sapiens
tattttttgtgtgagcagaacataggaaaaagagaagcgttggctgggcacagtggctcacgcctgtaatcccagcactctgggaggctgaggagggtggatcacctgagatcaggagttcaagaccagcctgaccaacaaggtgaagccccatctctactaaaaatacaaaatacaccaagtgtggtggcaggcttctgtagtcccagctactcaggagactgagacagaagaattacttgagcccaggagcggagttttcagtgaaacaagatcatgctactgcactccagcctaggtgactgagtgagactccatctcaaaaaaagagagaaaagcatcacatcacytgagtgctgagcccagatatgtcccaatccctctgtgagcagaatccatgcagaagaagagagtcaacatacatggatgatgggcacagagatatttcataatgtcccctgtaggaaaggcacaggaagaagtgtaacatcacttgagtgttggacagtgcaatatgtcaaaatagccaatgtggtcagggcacaggcagaaatcacataacctgggtgcagggcctgacagtgcatcacaatgtcctctatgggcagagcc

SEQ ID NO: 105261 - DNA, 603 bp, Homo sapiens
agaacagtattttcaaaggtatattttatataaatctagaacataaaattcttcacacacacatgtgtatgtgtttgggtttaacacattgctgatccaaattaatgcatattagtctaggaaatttcttgagacgtctgcaaaagaaacctttttaaccttgttaattactgaatttgaaaaattgatgaggacagagaagattttatcagtaaaattcctgttgatgtgtaactactaattttgggacaattggggaaatactaaagagaataaatcaatgttttattactttataaaaatatatgaggaaatacctataaaaattattcatttgtgtacttattatcagtggatacaaatccagtggaaacacctataaaaattattsatttgtgtacttatcatcagtggataccaatccagtggcttattaggagaatttgtggagtttttaaaaaatgccttcgtccaagccacagtctaaatacatgggattacacaaatacaaagataaaatctggattgagaaaaatatattaagcatatatttaatacctatgtttcctaaactatcatttattcaagtgcagggaaggtttc

SEQ ID NO: 105262 - DNA, 583 bp, Homo sapiens
catatctaattgtgtaataagataagcacttttcaaattacactggaattgcatgaacacatttaaaaatagcagtttattatgctgatccattttcaaaaccttaattttaaaagacaatggttggctaatatatgaaaataaatcacaagaatatattaaggatgaaaaaagcaagtgtagatacaggcattctcattactaagaaatagtgtgctatactgaaagagcataagagaattacaggagatagtccagaggtttaataagaaaaaaattaaaccgtttaaagttatatagaaaactatgaattttatcttttcagcttcccaggctgctaccagtctaacaccctggatatgtttattttttctaaatacagatcttaataaaatcctagttatggataaatacagaaacataggtaatcctaccatacctattgacatatattgtgatgtacttgttcacacatatgtatgtaaattctatgttaatcaaacaagcatgactcayagaccatcattatgaagaaatattatttttattctcatgatcacttaaaatgtataatctgtggaca

SEQ ID NO: 105263 - DNA, 579 bp, Homo sapiens
atatcccctcacagattctaccaaaacagtgtttccaaactgctcaatcaaaagtagggcttaactctttgagaagaatgcacacatcaccgagcagtttctgagaaagcttctttcaaatttttatctgaagatatttcctttttcaccataggcctcagtgcactccaaaatatccctacgcagttacttccaaaacagtgtcaccaaattgctcaatgaaaagcaaggtgtaactctgtggaggaatgtttgcatcacaaagcagttgccgagacaccttctttctggtttttatctaaagatattttctttttcatcatatgcctaaatgcgctcccaagtatctctttcctgattctaccaaaagaakgtttccacactgctcactcaaaagaaaggcttaactctgtgagattaatacacacatcacaaagcagtttcctcagaaagcttctttctagttttaatctgaggatatttcatttttcaccttaggcctcaaagtgctacaaaatatctcttctgagattctacaaaaatactgttgccaaactgcccaatcaaaacaaaagttta

SEQ ID NO: 105264 - DNA, 579 bp, Homo sapiens
atatcccctcacagattctaccaaaacagtgtttccaaactgctcaatcaaaagtagggcttaactctttgagaagaatgcacacatcaccgagcagtttctgagaaagcttctttcaaatttttatctgaagatatttcctttttcaccataggcctcagtgcactccaaaatatccctacgcagttacttccaaaacagtgtcaccaaattgctcaatgaaaagcaaggtgtaactctgtggaggaatgtttgcatcacaaagcagttgccgagacaccttctttctggtttttatctaaagatattttctttttcatcatatgcctaaatgcgctcccaagtatctctttcctgattctaccaaaagaatgtttccacactgctcactcaaaagaaaggcttaactctgtgagattaatacacacatcacaaagcagtttcctcagaaagcttctttctagttttaatctgaggatatttcatttttcaccttaggcctcaaagtgctacaaaatatctcttctgagattctacaaaaatactgytgccaaactgcccaatcaaaacaaaagttta

SEQ ID NO: 105265 - DNA, 495 bp, Homo sapiens
agataatgcatacctgagggtaggcacctgaaatggctgctttgggggtggctgtcttttatggtcacagctgtagagatgaaatgagccccagtctcctgtagctctcccaggcttattaggaggagaaaattcccgcctaataaattttggtcagaccagttttctgctctcaaaccctgtttatgataagatgatatcaatgacaatgcaagccagaaacttcattagcaattttaaattcactccagtcctgtgtcctgtaatcttgcccyacctccttttaccttgtgatatcttattactttgtgaagcctgagatctctgtgatccacaccctaccgtatactccttccccttttgaaaatcactagtaaaaacttgctggctttgtggcttgtggcccatcacagaacctgcagcaatgtgatgtctaccccagacaccaagctttcaaatttctctcttgcactccgtccctttatttctcagatg

SEQ ID NO: 105266 - DNA, 569 bp, Homo sapiens
tgtgagatgaaagcacacatcagaaagcagtttcccataacgcttctttccrgtttttatctgaaggtatttacttgttcaccataagctattttatgctacctagcatcacttcacagattatacaaaagcagtgtttccaaactgctctgtcaaaagagaagtttagctttttgagatgaatgcatacatcaaaaagcagttcctcaaaaagcttctttctagtttttatccaaagatatttccttttacactataggcatcagtgcactctcaaatatccctttacagattctacaaaaagagtgtttccaaagtgctcaaaaagaaaaaaaaagtttaactctgtaagatgaatgcacacatcacaaagcagtttctcaggtagtttctgtctagttcttctctgaagatatttcctttgccaccataggccacaatgcactctgaaatatcccttcacagaatctacagaaacagtgtttccaaattgttcaatcaaaagaaagacttaaaactgtgagatgaatgcgcacatcacaaggcagtttcttttaacgattctttcc

SEQ ID NO: 105267 - DNA, 569 bp, Homo sapiens
tgtgagatgaaagcacacatcagaaagcagtttcccataacgcttctttccggtttttatctgaaggtatttacttgttcaccataagctattttatgctacctagcatcacttcacagattatacaaaagcagtgtttccaaactgctctgtcaaaagagaagtttagctttttgagatgaatgcatacatcaaaaagcagttcctcaaaaagcttctttctagtttttatccaaagatatttccttttacactataggcatcagtgyactctcaaatatccctttacagattctacaaaaagagtgtttccaaagtgctcaaaaagaaaaaaaaagtttaactctgtaagatgaatgcacacatcacaaagcagtttctcaggtagtttctgtctagttcttctctgaagatatttcctttgccaccataggccacaatgcactctgaaatatcccttcacagaatctacagaaacagtgtttccaaattgttcaatcaaaagaaagacttaaaactgtgagatgaatgcgcacatcacaaggcagtttcttttaacgattctttcc

SEQ ID NO: 105268 - DNA, 569 bp, Homo sapiens
tgtgagatgaaagcacacatcagaaagcagtttcccataacgcttctttccggtttttatctgaaggtatttacttgttcaccataagctattttatgctacctagcatcacttcacagattatacaaaagcagtgtttccaaactgctctgtcaaaagagaagtttagctttttgagatgaatgcatacatcaaaaagcagttcctcaaaaagcttctttctagtttttatccaaagatatttccttttacactataggcatcagtgcactctcaaatatccctttacagattctacaaaaagagtgtttccaaagtgctcaaaaagaaaaaaaaagtttaactctgtragatgaatgcacacatcacaaagcagtttctcaggtagtttctgtctagttcttctctgaagatatttcctttgccaccataggccacaatgcactctgaaatatcccttcacagaatctacagaaacagtgtttccaaattgttcaatcaaaagaaagacttaaaactgtgagatgaatgcgcacatcacaaggcagtttcttttaacgattctttcc

SEQ ID NO: 105269 - DNA, 591 bp, Homo sapiens
atttccttttccaccataggcctcaatatgctcccaaatatccctttgcagattctacaaaaccagtgtttccaaactcttccacataaagaaggagttagctgcatcacatgaacatgcacaacacaaagctgtttctcataacgcttctttccagtttttatctgaagatatttccttgttcactatagtctttttaatggtgcctaatattgcttggcagatttttcaaaaacgttgtttccaaactgcttagtcaaaagaaaggtttatcattgtgagatgaatgcacaagtcacataagtttctcaaaaagcttctttctartttttatctgaagatatttttttcttcaccataggcttcaatgcaatcccaaatatcccgttgcagattctacaaaaaccttgtgtccaaactgctcaaacaaaaacagttttaactctgtgaggtgaaagtacacattagaaagcagtttctcaaaaagcttctttctagtttttatcagaagatatttcctttttaacagtgggcttcaatgcactcccaaatatcccttcgcagataatacaaaaacagtgtttccaaact

SEQ ID NO: 105270 - DNA, 591 bp, Homo sapiens
atttccttttccaccataggcctcaatatgctcccaaatatccctttgcagattctacaaaaccagtgtttccaaactcttccacataaagaaggagttagctgcatcacatgaacatgcacaacacaaagctgtttctcataacgcttctttccagtttttatctgaagatatttccttgttcactatagtctttttaatggtgcctaatattgcttggcagatttttcaaaaacgttgtttccaaactgcttagtcaaaagaaaggtttatcattgtgagatgaatgcacaagtcacataagtttctcaaaaagcttctttctagtttttatctgaagatatttttttcttcaccataggcttcaatgcamtcccaaatatcccgttgcagattctacaaaaaccttgtgtccaaactgctcaaacaaaaacagttttaactctgtgaggtgaaagtacacattagaaagcagtttctcaaaaagcttctttctagtttttatcagaagatatttcctttttaacagtgggcttcaatgcactcccaaatatcccttcgcagataatacaaaaacagtgtttccaaact

SEQ ID NO: 105271 - DNA, 591 bp, Homo sapiens
atttccttttccaccataggcctcaatatgctcccaaatatccctttgcagattctacaaaaccagtgtttccaaactcttccacataaagaaggagttagctgcatcacatgaacatgcacaacacaaagctgtttctcataacgcttctttccagtttttatctgaagatatttccttgttcactatagtctttttaatggtgcctaatattgcttggcagatttttcaaaaacgttgtttccaaactgcttagtcaaaagaaaggtttatcattgtgagatgaatgcacaagtcacataagtttctcaaaaagcttctttctagtttttatctgaagatatttttttcttcaccataggcttcaatgcaatcccaaatatcccgttgcagattctacaaaaaccttgtgtccaaactgctcaaacaaaaacagttttaactctgtgagktgaaagtacacattagaaagcagtttctcaaaaagcttctttctagtttttatcagaagatatttcctttttaacagtgggcttcaatgcactcccaaatatcccttcgcagataatacaaaaacagtgtttccaaact

SEQ ID NO: 105272 - DNA, 572 bp, Homo sapiens
gttccttttttaccagaggcctcaatgtactcccatataacccttcgcagattctacaaaaacagtgtttccaaaatgctacatcaatagaaaattttaattctgtgagatgaatggacacatcataaagctgttaatcagaaagttttctagtttatatctgaggatatttcctttttyaccatagtcctcaatgcattcctaaataaccttttgcagattctataaaaacagtgtttccaaactactcaatcaaaagaaagcgttatctctgtgagacaaatacacacatcacaaagcagttctgcagaaagtgtctttctagttttgacatgaagatatttcctttttcaccatatgcctcaatgcactcccatatatcccttcgcagattctacaaaaacagtgtttccaaactgcctcatcaaaagaatagtgcaactgtgacatgaatctacacatcacaaagcagtttccccaaaagatttgttctggtttttttctgaaagtatttcctttttgaccataggcctcaatgtgttcccaaacatcctttcccaaatcctacaaaa

SEQ ID NO: 105273 - DNA, 572 bp, Homo sapiens
gttccttttttaccagaggcctcaatgtactcccatataacccttcgcagattctacaaaaacagtgtttccaaaatgctacatcaatagaaaattttaattctgtgagatgaatggacacatcataaagctgttaatcagaaagttttctagtttatatctgaggatatttcctttttcaccatagtcctcaatgcattcctaaataaccttttgcagattctataaaaacagtgtttccaaactactcaatcaaaagaaagcgttatctctgtgagacaaatrcacacatcacaaagcagttctgcagaaagtgtctttctagttttgacatgaagatatttcctttttcaccatatgcctcaatgcactcccatatatcccttcgcagattctacaaaaacagtgtttccaaactgcctcatcaaaagaatagtgcaactgtgacatgaatctacacatcacaaagcagtttccccaaaagatttgttctggtttttttctgaaagtatttcctttttgaccataggcctcaatgtgttcccaaacatcctttcccaaatcctacaaaa

SEQ ID NO: 105274 - DNA, 572 bp, Homo sapiens
gttccttttttaccagaggcctcaatgtactcccatataacccttcgcagattctacaaaaacagtgtttccaaaatgctacatcaatagaaaattttaattctgtgagatgaatggacacatcataaagctgttaatcagaaagttttctagtttatatctgaggatatttcctttttcaccatagtcctcaatgcattcctaaataaccttttgcagattctataaaaacagtgtttccaaactactcaatcaaaagaaagcgttatctctgtgagacaaatacacacatcacaaagcagttctgcagaaagtgtctttctagttttgacatgaagatatttcytttttcaccatatgcctcaatgcactcccatatatcccttcgcagattctacaaaaacagtgtttccaaactgcctcatcaaaagaatagtgcaactgtgacatgaatctacacatcacaaagcagtttccccaaaagatttgttctggtttttttctgaaagtatttcctttttgaccataggcctcaatgtgttcccaaacatcctttcccaaatcctacaaaa

SEQ ID NO: 105275 - DNA, 572 bp, Homo sapiens
gttccttttttaccagaggcctcaatgtactcccatataacccttcgcagattctacaaaaacagtgtttccaaaatgctacatcaatagaaaattttaattctgtgagatgaatggacacatcataaagctgttaatcagaaagttttctagtttatatctgaggatatttcctttttcaccatagtcctcaatgcattcctaaataaccttttgcagattctataaaaacagtgtttccaaactactcaatcaaaagaaagcgttatctctgtgagacaaatacacacatcacaaagcagttctgcagaaagtgtctttctagttttgacatgaagatatttcctttttcaccatatgcctcaatgcactcccatatatcccttcgcagattctacaaaaacagtgtttccaaactgcctcatcaaaagaatagtgcaactgtgacatgaatctacacatcacaaagcagtttccccaaaagayttgttctggtttttttctgaaagtatttcctttttgaccataggcctcaatgtgttcccaaacatcctttcccaaatcctacaaaa

SEQ ID NO: 105276 - DNA, 588 bp, Homo sapiens
ataaataaataaataaataaataagtgcacaatcaaaatagaggtttaactctgtgagaaatatccacacatcacaaagtggtttcagagaaagcttctttctagtatttatctaaagatatttgcctaggtctcaatgcattcccaaatatcattttgtagattagacataaacagtgtttccaaactgctcaatcaaaggaaaggtttaattctgtgagatgaatgcattcatcacaaagccatttctcagaaagcttcctttaatttttttcttaasatatttcctatttcacaataggcctcaatgcactaccaaatatcccatcacagattctgccaaccagtgtttccaaactactcaatcaaattaaggtttaactctgtgagatgaatgcacagatcacaaagcagtttctcagaaaagttctttgcagattttctctgaaaatattttgtttttcaccatgggcctcaaagtgaacacatatatccctttgtttatactagaaaaaccatgtttccagactgcacaatcaaaagaaaggtttaactcagggagatgaatgcactggtcaccaagcagtt

SEQ ID NO: 105277 - DNA, 490 bp, Homo sapiens
tggaaacactgttttggaagtatctgcgaagggatatttgggagcgcattgaaggcaatggtgaaaaaggaaacatcttcagatcaaaattaaaaagaagctttctcagaaccactttgtgatgtgtgcgttcttctcacagagttaaatmattctttggattaagcacttttgaaatgctgttttggtagcatctgcaaagggacatttgggagctctttgaagcctatgttgaaaaaggaaatatctgcagataaaaagtagaaagaagctttctgagaaactgctttggaatgagttcattcgtctcacagtgttaaacctttcttttcattgagcagtttggaaacacagttgtacaatctgagaagggatatttgggagcgatttgaagtctatggtgaaaaacggaatatcttcagataaaaactagaaagaagctttctgggtaactgccttgtgatgtgtgcattcatctcacagagttaaa

SEQ ID NO: 105278 - DNA, 490 bp, Homo sapiens
tggaaacactgttttggaagtatctgcgaagggatatttgggagcgcattgaaggcaatggtgaaaaaggaaacatcttcagatcaaaattaaaaagaagctttctcagaaccactttgtgatgtgtgcgttcttctcacagagttaaatcattctttggattaagcacttttgaaatgctgttttggtagcatctgcaaagggacatttgggagctctttgaagcctatgttgaaaaaggaaatatctgcagataaaaagtagaaagaagctttctgagaaactgctttggaatgagttcattcgtctcacagtkttaaacctttcttttcattgagcagtttggaaacacagttgtacaatctgagaagggatatttgggagcgatttgaagtctatggtgaaaaacggaatatcttcagataaaaactagaaagaagctttctgggtaactgccttgtgatgtgtgcattcatctcacagagttaaa

SEQ ID NO: 105279 - DNA, 598 bp, Homo sapiens
cttcttcctcctgagttcccatttctgttaattatgtcaccaagggctaaatcttagggccatctttgatccctttctctccttgtctcctatcatccagttaagtcctgtcacttcctccatcacagtgtgccttggatgtgtcctttgccctcacactgccatggtcctggtgcactgcctctgaccttggccttcctcatctctatcacttgctccctgaccttcctctctccaggctctcctctaccatccatgcagcacattctctagaagaatttccctgcatttccagttacagagtgacagttattttgttcaccttctttcctggctcagaaattagcagtagtttctyattacttccgaaatcagcttcaaacgtagctgccttcagactctctgcctctgggccctgccgcacatttctagcctgttctcctccttaatgtcccacaagattctgctccactcaaactcaaaatccctgaaatgctccttgttctttttcacatctttttttttggtttatggcatttcttcctcctctgactcactttctctgttctccatccccaacgcttcaaaactgcctatt

SEQ ID NO: 105280 - DNA, 598 bp, Homo sapiens
cttcttcctcctgagttcccatttctgttaattatgtcaccaagggctaaatcttagggccatctttgatccctttctctccttgtctcctatcatccagttaagtcctgtcacttcctccatcacagtgtgccttggatgtgtcctttgccctcacactgccatggtcctggtgcactgcctctgaccttggccttcctcatctctatcacttgctccctgaccttcctctctccaggctctcctctaccatccatgcagcacattctctagaagaatttccctgcatttccagttacagagtgacagttattttgttcaccttctttcctggctcagaaattagcagtagtttcttattacttccgaaatcagcttcaaacgtagctgccttcagactctctgcctctgggccctgcygcacatttctagcctgttctcctccttaatgtcccacaagattctgctccactcaaactcaaaatccctgaaatgctccttgttctttttcacatctttttttttggtttatggcatttcttcctcctctgactcactttctctgttctccatccccaacgcttcaaaactgcctatt

SEQ ID NO: 105281 - DNA, 598 bp, Homo sapiens
cttcttcctcctgagttcccatttctgttaattatgtcaccaagggctaaatcttagggccatctttgatccctttctctccttgtctcctatcatccagttaagtcctgtcacttcctccatcacagtgtgccttggatgtgtcctttgccctcacactgccatggtcctggtgcactgcctctgaccttggccttcctcatctctatcacttgctccctgaccttcctctctccaggctctcctctaccatccatgcagcacattctctagaagaatttccctgcatttccagttacagagtgacagttattttgttcaccttctttcctggctcagaaattagcagtagtttcttattacttccgaaatcagcttcaaacgtagctgccttcagactctctgcctctgggccctgccgcacatttctagcctgttctcctccttaatgtcccacaagattctsctccactcaaactcaaaatccctgaaatgctccttgttctttttcacatctttttttttggtttatggcatttcttcctcctctgactcactttctctgttctccatccccaacgcttcaaaactgcctatt

SEQ ID NO: 105282 - DNA, 598 bp, Homo sapiens
cttcttcctcctgagttcccatttctgttaattatgtcaccaagggctaaatcttagggccatctttgatccctttctctccttgtctcctatcatccagttaagtcctgtcacttcctccatcacagtgtgccttggatgtgtcctttgccctcacactgccatggtcctggtgcactgcctctgaccttggccttcctcatctctatcacttgctccctgaccttcctctctccaggctctcctctaccatccatgcagcacattctctagaagaatttccctgcatttccagttacagagtgacagttattttgttcaccttctttcctggctcagaaattagcagtagtttcttattacttccgaaatcagcttcaaacgtagctgccttcagactctctgcctctgggccctgccgcacatttctagcctgttctcctccttaatgtcccacaagattctgytccactcaaactcaaaatccctgaaatgctccttgttctttttcacatctttttttttggtttatggcatttcttcctcctctgactcactttctctgttctccatccccaacgcttcaaaactgcctatt

SEQ ID NO: 105283 - DNA, 593 bp, Homo sapiens
gtcatcctgtgatcaagatctcaccaagaaataaatcaatgatcagtaacgcaaagattatacctcatacattcatattttgttattattagaaacactttcttcgtttacatttgtcttcagtctttccattatatcaaaaatgaaacaaacatcattaaggmattgtctttgtcagcctcatcaagaatgttttacaggaattccacatgtcatctgaaatgtctctgatgccatcctttttatgtaatacatgaaatgacagaatatagactcttttggtgtcaccacaggatagatttccattcacctcagcaaatattacatgaaatagaggtaagtttcttggtctgggaaggcttttctctagctaggcattcatatgatagaatggaggtcctatttcattcaacaagtaactgttgaatgccttcgttgaactggcatggtgaaataaagcatattaccaggtagtaataattgtccacttcataagaatccaatcccatttctaatgcatcttctaaaggtcattagtatacatttgacatccccttttcaccttttctacattcatgtattttcaagattca

SEQ ID NO: 105284 - DNA, 593 bp, Homo sapiens
gtcatcctgtgatcaagatctcaccaagaaataaatcaatgatcagtaacgcaaagattatacctcatacattcatattttgttattattagaaacactttcttcgtttacatttgtcttcagtctttccattatatcaaaaatgaaacaaacatcattaaggcattgtctttgtcagcctcatcaagaatgttttacaggaattccacatgtcatctgaaatgtctctgatgccatcctttttatgtaatacatgaaatgacagaatatagactcttttggtgtcaccacaggatagatttccatwcacctcagcaaatattacatgaaatagaggtaagtttcttggtctgggaaggcttttctctagctaggcattcatatgatagaatggaggtcctatttcattcaacaagtaactgttgaatgccttcgttgaactggcatggtgaaataaagcatattaccaggtagtaataattgtccacttcataagaatccaatcccatttctaatgcatcttctaaaggtcattagtatacatttgacatccccttttcaccttttctacattcatgtattttcaagattca

SEQ ID NO: 105285 - DNA, 575 bp, Homo sapiens
ctattgcactgaagagtttgtagaagtcattaaatgagaagggcaaagaaataagaataataaaagagtatgcctcattgaatataagtaatctaggatataacaacctgctcacaggtcataaataaacgakaacaacatttgtctacacagaatgaaaagagcagttcactgaaccatatagagcgaatctgtatggctttatcaatacctgcaattatctctccctagctggttggaaataagaaatcatcacactacagctggcacccgtttccaatataaatgcctttcagttgcaatggaaactcactgcattactgattaagtatgaaatcccagaagacttgcttaaaacctacctgatggtatcatgtgctcaacccatggaaaatcaatggctcatctcaatttcaagctgcaagagtactgatgtgcccaggcaccatcatgaggtggttttctcactttcttgcaacctttttgaccacatcctgcttctcatagaacatctagtgaataaagacatgaatttcagatcatgtcactttgatgtatttgagtatagagtactt

SEQ ID NO: 105286 - DNA, 625 bp, Homo sapiens
tttcaaaataacagagccaacagatcaaagaggcctgatcatgtatacaagcccaagaaagccactcctcactgagtcagagttatgaatgaacagctttggcaagttccctttgcaatggatgtgacagaacataatgagacatgtccatttcctcaagtcttgtgtgtgtgtgtgtgtgtgtgtgtgtgtgtgtgtgtgtgtacatggagagataatattcagccaaatgcataaccctcacaccttataagataataacacttgagatttctaacttctacttggaagatgtgtttatttatagagaagacacagaaagatattctagagacagggaaattcaggcaacaaacatgtccttccagcttttataatccctccaccagtcagtaccttttcatgtatgcctgagagtctctagcatggtatagaaatgaagagagagagagagaatacagatctggctgatgctgggacargtcaatagtagactctccctcaaaaactgagaggagtttccatgaattccagtatgagaatgacctctggggtcaaaagtgtttcaaaccttctacagctgaactccactcccttcctcatgcagatctcttcaaaacccctg

SEQ ID NO: 105287 - DNA, 466 bp, Homo sapiens
gccagttttcctaacaccatttattaaataggaaatcctttccccattgcttgtttttgtcaggtttgtcaaagatcagatggttgtagatgtgtggtgttatttctgaggcctctgttctgttctattggtctatatatctgttttggtaccatcttcccaggaggcattgcttgcttcagcccaggtcccgaggggtagggcacagctrtaactgggagaggtagactccctgttgaaatgctacctgaattcaaggcttactataaatctttattaatcgagatggtgaagtgttggtgaaacaacagacaaatagatcaatggaacaaaacagaaagcccagaagtacatccacatcaatatattcaacagatcattgatcccatggacatggaaatgataattgaccaaggagcaaaagcaatgcaatagtcatttcaacaaatggtgggacaattgaaca

SEQ ID NO: 105288 - DNA, 613 bp, Homo sapiens
gtctcactgtgtctccaggctggagtgcagtggcgtgatctcggctcactacaacctctgccttccgggttcaagcaattctcctgcctcagcctctggagtagctgggactacaggcgtgtgccaccatgcccagctaatttttgtatttttagtaaagatgggatttcaccatgttggccaggatggtctcgatctcttgacctggtgatccgcccgcctmggcctcccaaagtgctggaattacaggtgtgagccactgaacccggcccagagactgagtttgaccaagaagatttgagctgtgagacttttccttgcttaatgtcagttaataaaatgataaagaaaaataatacctgcaaaagaagaaataataactcgaataatgtaacacagattccagatagttgaaacttgaaggagaatctgaggagaagtatggcaggtacctgtgtattgaccaaagccagggtcataaggggaacactggagttatatgtaaaacattacccaaacctatgtattccagagcctctgtgcatattacattagttatttcccttctgttttgtagaaccagtgccaataaattaagtagttgaaaatccac

SEQ ID NO: 105289 - DNA, 583 bp, Homo sapiens
tgctgtctgtagtagcaggagatgatggggagacagcctttatgtccatcagttgggggctgggtggataaattacaagatgtccctgaaaggggacagcatagctctagctgtgatggggccaggggagatctctagatgccgatactgaacactccccatgatagagtatggaaaatggcaaaacaccagctcaagtcattgaagaaaaagttgccaggggagcagaacagacacagcttccaagtcccatcccacaggctaattggaaasaggaaggagcacctgcactacagggagacgtgcggacaaccccggaaccaagtgatccagtgaagcatcaccagcaaggtgacgcatggacactaagtgcctcctggaggaggactctgcattgcccggggggcgttcctgccagagctgttccacctgactccaaccagggagaagcaatcagacaaatccagaacaactggcccggactcttcatgtcaatgtcataaaagagcaaaacaaaaaaagggctggagaatgttctagattgaacaggacactagagaaacatgacaagattcaataaatg

SEQ ID NO: 105290 - DNA, 578 bp, Homo sapiens
cttggaaacactacatgatcaaggaacggcatggagagttagaaagagctcttggccagagggctaggagtcctgcactcaggttccaagtgtgggtgaccttgggccagtcccacccctcacaggcctcgaccccatcttcagccttctgtgaggtcttctccagcaccattagcctgaagttcaggccactagcaatgacccctgctctgccagcctcttgcttaataaggctgtgggcaaatccagtgagtgcctggcaaatttcgaagtgcagtgtacccggtgaggggtgatttttggcaaagatggtggaatgaaagatggtagaatggtgggaaaaaccttgagctgggaatcccacctctgcctggtagggaaaattaagagacttctctagacctccccacctgttcagttcagatccccawctccctttatgtcaagcatctaccaccaaccagataccagatctttcgtttatatcttagtacaggtctttcttgtttgtttgttttttgttgttttaaagagatgagggtctccctctgtccctcaggctggagtacactggcgaa

SEQ ID NO: 105291 - DNA, 598 bp, Homo sapiens
agcccacatggggactgtaaccctacatttcttctctgcattgttttagtagaggttcttcataagggctccacccctrcagcatgcttctgcctgcacaccctggcttttttatacattatttgaagtaaaggtggagactcccaagtctcaactcttgcatttttgtacactcacaggcctaacaccatatgaaagctaccaaggcttatggcttgcaccctctgaagcagtgactggagttgtaactgggccaatttgtgctacacctggagctggagcagtggccaggatgcagggagccatgttctaaggctacccaaggcagcagttcctgggcctgatcccagaaactattctcttcttttaggcctcagggtttgtgatggggggctgccttttagatttctaaaatgccttcaattcctctttctcattgtcttggctatcaacacttgcttttttttttaagttatacaaatatctctaacaagtgattgctccacagcctgctcgagttcctctcttgtaaaagctttttatttttctgccacatgactaggctgcaaagtttttaagcttttacgctatgcttccc

SEQ ID NO: 105292 - DNA, 598 bp, Homo sapiens
agcccacatggggactgtaaccctacatttcttctctgcattgttttagtagaggttcttcataagggctccacccctgcagcatgcttctgcctgcacaccctggcttttttatacattatttgaagtaaaggtggagactcccaagtctcaactcttgcatttttgtacactcacaggcctaacaccatatgaaagctaccaaggcttatggcttgcaccctctgaagcagtgactggagttgtaactgggccaatttgtgctacacctggagctggagcagtggccaggatgcagggagccatgttctaaggctacccaaggcagcagttcctgggcctgatcccagaaactattctcttcttttaggcctcagggtttgtgatggggggctgccttttagatttctaaaatgccttcaattcctctttcycattgtcttggctatcaacacttgcttttttttttaagttatacaaatatctctaacaagtgattgctccacagcctgctcgagttcctctcttgtaaaagctttttatttttctgccacatgactaggctgcaaagtttttaagcttttacgctatgcttccc

SEQ ID NO: 105293 - DNA, 642 bp, Homo sapiens
ttaaacttttatatatccctagggcatgacaaaaattcagccaaccactttgctaagacaacatgaatgacctttgcttcggtcctaattttctaattttcatctgagacctcctcagctcagccttcactgtccaggtcactatcagcattttggtcacagccattcaaagttaagaaaatctcaactttccctcatttttctgtcttcttctgagtcctacaaactcttccaacctctgcctgtttacccaactacaaagctgattccacattttcaggtattcttataacaattttccactcctttgtgccaattttctgtattaagcttttttcccatcactataaatacctgagactgggcaatttattttttaaaaaggaggtttaagtggctcatgattctacaggctgtagagaagacacagcactggcatgcacttctgggaaggcccctggaagtttasagtcatggcaaaagttgaagcagaatcttgcacatcacagggcaaaaagcaggagcaaaaaacagaggggcgagttgttacacacttttaaataaccaggtcttatgggaactcactcactatcatgaagatagtaccaagtgggatggtgctaagccatttatgagtaatcc

SEQ ID NO: 105294 - DNA, 528 bp, Homo sapiens
cataaatctttacaaaccttcaatccatattctgatcctttctagcaagctagagtttttatttttaaatattacctcttaattaaaaaactcwtaaatacctattgatgtgatctgtaatatttatatgtattagattttttaacagacaaaataaaaccttatcaataaatcaccttttcattgttaattctttagtggtattagtgctgctctaataattcaaccttggatcagagaaaaagccaaataaaaagttataaaattaattagtttatttatttatgttcatgctcatggaaaatcagtataagatagagagaagagcttggactctggattgcaaatacatggttttgaaacccaggaacaccacttgggcaattaatggaatgatcattaccttaatttatcctttgtacaatgaggataataaggtcacctaactcacagggatgcttatagaatcaaatgacttaaagtgcttagaagagtgctttgcatgcagtaaattcccactacatgctg

SEQ ID NO: 105295 - DNA, 528 bp, Homo sapiens
cataaatctttacaaaccttcaatccatattctgatcctttctagcaagctagagtttttatttttaaatattacctcttaattaaaaaactcataaatacctattgatgtgatctgtaatatttatatgtattagattttttaacagacaaaataaaaycttatcaataaatcaccttttcattgttaattctttagtggtattagtgctgctctaataattcaaccttggatcagagaaaaagccaaataaaaagttataaaattaattagtttatttatttatgttcatgctcatggaaaatcagtataagatagagagaagagcttggactctggattgcaaatacatggttttgaaacccaggaacaccacttgggcaattaatggaatgatcattaccttaatttatcctttgtacaatgaggataataaggtcacctaactcacagggatgcttatagaatcaaatgacttaaagtgcttagaagagtgctttgcatgcagtaaattcccactacatgctg

SEQ ID NO: 105296 - DNA, 447 bp, Homo sapiens
aaaaaaaaaaaaaagtctcccagaaacaaaagttttaaagatttagattgccttctgttatgattattgcatttgaaatgggctctgtgtagacttaaaaaatcagtttggcaatgtaagtaaattaaagaaattctcttgggctaaactcttacctaaagycaagttttatctattgtttagtaggtatatattggtgtttgtttaactgaattaaacaaagcacattttgcttaattcaatacacacatggtacctatggccagtacataattaaatatttacaaaatttatcactttgattgggagggaagcaactagttttttagatagaaaaaagaggaaaaaaccagtgggctatgaaaggctaggaaaatataagtctgagaaagggcttcaagcacaaatgtgatttaaccataaaataatcaagtttcccaaagaaca

SEQ ID NO: 105297 - DNA, 565 bp, Homo sapiens
cagcattaagtccagtgtttgctgtaaattctttgtagataatgtttatcatgttaaagttgatcttttatcattctaattggctaagggcttaaaatgaatgtattgaactttatcaaatgctttctctgtctcttcatgtggtcatatgatattttttttctctaaaatgttgagttacagtattaaaacatctattatagaacatacttgcatttctgtaataaaatccttctgtcataataattatatgtatgtatrtacacatgtacacatatgatcttcatataataaaattgttggctgaattaatttactgttattttttagaacttttgcatctatgtttattagtgcaatttgcttgtaaattttttttgtgagggttaggtttctagatcacgctgacttcatagaataacttggagaggttttatttccctgtctgtgtgtgtgcgttttcctttttttttcttttttttgagagaaggggaagtctttacagtatttctttctgaaattttaaagaattttatcacaaaatgcattttggccttgagttttc

SEQ ID NO: 105298 - DNA, 387 bp, Homo sapiens
atgaattcagttgctaagtcaggcatatgttttgagttatcagcatggccagggacctttcccgggtgcctgccttgagccacttgcctgggtcaggttagaagaatttctacaataatagctacaatttccttctgtacaggcattgttcattagatcaagttattaaccagttactgctatgagaaggcagagaggaataagccagacagacttartctgttagcctggccatagccttgctgccagctcacagatccctgtccaagtttgggtcctagtcctataccatgcctcagaatggtgtaaatacttccctcttagcatctttcattccctctagtgatctgcttctccttccttcttttttactctctcttgttttct

SEQ ID NO: 105299 - DNA, 547 bp, Homo sapiens
cagaaagaaggcttgggagagtaacctccatgcaggagggtatatgttccaagccacataatatgatttagcctttgataagataagtggaaaaagaggaaagctaaggtaggcagtagatgagacagaaaaataaggkcataaagggatcttcaatttaaagaaaagggacaagataaacaatttagagtgacaatgaagaaaatgtagtctttaatagatggcgatgaacttggtggatcatacaatatatgttgattatcaaaagataattttttttctcacaggcaacatggatgtagaaagtccaaggaaatctataagataacttgttaaaactaataattgaaccagaaaggttgtgagttaccaggccattttttttctcatgcttttaaagccaccctagtagcatgttacacaatctcctagggtctttcagaaaattaattcttgtattctagaagatactcacaaattgataacctctaatttatccaacctcctattcatgaccccttgatcaagtacacttgaaaatatatcc

SEQ ID NO: 105300 - DNA, 542 bp, Homo sapiens
ctatcacagaatctcttagactaaaacaatacatcaccatggcaactcaactttcacaaagtttaactgcagccagaaaaaaaatatttttaagtcaaccccattatatagcatctaactaaacaaaagtctgccttcaaagtaaagtacttttgattaggagccatgatttctaaaatgatttgagttatagcaaaaggttcacatttctctatrcattagaaatgaggtatttaaaaatgatattggcctgcttctcactttttagtgtattttgaatgccatgagattgagattggcctagtatctttatttttttttttgtagttcagtgcttttagaacatttttacatttctttcagtaaaaatctgaatttagtttttttctaaataatatgtttaaaattaaaacagttcagtttgattaaaatatgaaaagtaggaactattttgtgtgtttatgaatgtaaaacaggcactgaaatttgaagtgatgtattatttaacaaatggagttcacaatgctgaggctgcttatttg

SEQ ID NO: 105301 - DNA, 630 bp, Homo sapiens
tattccatcacttaagtatgcactgcagatagatgtatacacatatacctcaggagatgtgtacacaatgtttatatcatctctgttcataatatcaaaaaatcagaaatcatccaaatgccaacttgaaagagaatgaataaatatatatatatatatatatgctatagactgaatgtttgttttcttaaaaagtcrtattttgaagtcctaaccccaatgtgatggtattaggtggtagaaattttggaggtgattaatttatgatagtggagcccacatgaatggaactgatggccttagaaatgagggtcagtgcttcctcacctcttttgtcatgggagtgtacaatgaaaagtcagcagtttgcaacctcaaacgaatccctcaacagaacccaattatgcagacaccctgatcttggacttctggcctccagaactgtgagaaataaatttctgttgtttataaccacccagtttatggtattttgtgatggtagcccaagtagactaagtatattatctcaatggattttatacagcagcaaagtgaataaactacaaccacacaaagcaacatagataattttcaaaacaataatgatgatgacagttaaagataggccca

SEQ ID NO: 105302 - DNA, 630 bp, Homo sapiens
tattccatcacttaagtatgcactgcagatagatgtatacacatatacctcaggagatgtgtacacaatgtttatatcatctctgttcataatatcaaaaaatcagaaatcatccaaatgccaacttgaaagagaatgaataaatatatatatatatatatatgctatagactgaatgtttgttttcttaaaaagtcatattttgaagtcctaaccccaatgtgatggtattaggtggtagaaattttggaggtgattaatttatgatagtggagcccacatgaatggaactgatggccttagaaatgagggtcagtgcttcctcacctcttttgtcatgggagtgtacaatgaaaagtcagcagtttgmaacctcaaacgaatccctcaacagaacccaattatgcagacaccctgatcttggacttctggcctccagaactgtgagaaataaatttctgttgtttataaccacccagtttatggtattttgtgatggtagcccaagtagactaagtatattatctcaatggattttatacagcagcaaagtgaataaactacaaccacacaaagcaacatagataattttcaaaacaataatgatgatgacagttaaagataggccca

SEQ ID NO: 105303 - DNA, 630 bp, Homo sapiens
tattccatcacttaagtatgcactgcagatagatgtatacacatatacctcaggagatgtgtacacaatgtttatatcatctctgttcataatatcaaaaaatcagaaatcatccaaatgccaacttgaaagagaatgaataaatatatatatatatatatatgctatagactgaatgtttgttttcttaaaaagtcatattttgaagtcctaaccccaatgtgatggtattaggtggtagaaattttggaggtgattaatttatgatagtggagcccacatgaatggaactgatggccttagaaatgagggtcagtgcttcctcacctcttttgtcatgggagtgtacaatgaaaagtcagcagtttgcaacctcaaasgaatccctcaacagaacccaattatgcagacaccctgatcttggacttctggcctccagaactgtgagaaataaatttctgttgtttataaccacccagtttatggtattttgtgatggtagcccaagtagactaagtatattatctcaatggattttatacagcagcaaagtgaataaactacaaccacacaaagcaacatagataattttcaaaacaataatgatgatgacagttaaagataggccca

SEQ ID NO: 105304 - DNA, 598 bp, Homo sapiens
ttatgtgggactaataattaggatgggaagtaacctaattcttgcctcaatttcctcatctgtcaaatgggcctaataatgttaatagtactagtttcataaattataaaaagattaagttagttaatagraataaaaacttaaaataatgtccaggacatagtaattattcaacaaatagatacaattaatttcaatatgacaacttgtccaaaacgtttgaatttttatatttctaggaaaagattgcacaatcccaatgtgattccttgagattctttgtatgtgtcacaatcattcatttacatttgttacttcatttagtataccatacatccattataattcttattccaatttaattctcctctttctctacttcagagaaccaaaatttgaagatatgcccatgagagtttattattatacatatggcaaaaattggttatttctgtgatatacaatgttttaagtaattgaaattatgactgataacattatatcaaggcatatcaggtatctaggaatttattcaatttccgggacacttcctttaatgacatgtatacatatgaatataacataaggagcatttaat

SEQ ID NO: 105305 - DNA, 449 bp, Homo sapiens
tctaaatggccaaaggcagaacgatttgttcaacaacataaataatgttgcattagaacccgaaatataaatggaatatctattaattgccactgataaaaataaatatgggaataaataaataaatgtggcrgagaaataagcctcccatgaataggaatttcaaataatttatgtaaatagccctcaacgaggtagcagacatacctccccacttcttcactgtggattgtacatagagactttcttccaaagagtacatacggaaagaaaaggggatatggaataactttacattgtacaaacactacatcagacaaacgctgatcatcagcaaactcaagtcacgtgtatgtatatacccatgataggatgttatgaaaatggcagtttgcctctgtggttttcctccccaaaacacataatctcagtcagattatgtgaaaaac

SEQ ID NO: 105306 - DNA, 462 bp, Homo sapiens
aatggttgaactaatccacactccccccaacagtgtaaaagcattcctatttctatacatactttccaggatctgttgtttcctgactttttaatttatagcactaaatgcccacggaagacagcaggagagatataaaatcgacaccccaacattacaattaaaagaactagagaagcaagatcaaacaaattcaaaagttaacagaagacaagaaataacyaagatcagagcagaactaaaggagatggagacacaaaaagcccttccaaaaatcagtgaatccaggagctgtttttttggaaagattaacaaaatagatagactgctagccagactaataaagaagaaaagagagaggaatcaaataggtacaataaaaaacgataacggggagatcaccactaatcccagagaaatacaaactaccatcagagaatactataaacacctctatgcaaa

SEQ ID NO: 105307 - DNA, 571 bp, Homo sapiens
actaccatcctctatagttccaatgttgccatctgcacttgcatttatagtagtcccttctcccatatctaaaatgataagaataaaaaccatgcaaatatatctgacttaaccgaagtgtatttaaaaagcacagagtatttaaaatgaaacagtggcaggaaagcaatgtgaagtaaaatatgtattggcmccatttaaaggttagcatacttactactaaataagtatgcatctggcatacttccaaatacaatccttaagttgctctggcaatgaaacacacttagctgatgaaaggctaaccaggatgtgccaaaacagaagcttacttttagtctatattagcatttactgaactgggttttgatgaatgctaatgacttgagatgtgaagacaaattcctcgaaaaaatatctcattgtcaaattagttcaggaaatgctgggaaataggtttctttattgtagcctttaagttgctaatatgtacaaaactctccaaggatatacagtatgttgtgtttccaaaatttattgtaccataagcccccttcccgtttttagaatt

SEQ ID NO: 105308 - DNA, 453 bp, Homo sapiens
ctgtgaccctccatttgatccctatacttccacctgctcacctgccacctggggtggcccagctcctggatattccaccagaacgcccagctggggttgctgtccacactcctcaggcagagacactgttgtcatggacatgcaaaacccatytggaattgactgccttgggcattccctctgacagcaaggactgagcagatccgtttggactggtctggcaactttagggctggaagcccaggctggaacaccacactggggcccctgaacctcttatgaatgcacctcctgcctggggttccctaaaaactgtaaactctccgtctccagggggcaccacgtgtgcctctgggattgtacttttctgtttttttttttttttttttttttttggagacacccaggctagagtccagtggtatgatctcagctcactgcagcttcgaattc

SEQ ID NO: 105309 - DNA, 452 bp, Homo sapiens
ctgtgaccctccatttgatccctatacttccacctgctcacctgccacctggggtggcccagctcctggatattccaccagaacgcccagctggggttgctgtccacactcctcaggcagagacactgttgtcatggacatgcaaaacccatctggaattgactgccttgggcattccctctgacagcaaggactgagcagatccgtttggactggtytggcaactttagggctggaagcccaggctggaacaccacactggggcccctgaacctcttatgaatgcacctcctgcctggggttccctaaaaactgtaaactctccgtctccagggggcaccacgtgtgcctctgggattgtacttttctgtttttttttttttttttttttttttggagacacccaggctagagtccagtggtatgatctcagctcactgcagcttcgaatt

SEQ ID NO: 105310 - DNA, 527 bp, Homo sapiens
aatgtatttattcttgtcttggacctcacatagcattcctcttagattctgcgatgaaggattttactgggctctattatttgttcaagtgtttttatagttagatagtaaggacatgaaggggttagagagattaataatgcaaggaatgcatgctgctaacagaatagcggcaattttttaatatttcaaagttcattaataaaagactacatcataattttaaaagctgtgayggtgcccatcatacaaggacaatgtgagcattagttggattttgtacatgtcttccacacagttcacaatgccactgttaacaactgtgccaacaatttacccttctcaaggttacttgattttccatgtagaagtgtctctattttttctcagaaagcaaaaatagagaggcaaaattataggctatttgtagaaagtaaacttggaataagtatttccttctaaatgtgtgttttcaatatttttatgacatcagtatttttcaaatgaaatctatacacaggaatatc

SEQ ID NO: 105311 - DNA, 537 bp, Homo sapiens
ctgactattctccaattctgattgttcttcccatacccctagccatacacacctataatcttatagaatttcacttacccatggactttgcttccttttaacttcagcttgcccttagctcttgtggtcctgactctgtcatgatttctctccaggcatcatctaccttcagtcccccactgttaactgcctcaatctyccaatatctcaatgttaaaattcttcaaagagattttattttaggctgtgtctcacctgtctggatacccatggactgtttgcgtttggctctggcacttgccatcttttccaaaacctgaagttgagtggggagagaatctgtgggatcaaacctctctactcatagcttcctcttcagtaactacaatggataaggtgtctttccctgcaaggaaagggacttgcaagggactgagtacagcagataccaccactggtttatcagcatgtaaactttcctacaccaactgttctaatcagaatggaagtcccacgctctgcctcgggactggaagg

SEQ ID NO: 105312 - DNA, 577 bp, Homo sapiens
aattaagtgctaagaatgagaaaataaacctcttaagacagacttggcagagaggaagtgggccagcagaaggcagtgtgcaayccagtgtccctgcctaaaggttggtgatccctacccaagggtcgtgtcagctgccatttatttcctcaaattgcacataattttcctcgcagtaaagaaactttttcctgtactgatgactattaaaaggcatgaaaagtagaaaaatttctctattctattaaaagtagaaaaacgaaagatagcagagagtattgcctgctgcgctcatcagacatcatggtctgatccctgtaggcgtttgagtttacaaaccctgcagaaactgccacacaactgatttagggagcagatggagagtcagggaggaatatggtatttaaacataagtccagtttaacagaggccagaaagagtattctgacaaaaaggaatatcatgtgcaatgaccccatggcagaaaagagcatcagcatacaaaggctgcaaagccaaagaggctggaatggaaagatcattgaggagcctatagtaggttgaccctaaagaatca

SEQ ID NO: 105313 - DNA, 596 bp, Homo sapiens
tggtacgtaagtgttgtcattcgcaagatgtctagtaagatgaagaaatattataggtttccatagcttgttatttctaggaaactgctgatcactgtcttagaattcatagacttctcctgatgacttggaactttgttggaagtttcagaattgataccctaaactatttacctgygatatttcctaaaggtcagtttctgagaatgtctgaacaatacttgaattttacagttccatgtattaagtaaattatttttgttaaatgatttcatttttgaacacttattggcacatgacacaatacaatggctgatggccacttttcccttttgctttaacaaaactcttcttaagataggacaaggagctgcttctttaggcttaggaatttccctgcacgaacaggatgtatgtcaaggctaaaaattgggttactgtgcaaataggggaaaagtgatgtgcacattacttattatcctatttttagattcactgcctgccacactgctgctagagttatatctgaaacacagatgggattgtgttattctgctgcttaagtcttcaaatggcactgcctagaaaatgtccaa

SEQ ID NO: 105314 - DNA, 722 bp, Homo sapiens
cctttgtggagcacacagtctaatggagagtaagacattaattaatatcccaaatataaattaaaactatgataagaagaggattatggtgatataaaatcatttaggatttttaaaggattttctaaaagatctgaagaatagcagtaaactaggtgatgggggtaggaagaatattctgagcaaaaagaatatcatgtgcaaaggccctgtggcagaaaagagcttcaatgtgcaagggctgcagacccaaagaggctggaatggaaagatcattgaggaacataggccctgaaaaatcacaaaacagcctttcttcccaaaccttaatctactccagttaatcaaccctctttgtcatctggaagaagataatgtgagatttcaagaaaattcaatatgaaattaatcatattttcaatatcctattgatactgaaaactggcccctacaaactacataattcatatttcgtaaataaaattcataaatgatcttccagcactacgtccagcattcataaatkaaattttttcattttattattggttttaatttataaaggaaaaaggtttatttgactcacaggtccacatggctggggaggcctcacaatcactgcagaaggcaaatgagaagcaaagtcatgtcttacatggcagcaggcaagagctcattttattcttttgaggtctttatgtactgcttctgactggctgttc

SEQ ID NO: 105315 - DNA, 482 bp, Homo sapiens
gttccatgtctgcatctgcacaagatactagacacaagggagatcaagacagcggtagaagcagtaaattgaagcaagatgtgaccaggaaaactgtttgcccaatttccaagaatccctggggatatggtgaggaataaaaagttttccaatgtaaaggaggtcctggggtgaattacatgtaaaattcccagaacagaatgactcccaccagttataggacttggagtcatttaagcaattgatatttatgtgatgcagacaaagaaaacactgggaaaaatagacaccaaagtgataactttgttttctttgagtggtgggattgtggatgatttttttttttgcttacctacattatctaatttaggaaataaaatgcattccttcaaaataaaartatttttaaatctcaccccctcccccaatgatgccacattccagcagaaatgatattcaagctgagatgtgaagaataaaaa

SEQ ID NO: 105316 - DNA, 605 bp, Homo sapiens
cccccaaagtgttgggattacgggcacgagccactgcacccrgccaccctgccccttttaaaaatctcctttctattctctctctgctggcccaccttacccagagaagttttctttagttccatctcctgttctatttcattttttcttagatcccagaggaattaagaagatggggtggctgggaagggaaatggggagaatctcagagaatggaaggatcagagagctggaagccaaatctagactctaagctcctggggcacagaacatccccaccagacttagcacagtgccttgcacaaaacaggtgtacaataaatatccatttgtatggatgattacttgtgttaattagcaatgtgctcatacaaataatgaaaagtcatacagtaattttaaacaatgtcctatatacaactatttcaaggactcatgcaagtgacaacatccattaacactgtagctaattacctttgtgcctctcctctcctcccagtagcttcaagtgctcaactcttaaaaatcctgaaagtcaaagggcaagcagattccaggctccccttgaactttccctgaggcccagacaacattaaggccatggg

SEQ ID NO: 105317 - DNA, 605 bp, Homo sapiens
cccccaaagtgttgggattacgggcacgagccactgcacccggccaccctgccccttttaaaaatctcctttctattctctctctgctggcccaccttacccagagaagttttctttagttccatctcctgttctatttcattttttcttagatcccagaggaattaagaagatggggtggctgggaagggaaatggggagaatctcagagaatggaaggatcagagagctggaagccaaatcyagactctaagctcctggggcacagaacatccccaccagacttagcacagtgccttgcacaaaacaggtgtacaataaatatccatttgtatggatgattacttgtgttaattagcaatgtgctcatacaaataatgaaaagtcatacagtaattttaaacaatgtcctatatacaactatttcaaggactcatgcaagtgacaacatccattaacactgtagctaattacctttgtgcctctcctctcctcccagtagcttcaagtgctcaactcttaaaaatcctgaaagtcaaagggcaagcagattccaggctccccttgaactttccctgaggcccagacaacattaaggccatggg

SEQ ID NO: 105318 - DNA, 514 bp, Homo sapiens
caatggaaacctccattgagtgatttgcccaatgtctggagctaataagtagtggagtgggtggacacttatgtgtagatttttaattytcaagttctgtatttaacaattaaataacaaaagcaatgatgttagggtttggtattatcattttccctttctagaatattaagggttaaacttttccctttttccggatgtaatttagcaaatgaaaacaggtgttttctttccaccccccccctcacaattcctttcccaaggtacagctgactgcaccattaaggatggaggtaaggctaagcttggtggctcacctataaccctagcactttgggagaccaaggtgggccgatcacttgtggtcaggagtttcagaccagcctggccaacatagtgaaacctcatctctactaaaaatataaaactgccccagcctgggcaacagaacaagactctgtctcaaaaaaaaaaaaaaagtgcctagcagcctagccatggtgcccaaagttca

SEQ ID NO: 105319 - DNA, 623 bp, Homo sapiens
ttagtgtagtgctttttgcaccccatcctcctgtttcttttccttgtaaaatccaccatttgttgagcccctccgaagtgtctcttttcctacattatctcatggtgtactttaacagcaatttcatatcagttttgtaactgaacaaacaggcttagaaaagttaagggactggctcaagttaaaaaaatatgagccctagtccacctgcctttgaaagctttttaccctcatacttccacttccattagccatcttgtcagaaggaaatgaagagactaatgagagacaaacctccatcatcttttcctttctgccaaagagttgggagaaagaaaagcctctgtataatggccactttttgttttctgatgcttgatagcctgttgtcatctaaggcagtgcagacccamtatttctaaagatggtatgtgtttactagattttaagttattgattcaacatttaaatagcaagctgtaagtgtttgtcatctggaggaaacctatctcagtgcaggccagcagcaaggctttgtttggcagctgtatatctcaagcattttcgttgccaacattctcagtggctacaaaagctggagagtgctcataagcatgtagcag

SEQ ID NO: 105320 - DNA, 542 bp, Homo sapiens
gacttaaacctaagacctgaaagtataaaaattctagaagataactttggaaaaacccttctagacattggcttaggcaaggacttcatgagcaagaacccgaaagcaaatgcaataaaaacaaagataaatagctgggacctaattaaactaaagagcttctgcacagcaaaaggaacagtcagcagagtaaacagacaacatacagagtgggagaaaatcttcacaatctatacatctgacaaaggactaatatccagaatatacaacgaactcaaacaaatcaataagaaataaaacaaacaatcccatcaaaaagtgggctaaggacatgaataaacagttctcaaaagaagatayacaaatagccaacaaacatgaaaaaatgctcaacattactaatgataagggaaatgcaaatcaaaagcacgatgtgacaccaccttactcctgtaagaatggctataaagaaaaaattaaaaaacagtagatgttgccatggatgtggtgaacagggaacacttctccactgctggtgggag

SEQ ID NO: 105321 - DNA, 542 bp, Homo sapiens
gacttaaacctaagacctgaaagtataaaaattctagaagataactttggaaaaacccttctagacattggcttaggcaaggacttcatgagcaagaacccgaaagcaaatgcaataaaaacaaagataaatagctgggacctaattaaactaaagagcttctgcacagcaaaaggaacagtcagcagagtaaacagacaacatacagagtgggagaaaatcttcacaatctatacatctgacaaaggactaatatccagaatatacaacgaactcaaacaaatcaataagaaataaaacaaacaatcccatcaaaaagtgggctaaggacatgaataaacagttctcaaaagaagatacacaaatagccaacaaacatgaaaaaatgctcaacattactaatgataagggaaatgcaaatcaaaagcacgatgtgacaccaccttactcctgtaagaatggctataawgaaaaaattaaaaaacagtagatgttgccatggatgtggtgaacagggaacacttctccactgctggtgggag

SEQ ID NO: 105322 - DNA, 545 bp, Homo sapiens
gaatgaagttacaataaaagttaacatgatcttaggctatgttcataartatatagttgaaaacagggatgattctagccttagtttcaagttatgccactttgatttaacatggattactattattatgtgtgagtataacaatttaaaagtgatattatgtgaagaagaacaaggaatttaaaataatttcatatgactatactggccagaaagtcatgttttagcattaactacatatacatttaagccatttagcttctgtgtgtatgagtctaggtttcaaatatatatatatatatgtgtgtgtatatatatatatatatagtatgatatatatatgattttatttttatttttgacttttgaatgcaatgtattaaagcattctcattataaaaattctggtaatatttatattaagtgagcaaaccacctttttaccttcacaatataacttctatccttatgagtataatttacataaatatttatggaattcttggttttatattttgccttttatataaaccactttaaaaaac

SEQ ID NO: 105323 - DNA, 659 bp, Homo sapiens
gtcctaggggctctccctgcttaccatgctcacctctactctcaagcctgttgctgtattaccatctgcttatgcctctgctagatcttctaggccatcagctgctgagggcctggtctaggctttcatttctctttgaaaatccagtctgtggaagccatccttccttcaactccaactcttgcacgtcagtgctgtcccaactcatccctattcatcaaccccttccaccagtttctacaaataaatgtatccactccaccagttgtgtgactttacaattttattgcagttttgcaggggcatggggagaggcctcagctcggactacagtgtccagctctaacctccctggcgatcccattttcctcccatttgccttctttcctttcctcagcagattcctgttgtgattgcaygcaaagcagctttatcaaattctccaccaccttgggaacagaagatacccaatttccctgggaccctcctgccataagcagaataattaaagcataacccaatatagtgagtctgtctctggcaaaataatttgcctcctgctaagagaataaaatttttctttgacacattatacctgtgttctcagtggccagtataggacccgacctgagatacatggttattgaatgtgtgaatac

SEQ ID NO: 105324 - DNA, 659 bp, Homo sapiens
gtcctaggggctctccctgcttaccatgctcacctctactctcaagcctgttgctgtattaccatctgcttatgcctctgctagatcttctaggccatcagctgctgagggcctggtctaggctttcatttctctttgaaaatccagtctgtggaagccatccttccttcaactccaactcttgcacgtcagtgctgtcccaactcatccctattcatcaaccccttccaccagtttctacaaataaatgtatccactccaccagttgtgtgactttacaattttattgcagttttgcaggggcatggggagaggcctcagctcggactacagtgtccagctctaacctccctggcgatcccattttcctcccatttgccttctttcctttcctcagcagattcctgttgtgattgcatrcaaagcagctttatcaaattctccaccaccttgggaacagaagatacccaatttccctgggaccctcctgccataagcagaataattaaagcataacccaatatagtgagtctgtctctggcaaaataatttgcctcctgctaagagaataaaatttttctttgacacattatacctgtgttctcagtggccagtataggacccgacctgagatacatggttattgaatgtgtgaatac

SEQ ID NO: 105325 - DNA, 398 bp, Homo sapiens
gagcagcttcgaaacacagctccagcttaaagaaagaatttatgatctcaaatgtaacagctgccttagggtttaatgatagcktcatgctgtcccaagacaaagggtgggcaactacctcacatttgcattgctacagggtctattttttatttaacaggtttttatgtaatacctaccttggggaagcccagtgttaagcctggttcattgtgataatttatcctaaagcagaaaaagaaaaaaaggaaagaaaaacaacctttgtcctagaagtaaatgcaattctttacttctataggctcaaaactttaaattttacttaacattctctgttctgtttacacttatctggactcagatttgtatcaaatttttaaaaatcgtagggtccagtg

SEQ ID NO: 105326 - DNA, 555 bp, Homo sapiens
taaatgggccagttgcggtggctcacacctgtaatctcagcactttaggaggctcargtgggttgatcacctgaggttgggagttcgagaccagcctgagcaacatggagaaaccccatctttactaaaaataaaaaattagccggcttggtagctcatgcctataatcccagctacttgggaggctgaggcaggagaatccgttgaacccagcaggcagaggttgcagtgagccaagattgcaccatcacactctagcctaggcaacaagagtgaaactccctctcagaaaaaaaaaaaggggtgtaaatgtcatttaattgcctattcttgattggtaggtcagggataaggcagggataaaggagaggctggaattccatctctgaagaaccaatgactaactgaagttcacagttgatagatgtctaatgagctagtggaaataaagctggtttaagggatgccagtgaggtctggtggagttcagggtaattcttcagagatcagaagaatcaccctcactgctaaattgaactgaggtcagaaacaaca

SEQ ID NO: 105327 - DNA, 555 bp, Homo sapiens
taaatgggccagttgcggtggctcacacctgtaatctcagcactttaggaggctcaagtgggttgatcacctgaggttgggagttygagaccagcctgagcaacatggagaaaccccatctttactaaaaataaaaaattagccggcttggtagctcatgcctataatcccagctacttgggaggctgaggcaggagaatccgttgaacccagcaggcagaggttgcagtgagccaagattgcaccatcacactctagcctaggcaacaagagtgaaactccctctcagaaaaaaaaaaaggggtgtaaatgtcatttaattgcctattcttgattggtaggtcagggataaggcagggataaaggagaggctggaattccatctctgaagaaccaatgactaactgaagttcacagttgatagatgtctaatgagctagtggaaataaagctggtttaagggatgccagtgaggtctggtggagttcagggtaattcttcagagatcagaagaatcaccctcactgctaaattgaactgaggtcagaaacaaca

SEQ ID NO: 105328 - DNA, 561 bp, Homo sapiens
cacaacctttaaggtttttggtccctttcacatccgctcaatatcctcattatctgccaattatttaaacatggtttctatgtcttccaccaagttttatttccaattatatggcctgttctggcaatcctagtacttagaaaaattgaaccattccagtctcatttagtcttttaatagtgtgaatcattatgtgtcaaggctctttgataaatttaggaatggttctcctgttctttccttttccatcattaactggtaatactagcatctaaatagttgttatttcgaataagttgatattgggttacrttgtgatatttatacaaaatcaagctttgttattcttctacaccaagtaatgagtttaaattaattttaaagttataactgctgaatctatatgaaacgtgaagatgtgatttcatactatttaggttttttaagctaacatgatcataaagtatttaagttccatatgaaaagaaaaggtgaaaaatttctggtgttattttaaaaaatcaaaatgcagagcacaatgaaagtcactaaattttgaaa

SEQ ID NO: 105329 - DNA, 561 bp, Homo sapiens
cacaacctttaaggtttttggtccctttcacatccgctcaatatcctcattatctgccaattatttaaacatggtttctatgtcttccaccaagttttatttccaattatatggcctgttctggcaatcctagtacttagaaaaattgaaccattccagtctcatttagtcttttaatagtgtgaatcattatgtgtcaaggctctttgataaatttaggaatggttctcctgttctttccttttccatcattaactggtaatactagcatctaaatagttgttatttcgaataagttgatattgggttacgttgtgatatttatacaaaatcaagctttgttattctyctacaccaagtaatgagtttaaattaattttaaagttataactgctgaatctatatgaaacgtgaagatgtgatttcatactatttaggttttttaagctaacatgatcataaagtatttaagttccatatgaaaagaaaaggtgaaaaatttctggtgttattttaaaaaatcaaaatgcagagcacaatgaaagtcactaaattttgaaa

SEQ ID NO: 105330 - DNA, 633 bp, Homo sapiens
gacctttcctttgtgcatatacagacacagtgagagcartctctagggtctctttctcttttatcaagaacatctgtctattatactaaggctctacacttatgacctcagtttcccttaattatctccttaaatgtcctattttcaaatgcattcacaaaggaggataagacttcaacatataaattttgggagaccacaattcagtccatgatattaaccatatttaatatgagcacacaatagagtataaaacaacaataccgtctgaaattaaagcaaataagatacaactgaaggacggcatcacattagcatgtaaagtacagggcaaatgatgatagaacaatctacaagttaaggaaggtatggcggctgcatatcttgcattataaagttcctgcatttttaagtctttgtaaatgtcacctaattaaacaatttaagcttaaaatgtaataagtcatcctagatgagtcactcactctcaagcacaccctacctgattgtttggaatttctgtgtcttatttaaaaataatttgaaaaagaatattctgcagtcttgaaaatatattgaaaacatttctaacccccaaagagagaattattaaaatattattaataaaagata

SEQ ID NO: 105331 - DNA, 633 bp, Homo sapiens
gacctttcctttgtgcatatacagacacagtgagagcagtctctagggtctctttctcttttatcaagracatctgtctattatactaaggctctacacttatgacctcagtttcccttaattatctccttaaatgtcctattttcaaatgcattcacaaaggaggataagacttcaacatataaattttgggagaccacaattcagtccatgatattaaccatatttaatatgagcacacaatagagtataaaacaacaataccgtctgaaattaaagcaaataagatacaactgaaggacggcatcacattagcatgtaaagtacagggcaaatgatgatagaacaatctacaagttaaggaaggtatggcggctgcatatcttgcattataaagttcctgcatttttaagtctttgtaaatgtcacctaattaaacaatttaagcttaaaatgtaataagtcatcctagatgagtcactcactctcaagcacaccctacctgattgtttggaatttctgtgtcttatttaaaaataatttgaaaaagaatattctgcagtcttgaaaatatattgaaaacatttctaacccccaaagagagaattattaaaatattattaataaaagata

SEQ ID NO: 105332 - DNA, 586 bp, Homo sapiens
aataaataaatgagtgtttctgttgttccacatctttgccagtattggtaatattggtttctttgggttttagccattctaataggtctgtagtggcatctcactcttgttttaatttgcatttcattaacaacatacaaatttgagcatctctttrtaggctatttgtcctctacacatcttctttgaagggtgtgttttcccagatcatcccaatgttttattttttttccgtattgttgagttttttgacattttcagtcaaaataacttcattgaatatatatttaacaaatattttctcccagtctgtggcttgtcttttcatgttcatagtgcatttcacgagcaaatattcttaattctaattcattttcatgcattgcacctttcagataggttctaaggagtcatcaccaattccaaggtcattcactttcacctatgtcatcttttactcattttatcatttcatgtttcacttttaggtctataatccatctggagcaaacttttgtgaaaggtataaagtcaatgtctagattaaatttttggcatttgaatgtacagttgttccagcaccatt

SEQ ID NO: 105333 - DNA, 586 bp, Homo sapiens
aataaataaatgagtgtttctgttgttccacatctttgccagtattggtaatattggtttctttgggttttagccattctaataggtctgtagtggcatctcactcttgttttaatttgcatttcattaacaacatacaaatttgagcatctctttataggctatttgtcctctacacatcttctttgaagggtgtgttttcccagatcatcccaatgttttattttttttccgtattgttgagttttttgacattttcagtcaaaataacttcaytgaatatatatttaacaaatattttctcccagtctgtggcttgtcttttcatgttcatagtgcatttcacgagcaaatattcttaattctaattcattttcatgcattgcacctttcagataggttctaaggagtcatcaccaattccaaggtcattcactttcacctatgtcatcttttactcattttatcatttcatgtttcacttttaggtctataatccatctggagcaaacttttgtgaaaggtataaagtcaatgtctagattaaatttttggcatttgaatgtacagttgttccagcaccatt

SEQ ID NO: 105334 - DNA, 586 bp, Homo sapiens
aataaataaatgagtgtttctgttgttccacatctttgccagtattggtaatattggtttctttgggttttagccattctaataggtctgtagtggcatctcactcttgttttaatttgcatttcattaacaacatacaaatttgagcatctctttataggctatttgtcctctacacatcttctttgaagggtgtgttttcccagatcatcccaatgttttattttttttccgtattgttgagttttttgacattttcagtcaaaataacttcattgaatatatatttaacaaatattttctcccagtctgtggcttgtcttttcatgttcatagtgcatttcaygagcaaatattcttaattctaattcattttcatgcattgcacctttcagataggttctaaggagtcatcaccaattccaaggtcattcactttcacctatgtcatcttttactcattttatcatttcatgtttcacttttaggtctataatccatctggagcaaacttttgtgaaaggtataaagtcaatgtctagattaaatttttggcatttgaatgtacagttgttccagcaccatt

SEQ ID NO: 105335 - DNA, 586 bp, Homo sapiens
aataaataaatgagtgtttctgttgttccacatctttgccagtattggtaatattggtttctttgggttttagccattctaataggtctgtagtggcatctcactcttgttttaatttgcatttcattaacaacatacaaatttgagcatctctttataggctatttgtcctctacacatcttctttgaagggtgtgttttcccagatcatcccaatgttttattttttttccgtattgttgagttttttgacattttcagtcaaaataacttcattgaatatatatttaacaaatattttctcccagtctgtggcttgtcttttcatgttcatagtgcatttcacgagcaaatattcttaattctaattcattttcatgcattgcacctttcakataggttctaaggagtcatcaccaattccaaggtcattcactttcacctatgtcatcttttactcattttatcatttcatgtttcacttttaggtctataatccatctggagcaaacttttgtgaaaggtataaagtcaatgtctagattaaatttttggcatttgaatgtacagttgttccagcaccatt

SEQ ID NO: 105336 - DNA, 520 bp, Homo sapiens
aacaatcaactagcttacacagacaataaaaagtagataaaagcagattatgaaaaatgggattttattgtgtagaaaaagagtaattttcagcccagtcactgatgaattgattcatttgtttttacctgatggtatgaaatagagttgtcatcaaattttacatattatttatatgcattaagcacttttgcagatagcattatcttaattcaagtctcaccccaacactgacttattttctaactgtggaaattgacgttcaaaataaaaattagcaacttagcycaagaaggatagctgggaaattgtagagcttggacaatcctggaggctatcgaacatatcatactctgtctgttcaactgttcatgtatgaagtgtatctgaatcaaaaagctgttgtttcagagaagaatgcaaagtgagatggatgaagaaatattgtaaggaaggggtccaaagctgtaatacagttttattttataagtatctgtgaaaaatagaggaaaatgtgtat

SEQ ID NO: 105337 - DNA, 594 bp, Homo sapiens
ttgcagttgaggacttattcagcctttgtgggaatctgttgwgagatgtgcttatctggtacaccaagagaagctttcagacttgaatccctggccagttttcccatgtagcctaggtaaacttcttgaatctcctccaggtctgtacaggccagaaggctgcaccaacctcagagcccttgagagactttcagaaaacctgggtgtatgtttagtctagtgctgcgatggttgcaggctcaggaaacacaatagaatctcttagaatctctggaaggccttggaaaaaagatgaacacaaacaaagccagaccacaaagccaggattcctcaatgcacaatgcacagacattgttgcattgttgcacacccacaagcatcaagaatattcagggaaatatgacctcatcaaatgaacaaaataatgcattagatacccactttaaagtgacgaagatgtgtgatctttcagataaagaattcaaaatagttattttgaggaagctcaacaaacttcaagaaaacacaagaaaactatagaggaatttatcagaaaattttgacagagattgaaatattacaaatcagaaatcc

SEQ ID NO: 105338 - DNA, 594 bp, Homo sapiens
ttgcagttgaggacttattcagcctttgtgggaatctgttgagagatgtgcttatctggtacaccaagagaagctttcagacttgaatccctggccagttttcccatgtagcctaggtaaacttcttgaatctcctccaggtctgtacaggccagaaggctgcaccaacctcagagcccttgagagactttcagaaaacctgggtgtatgtttagtctagtgctgcgatggttgcaggcycaggaaacacaatagaatctcttagaatctctggaaggccttggaaaaaagatgaacacaaacaaagccagaccacaaagccaggattcctcaatgcacaatgcacagacattgttgcattgttgcacacccacaagcatcaagaatattcagggaaatatgacctcatcaaatgaacaaaataatgcattagatacccactttaaagtgacgaagatgtgtgatctttcagataaagaattcaaaatagttattttgaggaagctcaacaaacttcaagaaaacacaagaaaactatagaggaatttatcagaaaattttgacagagattgaaatattacaaatcagaaatcc

SEQ ID NO: 105339 - DNA, 594 bp, Homo sapiens
ttgcagttgaggacttattcagcctttgtgggaatctgttgagagatgtgcttatctggtacaccaagagaagctttcagacttgaatccctggccagttttcccatgtagcctaggtaaacttcttgaatctcctccaggtctgtacaggccagaaggctgcaccaacctcagagcccttgagagactttcagaaaacctgggtgtatgtttagtctagtgctgcgatggttgcaggctcaggaaacacaatagaatctcttagaatctctggaaggccttggaaaaaagatgaacacaaacaaagccagaccacaaagccaggattcctcaatgcacaatgcacagacattgttgcattgttgcacacccacaagcatcaagaatattcagggaaatatgacctcatcaaatgaacaaaataatgcattagatacccactttaaagtgacgaagatgtgtgatctttcagataaagaattcaaaatagttattttgaggaagctcaacaarcttcaagaaaacacaagaaaactatagaggaatttatcagaaaattttgacagagattgaaatattacaaatcagaaatcc

SEQ ID NO: 105340 - DNA, 594 bp, Homo sapiens
ttgcagttgaggacttattcagcctttgtgggaatctgttgagagatgtgcttatctggtacaccaagagaagctttcagacttgaatccctggccagttttcccatgtagcctaggtaaacttcttgaatctcctccaggtctgtacaggccagaaggctgcaccaacctcagagcccttgagagactttcagaaaacctgggtgtatgtttagtctagtgctgcgatggttgcaggctcaggaaacacaatagaatctcttagaatctctggaaggccttggaaaaaagatgaacacaaacaaagccagaccacaaagccaggattcctcaatgcacaatgcacagacattgttgcattgttgcacacccacaagcatcaagaatattcagggaaatatgacctcatcaaatgaacaaaataatgcattagatacccactttaaagtgacgaagatgtgtgatctttcagataaagaattcaaaatagttattttgaggaagctcaacaaacttcaagaaracacaagaaaactatagaggaatttatcagaaaattttgacagagattgaaatattacaaatcagaaatcc

SEQ ID NO: 105341 - DNA, 522 bp, Homo sapiens
tgcaggtaaatgcattgctcatttcacagttagtaagtaactgagaactgagtgaaggagagcaagaaactagttttgtaagccctcctcccgcattttagtccactgtttrccaccaatacatttggaaactacaattgaattgttgttcctgattattttagccatacatattaagtaggacatgcctacctaataaaatacaataattatacgtacaattattatatgtacattttatggtttatagatatattttaatacattgaataccgatacacttctcttaacgacattagttagtcccaaacggggaactcaaattaaaggaagtattaatttatgtggctccatgttagaataaatttgtatgagggcagagagtttgttttattcagtattctcttcccaaatcctggaaaagtgtctgacacatacatataatgttgagaattgctaaatattggtagggaggaggaaacttagtataaagtaattttaaaatataatgccaccagcttt

SEQ ID NO: 105342 - DNA, 522 bp, Homo sapiens
tgcaggtaaatgcattgctcatttcacagttagtaagtaactgagaactgagtgaaggagagcaagaaactagttttgtaagccctcctcccgcattttagtccactgtttaccaccaatacatttggaaactacaattgaattgttgttcctgattattttagccatacatattaagtaggacatgcctacctaataaaatacaataattatacgtacaattattatatgtacattttatggtttatagatatattttaatacattgaataccgatacacttctcttaacgacattagttagtcccaaacggggaactcaaattaaaggaagtattaatttatgtggctccatgttagaataaatttgtatgagggcagagagtttgttttattcagtattctcttcccaaatcctggaaaagtgtctgacacatasatataatgttgagaattgctaaatattggtagggaggaggaaacttagtataaagtaattttaaaatataatgccaccagcttt

SEQ ID NO: 105343 - DNA, 470 bp, Homo sapiens
actttgctgagaaaaaaaaatgcagtctatctacttcaattaaactatgacattctggacattttttgactctccctaaacagacatacactgagtcacatttgctatctttgaaatttgtgaaacatcagtgtctcaaacagatgttaaggctttttgaaagaygtcacatacattcatctcagggacaaattttcctaaaatgggattagaaacaatatatcacaactgtggaggagctttactggggtgttgtctatgcttaagttgcagatcctcttaatactcaaaaatctacacttactgtggctgacagtttcaagcagatgtgttcatcgcagtagtgcaagaaaagaaaagtagaagaaccctgcagagatttgatggaacccagcttctattcattaaaaccaatggcaaaatataaagcaaataggaggtgacgaaggttacaaagatacgtattgttt

SEQ ID NO: 105344 - DNA, 617 bp, Homo sapiens
atcaaaatcttcgtaaacattattcaggacttctaatataatttgcttcaagatctaaaaacatctgtcatttgatacaatgtggttttatgttaattcatggagaagaagaaaaatattgcataaaatgaggtatacttttattacaatgaatcatggaacacagttttatttaacaaactaaattattggtactgtaaacaagattagaaagataaatgtcatttttaatgaagtattttatctcactgtagtatgaaagcaaacaccacataaacgtatcagacccaccaaaattttatacaaactgcttgtccttggttaaaccctagaagttcaaaatgaaatgtaatgtttactctttagaactctaaaaatataagagttacttaatttacctatatcattcctcaaggcrttttataaaagaaataggataatttaatcttaggcaatagaaataaatttttcatgttcagctaagttacaataatgtagacctacattttttaaattttcaaactcagagtttgttttaaaatgattcaaattttatattttttaaaaaatttatcaaatagcagcttaaatttatattatttttgaattatgagcca

SEQ ID NO: 105345 - DNA, 585 bp, Homo sapiens
taaaacataaaaataactacaattttattgactgtatcaactgtacttctgatggaatgctaggtagtttacattattatctcattaaattttaagatatatgattttcataaatcatgtttaaacaggatagaaatttcagcaaggaggtaacatagcatttactgccaagggcccataattccagttagctttagacaggacakatataaaagacaggaaggaatcagagccattcataccctgggctgggtatccctgcagtatattgaaacgtgtttccgtaagtttaacgtgtcagactactaaatagatattaggtattccttgtgatgagatctgtaatctattttcaaatatttttgcagagggagtgtctaagagaccacacctcagggatggctgaccagcactacgcaagaaaggccattctccagaggcagttaacgcaagctgctcagctatctctatctaaatcaacaaccgaggctttaatacgcatactaatgtctgaaatgggctttcaatggtgaaattaaagtcattctggaggtgtggattagttgcaatctcttagagatgctc

SEQ ID NO: 105346 - DNA, 585 bp, Homo sapiens
taaaacataaaaataactacaattttattgactgtatcaactgtacttctgatggaatgctaggtagtttacattattatctcattaaattttaagatatatgattttcataaatcatgtttaaacaggatagaaatttcagcaaggaggtaacatagcatttactgccaagggcccataattccagttagctttagacaggacatatataaaagacaggaaggaatcagagccattcataccctgggctgggtatccctgcagtatattgaaacgtgtttccgtaagtttaaygtgtcagactactaaatagatattaggtattccttgtgatgagatctgtaatctattttcaaatatttttgcagagggagtgtctaagagaccacacctcagggatggctgaccagcactacgcaagaaaggccattctccagaggcagttaacgcaagctgctcagctatctctatctaaatcaacaaccgaggctttaatacgcatactaatgtctgaaatgggctttcaatggtgaaattaaagtcattctggaggtgtggattagttgcaatctcttagagatgctc

SEQ ID NO: 105347 - DNA, 564 bp, Homo sapiens
cgcaaatgtttagtcctgaacctagttttaatttagcacctagttttaatctaatttctgaaccaatgtgtttacaggtaacatacaccttaaaattaatcacacccattattccaagcctttctgaattatttttctactatataattacttattttccccacatgataagcatatgctrtaaacgaaagttatcccacttgataaagtctcagagaagtttagtgtcttgatcaaagacacacagccatttggtatgaaagcctgaaagattactatgttctactctctatctagacattggcatttgataaaatcgtagacaagaattgttgtctattttggtctggagtgatgtctgtttgtttggttttttttttttgtttttttttttttttgagacagagtctggctctgtcacccaggctggagtacagaggcatgatcttggctcacgtagatcttggcctaggtagatctaggccctctacctcccgggttcaagtgattatcctgccttagcctcccgagtagctgggattacaggcatgcaccaccacacct

SEQ ID NO: 105348 - DNA, 564 bp, Homo sapiens
gtcacatccatttcagttctttgttgttggttaattctagcatttgtactgcattaaattattttattgcagtgttgatttttattttccccatttgcactgaagagaatataaggttgacatttctttttggcatgtttctaagctcagcaaatatagcaaccgaggtgctaaatttcagtcaaaaatagaactcctcagcctcattttggaaatttcttctcattcatgcacagggattctagtgtcaaatttttagctctgccctctgctggtcatttcaaattatgcagaagaattctcagaacagtattcatttccaaatataaggagttacaggaaggcgtcttaaaatttcaccactgcaaaatatattcacaggaagattaattgtaatagctttacattttaaaatcaaaaattctttgaggtaaatttttgaaattagagagtagcgaaagctttatagatttttcaagaaaatagcatttgtgttttttttyccctgagtacaggtgaaaacaaatatggttatagttaaggtatcaataacattagagaaaa

SEQ ID NO: 105349 - DNA, 558 bp, Homo sapiens
cttgctgtcaagtggggtctgtgactaacggttctgtacgatgagatgtgagtggatgtgacacatggcactttcaggctgatccaaaataaaccttctgccctgttttccactcggtctctctcctctcctgccacagcactcccaaaagaggataaagaagacagaagtccactgagctactacaagtaagatagctgtcccaaagtgtcacctatgcccaccaaggactttgccttagagaaataaatttcactgtgttaaaccactggaattatttgaagttagagcaaaatttagcctaccctactaatccaccttagtagaacttgaagtaacaagccgtgagacgggggccgactcaagaaccacttatccatttatatttccaaaacttacagtattgtgcatgtacgctgaaagacttattgtaatttagataagtgaaaacaaatgtttttaaacaaaatttatggatagcgaatgtagagtagagaaaaacacactatwttaaatgctggctgcagtttgatttgagtagcggaaaaatattttaaa

SEQ ID NO: 105350 - DNA, 579 bp, Homo sapiens
attatttattctcttcccttgagttgaattagtctttctatgagcatttattattttaaaaatctgtaaccagactaatggtatttcagtccttatgcattcttctgcattaatatcattccaatgtagtaactcatacagtggacttctcacatactgtatataatatatacatattatatattatatacattcagattagtcctttttgtaataaaaatataatatcatctcttggaaactttgctatttgctttcttgcttatgcctttatatawttatatttataaatctggcagaagaatgcaaaatgaaaaaagacccactcctgttttcagacttacagtttgtcccaaacactcagtattttcttcctagtgtcctttaatgcaccattccaaatatacctatgctattaataattaacactgcatacaggagaaaaagtgttctgaatgacatacagcagcaaatcaaacctcagtgcttgctcctaagatgagcgtcatgggtgcagaatcattaatgcccttgaaaaagtaaaaatcagaatgatttcacaatcatatttcacaggcc

SEQ ID NO: 105351 - DNA, 559 bp, Homo sapiens
gtggttgcaggaaaattaaaaattaaatcaaatatggtaaatttttctgctattattttcaaaaaatatgttagaacaccagaaagaattctatttggcttgtcaactgtgggatttgattaaacatttcatacttgctcttcatttttgtagacaatcaacagcagatttttaaaataacaaataatgtttttataaataatgcttaaaatttaacttttacttggttaggtcctcagtgaagactgtattcttaactggtaaaatatttgtactttcatattggatgtcccagtgctgtaatctgaatatgttgcctcccaaacttatgtgttgaaaacctaamcactaatgcaacagtgttaggaggtggggtcttttgggagatatttgagccatgagggactttgtcctcataacttgattaatgacattataaaaaagactgtgatgtgggtttcttctcttctgctcttctaccaaatgagtttatagcatccattcccttttttgcccttctgccttccaccatgtgaggatgcagaaagacctacaacca

SEQ ID NO: 105352 - DNA, 685 bp, Homo sapiens
acctcatgaagcctccttgccaagactgatgagagatcaaacagaaattttaaatgactctctaaagtaaattgaaattgttatcgaaaatcttccacaaagaaaagtccaaatagtttcactggtaaagtctataaaacatttaggaataaatatcactaatcttatgcaaattccttcagaaaataaagaagaacacactttagagtatttgctggtgaattagattygagaactgagagagaaaaaaagaaattaatgatgatatataatttcggcctgtgcaaactggatgaatttgaggcacctactaggatgggggaggaacagatgtctgggaaggagaaaagatatattaatagcaacatttaggacatttaaactttgatacgccaagtgtgcatgccaagtctgcaattggatatatgagtccagagatctgaggagcagtggaggacgaaggctataaatatgggatttaccagcatataaagccatgactagtattacctggagactgaatatggatggagaagagaaggtgacacctcaccaaataacaaggagtgtgtggagatgaaaacagtggtctttgctgttaattgtaactaagtgggcaagtaccattgaatttggctatatgaacatcattgttgacctttacaagtgcagatttagaagggag

SEQ ID NO: 105353 - DNA, 648 bp, Homo sapiens
acgattctaattatctttattttgtagattatctttcatttctttctgactactttcacaatgtatctttctgcaacatttatgatgtgttaatgtgtgattttatttttatttttactgccttggacttctaagtcttggcttactagtaattataaaaagttacmagcactatctatctctcccttaggctctcacatccttttggaactctggttagaattctgttactttttattctattctccatatttcttgccttctcttttatatttatatatcaatccttctgggtgtgttttggaagtctcttcaggttagacttccagtttaggcagagcaaaaataaaatgtatagcttaattcgtgctctaaatttcacattttatgtgctgtagtcttcttttctacatattctatttgattgtgtttaaaatctcttagttcttattctctaaaaatctcttcttccaagcttatttttaaggatctcatttctttaaacatatatgctttttattctgattgataattctgatatctgaaacctttgtggtctacttctgctggttcttactcatagtatgttttcattattattttgtggtctgtattttgatatgtgtgtgtggatgctcaattttctgg

SEQ ID NO: 105354 - DNA, 656 bp, Homo sapiens
tgtaagccactcggcttgtggtactttgtcatggcagccctagaaaactaatacactagttataatattgtactatagtacaatattgttgttgtcttccagggaaactgagtaaagcatacatggtatctctttatattatttcttacaactgaacgtaaatctgcaattatttccaaataaaaagtatctttgtgaagttattctgaggttcaaatgcaggcctgtctgttgctaaagtttatgatcaaactggcccaaacttttgactcggtcctgtgtcagagcaactaattgtgaggctatcagttatccaaactatgaattcagactcaggagtttgacatagagtcttagcagtgatgggtcaaaatgtagcattctatggggttttctaattttctttcttgtggttcattacttctggactgcctccttccrcagagaaatgaccctatctcacagacccagagctttgcataaggagtgacctcagtgctgttgctttcatctgtaagtgaaaaggccttagcaatcttaaaggtaattgatgccacatggtgttctgagactttccaaaagtcatactacataattttgagtgcaaccattttgtagtctttaggaacatattgcttttaagatgtcattggcac

SEQ ID NO: 105355 - DNA, 656 bp, Homo sapiens
tgtaagccactcggcttgtggtactttgtcatggcagccctagaaaactaatacactagttataatattgtactatagtacaatattgttgttgtcttccagggaaactgagtaaagcatacatggtatctctttatattatttcttacaactgaacgtaaatctgcaattatttccaaataaaaagtatctttgtgaagttattctgaggttcaaatgcaggcctgtctgttgctaaagtttatgatcaaactggcccaaacttttgactcggtcctgtgtcagagcaactaattgtgaggctatcagttatccaaactatgaattcagactcaggagtttgacatagagtcttagcagtgatgggtcaaaatgtagcattctatggggttttctaattttctttcttgtggttcattacttctggactgcctccttccgcagagaaatgaccctatctcacagacccagagctttgcataaggagtgacctcagtgctgttgctttcatctgtaagtgaaaaggccttagcaatcttaaaggtaattgatgccacatggtgttctgagactttccaaaagtcatactacatwattttgagtgcaaccattttgtagtctttaggaacatattgcttttaagatgtcattggcac

SEQ ID NO: 105356 - DNA, 537 bp, Homo sapiens
gatcatcaagaacaaatactgtgaaccatgtttatgtttacccaaggttttgggatgagggaggccccagggtgactaccttgcccaaaactggccttccctacgtgacactctgcttttacctatctcatttcttgttgtgtacctgtttgggtgcaaccacaaaggtaaaggagagagctctggcttcctggagggaaaagccacgyacatttttgccatgggtgagaattctaacttgagaaaaaaaactgaggatgagcagactctaagctgagcaggtcctctctgacaagctgcttgctgagctcagggtcacagatctcccttaatcaaaacaacactgggaaatccatgaggctgaaacttccccaggcactcaccgccacctcgacttgctgcttgtaattttgcacttttagctgaagtttatccatctgagtttgcatcctgctcagattcttcttgtcttcctctgcctgcaatacataggcatgtatgggaaggtgattcagaggatccagcagtctacgttgg

SEQ ID NO: 105357 - DNA, 537 bp, Homo sapiens
gatcatcaagaacaaatactgtgaaccatgtttatgtttacccaaggttttgggatgagggaggccccagggtgactaccttgcccaaaactggccttccctacgtgacactctgcttttacctatctcatttcttgttgtgtacctgtttgggtgcaaccacaaaggtaaaggagagagctctggcttcctggagggaaaagccacgcacatttttgccatgggtgagaattctaacttgagaaaaaaaactgaggatgagcagactctaagctgagcaggycctctctgacaagctgcttgctgagctcagggtcacagatctcccttaatcaaaacaacactgggaaatccatgaggctgaaacttccccaggcactcaccgccacctcgacttgctgcttgtaattttgcacttttagctgaagtttatccatctgagtttgcatcctgctcagattcttcttgtcttcctctgcctgcaatacataggcatgtatgggaaggtgattcagaggatccagcagtctacgttgg

SEQ ID NO: 105358 - DNA, 646 bp, Homo sapiens
gtgaaaaaatccagatggtataaatagcttttcacttctaattgcaacttgcccctcacattttgtttcctgagagctctgaaaagagaccgatccaaaccactaatagcacaggagctctgggagggtgagtcagtgtctactgctgaaggagaayaaagatgaagagagaacggcaggagtcccagaaggccatttcaggcttgaaggagtacttttctgcagggtagtgcccagccagacaaacagggaatggtttcctggagtacctgataggtcagctctttgatgcatcgctcaagtctgcgggctcccctctgggcctctgcactgcgacggatttcaccctccagttcaccttccagttcacgaacctgcaaccaaaacgtgacctcagaccagacgctgccaccaagtctggcattctatttgctgattggcacaatcatttgaaagacagcaaagtgtcaagggaacatgcacacactgtttttggtgcttaaacaggacagtgtctctgggaaaactctctcgccaaaagtaagatcttttatggattcataaaagaactatttagactgaaatatgtgaaaggctaattcacacagatatgagaagcttttttcttgaattacaaaaccacacc

SEQ ID NO: 105359 - DNA, 537 bp, Homo sapiens
taccttccgctaaccatgcccgctgagagaagtgctgcatctgcccacagggggtgcccagagggtggccttttttcagtccctatgaaggtgcrccaaagctggcagccaactctgagctcaacatcatttaggaaaatcactgccatcatcaactggaaaataaagaaagtacagcagccctgaaacccttttttaccaacctgattttgctcttcaagcagtagtacaggttgtaaaaaaaataagtgaattaaacattctttccaaatcatcatcataaaactgttatagaccctaggaaaaatagctttttgtaaggaaacacagaaagaattgtttctagacactagatgtattgattcacaaatgaaaagtggcttaaccaaaacaaaagaagactcctgcttttataaggttttgcttatagcaattcaactgctccttttcatcaccagggtatgttggtgggaggagctaattggcctaatttttcaagatgagaacagggaggcagagaggtcagactaacctccc

SEQ ID NO: 105360 - DNA, 620 bp, Homo sapiens
tccttgggacagtgctcccaaatggaagggtgggctgctatctttgctgtttgggagacttagctgtttcagcttttgggcattgcagtgtctgagcagaccaggggcggaagggatcccccagcacagcacagctgctgtataaaaacatggccagactgcttctttaagygagtccccaatcccattcctcttcactgtgtgggacctcccaaccagagcctcctgccacccctgttggtgttctctggctgaaagagatttgtaacctccctgggatagagctcccagagggaggagcaggccactatctttgctgtttggacaacttagccattccagtcttcaggcttcgaagtgtctaaggtgactgggggctgaagcagaaatgtgaatcaaaaccacaatgagatatcatctcacaccagtcagaatggctattattaaaaagtcaaaaagtaacagatgctggtgagttagtggagcaaagggaacgcgtctaccataaaaacacaggcacacaaatattcattaccgcactattcgcaatagcgaagacatgggatcaacctaaacgcccttcaaggacaaattagatgagaaaatgtggtatatataca

SEQ ID NO: 105361 - DNA, 608 bp, Homo sapiens
gctgacttgaatgagaggctggaggaggtaggaggatccagtttggctcagctggaaataactaagaaacaggaaaccaaattccagaagctgcaccgagacatggaagaggccactctgcactttgagacaacttctgcatctttgaagaagagacatgcagacagcctggctgagctcgagggccaggtagaaaatctacagcaggtcaagcagaaactggaaaaagacaagagtgacttgcagctagaagtagatgacctcctgacccgtgttgagcagatgacaagagctaaggtagatactcccatgccatcctcgtggtcttctgaacatggaaktagggaggggaagaaatgggaggggagggaaaagaaaaataagccagcttagtgactcagtgtattttctaatgaagactatagtcctttggacggaatagatcaggcctgaccttagtggtcattgttaaggtcacacagccatcaccagaatgtgacctgacagtggcctctggttttaacagaattcaaatccatgttccttatggatttttttagtgattgcacaagtaagtgagctggaaatctgaggccactatctatgtc

SEQ ID NO: 105362 - DNA, 608 bp, Homo sapiens
gctgacttgaatgagaggctggaggaggtaggaggatccagtttggctcagctggaaataactaagaaacaggaaaccaaattccagaagctgcaccgagacatggaagaggccactctgcactttgagacaacttctgcatctttgaagaagagacatgcagacagcctggctgagctcgagggccaggtagaaaatctacagcaggtcaagcagaaactggaaaaagacaagagtgacttgcagctagaagtagatgacctcctgacccgtgttgagcagatgacaagagctaaggtagatactcccatgccatcctcgtggtcttctgaacatggaagtagggaggggaagaaatgggaggggagggaaaagaaaaataagccagcttagtgactcagtgtattttctaatgaagactatagtcctttggacggaatagatcaggcctgaccttagtggtcattgttaaggtcacacagccatcaccwgaatgtgacctgacagtggcctctggttttaacagaattcaaatccatgttccttatggatttttttagtgattgcacaagtaagtgagctggaaatctgaggccactatctatgtc

SEQ ID NO: 105363 - DNA, 586 bp, Homo sapiens
catatgtcagtacttaaatttctggaaggatttacactaaatggataatggtagtttcctctagtgggaaagcagggattgggtatgacattagtttgttttcatgttgctgataaagacatacccaagattgggtaatttatacaggaaaaagggtttaatggatttacagttccacatgtcttgggaggcctcacagtcatggcagaagacaaggaggaggaagtcacatcttatatggatggcggcaggcaaaaacagagagaacttgtgcagggggactcctccttataaaaccatcagatctcaagagacttactcactatcatgagaacagcatgggaaagacttkcccccatgattcaattacctcccacaggttccctcccacaacacctggaaattcaagatgagatttggatggggacacagccaaaccatataattctgcccctggcccctctcaaatctcatgtcctcacatttcaaaaccaatcatgccttccccacagtcacctaaagtcttaactcatttcggctttaactcaaaagtccacaatccaaagtcttatccaagacaaggcaa

SEQ ID NO: 105364 - DNA, 586 bp, Homo sapiens
catatgtcagtacttaaatttctggaaggatttacactaaatggataatggtagtttcctctagtgggaaagcagggattgggtatgacattagtttgttttcatgttgctgataaagacatacccaagattgggtaatttatacaggaaaaagggtttaatggatttacagttccacatgtcttgggaggcctcacagtcatggcagaagacaaggaggaggaagtcacatcttatatggatggcggcaggcaaaaacagagagaacttgtgcagggggactcctccttataaaaccatcagatctcaagagacttactcactatcatgagaacagcatgggaaagacttgcccccatgattcaattacctcccacaggktccctcccacaacacctggaaattcaagatgagatttggatggggacacagccaaaccatataattctgcccctggcccctctcaaatctcatgtcctcacatttcaaaaccaatcatgccttccccacagtcacctaaagtcttaactcatttcggctttaactcaaaagtccacaatccaaagtcttatccaagacaaggcaa

SEQ ID NO: 105365 - DNA, 598 bp, Homo sapiens
gggaaaagttttgataaaatgttcatcagtttcaactaaaccacactgtcaagaaatgaggaccattagacattctctgaaaattttaaattatgatatattcacaaaattgtgtaatgttaatgtattaaaagatcaaattacatcaaaatagtttgttttggacttgttttcaagttggagtaaaggaggctgaacttaatctcctgcctgaaacacctgaaacacttaaaaaaaaaaaaaaaaaaaaaaagacaaaatatatgctacaacggttttcaacacattgaacatcagacattgaaggacagtgatccttgccaggaggcttytgttaaaagatgaagctgagagtttcagcagcccaaggctgactagtgatcacagggcaaaataccagagaggtgatatatacacagaggaaattttggagatttgtagaaagctttattttattcttcatctgagtcttgatcagttcatgtatgcaagaaaaccactcaaagctaaggaaagaacttcacaaaagaattaaaggaaacaatcaccagagctcacacgtggctagtaataccacctgttcccacgagccccagtg

SEQ ID NO: 105366 - DNA, 607 bp, Homo sapiens
tgatgcaatgttgtaggtcttcatttcatttcattttagtactaaatatatatttttcagttgaaccaaagtgaaatcacagaatgtcaaaattaactcctgttcaccatttgcatttgcattgtttaatttattcaattctcccctacttttatgaggataaacttcaatggttttctgctcgcaaactttgttttcgttaatggcaatactacaattggctgaaagtttcaaaatctaaagattgttggtgttctgtttattgaatacttttataaagattttcaacacattttgaataaaatgtaaataaaaactaaaggactcgtttccaaaaaatgtcaaaatcaacacagagcttggttcacaaaggcccagaaatttctaaaatccgaccagtgataagtagcaagaaagagagccccaaacgccatgccaaacttgttatttaattcaacaayaacttcattaagataatttcatagtttattctgtgtgtatctgaaaaccttcatagattgtggcaactgtggcttctgttttaattggtagagtatcagagcatgtttggacacaagtatgaattttcagtgtaccaattccaagt

SEQ ID NO: 105367 - DNA, 628 bp, Homo sapiens
agatggttcctctggaggagctcctctgcctcttctccatgtgccagcgggagagacctctgggccaagcattcagggaatgccccaggcagtcacactatgattttcaaactcttgctcttttttttttcttcttactttaggtgcagaagatttagttaatcgtggtatttgtttcagggcatcttatcatttatttctggaaggctcctttcttattgctgtgctttgttatttatgacatttaaaaattctcatttccttttacttccctctcttagaagatctttctaagctacctgatatgtattctctcatcwtggtttgtgttgctgtagaatatgtattatatatagtgttgataggtgcaggaagaagataaggtggaaggtcccggagaatctcccaccagcctgagcactgggaggacggggtggagcctcaggacgttctcgccatttgcaggaggggaggagcctggcctctcctgttcctgggtagtgacctggaattcaatctgtgaggtgggggtctgttaacagaaacacctctcgctttgctgagttattttcctttttgcccagtaaattccatttcccctcacccttcaaagtgtctgtgagctgaa

SEQ ID NO: 105368 - DNA, 635 bp, Homo sapiens
caaatctcaccttgaattttaataatccccacatgtcataggagggatctggtgggaggtaattgaatcattgtggaaggttttttttccatgttgttcttgtgatagtgaataagtctcacaagatatgattgttttataaagggragttcccctgcacatgctctcttgcctgccaccatgtaagaagtgactttcctcttccttcaccttctgccatgattgtcaggcctcctcagccatgtgaaactgtcagtccattaaacttacttcttttataaattacccagtttcaggtatgtctttattagcagcgtgagaatggactattacaagaacatatggagaaactaacaattttatttagaattttttttttctaatgattgtttctggttaattttcaatgctaaaccagacagattaaaataagacaatttagtgttctataaaaaatgccacaatgtattaataattccctctactttactgagctggcattatcaaagttctttatattattttgatacttgagaaaattatttgtttccatgaaaaaatgagtacaatgcctaatgatagtttaaattctcatgttgattaattcaataaaatatttgtggagtatttgccat

SEQ ID NO: 105369 - DNA, 635 bp, Homo sapiens
caaatctcaccttgaattttaataatccccacatgtcataggagggatctggtgggaggtaattgaatcattgtggaaggttttttttccatgttgttcttgtgatagtgaataagtctcacaagatatgattgttttataaaggggagttcccctgcacatgctctcttgcctgccaccatgtaaraagtgactttcctcttccttcaccttctgccatgattgtcaggcctcctcagccatgtgaaactgtcagtccattaaacttacttcttttataaattacccagtttcaggtatgtctttattagcagcgtgagaatggactattacaagaacatatggagaaactaacaattttatttagaattttttttttctaatgattgtttctggttaattttcaatgctaaaccagacagattaaaataagacaatttagtgttctataaaaaatgccacaatgtattaataattccctctactttactgagctggcattatcaaagttctttatattattttgatacttgagaaaattatttgtttccatgaaaaaatgagtacaatgcctaatgatagtttaaattctcatgttgattaattcaataaaatatttgtggagtatttgccat

SEQ ID NO: 105370 - DNA, 576 bp, Homo sapiens
cacctacccacgaaaagaataggagcaatgggagctatagaaaatgttttgcctcagaatctgctcatgcgtgactcacacttgggccagggaaactcagttttgtctcaaatagaaatgatttggccaagraaagtaaaggatatattgggttattgataaccaagaaaaacagggtatcatcaatttgcagaggcaatgtactttattttctatgatcttctaacgtgtaaacaacaacaacaataaaaagctgatgataatactgactcagcatatcatacacttggtccataaaatacaacaggaggtaaaataactgataggataatacagttgctaattgagggcctcacctcacaaacacgacgacgctaaaggctcattgagatagtgattgttaatagacttctaccatagagtatttaactagattgttaaaatgcattaaagttacttggtgactgactgcaaagttgatttactcagtgtagaaatatactccccacccttcttgtaattataagatttatactatgtactctttgctggctgtacattaattttaaaagtagg

SEQ ID NO: 105371 - DNA, 634 bp, Homo sapiens
aatctgttagggatctttacctgatggttccctgaagggtttgcctttatttggccttccttagaccttttccagggctgaggatcatatgaatcacaggggagcatttgttgaaagcatttaaagacaaatgaaattaaccactgacaactgtaaataaggctaacatttagggcaagcaatagaacaaaaaccatgggtaggcagaggttagggaaggagatacatgaagaaattagaactttgaaaaactcrcaagtattatgtgaaatttagagagtcatgcatagtcacagagttggacatgtactcagaaaagacttgagaagaccctaagattttactattggccaaaaggcaccacacagtaggaagtgaaggctaaggaagagttgaaaactgcctagataagcagtaaggcagtgattcaacagacaactaacctgcacagattgggtgactttttgtttgctgttatatatatatataacttttggggctagtcaatcgttagagataataaatggctgagcaggcagcatgtgtttaatacgcaaactaaccaatagagagccatatctcttctatctggcccatacacctcaggggaaattattcctctaaattaatcatc

SEQ ID NO: 105372 - DNA, 488 bp, Homo sapiens
acagtgatcatgataagtaataaatatactacagtagataatgtgttttgatcatccagataattagttctcttccctgtggggaaagccaataagtggaataaacagagctgaaactccacggacagatacagatagagagagggaggaaagacagaaaggaaagtttaaataagatcaacacaaagaatctttcaaaatgtttcctagcacttgatagtgcctcattatatgttatgtatacttctccctgagatagatcttgcgctttcacagatttgctgcacatctaacaatttataaacattcytaagcttcagttttattatctgaaagacatgaaaatttaaatcaaccttacctgaaacctgttccttgacacactagttaaaaaatttaatgaattaaaaacaaaacaaacaaataaaaaggataagtcaaataagtttgaaaactttttttttgcagtcatattttaaaatgaattc

SEQ ID NO: 105373 - DNA, 553 bp, Homo sapiens
gatttgttcaatgtcacaaaaggagtatgtggtagaatgtaaactcagaaccagaaagttttgagcttctatttgaactcattatattctgtcttctctcagttgtgttagaacattaattcaaccagttatgttgaattacattgattgatgttgatgaacaatcatcaaacaagtgtcaggtaccagggatatcaaaataagtaagacatagcygctatttttcagcgtctataaatggaatgaggcacagaaataataatgctggatgctgtgtgctgtacaaaaagggcaagcaataataacagttaacatgtattgggtacttcctgtctgctaggtgctatactagatattttataagtattaattcacttaaattttacaatatgcctctgtgttaggtatggttgttattctgattttataaaagaagaaactgaggtttagatgggaagtgagggattaggtctcttggcccaaggtcacacaataagttaattatgggggtacaaggtacaggcgcttggaaaacatagaggaaagaacaatt

SEQ ID NO: 105374 - DNA, 516 bp, Homo sapiens
tctaccaaaacgtggccagactgctactttaatcaggtgcctgatctcatttctcctcactgggtgggaacttccaactggggcctccaaccattgctgttggcattctacagcaaacagagatttgtaatctccctgggatggagctctgagagggaggggtggaccactatcctttctgtctgggcgacatatcctttccagccttcaggcttcatagtgtctgaggcaactggtgcgctgaagcagattcccagcacagcacagctgctctaccaatatgtggccagactgctttttaaagtggatcacggatcctgttccaactcactgggtgggaacccccaactgggatcttcagccacctcctacaggtgtgtttggaccagcaactggcccatatctccctgacgyagagctcccagagggaggaacagactgccatctttgctgttttacagccttcactggtgataccaggtactggaaaatctgaggtaactcagggctggagca

SEQ ID NO: 105375 - DNA, 377 bp, Homo sapiens
tttttgagctggtcttttctcatcttcgtggatttagctacctttgatgtttgaggctgatggtctttagatggggtttttgtttgggtgtcttttttgttgatrttgatgttgttgcttcctgtttgttaggttttcttctcttaggctccttttctgcagatctgctacagtttgctggaggtcaaatgcagaccctgttcatctaggtatgaccagtggaggctgcagaacaaaaaagattactgcctgctcctttttctggaagtttcgtccctaagggaccccagactgatgtcagccagagctgtcctgtatgagttgtctgtccacccctcttgggaggtctctcccagtcaggtggcacggggttcagg

SEQ ID NO: 105376 - DNA, 660 bp, Homo sapiens
tgatttcaaaagtcatttcaaagctacagtaatcaaaacagtgtggtactaacataaagacagacatacagaccaataaaatagaatacatgacctggaaatagccctcaaatatatggccaaataatttttgacatgggtgctaagattttattaagaaagaacagtctcaacaaacaatttctggaaaaactgaatatccacatgcaaaaaaatgaagtaggarctttaccttataccacatgcaaaaattcaaagtagatcaaagaacaagttataagacctaaaactgtaaaatacttagagagaaaagtagagggaaagcttcaagactttagaaataacaatatttttattggatatgacaccaaaaataaaggcaacaaaagcaaaaataggtaaattggactacatcaaaagaaaacaattatctgtatcaaaggacataattagtagagtaaaatggcaatctatggaatggtggaaaatattttcaagccatgatatatgttaaggggttggtagctaaaatatataaagaactcctacaactcaacagtaaaaaactcacaaaacctatttttttaaatgggcaaataatttgaaaagacacttctccaaacagtatatgcataaggccaataaatatataaaagatgc

SEQ ID NO: 105377 - DNA, 546 bp, Homo sapiens
tgctcttgttctttctttgtgtgaactcagaggaaaggtaatgtaaacacatggcaagaaagcatccatccatctacaaactagtataggamcttcaccaaaagccaaccatgctggcaccttggtcttcagcttcccagcctccagatctgtgagaaataaatttctgttctgcatatcacccaatatgtggcattttgttattttcagtcccagaagactattacagatagaaggtcaaagaaggttcctacatgaaggtgatttttgagctgatatctgaagtgttcagaaaaagccatgtgaatattgagtgaagaccatccagcaaaaaaaggagcaaataatgcaagaaaaaggatgtcatgatcttggtatgttagaggaataaaaagaccaatgagacttaagaagagtgaagggaggagaggtaggagataaagttggagagattgacatatatcaggtcatacagggtaatgtaggccatgagaacaaactcagtggaaagtcactggagcatcttaagcagtaagataatataac

SEQ ID NO: 105378 - DNA, 260 bp, Homo sapiens
agatccggaagtattcatttgaataattttaacaagagttggaacatagctttgccaatatgattgtkaaggcaaagcccaatgaaagcaatggctatcaacagggtggatgtgatcaggtcaaagcaaaagatgacaagtcaataggtaagatcatgacaacagttttttgaattgtttaaggctctttgcgtgctgactttctgtagggccaaataacaataacagctacttattatgagagtgttttgaggcgttag

SEQ ID NO: 105379 - DNA, 546 bp, Homo sapiens
taaacctctgagcaacgataataataaaacaaccagtgctttcagtgaatacagtaaatgtatatcttgtacaataggaaacatacccatgccttcttctaaaagatagaatatatgtctcataaattactgcattcatttctagttgattatgaatacttttcatttggaggaacataatgattgctatattgatattaaggaaaataaatttgaacagctgatmcagatggtaactgccagatctttccaatatataagcacatttttccttttgtgattaggtaatttatctttgcagagatgctttttgacaccattaatattctaattccaaaaaagtgtcattcaataattttagcacacattgatattcctcacatgaaccatttatttcagggaaggtttcaaacggtgattttgcaggtgcattattattgtctcactaattatctggagttatcctgtaaagaagggttgttatcacttttcacttttctcatttctctaaaggatttttttaaaattcattgttttatagtcaat

SEQ ID NO: 105380 - DNA, 581 bp, Homo sapiens
tttttctcttttggttctactaacgttttaattccatcacttcaaataatatatttttgtctctatttattgatttatcagtaaaaataagtaaaaaatcaataagtaagatttgtattattaaagccacgtagttatttttttactgcagtactgaacagtgttttgaataatttttcttccctaggatcccaaagataaagatcttttgatggactgttcccagcccagactatttccagtccattcttgtaggatcaatgaaatatgggctacacaattcctcagatcttcctttaaagacacttgtttcagcaattagttgaatcaatctgctttcttaattctcttctatattttattccctttacacttatgtaagaattttgttgttttgttttcattccttccttacttgagcctctttgcaawcttgactctaagattatttttgaaattatcccattgaatttttgttatgttttgtttcttttgctttctcctctgaaaattgacctgtacactgtaaattttctgctatagccttggcaatccactctctttttctgctctaagttttc

SEQ ID NO: 105381 - DNA, 699 bp, Homo sapiens
tactttctctcatcattgtatatttctctgcctcatcctttttcaagttgcatattattctatggaatagatttactgtaacatatcaatacagcccactattacttacaaattccataagatattttcaaatgtttagttgttataaacagtgctttaattacgtacttgtatatgactctctgtgtattcttccagttatttctggagaatataaagctttatcagagattatgtataattcatatttcaacaaataatgccattcatatgtttgtacttcctttttgatttttgagaattttaacatattctgaggtaattatttgcaagtattatgcttgcattttctcagtcttcagaaatagttctttgccttcattgggcattatactaacattgaaatttagaaaataattatattaagaataaacagtggcttaaaaagtgtggcctcactatgtaggccctaaaaagaaatagaaaatattaaagatttatatttaaagycaataatgaaaaatgagagttaataagattatataaaactgctaaaattcacaagagttacataaattaatatatactgctctgttcagagcaatatagtgtacaaacaaattacaaaataattgatataaactggcctaaatggcaaagggtttgtaattatctgaacacatgtactttataaataat

SEQ ID NO: 105382 - DNA, 339 bp, Homo sapiens
taggtctttttctaacatgcaaaataaagagttaaagatagtgttctatattcaggctgttgcaaatcaatggggtgtaaagagagtaaaaggtgatttgacatattaagggatattatctgtaggttgctattggaacacagaaattgtttcaaatagcttgaaaatcacttcccttgtcttacataacaagatatacttattttcaatcttttaatattggatatattgatattagagacatgatataataaacgaagcagtgyttcatattatatcatattagagttttaacacattatttgggtgctaaacatttaattatccaataaacataaa

SEQ ID NO: 105383 - DNA, 576 bp, Homo sapiens
aagaatggatttaggcatagaaattgtttgggtattaatacctagaaactatgataaggatctacttgtgattgttcaaaaggtagatgcagagacatgtgactggggtggttatatttccaacaaagatatttgcttctcctttttacagtgtagacttgctctttagtcagaatggttagccagggactatatttcttgaactcccttagatcccagtaggactttggcatagtacratgtaaattaatgttattttggccctgttgctgactgctggatggatacagaacaattaaggagctgacacatttgcaaggaaaaaaaaagttgcaaggagcctcaagttctgaattagcacacatagggaagtctttggacaagcaaggtgtttttattgggaaagtttatgttttcttatattacataaattattttatcctaaataatacaggatttaaaatcagcagaacttaggggctgattcaatgtgaacatgtgttcttgtcatgggggagggagttactgtattagatattatttgcaggtgaaactgagggaaaaaaggtcctgatt

SEQ ID NO: 105384 - DNA, 576 bp, Homo sapiens
aagaatggatttaggcatagaaattgtttgggtattaatacctagaaactatgataaggatctacttgtgattgttcaaaaggtagatgcagagacatgtgactggggtggttatatttccaacaaagatatttgcttctcctttttacagtgtagacttgctctttagtcagaatggttagccagggactatatttcttgaactcccttagatcccagtaggactttggcatagtacaatgtaaattaatgttattttggccctgttgctgactgctggatggatacagaacaattaaggagctgacacatttgcarggaaaaaaaaagttgcaaggagcctcaagttctgaattagcacacatagggaagtctttggacaagcaaggtgtttttattgggaaagtttatgttttcttatattacataaattattttatcctaaataatacaggatttaaaatcagcagaacttaggggctgattcaatgtgaacatgtgttcttgtcatgggggagggagttactgtattagatattatttgcaggtgaaactgagggaaaaaaggtcctgatt

SEQ ID NO: 105385 - DNA, 605 bp, Homo sapiens
ttttctttggaaaaaataaggatattctcttatataaccacacaacagtgatcaaaattaagaaatcaacaatattacaatactattgtgtaatctatgaacaagtctagctatataattagcaggacccagtgcaaactgataattcaaggcattggcaggggaaatcagtttcctctccagtggacccaccaccccaacccrtggtggacaggtgatctccaagtgattccaacttctgtgcctggacatactcagtatatcctggatcagggttgagtgagaaacctttgctgaatgcccacagaatacactatcgtgcaggctgctgtcctgagccaaggagtcacctccttgccccaagctcccccaaactcagacatcctgtctggtgacggagctgctgatgcagttttggggcagagagtggaatgtcagcaggaactgggattccaaaaggtctgaatcaagtaactgagaacccatcctatggaggttgcaggatgtcagattatacttgaaccaaggcccttggtgtctgtcatcccattgggctttacttacaaaacacaaattcagagataaaattggtaagaatttcaggg

SEQ ID NO: 105386 - DNA, 575 bp, Homo sapiens
atgcacttcatagacaatagtggctcagagccaggtggtgagcccactcataacatggttacataactgtggttatataatgcaagggattgtgcacctgtgctccaaccctgctgtgtcatgctatgccagatgtttaccttggcctactcttgactgctgcacagccattttccttacagcgacagaagataacattaaagggaatgttaaggaaagaccatcaatagtttcaaaggctaccaaaattagatctgaaaaaattctagtgccagaaaattagtttatattcaaatattgagagacagtgtatataacttactaggtaagagtagattcaggagtgtgttgtctgtttctgccacttaccggctatgtgatttggtagttatgtcatgcctagcctcagttttctcatctgtaaaattggagtgataatagtggccacttcatgaatacatcatgagtattaaatgaattaatatttgtgaaatgcttagccggtatctgtaacatagacctatctawctgtatctctgtaactatcatatatctcacatgttctggatatctag

SEQ ID NO: 105387 - DNA, 556 bp, Homo sapiens
gtcattccatcccagcaagagccactcctgactcttaagagcagggaaagctcagcccagcaggagtctgcggagagagctgggcaggggaacacacttgagtgaaggaagggctcctctgatagcacgggatacaaccacatcaaacccagggcaagcggaggggaagcccagtccctgggtattcatttcattaacaataaagagcaatcccatttagagactacctgtttttctaactaaggtctatacaccctgttagaggaaagggatttaaagaaagttaggaaagaactgggctgcaaggagagcaagagtggagggatgtaaggagaggagaaaagaccctcctggtgcctcaccagggaaacagaagaaagaatcactacacttgttgagcttctgcctagatagtgcctgctgkaggtttccgctttgctgtccacatccacctaccagcctctcctcagtgcagtagcaggagaagcacacaattaacccctgatcctaatctcctattaatcctcaaatcagagaaagagagaatctctggaaa

SEQ ID NO: 105388 - DNA, 591 bp, Homo sapiens
gtgaatttattgggcctggtcactcatttcacacctcctgggagacagtatctccctcatgtcccgatcccacaatggtgatgggagtgtttaacacagaaaaacagtggtttccccagatttcccattgcaacgacaatgtttcaaaaagctttctcccaccattgtcactagctcctctctcctgactttgcagtactgtcaattaaggagtaagattctgccctaaatgcaaacattcaagcatagcacactctggtgcaaacccaaggcatgcatttctcttcgcttctatagaaatttgtactcaaagtttacaaatatttgttgagttgggtgycatttgatacaaatatggtatgataagatttcttttgtccctcatagtgtcatctttactcttccttgctctttcaagggaaagtaagtttcataaatttttttaaaaagaccaaaatttgttagcataaaacttgtactattatataagagtattagggcctttaacttttatcatatgctaaaattacttcaacatggatcaaaaacctaaatggaagacctaaaaccagaaaactctttttttttttt

SEQ ID NO: 105389 - DNA, 533 bp, Homo sapiens
gtctggctgctgcagcagctagcatcctcattgtttctctctgtgttggctgcaaattcctttttctgtttatcccctcaggagcctaggctctgggagtgtagcatgggggttggagggagaaaaagcagacgttcccaagactgtcattgccatgggcaccagccatgtttgtggtgctgttactgatatggcccagagatggcatgaacatcaagttgtcaaggacagcctactggttctagttactgaagctaccaccaatgttttacagtggattccctgccagccaccagactgggaaacttcaaattgtttaaaagaggcacctcctatcccccagcctgatgctggagcaagagagctactcacagtgcctgaaatatatcctggttctcatttttcctctgctcttaactctacccagagaccatcgtgcagatctattctgcaggtgggaaatggaggcagagcagaacagactcrcagacttcgatcattccttcaacgaacagttgctgagggcaacaatc

SEQ ID NO: 105390 - DNA, 576 bp, Homo sapiens
gctgaacatcacatttaaaatcaatctcctcaagagaagcaaactgtgaaaagctttttgggggtgccatgacctgcttactttggctcattagcttatcattgcaaaatatgaaaaaaaatttcattggactccaagtctcacatattctggacttgctggccaaccctgccttctttygggggtgtctctgttttctgcaagcttctgatcagggatttatgatgacttagatgaccacttcagagcgggaacttgtgtttttaaaataatctttgtatcatccatgtctacttgaggattgggtatagaatggtttctcctcacattctgaatacgtggatgagtgaatccaggttccagcaggaatgagaggcacgtaccccttcagtctcctcatgcatgtctcatgactggccacaattcccaaggtgatgatttagttcctttcgagggtgactgcttcctattaagacacaaggaatggcctccatttgttgtctgtgtattaaaaataaatacataggcaggaagattatcctttatagaccacagttacacattcttacctaatcc

SEQ ID NO: 105391 - DNA, 620 bp, Homo sapiens
tcctgccttggcctccaaaagtgctgagattacaggcatgatccactgtgcctggcctctgcttcatgcttagtgtctcagcaacacaggacagcttgtcatatgctccccaacacacatattgtgccatctcctgccctccccacttcccatctttacgacatctttccctttgcctcaactgctattctattcttttcattctccatattcccttctctggaaaattcattcttaaagttcagctctgatcatctgagtaataattagaaaacatactcatctgcttggatctgcatagactgtctccagaagaatccagaacaactcggtgacattggttatctctggggagggagtattgagtaggcctgagggatasactttaagagagggaaactttactgtaaaccattttgtgcctgttaaattttgtagcatatgaatatatttctctgttcaattaaatattaaatgaagcatttataatgaaggaaaaagttaatttctaaatttacctttgctgggaagccttccctgactttctcttaccgagttgattgtgtgaagtcctgttcatgtatctgtcaccccctccagtctctactgtcctagaattc

SEQ ID NO: 105392 - DNA, 448 bp, Homo sapiens
agtggaaccatgagagacagagtcgaaagcagcagagcctggaattatttctctaagcaagacccagacgccaggcaggtagtgaaattgctcctgccccacctccatccttgctgcctatttgagaacagagtctgccaacccctcctgaygagagactgacccctcatagccactgcaggctggaagccataagcttaaaccacttccataccatgaaagcaaaatgtatggttggcaaaaagcaaaaaaaaaaaaaaaaaacaaaaactggttactggcgagtgcagaaccacagtctgggtcgatgacaaattatccagcatgaatcttggtgtgacttaggcccttcttagtcctctaaaattcatcacattttgtttattcgttcactacccacttacagtagatgccaagaaatatatataacaagattatagatataaat

SEQ ID NO: 105393 - DNA, 406 bp, Homo sapiens
gaattccagaaggaactactgagatgcaaagaagcacagcagcttttgcacacatgcgtggggttagatggaaaacaagtggattgagggtctgccaatgaaagcgacccatactgaagtccactggctctggttgagacccagaagagtcatgcatcagaatagaggtggacaggaaataccctggcctttgtagggactgagcctgcacagacgacctcaattgcagcctgtatggaggacccctgaccatcccccagaagtagactcccatctcttctgcagcaagataacatgctactaggtctcagttcattgytaaatattttttaaaaagtatctcacatttaacaaaaaaagatcagtcatatggcagcaaaatacaatgtaatatgaccaaaacatg

SEQ ID NO: 105394 - DNA, 590 bp, Homo sapiens
tatgtagtttccaagtatataatttatctgaatgtaataggcattaatatattttacattattgggaccataatacagaaatttctaaatggtttgtaaaataacttgttatttkcaatgttgtaaaagtagttaatacaatggaaaaactcataataagaagatacattttaacatcaagaagtttacccaaggtaattatgaatactacctggcaaactttacagaagctgtggtatcacttctatgatagaagaatagtgtttgcattttgtgtaaaagtacttgcggctgggagtagtggctcatgtctataatcccagtgctttgggaggggaagccaggtggatcatctgagcccaggagtttgagaccagcctaggcaacatggcaagagcctgtctctccaaaacctatgaaaattagccaagcatggtggtgtgagcctgtagtcccagctacttgggagactcatgcaggaggatctcttgagcccaagaggcagaagatgaataaataaatggatgccactgaatgagatgaggtctctcttgaaggagagagaaaaagagatttaaatagtaacaatt

SEQ ID NO: 105395 - DNA, 556 bp, Homo sapiens
ctattagagactccccaggcctcatccacaccctctcccgccactctcggcccactgcagaacgctcatcttacttgatagtcacagtgacatccatcattttgtcggtggtgatagttccaaggacatggtggcgaatggctgtcaatgtcaagatactaggtgaagacctacaaatcaaagcagaggaaacgctagaacctactcattctcagaagatcatcagcaataccctttttgggcatccttcttcaccctaaatatactacagaaaattgctcttagtctggggtaaaataactctggagatccagagaagtattttaaagagtaaactaattctccactccacaactttatgcttccaattcccagtgaaacccacacacttctgtaaaaatacaaaaatggcagacttgaacttgacagaygcccatcggtgagggctgggagatttgacaaagcttctatttaaggcacttcaaaaacacagccctctatcctggggttacagaattcttgggaaagggatcctgtctccggttcctcagtaact

SEQ ID NO: 105396 - DNA, 261 bp, Homo sapiens
taaagaacccggtttttaatgtgaaacctgcggattgttaaagtattagcaaccagtataattttttttttttaacagtaaggtccctgttagagaacaaaatgtcagtctcatgagagtatggagttttgtctgttctgttcactgtactgctatatccacactggggacaaggcttcagtatgtgccrgggctcagtaaatagttgttgactcaatgaacacgatgtaaaaacactcaggatgggagaaagctagagaa

SEQ ID NO: 105397 - DNA, 518 bp, Homo sapiens
aggacgggagattttgttggtggaattatctaacaactttctcaaatctttctgacccatatatttcgcaggtaaaatatataatctcacaaaaagctttagggccgggtgtgtggctcacgcctgtaatcccagcactttgggaggctgaggtgggtggatcgcttgarcccaggagttcgagaccagcctgggcaatatggcgaaaccccatctctacacacacacgcgcacacgcacacacacgcacacacacacacacacgaaaaacacacacgaaaaacgctttaagaatttgtgtaagctggtgtatttttccatgataaatgatcgatacttttttaagcaaaacgtgttaatgttagcatattaaagaaagtatgtaagatttattttaatcctagctctaataacatatgcctagaaacaaattttgatgagttttcttcccctaagcaagaagtgcatgcagtcagtatactttgaattagctctgcaagatgaaacatgatttgcct

SEQ ID NO: 105398 - DNA, 500 bp, Homo sapiens
ttgttggtggaattatctaacaactttctcaaatctttctgacccatatatttcgcaggtaaaatatataatctcacaaaaagctttagggccgggtgtgtggctcacgcctgtaatcccagcactttgggaggctgaggtgggtggatcgcttgagcccaggagttcgagaccagcctgggcaatatggcgaaaccccatctctacacacacacgcgcacacgcacacacacgcacacacacacacacacgaaaaacacacacgaaaaacgctttaagaatttgtgtaagctggtgtatttttccatgataaatgatcgatacttttttaagcraaacgtgttaatgttagcatattaaagaaagtatgtaagatttattttaatcctagctctaataacatatgcctagaaacaaattttgatgagttttcttcccctaagcaagaagtgcatgcagtcagtatactttgaattagctctgcaagatgaaacatgatt

SEQ ID NO: 105399 - DNA, 548 bp, Homo sapiens
cctggcttctgcccataggtgccagtagcataccatccaattgcagtaacccaaaatgtctccagatattaccaagtgtccctgggggtgaggaggacaaagtcacccacctattgagaagcactggcctcgacagtgtgcttagccaaggcttctgggagagggagttakcttaacaccaatgaacaggctgcagcaggtttcagatattttacttcattattttatttttgtggagacaacatcatgctttgttgcccaggctgatcttgaactcctcggctcgagcaattctctgacctcagcctcctaaaatgctgggattagaggcatgagccaccacgtctggactcacagatcatttcttcagtccagtggttactccatcctgcccctaaaggagaaggtagagaagcatcaccctgtccttaaggacagagtttttattttttgtttgttcattctgagacagagtctttctctattgcccaggctggagtgcagtggcacgatcttggctcactacaacctccacctcccgggttcaa

SEQ ID NO: 105400 - DNA, 548 bp, Homo sapiens
cctggcttctgcccataggtgccagtagcataccatccaattgcagtaacccaaaatgtctccagatattaccaagtgtccctgggggtgaggaggacaaagtcacccacctattgagaagcactggcctcgacagtgtgcttagccaaggcttctgggagagggagttatcttaacaccaatgaayaggctgcagcaggtttcagatattttacttcattattttatttttgtggagacaacatcatgctttgttgcccaggctgatcttgaactcctcggctcgagcaattctctgacctcagcctcctaaaatgctgggattagaggcatgagccaccacgtctggactcacagatcatttcttcagtccagtggttactccatcctgcccctaaaggagaaggtagagaagcatcaccctgtccttaaggacagagtttttattttttgtttgttcattctgagacagagtctttctctattgcccaggctggagtgcagtggcacgatcttggctcactacaacctccacctcccgggttcaa

SEQ ID NO: 105401 - DNA, 548 bp, Homo sapiens
cctggcttctgcccataggtgccagtagcataccatccaattgcagtaacccaaaatgtctccagatattaccaagtgtccctgggggtgaggaggacaaagtcacccacctattgagaagcactggcctcgacagtgtgcttagccaaggcttctgggagagggagttatcttaacaccaatgaacaggctgcagcaggtttcagatattttacttcattattttatttttgtggagacaacatcatgctttgttgcccaggctgatcttgaactcctsggctcgagcaattctctgacctcagcctcctaaaatgctgggattagaggcatgagccaccacgtctggactcacagatcatttcttcagtccagtggttactccatcctgcccctaaaggagaaggtagagaagcatcaccctgtccttaaggacagagtttttattttttgtttgttcattctgagacagagtctttctctattgcccaggctggagtgcagtggcacgatcttggctcactacaacctccacctcccgggttcaa

SEQ ID NO: 105402 - DNA, 548 bp, Homo sapiens
cctggcttctgcccataggtgccagtagcataccatccaattgcagtaacccaaaatgtctccagatattaccaagtgtccctgggggtgaggaggacaaagtcacccacctattgagaagcactggcctcgacagtgtgcttagccaaggcttctgggagagggagttatcttaacaccaatgaacaggctgcagcaggtttcagatattttacttcattattttatttttgtggagacaacatcatgctttgttgcccaggctgatcttgaactcctcggctcgagcaattctctgacctcagcctcctaaaatgctgggattagaggcatgagccaccacgtctggactcacagatcatttcttcagtccagtggttactccatcctgcycctaaaggagaaggtagagaagcatcaccctgtccttaaggacagagtttttattttttgtttgttcattctgagacagagtctttctctattgcccaggctggagtgcagtggcacgatcttggctcactacaacctccacctcccgggttcaa

SEQ ID NO: 105403 - DNA, 609 bp, Homo sapiens
gaggctgcagtgagttataattgtgccactacactccagtatgggtgacagactgagatcttgtctctataaagaaaaaaagaagaagaggaggtagaagaagaaagtctgaactactccctgcaggaagagtagacaaggtaaagagccctagaaaagattcgtccccgtgctttcctctagaatgaggactccagtaatttataccagtgctggagcacaggcttgacaatggctggagctcagcctccacagtatctgttgtgattagtgctcaaaagcataaagcataamtggaactaagaagaaacaagatgctcaaggtctccccttcagccttccttccaagtaacagaatcatgatttgatgatttgaccccttcttctaccacctcaatattgaaatctgtttccaattcccgttaccttagagaacaccatcagatgtccattgtatatctcagattcatttctttccaaaaacgaatttaacttgccttccaaataattttactcctaatttttagctcactttctccatgaatatcatcgccattcacccagttacccaaaccaagagcctgaacaacatctttgagtccttctcca

SEQ ID NO: 105404 - DNA, 506 bp, Homo sapiens
cacaggcttgacaatggctggagctcagcctccacagtatctgttgtgattagtgctcaaaagcataaagcataactggaactaagaagaaacaagatgctcaaggtctccccttcagccttccttccaagtaacagaatcatgatttgatgatttgaccccttcttctaccacctcaatattgaaatctgtttccaattcccgttaccttagagaacaccatcagatgtccattgtatatctcagattcatttctttccaaaaacgaatttaacttgccttccaaataattttactcctaatttttagctcactttctccatgaatatcatcrccattcacccagttacccaaaccaagagcctgaacaacatctttgagtccttctccatcacaccctacattcaaccaattgccaccttctcttttatatacctccttaagtcacggccttaatttgggaatgatcgtttctcatttggacttgacttcatggtcaaatatgg

SEQ ID NO: 105405 - DNA, 587 bp, Homo sapiens
caggcatgtgtcaccatgcgtggctagttttcacaatgtttgtagaaatggggccatctcactatgttgcccaggctggtctcaaactcctgggctcaagcaatcctccctgctcagcttcccaattagctagaactacaggtgtgcaccaccacacctggctacaaactctccttgtcaccccctgttgataggtctctttccttcacaggctgagacaactccaattcaactctgaatccccaatacaggacctgcccagggaacagggctcagacatttatgctgggaaatactcagcttttggggctcagcgtccttttctgcaaaaagagttcccctcccaagaggaaatcccctaagcctaaggacaggaggtgatggaaagatggatggaygggcagatagatggatggaaaaaaatggacagttggaaacagacaaacttggtggatgagcagaaataagcctcattctcgcctaacaacgggacagcctgggggaggggtgggacacaccaaggctcccagttgacccccagcaattggacaagagagtttataaaccagcattggggttttaggagc

SEQ ID NO: 105406 - DNA, 506 bp, Homo sapiens
ttagtgtctgccctgctgagttttgaacttgcttgaggcctgtcacctctttcttcttttggcctatttctcccttttggaatggaactgtctgccatatgactattccaccattgtatcttgaagtaaataacttgtttttttttttaattttacaggctcatagctagaaggaacttgccttgagtcttatatgagactttggactttgacctttgaattgttactggaatacattaagactttggggaccattgagattgaataattacattttgtagtgtaagagggacatgagtttggkgttccaagggtggaatgccatagtttccgtctttctgtcaaaaatcatgttggaacctttaagaggtaaggcctaatgggagacgcttgggtcatgggggctctgccattttgagcagcttggtgcagtcctcatatagtgagtgagttcttgctctcatgaaactggattggttcctgtgggaatagattagttgccctga

SEQ ID NO: 105407 - DNA, 627 bp, Homo sapiens
acaatcttttatacttacaaatttatttaccatttcccatgctgtttattccttataggttcaagttgccatctggtgtcatatccttttatcttaaaagcattttctttagtgtttctttagcaaggataagttctttttatttttatttatctggaaatgtctttatttcagctccatttttgaaggatcatttaactggatacagaattcttaattgacagttatttttccctccacttttgaaatgtcgcttcataagacctccatttttttcagataaaaatgccagtattgataatattactgttcccctgtatgtgataagtcgtctcttgctactttcatgattttcttattatccttggttttcaccaatttgwcaaggatggctctaggtgtgaatctctttgtgtttatcctactagagatttgttggacttcttatatctgaagattaatgtttttcatagcatttttgaagttttcagacatgttttcaaatatttttctgccctcttatctctctcttctcctggaattcccattatgcatatgttagtgctcttgatggtatcccataaatttctgaggatctgtttattatccttcattcttttttctttt

SEQ ID NO: 105408 - DNA, 502 bp, Homo sapiens
gctgtaggtccatgccttatggaggcaagtgcagctgctgttttttcccacttcattatgaaatttccctggcaatgggcaattctattagggtaatttatttctcattttttcttatgraaatattcaattaaggatgcttggttaaaactgttaaaatattcagaatattgtatagaaaagctctattaaaattcatttcacagtgttaaaatccttggaaagcagttgattaaaagcagagcatgtcccaaattgcacgaaatttttttaacaaacattcatagcccctaaatgtttatcatcaagaaaattcacgtgatcaatttattccttttcatctgtattatatctgtatgttttaatctatctaatggcctattcctcataactatatgtaaatacagttgcacatttcatatatatgtatgtgtatatatatatttgaaaaacattttatatagacataggtgtataaatataaactctcccattttaaaga

SEQ ID NO: 105409 - DNA, 502 bp, Homo sapiens
gctgtaggtccatgccttatggaggcaagtgcagctgctgttttttcccacttcattatgaaatttccctggcaatgggcaattctattagggtaatttatttctcattttttcttatgaaaatattcaattaaggatgcttggttaaaactgttaaaatattcagaatattgtatagaaaagctctattaaaattcatttcacagtgttaaaatccttggaaagcagttgattaaaagcagagcatgtcccaaattgcacgaaatttttttaacaaacattcatagcccytaaatgtttatcatcaagaaaattcacgtgatcaatttattccttttcatctgtattatatctgtatgttttaatctatctaatggcctattcctcataactatatgtaaatacagttgcacatttcatatatatgtatgtgtatatatatatttgaaaaacattttatatagacataggtgtataaatataaactctcccattttaaaga

SEQ ID NO: 105410 - DNA, 506 bp, Homo sapiens
ttttttgtatttttgtgtggttggcggtaatgtccactttaccatttctgattgtgttttttgtatcttctctttttttttttttcttattggtctagctagtgacstatcaaatttatttattctttcgaagaaacagcttttagtttcatttatcttttgtatggcttttcatgactcaatttcattccattctgccctgattttggttatttattttcttctgctagctttgggttggtttattcttgtttttctatttcctttaggtatgatattaggttgttaatttaagatctttctaacttttcaatatgggcctttagcacgataaatttttccctcaacactgctttgcctgtgtcttagagagcctagaatgttgtatctttgttttaattagtttcaaagaatttattggtttctgccttaatttcattgtttacccaaaagtcattcaggcacaggttgtttaatttccatgtaattgtatggttttgagagtt

SEQ ID NO: 105411 - DNA, 609 bp, Homo sapiens
actcaaaatctgtgcaaaaataagcagcatcagtatcacctgggagcagcttcaggtctcactttagatttactctgaatcgaaatattatatttttattaaaaaattaagamcagatgacaagcttcaactacatctaaattctttagatttactttaaaagaatcagcattttgacacaataccaaagtgaactaaattcgcttttttttttttttttttttgagacagagtcttgctctgttgcccaggctggagcaaagtggtgcaatctcggctcactgcaacttccacctctccagttcaagcgattatcttgccacggcctccaaagtaactgggattacagcacatgccatcatgcccggataattttggtatttttagtagagacagggtttcacaatgttgggtgagctggtctggaactcctgacctcaagtgatctgtccgcctcggccttccaaagtgctgagattatagacatgggccaccatgcccagcctaaatttgctttaatttggagaagtgctggtctagaaaacacaaattccaaggagacagaggttcttaagttgatttctcaagtacaagtccttcaaatgcatt

SEQ ID NO: 105412 - DNA, 387 bp, Homo sapiens
actatattcaactgatttttttttacaaggatgyaaaatcagtttaaaggaaagatatctttttcaacaaatggtgctagagcaattggacattcacaggtacaaaaactaagactgacctaaatttatactttatataaaatttagctcacataaatcacaggcttaaatgtaaaatgtaatattataaaacttaaagttgtgtatggtagctcgtgcctgtaatcccagctactactgaagtggctgaggtggaagcatcacttcaatccagcagttagtggatgcagtgagcaatgatggcaccactgcactacagcttgggcgaaacctcgtctcaaaaataattaataaataaatacattaaacttttaaaatagaagaaaa

SEQ ID NO: 105413 - DNA, 387 bp, Homo sapiens
actatattcaactgatttttttttacaaggatgtaaaatcagtttaaaggaaagatatctttttcaacaaatggtgctagagcaattggacattcacaggtacaaaaactaagactgacctaaatttatactttatataaaatttagctcacataaatcacaggcttaaatgtaaaatgtaatattataaaacttaaagttgtgtatggtagctcgtgcctgtaatcccagctactactsaagtggctgaggtggaagcatcacttcaatccagcagttagtggatgcagtgagcaatgatggcaccactgcactacagcttgggcgaaacctcgtctcaaaaataattaataaataaatacattaaacttttaaaatagaagaaaa

SEQ ID NO: 105414 - DNA, 387 bp, Homo sapiens
actatattcaactgatttttttttacaaggatgtaaaatcagtttaaaggaaagatatctttttcaacaaatggtgctagagcaattggacattcacaggtacaaaaactaagactgacctaaatttatactttatataaaatttagctcacataaatcacaggcttaaatgtaaaatgtaatattataaaacttaaagttgtgtatggtagctcgtgcctgtaatcccagctactactgaagtggctgaggtggaagcatcacttcaatccagcagttagtggmtgcagtgagcaatgatggcaccactgcactacagcttgggcgaaacctcgtctcaaaaataattaataaataaatacattaaacttttaaaatagaagaaaa

SEQ ID NO: 105415 - DNA, 576 bp, Homo sapiens
gaaccacataacaatgtttgagaaattgacagactatatatatgagggtgttttcttgtgagtatatatatatatatawacctacctttaaaggccaaaggagctgagagtttgaagaatgaggctgacaaatcaagtttctcagaaagaaacatttaagaggaacatttattaatagaagctatgtctcagatagctgaagatggtggaacctcacactgtgaccccctaaacccagacacttatcacaggaaagggaatgtgaaggacaattgaaatcactatataaatttgcctaagggtaggatttgtgctaagtacctgttcacaatagcatcagggttgttttgatttaagggtagggcttatagaactgtaggtttcaatatatgacataggtatttgaaaccctcaccaaaaaacattagaggaagtaactctgtcatcattttaagtttcttttttttttttttagtaatttaaaatcttaaagtctggttatgttaaattaagtaatcttaagtttctcactaaaaattagtattgctaagcattaaaagaatagttttaagacag

SEQ ID NO: 105416 - DNA, 576 bp, Homo sapiens
gaaccacataacaatgtttgagaaattgacagactatatatatgagggtgttttcttgtgagtatatatatatatataaacctacctttaaaggccaaaggagctgagagtttgaagaatgaggctgacaaatcaagtttctcagaaagaaacatttaagaggaacatttattaatagaagctatgtctcagatagctgaagatggtggaacctcacactgtgaccccctaaacccagacacttatcacaggaaagggaatgtgaaggacaattgaaatcactatataaatttgcctaagggtaggatttrtgctaagtacctgttcacaatagcatcagggttgttttgatttaagggtagggcttatagaactgtaggtttcaatatatgacataggtatttgaaaccctcaccaaaaaacattagaggaagtaactctgtcatcattttaagtttcttttttttttttttagtaatttaaaatcttaaagtctggttatgttaaattaagtaatcttaagtttctcactaaaaattagtattgctaagcattaaaagaatagttttaagacag

SEQ ID NO: 105417 - DNA, 486 bp, Homo sapiens
taaatatattatgacattacaacatattatgatatcataattcatatgtattatgacatcacaatatattatgacatcataatgcacacacaacatgacatcataatatattatggcatcataatttatactacaacatcacaatatatcatgacatcataatgcacatgtattatgacatcaaaattcatagrcattatcacgtcacagtatattgtgacaccatcatcagtatgtgttatgacatcacaatatattatgacattatacttcatatgtattatggcatcacagtacattatgacatcgtactttgtatataatatgatgtatcatgaattattatgtaattgatatgtattacatatctattagatggctctggatgtcttgggctctgtggggcaggctgggggtcagaggagacacacatgctgcagatggggagactggggcacagggtcctggggttccaggagcagtgag

SEQ ID NO: 105418 - DNA, 486 bp, Homo sapiens
taaatatattatgacattacaacatattatgatatcataattcatatgtattatgacatcacaatatattatgacatcataatgcacacacaacatgacatcataatatattatggcatcataatttatactacaacatcacaatatatcatgacatcataatgcacatgtattatgacatcaaaattcatagacattatcacgtcacagtatattgtgacaycatcatcagtatgtgttatgacatcacaatatattatgacattatacttcatatgtattatggcatcacagtacattatgacatcgtactttgtatataatatgatgtatcatgaattattatgtaattgatatgtattacatatctattagatggctctggatgtcttgggctctgtggggcaggctgggggtcagaggagacacacatgctgcagatggggagactggggcacagggtcctggggttccaggagcagtgag

SEQ ID NO: 105419 - DNA, 608 bp, Homo sapiens
actcatttagattgagaagaaagttgaaacttaacccaaggaagccaagcaatccggttaaatgattcaaaacctgaaagataaaatagcaatcttaaraaatatctaaactaaaaaaattcttgagctgaaagatttactgtgaggattttataataaaatcagaagtatttccagcagaatagactaaactgagaaaagaatctcagagctcaaacactgttttattgaatcaacatagtcagacaaaaataaagataaaagaattaagaaaaatcaacatccccattgagaaatatgagattacttagagaacaaatctacaatttatcaacatttctgagagagaaggaaagagaataggcaagttggaaaatatgtatgaagatatagttcatgaaagtacctctaatctcactagcgaggttgccattcaaatccaagagaaccccagtcagcccctagtcagatacaataatatatgacagtctgtattagtcagttctcacattgctataaagaaatacttgatactgggtaatttataatgaaaagaagtttggttggctcacaattctgcaggctgcagcggaagcatggcagcatca

SEQ ID NO: 105420 - DNA, 327 bp, Homo sapiens
aaggtgggcaaatcagttgaggccaggagttcgagaccagcctgggcaacatgtcaaaaccccgtctccactaaaaacacaaaaaacagctgggcatggttactcatgctggtaattccagmtattcgggtggctgaagcctgagaatcttctgaacccaggaggcagaggctgcagtgtgttgatattttgccactgtactccagcttgggcaacagagcaagactctgtctcaaaaaaaaaaaaaaaagaagcaagtgagtaagagagagaaaactataaaatcactgaacaaagtgtaaagatgttaattttcccacaacgtta

SEQ ID NO: 105421 - DNA, 549 bp, Homo sapiens
aggcagcagccagccctgcctgggccgcggccgccggcctcatgagcctggcattcctgtcgccccctctccccatagcttgcctcctccttctcacagtcgggcgcccggctcctcgagacgcaggaccacctcagatctccagtcctgcacctgccggctgagcaaacgaggagacggggagaaaagctgtctgtcgttcctgaaggaacaggacctccgcactccaagaaggaatcgggcgcccagtgggggctgcaggagcagaggacggtggcggcagtagcaggagaggcaggagtaggagcagtggcttctctggaggtggcactgtctgcccccttgagcctcttcctaacgcagtcttgattcaaaatccctgctcaccacggatgcacagtcacagctgaagattgtagttatctaggaggattctttcttagttgtaaatctatgttttatataggagttttttcgttgtttctctcattctttyttgaaatttcatattactattttttttttttttttggtaagttccttgacatt

SEQ ID NO: 105422 - DNA, 605 bp, Homo sapiens
ctactgcctgctttttatcttgtgtatttattacattttcacgtgtcttcacgcatcycttgaattggaaattgtgccctggagactgtatacaagactggattaaaaagactggattctgttttgtccctgtgaagagtgttgtttttaaaagatggtgttaaatgggctggattctatcttcaatacttatctctcctatggaagtcatagccaaaatatgcattcagtttttatatacacatatttcatgtatgtattgtatatagaaatgtttctataatgatatataataatttacccaggattcatcatttttctgtgtgagagtgttagttcagttagctacttcatcattagtggaagccagaacctcagttttgatttttgagtgtaatataaaaaattacacagtatggatacttttacatcaattttttaatgcaatattatatttgtgatatttatgctgttacagatatctacagtttgttcatttaaaaaagtccttttttacattgtggtaaaatatacataaaattaaccattttaacaatttttaaaagtgcaggacagaggaattaatcatactcacattgttctac

SEQ ID NO: 105423 - DNA, 584 bp, Homo sapiens
gagcatctcaccaggtagacttggactcaggccctgttgcagcaatggatactgaacttgttcttctaactctgctgccttaggtcttttatggagattgaagctgcaaccagcatgaagactatgtgacagtgtaaacttaatgtgggtatgagcagatctaagtggagcaaggagtggacggtaaaagacattgtcatgggtgaaaggtgactatctgaggcagtgactatctgaggccaaatttaccagttgtgggttaaaaaaggcagatttattagagaaagtatgaaaatatgttgcaagggagcaatgggcagaatcagcaagaaaggagctgactccagggaarcaaaggcttgctggaaattttataggatggttcttgagcggccgagtactgcatgcagtactgattatggcaaggttacagggcactaacttgcaatttttctatcagccaagggtctggtgatacctggacataggaatattgtgagttatttgcacagaagggctgtgtcctggaccgtgaagaaagacaaacttgtagcttacctgctttttctttttgcttgctttca

SEQ ID NO: 105424 - DNA, 584 bp, Homo sapiens
gagcatctcaccaggtagacttggactcaggccctgttgcagcaatggatactgaacttgttcttctaactctgctgccttaggtcttttatggagattgaagctgcaaccagcatgaagactatgtgacagtgtaaacttaatgtgggtatgagcagatctaagtggagcaaggagtggacggtaaaagacattgtcatgggtgaaaggtgactatctgaggcagtgactatctgaggccaaatttaccagttgtgggttaaaaaaggcagatttattagagaaagtatgaaaatatgttgcaagggagcaatgggcagaatcagcaagaaaggagctgactccagggaagcaaagkcttgctggaaattttataggatggttcttgagcggccgagtactgcatgcagtactgattatggcaaggttacagggcactaacttgcaatttttctatcagccaagggtctggtgatacctggacataggaatattgtgagttatttgcacagaagggctgtgtcctggaccgtgaagaaagacaaacttgtagcttacctgctttttctttttgcttgctttca

SEQ ID NO: 105425 - DNA, 584 bp, Homo sapiens
gagcatctcaccaggtagacttggactcaggccctgttgcagcaatggatactgaacttgttcttctaactctgctgccttaggtcttttatggagattgaagctgcaaccagcatgaagactatgtgacagtgtaaacttaatgtgggtatgagcagatctaagtggagcaaggagtggacggtaaaagacattgtcatgggtgaaaggtgactatctgaggcagtgactatctgaggccaaatttaccagttgtgggttaaaaaaggcagatttattagagaaagtatgaaaatatgttgcaagggagcaatgggcagaatcagcaagaaaggagctgactccagggaagcaaaggcttgctggaaattttataggatggttcttgagcggccgagtactgcatgcagtactgattatggcaaggttacagggcactaacttgcaatttttctatcagccaagggtctggtgatacctggacayaggaatattgtgagttatttgcacagaagggctgtgtcctggaccgtgaagaaagacaaacttgtagcttacctgctttttctttttgcttgctttca

SEQ ID NO: 105426 - DNA, 509 bp, Homo sapiens
ttctgaggtactaggggttaagacttcaatgtatgaattggatagggacacaactcagcccacagcactgggtgagccaggattctgacacaactctgtgatgttggaagctaccccatgttgtgttggaattcagaatgattctttaactcctttggcctgttgcaatgagatttagaaaataaccacgaaattggcaacttctrtttacaatcactatagttcttttaacaatagtgaacaacaacaacaacaacaaaaaatgcaaggcaaggcccaaagcaaagcaattgatttgtctctaccacaggcaaatgtaagatgctgagcctttatatagctgtcttgcttaattttttcccaaaaggttccacaaatagagaaagacccaaaggcttctgcaaacctgtggctgagatttagctgcacattcttgcctggggctactatccacctccatctcctgcctgaggaccctctggcgggattaccagcccagagccagggag

SEQ ID NO: 105427 - DNA, 509 bp, Homo sapiens
ttctgaggtactaggggttaagacttcaatgtatgaattggatagggacacaactcagcccacagcactgggtgagccaggattctgacacaactctgtgatgttggaagctaccccatgttgtgttggaattcagaatgattctttaactcctttggcctgttgcaatgagatttagaaaataaccacgaaattggcaacttctgtttacaatcactatagttcttttaacaatagtgaacaacaacaacaacaacaaaaaatgcaaggcaaggcccaaagcaaagcaattgatttgtctctaccacaggcaaatgtaagatgctgagcctttatatagctgtcttgcttaattttttcccaaaaggttccacaaatagagaaagacccaaaggcttctgcaaacctgtggctgagatttagctgcacattcttgcctggggctamtatccacctccatctcctgcctgaggaccctctggcgggattaccagcccagagccagggag

SEQ ID NO: 105428 - DNA, 630 bp, Homo sapiens
acattctcaattgcagaatgactttcattaaaacccatggattgaggcacttggaatttgtgaataattcttactttgagctctggctctattatgcctctgtttggagttgatgtttcttagggagggtgagactccacttgttcatcaagctgctattttagaaataatgccatcaaaatcaatttaatgagcatttgtttagcacccactgtgtgccaggctctgtgctaggagctgggtactgggaatagatatcccttggctacatccattcaacaaatgtrttcaatagcaacacatgccaggcactgtgtggggtgatgcaggggcaggatatccctagcagactgataagaatacaggcaattacttgtggtagagtcactgtatgtaacaagttgtacctctattaatctgcttcaggtggtgaagggaggagaagggtaactgcattcatctttgaccaggagggtacctagactaagtccatagtgaccaccacttagtggcccatgaaaaaggcagaagtgacaacttctagtttcatgacacaatcagattccaagcaggttcctggatgggggctgtattagtccattctcacaattctaataaagaaatacccaa

SEQ ID NO: 105429 - DNA, 630 bp, Homo sapiens
acattctcaattgcagaatgactttcattaaaacccatggattgaggcacttggaatttgtgaataattcttactttgagctctggctctattatgcctctgtttggagttgatgtttcttagggagggtgagactccacttgttcatcaagctgctattttagaaataatgccatcaaaatcaatttaatgagcatttgtttagcacccactgtgtgccaggctctgtgctaggagctgggtactgggaatagatatcccttggctacatccattcaacaaatgtgttcaatagcaacacatgccaggcactgtgtggggtgatgcaggggcaggatatccctagcagactgataagaatacaggcaattacttgtggtagagtcactgtatgtaacaagttgtacctctattaatctgcttcaggtggtgaagggaggagaagggtaactgcattcatctttgaccaggagggtacctagactaagtccatagtgaccaccacttagtggcccatgaaaaaggcagaagtsacaacttctagtttcatgacacaatcagattccaagcaggttcctggatgggggctgtattagtccattctcacaattctaataaagaaatacccaa

SEQ ID NO: 105430 - DNA, 583 bp, Homo sapiens
ttaggggagaaaactttgaaaagcatctcaatttaacccaatggaagccagaagaggccaagcaatggactagacatggctggaatacctggagctcaatagcagcaacaaggaaaaatttaagaaagaaattaaaatggttcagtaaacctatttgcttaacataaaagaaggcagtaaaggaccaaaaacaagacgtacagaaaaaaaaaaaatagcaaaatggtagacaaaagtgcaactacgtcaatgggttaaatgcaccaaataaaakacagagattgtcagaaagacaagtaagacctaattgaaatactgtctatgagagattcaagttacatttaaaggtgcaaataggttgaaagtaaaaggatttaaaaaaaaaacatgtatattgtgagaacagtggccataagaaagctggagaggctatagtaatatcaagcaaaatagattttaagacaagatatattagtatattatcctataggccaaagaaaaaaattacaggggaaactggaaataacttgaactgtctcagatatttggggttcaccatacccactagaaagactatactcaa

SEQ ID NO: 105431 - DNA, 545 bp, Homo sapiens
cttgcacgaccacctgagctccgcctcctgtcaggtcagtggtgacattagattctcatagaagcgtgaatcctcttgtgaactggtcatgcaagggatctaggttgcatgctccttatgagaatcttatgcctgatgatcttctgaggtggagctgagacagtaatgctagtgtgggcagtggctgaaaatacagattaacagtagcaagaggtttgattgcacaaagaccctaacaaatcaattgcttgcagactcatatcaaaaccctatcagagagtggcaagcgacaattaagctgcatctggtggaaggctttctggtggccagtgagttgatgtacttcaatcgtacagttgcatccgatggcaggctttaagtcagaatctgacatttattttaatccacacatggcctaccattattttatttaccacttctgtccacgcctctttcctgyactgtacaattgtctcagtaacagtttcggtaagcccacaagctaaccctagccaaaatcagtaaaaaacaaatgtcactggaaa

SEQ ID NO: 105432 - DNA, 608 bp, Homo sapiens
agagtccaggaaacatgtgccccagaaggcatgtgcgtttgcaaacccatctgcctaagtccctgatccctgatgtcctcaaatgagctcactgggcagaagctgttgaggatttatcctctttctcttgaagcagaagttccagttctgcctctggctgtgtggctttgtgaataccacttcactgttccggagcttccatttcctcatctttcaaacaaataaatgacacctgtctgccatgggctgtgacctctaacaggtgctcatttaatgagggatcagggcggttcctacctgcagggctgaagtcaaagctgggaatgaccttagaaggacttgggaatgaggaaagtgaccaagccaggacctcagctcagccagaatgcagaagccstgtttgcagaatcggcagcagctccacagcagtggctgtttatcgggatagggaagggccagctgcaagagcatttatgtcaaaaggcccaaagaatgtttggatgctccaagaggagggaaagtccatttgagataaagagcaaacaaagcaataaaaaaaaatcattaagtagacattttttagtaataataaccactaattagcaaac

SEQ ID NO: 105433 - DNA, 608 bp, Homo sapiens
agagtccaggaaacatgtgccccagaaggcatgtgcgtttgcaaacccatctgcctaagtccctgatccctgatgtcctcaaatgagctcactgggcagaagctgttgaggatttatcctctttctcttgaagcagaagttccagttctgcctctggctgtgtggctttgtgaataccacttcactgttccggagcttccatttcctcatctttcaaacaaataaatgacacctgtctgccatgggctgtgacctctaacaggtgctcatttaatgagggatcagggcggttcctacctgcagggctgaagtcaaagctgggaatgaccttagaaggacttgggaatgaggaaagtgaccaagccaggacctcagctcagccagaatgcagaagccgtgtttgcagaatcrgcagcagctccacagcagtggctgtttatcgggatagggaagggccagctgcaagagcatttatgtcaaaaggcccaaagaatgtttggatgctccaagaggagggaaagtccatttgagataaagagcaaacaaagcaataaaaaaaaatcattaagtagacattttttagtaataataaccactaattagcaaac

SEQ ID NO: 105434 - DNA, 586 bp, Homo sapiens
tcaattttcattttacagatgaaaatctgtagatcaataatctcaggtcctcagcagagcatggttttaaacactagttttgcacccttgtctgtcagacaaaaaaaaagcgtattctctctctcttttttttggtgttttgttttgttttgttttgttttgttttgtttcattggagacagagccttcagactagagtgcagtggcttgatctcagctcattgaaacctccacatcccaggttcaagcaattcttgtgcctccagcctcccaagtagctgggactacaggcatgtgccaccacgctcagctaattttttgtgttttagtagagacagagtttcaccatgttgcccaggctggtttcaaactcctgagaccaggcaatctgcttgyctcggcctcccaaagtgctgggattacagacatgagccaccccgtgcccggcccattatgccctttatttctaaagaaaagatgaatgaattaatgtatccattcactcacctatccatcttctcatcatctcactgctactaggctctgagtggaccctcatgatacatatgtgacccagtcaggcttc

SEQ ID NO: 105435 - DNA, 628 bp, Homo sapiens
ttggcctcagcaacgtaccagtgaaaattgtattttaatttttgacttttgttaagaataaatagtcagagatgttttacccctttaggcttctccattaaaagtccatctaaatgcwatcagctttattagctaacatgaaaattaatttttttcccaaggtgagttatcattgtataattccattggttagcatttgccttaaattcaaagcttctcttgaaaggtttagcttagcaatactatctcaacaattcttaggctggttctgaattctaatcttgtcactgccactgctttgttgtattttccctaatcaagtgtgttctaccataggatttcatgcattcctagtaattccttcattcattcacaaatttgcttttccatttatttgttttgcaggcatttacttaatctctcctatgtgaccgactcagctgagactacaggtgcacactaccacaccaggaaacctttttcttttatttttttagatgtggccttgctatgttgtgtaggctgctcttgaactcctggcctcaagtaatcctcccacctcagcttcctgtcaagtttcactattaaaggtcattttttccattagaaccaatgcttcatgaggttc

SEQ ID NO: 105436 - DNA, 654 bp, Homo sapiens
ttggcctcagcaacgtaccagtgaaaattgtattttaatttttgacttttgttaagaataaatagtcagagatgttttacccctttaggcttctccattaaaagtccatctaaatgctatcagctttattagctaacatgaaaattaatttttttcccaaggtgagttatcattgtataattccattggttagcattygccttaaattcaaagcttctcttgaaaggtttagcttagcaatactatctcaacaattcttaggctggttctgaattctaatcttgtcactgccactgctttgttgtattttccctaatcaagtgtgttctaccataggatttcatgcattcctagtaattccttcattcattcacaaatttgcttttccatttatttgttttgcaggcatttacttaatctctcctatgtgaccgactcagctgagactacaggtgcacactaccacaccaggaaacctttttcttttatttttttagatgtggccttgctatgttgtgtaggctgctcttgaactcctggcctcaagtaatcctcccacctcagcttcctgtcaagtttcactattaaaggtcattttttccattagaaccaatgcttcatgaggttcctatgagatcgcatatctgtagtgta

SEQ ID NO: 105437 - DNA, 628 bp, Homo sapiens
ttggcctcagcaacgtaccagtgaaaattgtattttaatttttgacttttgttaagaataaatagtcagagatgttttacccctttaggcttctccattaaaagtccatctaaatgctatcagctttattagctaacatgaaaattaatttttttcccaaggtgagttatcattgtataattccattggttagcatttgccttaaattcaaagcttctcttgaaaggtttagcttagcaatactatctcaacaattcttaggctggttctgaattctaatcttgtcactgccactgctttgttgtattttccctaatcaagtgtgttctaccataggatttcatgcattcctagtaattccttcattcattcacaaatttgcttttccatttatttgttttgcaggcatttacttaatctctcctatgtgacygactcagctgagactacaggtgcacactaccacaccaggaaacctttttcttttatttttttagatgtggccttgctatgttgtgtaggctgctcttgaactcctggcctcaagtaatcctcccacctcagcttcctgtcaagtttcactattaaaggtcattttttccattagaaccaatgcttcatgaggttc

SEQ ID NO: 105438 - DNA, 576 bp, Homo sapiens
taattccttcattcattcacaaatttgcttttccatttatttgttttgcaggcatttacttaatctctcctatgtgaccgactcagctgagactacaggtgcacactaccacaccaggaaacctttttcttttatttttttagatgtggccttgctatgttgtgtaggctgctcttgaactcctggcctcaagtaatcctcccacctcagcttcctgtcaagtttcactattaaaggtcattttttccattagaaccaatgcttcatgaggttcctatgagatcgcatatctgtagtgtaactgacaagamcctcatctgcaaaaagatgtcttgtatatagagggcctttttctattcttatcacttctgagctgcagaaggtctcctaaagatcaatagatgaatatgcaaccaattcggactttaaggcattttacctgatcttagacaattgcttttttttttttttttagaattgaagaaactgaggtccatagcaggaaagaaaagtgacctacctaagatcagggccagggctaggaccaaagcccatgctcttaactcccagtcctct

SEQ ID NO: 105439 - DNA, 556 bp, Homo sapiens
actatctcaacaattcttaggctggttctgaattctaatcttgtcactgccactgctttgttgtattttccctaatcaagtgtgttctaccataggatttcatgcattcctagtaattccttcattcattcacaaatttgcttttccatttatttgttttgcaggcatttacttaatctctcctatgtgaccgactcagctgagactacaggtgcacactaccacaccaggaaacctttttcttttatttttttagatgtggccttgctatgttgtgtaggctgctcttgaactcctggcctcaagtaatcctcccacctcagcttcctgtcaagtttcactattaaaggtcattttttccattagaaccaatgcttcatgaggttcctatgagatcgcatatctgtagtgtaactgacaagaccctcatctgcaaaaagatgtcttgtwtatagagggcctttttctattcttatcacttctgagctgcagaaggtctcctaaagatcaatagatgaatatgcaaccaattcggactttaaggcattttacctga

SEQ ID NO: 105440 - DNA, 576 bp, Homo sapiens
taattccttcattcattcacaaatttgcttttccatttatttgttttgcaggcatttacttaatctctcctatgtgaccgactcagctgagactacaggtgcacactaccacaccaggaaacctttttcttttatttttttagatgtggccttgctatgttgtgtaggctgctcttgaactcctggcctcaagtaatcctcccacctcagcttcctgtcaagtttcactattaaaggtcattttttccattagaaccaatgcttcatgaggttcctatgagatcgcatatctgtagtgtaactgacaagaccctcatctgcaaaaagatgtcttgtatatagagggcctttttctattcttatcacttctgagctgcagaaggtctcctaaagatcaatagatgaatatgcaaccaattmggactttaaggcattttacctgatcttagacaattgcttttttttttttttttagaattgaagaaactgaggtccatagcaggaaagaaaagtgacctacctaagatcagggccagggctaggaccaaagcccatgctcttaactcccagtcctct

SEQ ID NO: 105441 - DNA, 531 bp, Homo sapiens
gaattcctatagtcttcttactgtatcttcagtattcataagctttgttgtatcagttttctgtggttgtgtaacaaattactgcaaacagtggcttaaaacaaccaaatttattgtcgcatggtttctgtgggtgagaagtttgggcacagcttagctgggttctttgctttttccaaaggcaaacctttgaaacacactggtttaatgtcttccaagtccttcacagaaatttcacttttcctctcaaagtgacataaggttcattttacagatgagtcaactgaggcttagaaaatgattttccaaaacacyaaatcaatatatgataagagttggggaacaaattcagattttctctttcaggcctcaagatcttttttggctttcctgtctctgaaggcataatttagagatgtgagtattgatgtgatctacttccaactggcgtttcggcttttcttgtttgtttgttacttcatctccttaatatttatgcaacctggaccaaaaggtctgcctttgtttcaa

SEQ ID NO: 105442 - DNA, 643 bp, Homo sapiens
ttctctttcaggcctcaagatcttttttggctttcctgtctctgaaggcataatttagagatgtgagtattgatgtgatctacttccaactggcgtttcggcttttcttgtttgtttgttacttcatctccttaatatttatgcaacctggaccaaaaggtctgcctttgtttcaattcctatccaaagccctgcagaattcacattagcacttccacaaaagtcataaaggctctgcaaactgctcacagtttaaatatggaagtcaaaaccctaatcacaatttaatataactaaatatgtacatactttatggtcaatcatccagaccatttacagagtcccttggctttgaaattactagatctcaaatggtgccgtagatgagctttgcttgacatgacatatattgaaatagactgtggagcgatcacttagggatgaaaacctcactacagtcttagtgaaccaaagctaagaggcaaattattcaattacagtaaatttacagtagcttaatatttgataaaagtggytctcccatcatcagagcatcttattgaaaacccttgagcagcaaaatagcgccggaaactcttaagatgttttaaccacttattaagaaaattcatctagcttgatc

SEQ ID NO: 105443 - DNA, 569 bp, Homo sapiens
aatcaactggggatttggttaaaatgtgacttctagttaggcctaagtgtctgcatttctaacaagcttgagggtgatgatgcccctgccgctgctctgcaaaagcctcttagagttgcaagaagataaggacactcctggccccacctggaccgggcataggtggagtctccggtgcggtgcctgacctgcaggacaacagaatatagcagacagccctggtggggtttgaacccaagctctataggttcctagctgtgtacagttttggatgagctgtttaacccatctgagaaaattctatcacattggacttgagaaaggacattgagttccktccatcctgactctggcatgctggattgaagggcttggggaagttcatctggccctccagcctccttggataggtgcattcaaatacaaatgccactctgcagcttgctttggagctgccatcatgtaaataaacattccctctgcccaaacctcatcctcatgaagccacgccggctagaaatgttgatttttctaacttctagaatcagagttcgacttcttaatctggg

SEQ ID NO: 105444 - DNA, 569 bp, Homo sapiens
aatcaactggggatttggttaaaatgtgacttctagttaggcctaagtgtctgcatttctaacaagcttgagggtgatgatgcccctgccgctgctctgcaaaagcctcttagagttgcaagaagataaggacactcctggccccacctggaccgggcataggtggagtctccggtgcggtgcctgacctgcaggacaacagaatatagcagacagccctggtggggtttgaacccaagctctataggttcctagctgtgtacagttttggatgagctgtttaacccatctgagaaaattctatcacattggacttgagaaaggacattgagttccttccatcctgactctggcatgctggattgaagggcttggggaagttcatctggccctccagcctccttggataggtgcattcaaatacaaatgccactctgcrgcttgctttggagctgccatcatgtaaataaacattccctctgcccaaacctcatcctcatgaagccacgccggctagaaatgttgatttttctaacttctagaatcagagttcgacttcttaatctggg

SEQ ID NO: 105445 - DNA, 554 bp, Homo sapiens
gtggatggatagatgaatacatagatggatgcgtggatgagtggatggtaggtggatggatagatggatggatggaaacatgcatagacaataatgtgaattattaggcagacagataaatcaaaagtctagtggatgggatgctggtttgatggacaayaattgattaatgagtgaacttaaggtttacaacttattacttctggaggcttcatcttctcagaggatctttttggtgaaaaacaaagctattatatatgtagtttagtggtagaaagtagcaaacttcagcaacttaataaaaatacatggcttctagaacctcaatcacttttaaaagatagagaaatcattcagaaatatgtcttcttttgaacaataaacccacatatatgttgttgaaaaaatgtagatatatttgccaaaattttggagttcatagctgcacaaacaagacaactggttataagtattaaatgagtgaacaaatataaaagcccctaggattatgcccagcatttagtagaaacttactgatggctgaatatcaataa

SEQ ID NO: 105446 - DNA, 526 bp, Homo sapiens
taatacatatattacatattatatatgtacatataatacatacattatatgcctatacatatataatacgtatcatacatatatattatgtgtatgatacatataatagatatatgtatcatacatataatatatatatgtatcatacatataatatacttataatacatataatatataataaagataaaaataaacatttgtatattgaaaatktaacacattcataaactttaaaaaaaacctaatatgaacatgttcccatattactaaatattattttacagcattatttttaatagctgcagagttattcattgtgtaagtgtgtctgaatttatttagccagtgacctcctatataccatcacatttgccttccattcaatattattcatataattggcatgcttcaaaagttcgtgaatacaaaaatggggtcatagttcatcaacatccaaatcgtgatatctgctggcccctacctgttgatgcaagaaccttgtctccttacagtgcttgttggt

SEQ ID NO: 105447 - DNA, 542 bp, Homo sapiens
gagacgtgagctgaccctttgtggttgggtctagggaacacctatccctattatgccacaggtttaacgtgccagcactggattgcaaaaggcagtatgggataaggaaacactcatggaacttatagtcagacaagcctggggtaaagttctgctttatccactcactacctgcatggtctcctacaatcttgctcagcttaatttgggaataacagtatataacttccggttggtttgagaatttcacaagataagtaatctatatatctatgacctaaccgttgccactagaacctagtagatgttcaataaattatattatttttattattttaccatttccccttagatcatggcttcatttttttgcaagtatggaaaacaagccatttaagtacctcttataagtttcaagtgacaattagcaaggctttcaaaccacaatatttccttttaggaakttttaaaatatttattaaaataacagatgaatacaattttaaaaccaaatgataatacaaagattaggacatgaaatg

SEQ ID NO: 105448 - DNA, 582 bp, Homo sapiens
ttccttgtatgcatttagggaatggagctgtgctttaaacataataagcagttaataaatatgtgtgggctgaactattcatttgataacaaactgctagagagttttctgcttggatgcataaacataaacatacacaaggggatatatttagccattttcttgctgttttaattttatacgtgttgcatatgtatttctaccagctatattggcttcctcttagaagtagaaaagataagaatcaattagtctctcaattaatcaatcatgtttttatcatttactgtcctttacagtagaaaatcttgctgagttgtttgttttgtttttatttttatagtttagcaaaatggatgttactttacctctgtttaacaattaagaaagagagacccctgaaatgtttccccaaaggcatggccaactggggaagactgaggaagtgyatgagtaatgggtccccgacatggatgccaacaaatagtgttggattctatattttgaagctgaaacaagattcagaataattttggccagatgtcaacaactttttcctcttttcttttttgtaatggggca

SEQ ID NO: 105449 - DNA, 584 bp, Homo sapiens
ggtcctggctctagagcttctgaggagcctgggagaggaaaggaggttgcaaggctcatttcccccaaatccagtcccagctccatctagaaagaggccccccgcataccaagcatgtgtccaatcactccagaaaagcccctggcaggggagcatccaggctcattccagagaggtcaakaatgggaggggaagaagaggagtaagaataaacatgtctaaaaatagtgcttggatctccgaaacccacaacaaaacaggaaagagagggcaggagaactgggagggagaagcctggaggtttggctgagggaagaataaggtgcactgccctggtgggggctgtttctctgactttcctctctgaagtcttgggagctaggctggatggagggtctgagcataaaggccaaatatctctggagtcatgagtgtttccagatttcacaacacgtttgccatgaagccttagccctagcaaacttcatagcatttagaagtcctcgactgaggcagagggaggcttttaagagggagcttttttttttcttccccctttcaggaacagatgtttgagcaacatt

SEQ ID NO: 105450 - DNA, 603 bp, Homo sapiens
agtcccaggcaaatgaagttgataagtggtgtttctgttcttctcatccactcataaaacggggactctgccttgggtgtggtgtgctataaatgtgggggagcctattgcttaccctggcttgcagtgcagtggttctgctccaggaaagataagtcaagaggatctcaggttactgaccttctctaatgagtgctcaactcctgcagtaggggtgccactgagagatgggtttgtcattttcttactcacagttccaggaccttggctcaacaattttgcctgtgtggagaaaagcaggccataaagccaacagttcttaatatctttctaaaagcaataarctcatttgcaacagaacttggagaatttccagtctgtggtgactctaaagaacaagaaaagatgtggtggaagagaaatgtcaggaggtttctagattgaatgaagatttagcttagattattggtcagttagtttgcagaagagaattgaggcataagacagtggagaggagtctactttagtcagaacaaatactgaatatagacctcagaaactagttgtccaaagattcacagtatgattgcattaatttgtaga

SEQ ID NO: 105451 - DNA, 465 bp, Homo sapiens
gaggaatcatcagatagagaaaataacmcctgtattattgaaaagctagttggagatgcagtgtatttgaaagaaaaaaataagtttccaaatttttcacagcttatcttctttatggctctttaaaaggtcacttatgggccgggcgcgatggctcacgcctgtaatcccagcactttgggaggccgaggcgggtggatcatgaggtcaggagatcgagaccatcctggctaacaaggtgaaaccccgtctctactaaaaatacaaaaaaaattagccgggcgcggtggcgggcgcctgtagtcccagctactcgggaggctgaggcgggagaatggcgtgaacccgggaagcggagcttgcagtgagccgagattgcgccactgcagtccgcagtcccgcctgggcgacagagcaagactccgtctcaaaaaaaaaaaaaaaaaaaaaaaggtcactgatgaa

SEQ ID NO: 105452 - DNA, 539 bp, Homo sapiens
agcttgggaaaattgtttaaccttactgagttcaataatgttatctcctaataatatatgaggatgaaaattctcttacatgatttaataaaaatatgtgcctagataaagcagttgtgctactttgcagttttattgctaactggagaatgttcctcttacataacacatccatctggaatgccgcttgtcgtgtagagaattgccagacttaaaaatccatataaaatgatctggcctttagttaatgactctggacatcttaaagacaaagtattacacataaacttttgaatcttttttacttcactgtgcaatttatgtggcattcaagcataaagcattggttgcaaataaatatataatttacatttgtttctatatacttcactttctttaacggccagtggtagtggtagaatcaattcacatgaattatttttaaaatttatawaataaataaaaattactgggtaagacaaagtatacttggataatacataataaaaaatcatattggattatgcaattaaaatgga

SEQ ID NO: 105453 - DNA, 562 bp, Homo sapiens
agttcctggaatcaagggcaagcatctcatcacacagcattgttcataaagaagtttgggtcttctttgaaaattttaaaataataaagtgcttttaaatttatgagtttttttttttcaaaaataaagtgcayatgtatcatttatagtcattgtttttcagcaacaataacaatgatcgtgacatgttggtatatcaattaaaattctgttttctcatttagcatgtctgcaaagtagattccagtttatagacagaaaatggggacacagagaggttttatttcttgtctaagtcacacagcctttgactacagaatcgggactgcaaccctgttctgattcaaatcccatcctattcactacagctatagactctgccagatttttttccttccagctttatgcgagtaaaaaaaaaaaaaaaaaaaaaaaaaaaggtccaagggcagaaatccctgcatgagcccattcctgttggaagatggccaagttccgaaatggggttcctctgtacatcacttgctatctctagcccccagcttccagctcaaagaattag

SEQ ID NO: 105454 - DNA, 562 bp, Homo sapiens
agttcctggaatcaagggcaagcatctcatcacacagcattgttcataaagaagtttgggtcttctttgaaaattttaaaataataaagtgcttttaaatttatgagtttttttttttcaaaaataaagtgcatatgtatcatttatagtcattgtttttcagcaacaataacaatgwtcgtgacatgttggtatatcaattaaaattctgttttctcatttagcatgtctgcaaagtagattccagtttatagacagaaaatggggacacagagaggttttatttcttgtctaagtcacacagcctttgactacagaatcgggactgcaaccctgttctgattcaaatcccatcctattcactacagctatagactctgccagatttttttccttccagctttatgcgagtaaaaaaaaaaaaaaaaaaaaaaaaaaaggtccaagggcagaaatccctgcatgagcccattcctgttggaagatggccaagttccgaaatggggttcctctgtacatcacttgctatctctagcccccagcttccagctcaaagaattag

SEQ ID NO: 105455 - DNA, 562 bp, Homo sapiens
agttcctggaatcaagggcaagcatctcatcacacagcattgttcataaagaagtttgggtcttctttgaaaattttaaaataataaagtgcttttaaatttatgagtttttttttttcaaaaataaagtgcatatgtatcatttatagtcattgtttttcagcaacaataacaatgatcgtgacatgttggtatatcaattaaaattctgttttctcatttagcatgtctgcaaagtagattccagtttatagacagaaaatggggacacagagargttttatttcttgtctaagtcacacagcctttgactacagaatcgggactgcaaccctgttctgattcaaatcccatcctattcactacagctatagactctgccagatttttttccttccagctttatgcgagtaaaaaaaaaaaaaaaaaaaaaaaaaaaggtccaagggcagaaatccctgcatgagcccattcctgttggaagatggccaagttccgaaatggggttcctctgtacatcacttgctatctctagcccccagcttccagctcaaagaattag

SEQ ID NO: 105456 - DNA, 574 bp, Homo sapiens
tagtaggaacctttctcaaaaaattaaaaatggaacaattgtatgatctagcaatcccactactaagtgtatatccaaagaaaatgaagacagtatgatgaaaagatatctacactcttatgtttattgtagcaccattcacaatggccaagacatccaggcaaacttagatgaatggataaataacatatgatatgcatacacaatggaatactattcagctttaagatagaaataaatccttttatttacaacaatatggatataccaggagaacattatgcttagggaaataagccaggcacaaaaagccaaatactgcatgacctcaattacatgtgaaaccttaagaagtcaaactcatagaagtagggagtagaacagtggttaccaggggctggrggtgtgggtggagatggggaaatgttggttaaagggtacagagttttaattaggaggaaggaatacaatctggagatctattgaacagcatggttactatagctaataataatgcactgtatgcttgaaaattgctaagagagtagattttaaatattattattacaaaaat

SEQ ID NO: 105457 - DNA, 589 bp, Homo sapiens
ctaggtagatggggagaacagcatagaacaacatagaatttaatctactacaatttaactgaaaattttcttcaagcctctgaagtcatggcatatgctgtttttcttagtttttcaactgattttggacattatgaagttcagggaaggattgcaagaactttctccacactccagcctctattccatcttgagttcatattttgctggccacacatgacattttataagcgcttgaaaaataaatctctaataaagcatgaggacccaagattggttctatrgagatatggtaattgaattgaggatacgattttcctctctttgttctgtttggtttgaaatggcacacttttcaaagcttttacaacaatagacttatacaaaaaggtaaactcatgactatatctattagaataaagaagtgtcagaagtgctgtgtacatgcatgtatattagaaagcttagaaatgccaagcattttgacactaaatagctacaaagcttccaaagtcaacatatgccagcaggtgatatacagatcctgatcaactctggacccaacagcaaagatcaaggctgcttactg

SEQ ID NO: 105458 - DNA, 576 bp, Homo sapiens
agatttataaactctaattaagtggcatttttaaaaactgcaatgctatagccacactttcattaagaacaagatccaaatcattatgtaatgaatgggggaaatgctatttactacaacttctaagaaaggaaaatcctactgaatgaactcttcccaccccaccttttcctgctgaggacctcaattggttttgcttatgggctaagtttatgatcagaggcagaagagacgtaattttctctattaatacagagagagaatttggagtttgtattagtccgttctcatgctgctataaagaactacttgagactgggtaatttataaaggaaagagggttaattgactcacggttctgcagggctggggaggcctcaggaaacttacagtcatggcagaaggcaccacttcacagggtggcaggagagagaataagagcccagcagagggggatgccccttacaaaaccatgggatcttgtgagaactaactcactatcatgagaacaggatgagrgtaattacccccatgattcaattacctcccactgagtctctcccacaacatgtgggg

SEQ ID NO: 105459 - DNA, 609 bp, Homo sapiens
tcataaaaagaggccaggcagccgggcgcggtggctcatgcctgtaatcccagcacttagggaggccaaagcaggcggatcacgaggtcaagagattgataccatcctggccaacatagtgaaaccccgtctctattaaaaatataaaaattagctgggtgtggtggtgggcacctatagtcccagctactcaggaggctgaggcaggagaatggtgtgaaccccagaggcagaggttgcagtgagctgaggtcacgccatagtactccagcccggcaacagagcragatgcagtctcaaaaaaaagtaaataaataaaaataaaggccaggcatggtgcctcatgcctgtaatcccagcaatttgggaggctgaggatgatgaatcacttgaggtcaggagttcaagatcaacctggccaagatggtgaaaccctgtctctactagaagtacaaaaactagccaggcatgatggtacatgcctgtagtcccagctacttgggaggctgagacaggagaatcacttgaactgggaggcagaggttgcagtgtgccgagactgtgccactgcactacagcctaggctgagactccatctcaaagaaaaaa

SEQ ID NO: 105460 - DNA, 609 bp, Homo sapiens
tcataaaaagaggccaggcagccgggcgcggtggctcatgcctgtaatcccagcacttagggaggccaaagcaggcggatcacgaggtcaagagattgataccatcctggccaacatagtgaaaccccgtctctattaaaaatataaaaattagctgggtgtggtggtgggcacctatagtcccagctactcaggaggctgaggcaggagaatggtgtgaaccccagaggcagaggttgcagtgagctgaggtcacgccatagtactccagcccggcaacagagcaagatgcagtctcaaaaaaaagtaaataaataaaaataaaggccaggcatggtgcctcatgcctgtaatcccagcaatttgggaggctgaggatgatgaatcacttgaggtcaggagttcaagatcaacctggccaasatggtgaaaccctgtctctactagaagtacaaaaactagccaggcatgatggtacatgcctgtagtcccagctacttgggaggctgagacaggagaatcacttgaactgggaggcagaggttgcagtgtgccgagactgtgccactgcactacagcctaggctgagactccatctcaaagaaaaaa

SEQ ID NO: 105461 - DNA, 544 bp, Homo sapiens
tgggtcatcattgcatgtgcaatgtccagaacagttcctgatacagaatgtttgtcaagtaagtgcataaaactttgctgtgtcctgtgaagcctggagcggctttctggacccattatatcaaatctcagccagcttcctgaagattcagagcagagaagagtactttgtcattttggagcctttggaatgtgccacatgcaacacttacaatggtggttgataaggacttttctggatgtgtatgatattgtaaaaacttcatttgttgagtasttactttgtactatacactatgccaaaatttacatttataactcatttaatactcgtaacaactctgtgaagtaggttctgttattatcctcaatatttgaatgagaaaactaaggaacaaagaagttcagggacttattcaaggacagcccaccagacaatggaggcacctatatttgaattcagatgtctgctgcagagcctgagttcttaatgttggatgttattgcctctcaacataaccataacagtctttgactaatttttg

SEQ ID NO: 105462 - DNA, 570 bp, Homo sapiens
agtcatcgtgacatagtagaattttgcttattaaaaagacgccttcgttagtgaaactccacctttgcacctctcccctcttcccccgtaccttattaggagttcacttcagcagttgcccactttctcttcatttcttattctctacctgtctttttctcataaactctgctcaagcctctcaaatttaaaataatcttttattttccrtatttctctccttctctcaatattcacatttttctctttgccagagctcttaaaagaaagggtgacaattactctctgaatgttttcactgtcactattagtactgagaaaaattgcagtggattaggttttaaacaaaccagtagtagtcccttttcaaagcaaggctaaattctctttgggttctgcctttgttatcaatgcagttaggttgacctttagactgggtatgcctaaaataggctttttatacctagtatctgccatttaaaaatttcaggctcagtttttccagtgtgcatgaggattgttttccataatgttgaatattgagcaaaaaggaacaccaagaaaaataaa

SEQ ID NO: 105463 - DNA, 635 bp, Homo sapiens
tgtctacccaaaaccctcttgacatcttcagtcacscaggagtcccattaacctagaagtgaaagagcagagagaagactcatttgtgcctgtagttgggaaaatgcaacttcactttgggatgaacctgcagcattttacatgcccacacgacggcagtattgccccaggatgttaatgcaaccatcagggagcctcctggacagctggctgcagagcctgaactaggggaacgttttgaatactggtgaaaagccaaaaagacaccaagcccaggattgaagagggttgcacagggaatgtaggaatctggggaagtagaaatctgggccagcttccaattcaaggattgtgtttgtagaaatagtataattttatatatccaggtgctggcaactttttcagaaagtgaaacttatgagcctttttgattttgaattacattttcctatggtttctcctgtcatttggttagaaagcaaactgagactagggatttcttttagaaagaaagtttcagggcaaacccatacatcaccctgactcaaaagaattaatcattggaagacaataatttttcaagaaaagcataaattaaaaataaagaaaagcataaattaaaaacatatattcat

SEQ ID NO: 105464 - DNA, 635 bp, Homo sapiens
tgtctacccaaaaccctcttgacatcttcagtcacccaggagtcccattaacctagaagtgaaagagcagagagaagactcatttgtgcctgtagttgggaaaatgcaacttcactttgggatgaacctgcagcattttacatgcccacacgacggcagtattgccccaggatgttaatgcaaccatcagggagcctcctggacagctggctgcagagcctgaactaggggaacgttttgaatactggtgaaaagccaaaaagacaccaagcccaggattgaagagggttgcacagggaatgtaggaatctggggaagtagaaatctgggccagcttccaattcaaggattgtgtttgtagaaatagtataattttatatatccaggtgctggcaactttttcagaaagtgaaacttatgagcctttttgattttgaattacattttcctatggtttctcctgtcatttggttagaaagcaaactgagactagggatttcttttagaaagaaagtttcagggcaaacccatacatcaccctgactcaaaagaattaatcattggaagacaataatttttcaagaaaagcrtaaattaaaaataaagaaaagcataaattaaaaacatatattcat

SEQ ID NO: 105465 - DNA, 509 bp, Homo sapiens
catcctcttgtaaggcttggctggattcttacaggatcactttgaacaatgaaatctaatgaatatgcaaaaacaaaagccaaggcacatctggttgcaccaacaagatgtagagtagtttgctttttaaaacaaaacaccctgttttccttccttttatacactttgtaatattttccctaatgaaaaaagaagttttcatcaaatttcaggcaaaaacaatttatcatgaaatattatagagctttggtggtaaaaagataaccattaagtgatatgagggggggaaatgatgatttttaggcctctcttcaaatatagtttggaaagctatagtggccttttattatttctggctacccagcatctctcctctcccttgaggtattatgtgcctcttctgggtatccccacctttggggaactgctcctgccccttttcacaggttctggtrgaattgccaagcaagagactccattcagtggcttcccatgtgcctctcttttct

SEQ ID NO: 105466 - DNA, 593 bp, Homo sapiens
tgtgcaactacatgggtgaatcctgaaataatgctgaatgaaaaaaactgaatatcaattatattaatagcccatgccaactgaattgtcttttcccaaaagtctttcaatatacctcaaacatttgcaaatttccttgacctctttgcatatacatacaaaaccaatgtttcctttctcccaactaccaaacatgcagcactaaaccattctaaaattggaaacaactgtataccaaaaatagaagaatgtgtcttaaactatgaaataattatwctccacaggcactttcatcttctcaagaaagcaaagattgattagtatggtgaagaatagaagaagctgacacctcaaaacatgccactttggcataaggattattctgagttgaaggcaactaagatgataacacaagaaaagctctcttcccttcctttattagcctaaaggaggacataaatctgtatagaaatttatccagtgacaaccctggatccttattagcccagaggtggcactagaggactctacataaccaagtttactgactagcccttatctgtcattagtccttaatatatttaccttcccac

SEQ ID NO: 105467 - DNA, 593 bp, Homo sapiens
tgtgcaactacatgggtgaatcctgaaataatgctgaatgaaaaaaactgaatatcaattatattaatagcccatgccaactgaattgtcttttcccaaaagtctttcaatatacctcaaacatttgcaaatttccttgacctctttgcatatacatacaaaaccaatgtttcctttctcccaactaccaaacatgcagcactaaaccattctaaaattggaaacaactgtataccaaaaatagaagaatgtgtcttaaactatgaaataattattctccacaggcactttcatcttctcaagaaagcaaagattgattagtatggtgaagaatagaagaagctgacacctcaaaacatgccactttggcataaggattattctgagttgaaggcaactaagatgataacacaagaaaagctctcttcccttcctttattagcctaaaggaggacataaatctgtatagaaatttatccagtgacaaccctggatccttattagcccagaggtggcactagaggactctacataaccaagtttactgactagcccttatctgtcattagtmcttaatatatttaccttcccac

SEQ ID NO: 105468 - DNA, 553 bp, Homo sapiens
tcaccatgttggtcaggctggtcttgaactccagacctcccaaagtgctgggattacaggcgtgagccaccgtgctcagcccagtttatctttctagccatgtatttctctaaactcacagagatatctggaattcaactaactaaatgtgtaagtagtgtgcttgtatttttctgtattgcctattttcatattgggcaaatgttctttttacacagtaaataaaaggcaaaatgctctcctaaaaataatctaatttcttaagcatattaatcacataaagcctatgtctgaaaagcctaatatttacatctcctattggtctatttctrttttctgttttactatcttggctttttcggtcattgaatcctgtcagctagtatattgggtaattttatttaattaatttatttattttacaaaatttccatttttattttagattcagggagtgcatgtgctggtttgttgcaagggtatgctgcatgatgctgaggtttgggcttctattgatcccatcacccagagagtgaacatactgtattgggta

SEQ ID NO: 105469 - DNA, 588 bp, Homo sapiens
gtttgattttatgacatcacactggaacatgtacaggaacactttccaccctaaaaattcccaaatgtactggccactgtgtgtatttttccagtgataaatgaaaataaagcaacttattctcaaattaataagccatcttattttgaacacaacagtcacattcaatggaagaaaactacttaatcgaagcccaaacaagtttaggtttgtttttggtggggaacagtctcaacatacaaataatttctttaagcaacttttaacagtaatcttaactatgactataaattctcttcagtgcattcaaattatccatcaacatcattgtatatatgaaatgcatcatcattctaygatcttaagttcataattagctggagaaggaagcctgggccaaaaatggcaacatttctaagattattaatctaacaggtattacctatgcctaaagtaactttctttttcacataaccctatatattctctgaaacaaaattcataagcctggctggacattcccattcctcacctttcccttcagcctatactatccttgtttcatctcaggtgctataaaaatggttg

SEQ ID NO: 105470 - DNA, 646 bp, Homo sapiens
tcacatttttgaatatcttaaatttcattgttattgatttctaatttaattctattatggcyaaaaaaatatgattttaaaattttaattccagcaaatgttctggggtttgtttcgtggtccagcatatggtctattctggagaatgcgcatttgaaaagaatgcgttgcttaggggagtgttttatagatgtctgttaggtctggttagcttgtagttattaaagttttctatttccttgttgaacttctgctagatattctatgctttgaaagtagtatcttgaagtctccatctgttttattgttgaactgtctgtttctccctctaattttgtcagttttgcttcatttattttgggacactgtttttaggtgcttataaatttataattgttatgtgtttcttatcaactgactctttgacattataaaatgtccctcctgttctctagtaacaaattttgttttaaaatctattttgtctgatattggcatagccacaccagttctcttttagttactgtttgcatggtacatatattttttacatcaattcacttcaatctatttgtatatttaaatataaagtgtgtttctgtaggtattccatataggtaggccattatctactcttctaatctct

SEQ ID NO: 105471 - DNA, 646 bp, Homo sapiens
tcacatttttgaatatcttaaatttcattgttattgatttctaatttaattctattatggctraaaaaatatgattttaaaattttaattccagcaaatgttctggggtttgtttcgtggtccagcatatggtctattctggagaatgcgcatttgaaaagaatgcgttgcttaggggagtgttttatagatgtctgttaggtctggttagcttgtagttattaaagttttctatttccttgttgaacttctgctagatattctatgctttgaaagtagtatcttgaagtctccatctgttttattgttgaactgtctgtttctccctctaattttgtcagttttgcttcatttattttgggacactgtttttaggtgcttataaatttataattgttatgtgtttcttatcaactgactctttgacattataaaatgtccctcctgttctctagtaacaaattttgttttaaaatctattttgtctgatattggcatagccacaccagttctcttttagttactgtttgcatggtacatatattttttacatcaattcacttcaatctatttgtatatttaaatataaagtgtgtttctgtaggtattccatataggtaggccattatctactcttctaatctct

SEQ ID NO: 105472 - DNA, 533 bp, Homo sapiens
ttctttggccagaactgtacaatgaaagtgaatcatgttgcttcatattttgcctgtaagtacaatataaacttcttgtattagaaagcccagctgggtttaccttaccttgaaatgtttgggtttatattgacgaacccatcatgcaactctctcacttctcttggtcttgtttctatatttttgatatttaaatgtagaagaaaaaattgaaacaataataaatagaatttattatgaaatcattgaccttcagatgactatggagttttatatccaacatttcttactgacgataatgtaacttcytcccctttggtttaaaaatgactactttagagataccttctagttattagaggtccctttctatatggttcaaaagagattacgtagagaagctaaccactcaaagctatcctttgtcagatatcctatatatgtgatatatttcattttatgaaaatgtctgaaagtatattaatagttattttcttttttttttcctttttaattatagcagaaaatggccc

SEQ ID NO: 105473 - DNA, 412 bp, Homo sapiens
tttcccatttccatctgagacctcaccagaattgcctttactattcatatttctaccaacattctatcatgaccacctaagtaatctctaaggagattcagactcttgaaagctcttctcttcttctgagcgctgactattagtagcatcatccttaacgctccatccatggcaatacaggctttctctagcccattccttcaaactcttccagcatctgtccattacccagttccaaagccacttccacattttcaggtattcgttatagcagtaacctcacttctcagtactaattttctgtctttgttttgtgctacctgagactaggtgatttataatgaacagaaatgtatctctcacagttctagaggctggcatctkgtgagggccttcttgctgcattataata

SEQ ID NO: 105474 - DNA, 628 bp, Homo sapiens
tgggtggtatgtgaaatatatatgcataaagctgtttagaaagaacaatgtgacagggcagccagtctttgagaatgagaggcttctctccctaagtctccatcagaagatggtgaaactcatggagggtggattttttttttttaattgtaaaaaattttatttcaacagtttcaggtggtttctggttacatggataagtgatttagtggtgatttctgagactttggtgcccccatcaccaagyagtgtacaatgtacccaatatatagccttttacccctcctcccctcccacccttcctcccaagtccccaaagtccattgtgtcattcttatgcctttgcatcctcatggcttggctcccacttataagtgagaacatacgatgtttggttctccattcctgagttacctcacttagaataatggcctccaactccatccaagttactgcaaaggccacttttgtcttctgttttatgcataagtagttttccatggtgcatatatactacattttcttcatccactcattggttgataggcatacagtttggttccatatttctgcaattgtgagttgtgctgctataaacatgcatgatcgtgtgtctttgtcatataat

SEQ ID NO: 105475 - DNA, 312 bp, Homo sapiens
ccaacaacaagctacgtaatttgtgaccatttttgtgatttaccatagacaattctaagatcacctgcttagaatttaaagagaatcggctaatttaaacatgaaatattaaaacaatataagccagacatagaaaagactggcccagtstatgtcttaggctgggtttccccagaagcagactctgagtcaacgacctttgtgcaaatcattttcctgaaaggagaccccagaaagtaactgtagggaagaagggaaatggaggagtagaagggggaaagtatgccggtgatcaggttgttactgcagaaa

SEQ ID NO: 105476 - DNA, 312 bp, Homo sapiens
ccaacaacaagctacgtaatttgtgaccatttttgtgatttaccatagacaattctaagatcacctgcttagaatttaaagagaatcggctaatttaaacatgaaatattaaaacaatataagccagacatagaaaagactggcccagtctatgtcttaggctgggtttccccagaagcagactctgagwcaacgacctttgtgcaaatcattttcctgaaaggagaccccagaaagtaactgtagggaagaagggaaatggaggagtagaagggggaaagtatgccggtgatcaggttgttactgcagaaa

SEQ ID NO: 105477 - DNA, 589 bp, Homo sapiens
ccagtgccagtccacctgggcacaaatctttgccgttcaccagctgtacgaatttggggcattgtttgccttctttgggttgggaccttttcctgggtggaaaacaggatcttaagagaaccctccttaccagggtgtgctggggttgctgtgagaactaagtgagtccatacacaggacatatttggaatggtgcctrgcacactgctatgtttaccagattattttactgtgttgtgtacactcatcatgtactcccttattcccttttactacttcatgatcatgaactcgctatactcgaatactcaatcatgaactcgaatactactcgctattactacttcatgatcatcattatcaccgttattattattatgttctgagacaggtctcgctctatcaaccaggctggaatgcagtggtgtgatcatggctcactgcagccttgatctcctgggtgatcaggtgattctcctgcctccgcctcccaagtagctgggaccacaggcgcgcaccaccacagccagctaattttttttgtttgtagagatggggttttgccatgttgcccaggcgagtcttgaac

SEQ ID NO: 105478 - DNA, 589 bp, Homo sapiens
ccagtgccagtccacctgggcacaaatctttgccgttcaccagctgtacgaatttggggcattgtttgccttctttgggttgggaccttttcctgggtggaaaacaggatcttaagagaaccctccttaccagggtgtgctggggttgctgtgagaactaagtgagtccatacacaggacatatttggaatggtgcctggcacactgctatgtttaccagattattttactgtgttgtgtacactcatcatgtactcccttattcccttttactacttcatgatcatgaactcgctatactcgaatactcaatcatgaactcgaatactactcgctattastacttcatgatcatcattatcaccgttattattattatgttctgagacaggtctcgctctatcaaccaggctggaatgcagtggtgtgatcatggctcactgcagccttgatctcctgggtgatcaggtgattctcctgcctccgcctcccaagtagctgggaccacaggcgcgcaccaccacagccagctaattttttttgtttgtagagatggggttttgccatgttgcccaggcgagtcttgaac

SEQ ID NO: 105479 - DNA, 589 bp, Homo sapiens
ccagtgccagtccacctgggcacaaatctttgccgttcaccagctgtacgaatttggggcattgtttgccttctttgggttgggaccttttcctgggtggaaaacaggatcttaagagaaccctccttaccagggtgtgctggggttgctgtgagaactaagtgagtccatacacaggacatatttggaatggtgcctggcacactgctatgtttaccagattattttactgtgttgtgtacactcatcatgtactcccttattcccttttactacttcatgatcatgaactcgctatactcgaatactcaatcatgaactcgaatactactcgctattactacttcatgatcatcattatcaccgttattattattatgttctgagacaggtctcgctctatcamccaggctggaatgcagtggtgtgatcatggctcactgcagccttgatctcctgggtgatcaggtgattctcctgcctccgcctcccaagtagctgggaccacaggcgcgcaccaccacagccagctaattttttttgtttgtagagatggggttttgccatgttgcccaggcgagtcttgaac

SEQ ID NO: 105480 - DNA, 589 bp, Homo sapiens
ccagtgccagtccacctgggcacaaatctttgccgttcaccagctgtacgaatttggggcattgtttgccttctttgggttgggaccttttcctgggtggaaaacaggatcttaagagaaccctccttaccagggtgtgctggggttgctgtgagaactaagtgagtccatacacaggacatatttggaatggtgcctggcacactgctatgtttaccagattattttactgtgttgtgtacactcatcatgtactcccttattcccttttactacttcatgatcatgaactcgctatactcgaatactcaatcatgaactcgaatactactcgctattactacttcatgatcatcattatcaccgttattattattatgttctgagacaggtctcgctctatcaaccaggctrgaatgcagtggtgtgatcatggctcactgcagccttgatctcctgggtgatcaggtgattctcctgcctccgcctcccaagtagctgggaccacaggcgcgcaccaccacagccagctaattttttttgtttgtagagatggggttttgccatgttgcccaggcgagtcttgaac

SEQ ID NO: 105481 - DNA, 584 bp, Homo sapiens
gtggcctgtgagtggtctgggctcctgggactgaagccagggctggtctcagggctttctagggataggaatatgttaggacaggctgagctggagagagggggcatcctgggccagcctgcagccagctcactctggattggaatcagctcargctcttgagccctgtgaacttgggagctgcccctgctactcagaaacgtggtacactcgagtttgaaatgaagacgccagtccccacttctcagattagaaatggtcagtgtgcctttgttgaggtctgcttttgtgtaaagaggggactactgaataccattgtttcttaaattgatgttcaattattaagttttcaagccccttgagccttgaaattctgctcattaatttctttcttcttttctactaaatttagtatagtccctgtcactctctttcactgaaactgaacaggctatgctcccttaaacagagagctttatttaaagactcaattatgcattccatacattcttttttttttatagccttttagctgcctaccggggcaagttcaccacccaggaagacctccacaaattctcaga

SEQ ID NO: 105482 - DNA, 596 bp, Homo sapiens
tcaccattagtactgtaacatatttaccaagtgcaatgagtcacatgtaaattttatttaggaaagagaaatataaaatgtatatttcaaagtttaacttaaggagtatttggaatgaaagtgtcaatgacctatatactaaaattaccaaacattgctgacagaaattccagagggccaaaataaatggagaattctgtcatgatcacagattaggatacttattttgtgaagatgtcttttacccttaaataacctaaaaataaaatatgatcccaataaaaaatcccaggagcttttttccttggtgtaattgataggatgattttaaattttatatgaaaatataaggaatcgagaatacaaaaatatctgaaagagtaagaacaaaattgaggagctgcactaacagatgccatgttttactataaattgtcagcaattaaggcatatkgatgaaggaatagatatatggatcaaagaaaagaaaggacttaaaagcagatccacatgtcacttcaattcagtggagaaaagagagtctcttcaaaaatgataccggatcaactgggtggcatatagaaaaaaattcataa

SEQ ID NO: 105483 - DNA, 558 bp, Homo sapiens
aaaactgttaatctgtgctccacattaaatataaagtacattttttatttagacactgcactggtataattaaaataaagtatgctggctttattttttcagtaagtcatttccaaccatagagatcaaataacagtgcaacagcagcatgaaatgtggttataatagcctgggaccacatttcctgaaactaaaacatggragataatagtgtgaaggtacaaattaaatgcaaataaaacagattccctattgttgctaatccctggattgggtttcagtagggaaatttagctgtaatgcttaacttctttgtacagcaatcattgacatgttatcagttgcattttgagatcattgatagaaactctcaacaaagaatttagactacctgtccacctttcaggaagaaaatggaagttgtctggggcaaatcaaataaaaagatactgcccagactgcctccgggacacttatggcagttggcaaacactgattaacttgtttcataattgatatacatttttgtggcaacctactttcatttgcccagcagaa

SEQ ID NO: 105484 - DNA, 567 bp, Homo sapiens
ataacttatacttttatccagggactacttatgtagaaatacagttgtcttaaattgtggataaacctyatcacataaaattataggatattatacatttcaaaatattaccatcctcccctaacaaaatttagttataatcaaaactattgccttgtagaagaaccctactagcttgtttagaaatgtttttctcctaaagacaaagactaggtcagtgttagttcaaaaagatcaattagacagttggtatgtggcactcaatgctaaacactttttacataaagatggtataaagctgggctctgtggctcacacctgtaatccaagctacttgggagactgaggtggaagaatcctttgagcctaggagtttgagttcgaggctgcagtgagttatgattgagccactgcatttcattccagcactggggcaggcagaagtgaagaccctgctctctaaaaaagagttttaaaggtaaaatataataaataaaaattatccaagtagtcacatttttaaaagtgattaaatcaatgcatcttggcacatatcaggtttttaaa

SEQ ID NO: 105485 - DNA, 620 bp, Homo sapiens
accagattgaagtgggttgaggtgtaagtacaaagggagaatcaagatagtgaatataaacaaaattatttcaagaaattatgctcagagtgaggaggaggtaagaagtatctggatagggaagtaggaattgagagggatcttattttgtacagtgaaaaataagtgcttatggaaaagatttggtaaagaggaggaaaagagtaagggaaaaatggatgaagctgcgtatcagagaatgtgagaaggacaaagaaccmaagcacaggtggaaggatttgcccgagttggtaacaggagggaaaatggaaatgatgactgtgggagtagatgtgtttgtcattttgatggctggacatggagaatgttcctttttgatggttactattttctctttgagtaggaatatcatctgctgtgtgtgggaagtggggactcaagtatttgagaagaaagaagaaggacgtttgctgtagtctttgcagaaaatgaaagtgatttgattaatagttgttagaatttaaaaatgtgtgcacagtgtttgggttaaagttgtttttaaaaaaccagccaccttgccttttattctttatgctgtgaaacctctttagagcactcag

SEQ ID NO: 105486 - DNA, 619 bp, Homo sapiens
attattctttcagtagggagactactaagatttcattaaagatagctgaataaatgatcaaatacattattgtagctccagactaggtaataaacattgagatatgcttttcaagtagtggtgaaaatactaggcaaaattacacatacacttacatatattaagcgaccatcctgttggcctggtatgtgaagctctgctgaactcttgcctamatgcatggacccatcgattgtgaatgtgtgactacttgtgtgttttcatcataaccagctcatcctaatagcaaatgatatggtttggctgtgtccccacccacatctcatctttaattatagttcccttaatctccacatgctgtgggagggaccctagtagcaggtaattgaatcatgggggcagtttccccatgctgctctcgtgatagtgagtgagtactctgaaatctgatggttttataagcatctggcatttcccctgttggcactctttctccttcctgctgccctgtgaagaagatgcctttcttcccctttgctttccaccatgattgtaagtttccagagaccttcccagccatgtggaactgtgagtcagttaaccatcctttctatataaa

SEQ ID NO: 105487 - DNA, 647 bp, Homo sapiens
aacaaggttgaagcctatgttttaaaccattatgtgtctggtgctttgtctgggtcctggtacataatagatattcaataaattcttgtaaaattcattttttttcaactgagagtacaaaagtaatcagacagtaaatatatgtgtacccttttggagaaacattaaattcattccattagcaggcaatgagttctttatttaaaaaaaagttctttcagcaacttccaaatgtacatctcaagctctgaccactcctcccctttagactcctactaactgcttggaaattatttcagttgttctcatggccaaaattgaactcatcatcttactcttaccatctggtctttttcttctatttctttgttggattgattactacagagttatctaaactagaaacacaggagtcaccttagtcatcttcctttatcttaacactgtctctcatcatcaagtcttcttttacctataatgttcttatatsagtcccttccactctgtctttattaatattgccaactgatgtgaactactgtaagagcctctgaagtgatctccacattgctggttttcatataatccaccccaaaggtctttgtgtttgttggttggttttcattgctatagcaatattcacattt

SEQ ID NO: 105488 - DNA, 593 bp, Homo sapiens
ctaataatcatatgaaaatatgttcaatctcaacagctaaaatgagttctttttcaccctgattggcaaaaataaaagatttataacatccaatatgggtgaagatatggagaaatggaagctgtcattctcagttgaagagaataaatggatatagccttttcagaaagaaattttattctatcaaaaattttgacttgcattctctaccacccaccaattccactgtcaacatctattccagaaaaacatccagaaaaaataaggaaataagtggcataacaatttcaaagaaagagtttaaattgtcctyaattccagggaatatacagagaaacatcttcatatgcacaaaatggcaagaacgcaaaatatttccttgagcaatgtctgcactaggaaaaaactggaaacctcaatgtccatcagtaaattatggcacatctataagatgagaatgaaaaagaatgagacaatttaatgcatatagagtttatgttgggttgatgaaaatgttttggttataaacagtggtttaatatagatatatacatgtatctatatacaacacaaaaacaaagctacatatttct

SEQ ID NO: 105489 - DNA, 607 bp, Homo sapiens
ttggcccagagactggtagagaaatgctcaatgaatgtcattgttattccatgcaaagccattcccatacccctgagccttggtttctccatccaggaaatgagtgtcagggtcctgtgaaacctttagcatgctagtcatttacctactgctttgtggctctagatccttccttttccctttgtactccataccttagggagtggtggctgcttccaacagttattactagctggattgcttcaatattccctttctcatcttctacaagtttgaaataaatccctgtattaaatcccctccagttgacataccttgcagtggggttggaccctgactggacccatgtggcatagggagccctcatctgggccaggaagacatacctgcagcttcttgagctgactgttgacagtggcaggtctcctccagggctcgcacgtactggcgggcatggtctccatgtgaaggagcttcttgtccaggtcagcaaagctctgcaccagctggtctgtttgctggcctcaaagagctscggtgccttggcctggttggtgctctccagctccgcccagcactggcggatctcgcccagcttcttccgcac

SEQ ID NO: 105490 - DNA, 548 bp, Homo sapiens
ttgtaatgcctgagcacccagaggaacatgccaatcaatgtgtaagagatatttgctgagtaaataaataggagcaagaacattctgtttatttaataatgcaactaacagataaaagaaaaaagtgaggtcaaccaatcttttgcctcaaataaatagccattcttgacaggttttctggatatgttcgttgaactgacctatttacaggttgaatagactgatggaccttttcttttcctgggaaaggacaaaaagggcctatacactctgtccacatctcagtctgtcttgtctgctgttttctyttggcccagaaccagtttcttatgtcacgaagaacttgaccttaatttcaaggtcctggaacagcgagcaggtgaggtcagaatgctgcacacctggagctctgttcaattagccggtgcagaggccagctttctccaccacatggcagaggagctcagaagtagcattcagggcacaagctgcctttcttgcctttgtggctactcatctgctggagtcagaccaggatgagaatttgg

SEQ ID NO: 105491 - DNA, 601 bp, Homo sapiens
ccagctagactgatttgagtagaagaattaatgaaaagtaagaaaatggaaatagcagatgcaggactgacagtgggagggcacagtagatgatttgagttaggaaaatgaatgaaaagtaagaaactagaaatagcattatgtaggactctgagcaaattattctttgagtaaagtgactgtatcttttataatcaattgtatacaacagggtaatctcacctaaccattgatyccacctgtattcatcagttctggctactataacaaagtaccacagacttggtaccttctagacaataaaaatttatctctcacagttctgaaggcaggaagtctgagggtgccagcatgactgggttctgctgagagccgtattctgggttacacatgaccatcttgttgtatccttacgtggctgaaagtgggcaagggagctctctggggtctctattataagaacactaatcccatttgtgagggtcccacactcatgacctaattaccttccaaaggcttcatcttttactaccatcacattgagtgttgggatttcaacatataaattttggggggacacaaacgttcaatccataacacc

SEQ ID NO: 105492 - DNA, 425 bp, Homo sapiens
acaataaaaatcacctatattctgcaccttaaaatatgacaaactagagtttaaaaaaaaattctcccataagatacaaatatgtttttcaaatatttattttttaaaatgcaccgctgagctggtaagaacataagggcaattttcaagggtcaaaaccaaaccaaggagcagacagaatccaggtgggtaagccagacctgaagccttggaggttctgatgatatttactgatacaaaaatctaggacttttgagtttttttagayacacagtagaaaggtctgggcctaaccaagcagtattcacataaagctaagacccacatgctgtactatactatagcccagtgaaactgaggcttccataccccaaaagaagttttcaaagcaacttgtctgtcttggccttagctcttgattggga

SEQ ID NO: 105493 - DNA, 566 bp, Homo sapiens
aagctcacttcacttctgatgagttcttccttcagggccctagatatttcttgctagagacctaagtctgaattatctccatccatcagcatggcttaaaataaggattggtgaacttattctgtaataggctagatagcaaatattttaggccctataggtcatttgagttatttggtytctgttgcaactactcacctctaccatcacagctagaaagcagccataaacatagacaatataaacaaatgagcatggctatgattcaatacaactttacttatgaacaccaatatttgaatttcatagaattttcacgtcacaaaatattcttcttttaatttttttcagccattgaaagtataagttctcctattcaagtaggtgtagttagaaataaacaaaataaagtcattcttagttcactggtcttacaaaaacaggaggcagccagatttggcccttgggctatagcttgctcacttctgcaatactaatttgttgaacttaaaaagaaataggaggtaaatctggcaagatggtggagtagaaaataccaggaatct

SEQ ID NO: 105494 - DNA, 481 bp, Homo sapiens
gccttctaagatgttttctttagttcttagttcctttgcagttccatctccaagcataaattctcattaataatcagtacagtgaggaagatagacatgtgtcagtcagtgagaatgcttgcagctgtaactgccagaaagttgtaacttaactggcttaaaccaaagccatcctgaggtgggaggctccaagtcactcagtgacattatcaaaggcggcctgagtctttttcatctttctcttctgccagcctcaagtgttggtgagttttctggtttgttcctgtaaactcgagatgtctgtcacaggtccamctattacatgcagataactatggccagtcagaaaagaggatcttctttttacgtcttcttttaagaaagaaaaaaaatcatttccagatggtctccccttgtcccacttcccttcaatgtcttattggccaaaatggtttcacatgccgatgtcttaacaaatcac

SEQ ID NO: 105495 - DNA, 549 bp, Homo sapiens
  misc_feature (1)...(549): n = A,T,C or G
agacagcatatcagaatctctgcgatgcagttaaggcagtgttgagagggaaatttatagcactacatgtccacatcaaaaagctagaaagatgtgaaatcaacaacctaacatcataactaaagtaactaaaccaagagcaaacaccaaagctagcagaagacaagaaataaccaagatcagagcaacccacacaaaaagacaaccttacacagaaagaactgaaggagacagagacacgaaaaactcttcaaaaaaatcaacaaatccaagagccagttttttgaaaaaaataaygaaatagatggctagctagactaatagaagaatcaaatagacacaatcagaaatgacaggggatatcaccactgactccaaagaaatacaaataaccatcagaaaaatactataaacacttctatgcaaataactggaaaatgtagaagaaatggatagattgctggacacatacaccctcccgaagattgaaccaggaaggaattgaatnccactgaatagaccaataaacaagttatgaaattgaggaca

SEQ ID NO: 105496 - DNA, 557 bp, Homo sapiens
tcttgttgggcctcagaagcaggagttcaaagatcttcagtgagttctcagcattcgtgtgagtattagttctatttcccacctctgcccgccttcagtggcccactggctaccctgtcttctgctctacatctttctctttcttctccctcaaagttccacttcttcttagatttttcttctttctcactgaagactgtacctggtccttactgatcactactttagctcattgcttctttatgtatcttttaagcctcagctcctattcataatttcctgtttttctctttatttcacaactattttgcaagagtgatataatgattggactagcawccctctttagctagattttttttttctgtagtccctggaaaatggataccatcgatatatagtattatagtatgtactaaacacctgtgaagctccttatcaaactgggctgggccatgtattaagcacaaggatctccttcctccaaattataagcaggccaataggcctaagcaatatgtaccacgactcatctctcgtgatttgagggtttaccc

SEQ ID NO: 105497 - DNA, 576 bp, Homo sapiens
taattcatagaaacataagttgtgggatgtttcagaaagagaagaaccaatggtgatatggtgattcctagatgtaggcctataataaccgggttgatggtggtgctatttactaatatgagcaaagattaggacccaggagaatttgagtgagagtggagwtaatggcttttttttaacacattaagtttatcttttaaatatccaagtggaaatactgagtaaacaattgaatatacaaagtctagggatatgcttagagaagaatgtgatttaaggagggaagggtcaacagtgtccaatgttgctgaggtttaagtatgatgagtatatggaattcaacacaatctccatttgagaattgtggtcgtaaattcaaactacattcagtaaatttgacttgtcattttcttcattaatatttacctattcagaagcaggtaccatgtaaaaggataggaggtttaaacaggtttgggttccactacatgagtgtattaaagggagagaggtaaaaaggagattttgcaagagtgtggtttcacttgatgtagccagcaatacacatatactgaa

SEQ ID NO: 105498 - DNA, 273 bp, Homo sapiens
ttatcagagacctctattgtgccaaatccacttggtaattcactgtcctcatctcagagcattacctatttttatccacttgaccatctttccttcaatccctctctctgcttggcatmtggggcatcatgctcttttggccttattccctcttcattggccactcctttttagttttctttacttgctgtgttggtctgttcttgtgctgctatgaagaaataccagctcctgggtaatttataaagaaaagaggtttaatatgctcatagt

SEQ ID NO: 105499 - DNA, 677 bp, Homo sapiens
gcttattcagatttgtgtttctccttttgtgagattttgtcactcttgtctttcaaggaatggtgtatatcatctaacttatcaaatttgagrgcatagaattgttcatcacaattctttattgtccttttattgtccttggcatcagtactgttgactcctctttcatttctgatattcgtaatttgtatcttatctcttttttccctggctatagatttatcaattttattaatcatttaaaagaacttgcttttgattttgttgatttttctctgtttttttttgttccagtttcattaatttttgctcttattgtctgatttcttttcttctacttgctcttctttttctggtttccaaaggttggaaagttagattatcaattttagatttttctttcttttgaatgtattctttcagtggtataaattctaaccactgcttttgcagcatctcacaagttttagtaagttgtattttcatttccacttaatttaaaatattcttgagaattcttctttgacccatgtgttatttaaaatgttgtccaatttccaaatatttagagattttcctgctgtctttctgttactgatttctagtttaattccatgtggtctgaaagcacatgctgtatggtttttgttcgtttagatttaagttgtgtttaatgg

SEQ ID NO: 105500 - DNA, 584 bp, Homo sapiens
taattttagtgaccttttctatttttaaaaatgctctaatacacaaatacttgatattgtattatagttgtccatattatttagtgcagtaacatgctgtacagatttgaagcttaggggcaacaggctataccatacatcctaggtctctaggaagctaaaccatcttggttttagtaagtgcactcaatgatgttcatacattgatgaaattgcctaacaaagcatttctcagaatatttcctcattgttatgtaacatgtaactgtatatgttttcattgctcatgggtatattagaaatggcatttctcrattatattatgatgctatgtttaaacatttcaggaattaccagactctttgctaatgtggctgaacttttttccattcccaccagcagcagacatgcgggttctaatttctccacatctgtgttacgtacgtactatacttggctttttttattcttgccatcctggtgggtgtgaagtaggatctcatggtggttttggattgcattcccctgatgcctaataacgtcaaaaatctctttatgtgaatattggtatttgtaaaatgtat

SEQ ID NO: 105501 - DNA, 590 bp, Homo sapiens
gtagctgagtcataacctcaaatgagattcawatgctggttctaatgctctcttctctttaccagatttacaatgaaataaataaaaaataagatactaatttaacacaaacaataattttcaacctcgatcgttcaaactcattttttaaaattattataaacacaaggtaatggacgaaaagcaaaaatattccaatgatacaggatccttaccttttcatgatttttaaaaattataactttaccattaatataaaacttttacattttgtgacctccttaattataatttatttgccattattttaatggcaaaaaccacaattacttttgcaccaacctatatggaacaatcttaaatactagagacattgtatttcctcagcatattactactcaattctcggcaggctttgattgcgtttttgttttttgctcaaattaagccatacagaaagtaatattttgcttagaatttaagaaaataaagtgacccttgtgatatgaacttcatgaactacacacatattatttatatttacaatttatttaaccactgtgacagcaaaaaactaaaaaatggtgcat

SEQ ID NO: 105502 - DNA, 540 bp, Homo sapiens
aatataaaacttttacattttgtgacctccttaattataatttatttgccattattttaatggcaaaaaccacaattacttttgcaccaacctatatggaacaatcttaaatactagagacattgtatttcctcagcatattactactcaattctcggcaggctttgattgcgtttttgttttttgctcaaattaagccatacagaargtaatattttgcttagaatttaagaaaataaagtgacccttgtgatatgaacttcatgaactacacacatattatttatatttacaatttatttaaccactgtgacagcaaaaaactaaaaaatggtgcatcgttccaatcatttgccaagctaagaaagctggagtgtttgggggttgttaaatatgcaaattgataaacactccctactcatcaatgtgcttctggaaaattaattgccccactgtttatatcttgtcattgaagagcattcgattaatttctttcctctttaaatagttggccaacacttaattatttgaaaggtatta

SEQ ID NO: 105503 - DNA, 540 bp, Homo sapiens
aatataaaacttttacattttgtgacctccttaattataatttatttgccattattttaatggcaaaaaccacaattacttttgcaccaacctatatggaacaatcttaaatactagagacattgtatttcctcagcatattactactcaattctcggcaggctttgattgcgtttttgttttttgctcaaattaagccatacagaaagtaatattttgcttagaatttaagaaaataaagtgacccttgtgatatgaacttcatgaactacacacatattatttatatttacaatttatttaaccactgtgacagcaaaaawctaaaaaatggtgcatcgttccaatcatttgccaagctaagaaagctggagtgtttgggggttgttaaatatgcaaattgataaacactccctactcatcaatgtgcttctggaaaattaattgccccactgtttatatcttgtcattgaagagcattcgattaatttctttcctctttaaatagttggccaacacttaattatttgaaaggtatta

SEQ ID NO: 105504 - DNA, 540 bp, Homo sapiens
aatataaaacttttacattttgtgacctccttaattataatttatttgccattattttaatggcaaaaaccacaattacttttgcaccaacctatatggaacaatcttaaatactagagacattgtatttcctcagcatattactactcaattctcggcaggctttgattgcgtttttgttttttgctcaaattaagccatacagaaagtaatattttgcttagaatttaagaaaataaagtgacccttgtgatatgaacttcatgaactacacacatattatttatatttacaatttatttaaccactgtgacagcaaaaaactaaaaaatggygcatcgttccaatcatttgccaagctaagaaagctggagtgtttgggggttgttaaatatgcaaattgataaacactccctactcatcaatgtgcttctggaaaattaattgccccactgtttatatcttgtcattgaagagcattcgattaatttctttcctctttaaatagttggccaacacttaattatttgaaaggtatta

SEQ ID NO: 105505 - DNA, 533 bp, Homo sapiens
gtttattttgcagtgcagaastttttagtctaattaggtcccacttgtcaatttttacttttgtcttagttgcttttggagtctttgccgttaagtctttgccagggcctaggtccaaaatggtatttcctatgtttccttctagggtttttatagtttaggttttccgtttaagtctttaattcatgttgtgttgattttcttatatggtgaaaggtaggaatttagttttggtcttctgcatatggctagccatttatcttagcaccatttattgaataggggagtcctttcctggttgcttctttttgctggctttgtaaaatatcagatggttatagaaatgtggctttatttctgggttctgtaacctgttgcattggtctatgtgtctgcttttgtaccagtaccgtgctgttttagttactgtagcttggttgtatagcttaaagtcgggctgtgtgatgcttccagctttgttattcttgcttaggattgccttagcttttcggtctcttttttggttccaaata

SEQ ID NO: 105506 - DNA, 611 bp, Homo sapiens
tggggagaaaaggaaaccattacatactattgggaagaatgtaaagctatcatatcatctagttgggcatataccccccaaaaaaggaaatctacacatcaagagataatctgcacttctaggtttgctgctgcactgtttacaatagcagagatttggaagcaacctaagtgtccatcaacagatgataaagaaaatgtggtacatagacaccatggagtactattcaaccataaaaagaatgagattctatcatttgcaacaacatggatgcaactggagatcattgtgttaactaaaataagccaggcacagaaaggcaaacacaaaagtatagctttttgcagctttggttcttatctgtggaatctaaaaatcaaaamaattaagctcatgaacatagagaatacaaggatggttaccagaggctgggaaggacagtagggagttgctggggaggtagggatagttaacaggtacaaaaaaaagttagaataaataaaatctactatttgatatcacaatacggtgactatagtcagtaataaccgtacatttaaaaataacaaagagtataactacattgtttgtaactcaaaggataaatgccg

SEQ ID NO: 105507 - DNA, 611 bp, Homo sapiens
tggggagaaaaggaaaccattacatactattgggaagaatgtaaagctatcatatcatctagttgggcatataccccccaaaaaaggaaatctacacatcaagagataatctgcacttctaggtttgctgctgcactgtttacaatagcagagatttggaagcaacctaagtgtccatcaacagatgataaagaaaatgtggtacatagacaccatggagtactattcaaccataaaaagaatgagattctatcatttgcaacaacatggatgcaactggagatcattgtgttaactaaaataagccaggcacagaaaggcaaacacaaaagtatagctttttgcagctttggttcttatctgtggaatctaaaaatcaaaacaattaagctcatgaacatagagaatacaaggatggttaccagaggctgggaaggacagtagggagttgctggggaggtagggatagttaacaggtacaaaaaaaagttagaataaataaaatctactatttgatatcacaatacggtsactatagtcagtaataaccgtacatttaaaaataacaaagagtataactacattgtttgtaactcaaaggataaatgccg

SEQ ID NO: 105508 - DNA, 611 bp, Homo sapiens
tggggagaaaaggaaaccattacatactattgggaagaatgtaaagctatcatatcatctagttgggcatataccccccaaaaaaggaaatctacacatcaagagataatctgcacttctaggtttgctgctgcactgtttacaatagcagagatttggaagcaacctaagtgtccatcaacagatgataaagaaaatgtggtacatagacaccatggagtactattcaaccataaaaagaatgagattctatcatttgcaacaacatggatgcaactggagatcattgtgttaactaaaataagccaggcacagaaaggcaaacacaaaagtatagctttttgcagctttggttcttatctgtggaatctaaaaatcaaaacaattaagctcatgaacatagagaatacaaggatggttaccagaggctgggaaggacagtagggagttgctggggaggtagggatagttaacaggtacaaaaaaaagttagaataaataaaatctactatttgatatcacaatacggtgactatagtcagtaataaccrtacatttaaaaataacaaagagtataactacattgtttgtaactcaaaggataaatgccg

SEQ ID NO: 105509 - DNA, 463 bp, Homo sapiens
cctgcttgccaataatatatgtctaaagaatattcaaatttaaaagctttctattgattgggaaattaatgggttttaattctcacaggattagtcagtagcatattaggcatttaggaaatgccatggactcttctagccacaaaggtatcataaagtcagctgagaattttaatctcatttgtgcagcagacatgtcctcgattcaccttcatgttgatttcactaggaaaccagcacagaagtttataaggattagaagaattatcttcacgtgccaaaggctggtatatttgcattccttttyaagcaaatagtactctaaaaatagtgcatataacaatagataattacatagatttattagaatgcactttgtggttcactgatgttgcagcctatgactattgcagacatcctgtgtgagccattaagatgcttagatctcatgccagtcagaatg

SEQ ID NO: 105510 - DNA, 621 bp, Homo sapiens
atcatcatgatgccctatattatgctagatgttaaatagatcaacagttttccagaaatgtgtgtgcaattatagaattcataaagtttaattgatacagaatatgcttactatatactcctgtgaaaaagaattttttggaacatacatagaataaaggtctttgttttaaaaaggttggagatttagcatttgtatttgtgaactamacaattagcaaatgacttaatactcacacatactaaataattcatcatatagtttgattttgttaataatacaatgaaaccagtgttttaggtaatgtgtagagttcactggaaaggaaaaaactgaaggccgagcagcccattatgagtttctcatgttggaccaggttggtgtggtttcatctaggagtgatttaatgtaacaatgagatagtgtcgttaagaatggaaaaaatagcgttcatgaagacattttggagggagattcaaaaagcaatgaatatgtaactctacatacagaaaacggaagcaagattcaaaattgtgtgaaactttaactgcgaattattgaaaactaataatgccattgacagatgtgtttggcagattctgggggctggagacgatgaaa

SEQ ID NO: 105511 - DNA, 621 bp, Homo sapiens
atcatcatgatgccctatattatgctagatgttaaatagatcaacagttttccagaaatgtgtgtgcaattatagaattcataaagtttaattgatacagaatatgcttactatatactcctgtgaaaaagaattttttggaacatacatagaataaaggtctttgttttaaaaaggttggagatttagcatttgtatttgtgaactacacaattagcaaatgacttaatactcacacatactaaataattcatcatatagtttgattttgttaataatacaatgaaaccagtgttttaggtaatgtgtagagttcactggaaaggaaaaaactgaaggccgagcagcccattatgagtttctcaygttggaccaggttggtgtggtttcatctaggagtgatttaatgtaacaatgagatagtgtcgttaagaatggaaaaaatagcgttcatgaagacattttggagggagattcaaaaagcaatgaatatgtaactctacatacagaaaacggaagcaagattcaaaattgtgtgaaactttaactgcgaattattgaaaactaataatgccattgacagatgtgtttggcagattctgggggctggagacgatgaaa

SEQ ID NO: 105512 - DNA, 615 bp, Homo sapiens
tgccagggaaattaagcaagagaaagaaataaaaggcatccaaatagaaaagaaagaagtaaacctgtcactgtttgttgatgccatgatcttatatatagaaaaccctacatactctaccaataaaaaaaaaaatctgccagaactaataaatacagtaaagttgcaaggtacaaaatcaacgcacaaaaatcagtagcwtttctacacactaacaacaaactaaccagaaagaattaaagagaacaatcccacttacaataggtacaaaaaaaggaataaatttaactaaagaggtaaaaaaaatctgtacactaaaaactataaaaaaatcatgaaagaaatcaaagaagacactaataaattaaaagatattccacattcatggattgaaagaactaatagtgtgaaaatgtccatattacacaaagtgatctatagagtctatgcaatctctatcaaaattccagggtcatttttacatagaaatggaaaaaataatcctaaaatctgtatagaaccacaaaagacactgactaggcaaagcaatcttgagcaaaaggaacaaagctggaggcatcacactacctgacttcaaaatccactacaaagcca

SEQ ID NO: 105513 - DNA, 424 bp, Homo sapiens
aaggtcccaccaggcagttacccctgccaaggaccctctgtgtgctcaagggcagccaggagggtggtgtagctgggacagctggccatggaggattgcaggggccgttgctggtcttgcaagtttaggaagttaaactcacctgatgaggagggaagggaggcagacaggccagaaggcagctgaaatatcttgtggccaccccagagggtcacagtgcactccacagtgggtggcatttacctccatctaacccatgtatgtgctactcatctatcttgctgctatctgcttcttatctctcaaatgtaagctccatgagggmaggaatttttgaatattttcttcactgttatacccacagttgctcttgaaggaaagcaggtccttaaaagatatttgttgactgactgactgaatgagg

SEQ ID NO: 105514 - DNA, 519 bp, Homo sapiens
ataaagggacagagtacaaaagaaaaattttaaagctgggcatccaggggagacaccacatgtcagtaggttccgtgatgccccacaagccgtaaaaccagcaagtttttattagggagtttcaaaaggggagggagtgtgcgaataggtgtgggtcacagagatcacgtgcttcacaaggtaaatagaatatcagaaggcaaatggaggcagggcgagatcacaggaccacaggatggaggcaaaattaaaattgctaatgaggtttcgggcaccattgtcattgataacatcttatcaggagacrgggttttgagagcaaccggtctgaccaaaatttattaggcaggaatttcctcttcctaataagcctgggagcgctgtgggagactggagtctatttcacccctacagcctcgaccatagaagacagccacgcccaggggggccttctatagacctaccccccaggtgcgtattctctttcccagggatgttccttactgagaaaaagaattc

SEQ ID NO: 105515 - DNA, 421 bp, Homo sapiens
ctgtagtcaatgttcggttcctcgaaaggtcttgctgctgtcaggtgttatacactccatccatcataactgtatgaaacacatttcatatgtaaataaacgtgggacatttgaaaaaaatattttgttctatgtagttgaaaatcattggctaagttcattataacctcctttctgcatcttaccctcatccacacycttacagcctttcattaattgtaaattcttatgtctgtattttccatatctacttagtactactttttggaatgaatcttttatgccctgctctggtcaataatcttgggtgaaatgagaacacaaagccagagagaccaggtttctgtagttctctaacatcggatgctaatacaaattctgctgtgcagtgcccaggcattgccacccctctggagagaat

SEQ ID NO: 105516 - DNA, 587 bp, Homo sapiens
agtggctctcaagtcgacctccactctgaacatggcattggcaaggggtctctctgccaaatcggctcctgctgtatatttgggagtcacacagacacatctactacctctagcgtccctcaagagtttgctgcgcacaaatacaaaatcaagtcgtcctggtttctcrgtgtctttcctgatgctgttttagatgagtaatgcctgcttgctttgcctaggctcagggcactgtgctcctaggactagtggccacaaccttgtcctgctgaaggcccgcaggaagcccttgggacacgagcacttccactgtctggtgctcttgaactggttattttagggagatagggtgtgtccagctatgggctggtctctgtggggctgtgacaattcaaagtgacagtaaagggactcagtgttaaaaggttctctgtgccaggggtgcctggtggcagaggctgagatggatgggtcccaacccatcagccctgccttacctgtgctctctagctacgccctcatccatctgaagcatgtgggttgaagggggaggcaagtaaggctatccatgcacaaggctgccccac

SEQ ID NO: 105517 - DNA, 587 bp, Homo sapiens
agtggctctcaagtcgacctccactctgaacatggcattggcaaggggtctctctgccaaatcggctcctgctgtatatttgggagtcacacagacacatctactacctctagcgtccctcaagagtttgctgcgcacaaatacaaaatcaagtcgtcctggtttctcggtgtctttcctgatgctgttttagatgagtaatgcctgcttgctttgcctaggctcagggcactgtgctcctaggactagtggccacaaccttgtcctgctgaaggcccgcaggaagcccttgggacaygagcacttccactgtctggtgctcttgaactggttattttagggagatagggtgtgtccagctatgggctggtctctgtggggctgtgacaattcaaagtgacagtaaagggactcagtgttaaaaggttctctgtgccaggggtgcctggtggcagaggctgagatggatgggtcccaacccatcagccctgccttacctgtgctctctagctacgccctcatccatctgaagcatgtgggttgaagggggaggcaagtaaggctatccatgcacaaggctgccccac

SEQ ID NO: 105518 - DNA, 587 bp, Homo sapiens
agtggctctcaagtcgacctccactctgaacatggcattggcaaggggtctctctgccaaatcggctcctgctgtatatttgggagtcacacagacacatctactacctctagcgtccctcaagagtttgctgcgcacaaatacaaaatcaagtcgtcctggtttctcggtgtctttcctgatgctgttttagatgagtaatgcctgcttgctttgcctaggctcagggcactgtgctcctaggactagtggccacaaccttgtcctgctgaaggcccgcaggaagcccttgggacacgagcacttccactgtctggtgctcttgaactggttattttagggagatagggtgtgtccagctatgggctggtctctgtggggctgtgacaattcaaagtgacagtaaagggactcagtgttaaaaggttctctgtgccaggggtgcctggtggcagaggctgagatggatgggtcccaacccatcagccctgccttacctgtgctctctagctaygccctcatccatctgaagcatgtgggttgaagggggaggcaagtaaggctatccatgcacaaggctgccccac

SEQ ID NO: 105519 - DNA, 615 bp, Homo sapiens
aataaactcattgcctgttacaaggggccagttgaggcacagaaagtttaaataatcatggtgcatacaaaatgatcctgagcagggtactgaggtaggaggcaggactctactcaggaggtggggcttgactccagaggtgggtcttggaccctggaccaaattgaggaccagctaaaacagggatgggacagaaggagctttccataagccatgcccaccagtgtcctatgtcagtttaccattgccctgtcaacacctagaagctgttgcccctttccatggcaatgacccgataacctgaaagttaccaccgttttttaaaagaaagttctgcataatctccttaatttgcatataattaaaagtaggtataaatatgcctgtgcaactgcccctgagctgctactttgggcatactgcttatggatggggtagccctgctcctcaaggagcaatccctctgctgctgctggtcagtaccacttcaataaaagttgctgtctaaccccaccagctcaccctmgaattatttcctgggataggccaagaaccatcccaggccaagccccagttctggggcttgcctgcccggcatcagtactacacgcagtc

SEQ ID NO: 105520 - DNA, 570 bp, Homo sapiens
gatcctggatttctagctccagaactgtgagaacatcaatttctgttgtttaagccacacggtctgtggtgtctttttatggcagccctagtgaactaacatacttgcaagctaacttcagcagggaatggcttgcaaaagttttccagactctgagcaaagcctactctccaacactcatttcagatgtggccaaggaggatggttaacacgaaataatgttctagagcatggaggtaaaacaacattggatggtaaaacagcaktcttcctcgtaacatcagggtcaaatcgaggaacactctactctcgggaaagggatctgtgcagtatctcttaagggttcttcctaattgctctaggtcaatgaatatggggtgtctccagttcttcatctttcttaacaggcatgatttcttactgctatcttgtcattgttgcacatttatatgtgggagttttggagaaagttgattgtctttttaatttctaggcggctggactctgaggaccatatctggagaagatcgcaggtaagccagagatcctagacactgagctggataaagt

SEQ ID NO: 105521 - DNA, 620 bp, Homo sapiens
acctaatgacttccaagttcatgacatctcttcttgcaaatagtattcacacacctttatctttcccatccaattacttgaaataatcacatcaaccaaatgtatttaatttaacacaatattcaatttattgcctgaacaaagatggcactgctcaccaaatggaagtgtgggccacccagagaggactatatacaatagctaatatttaagatgttcattcatggactgacacatggaaatgcaaatgtggctcaccacaggtcatttagtggtgggctagcctaggtcattcagtactaaaactgtagtacctgggctacagttactagatcaagggctgggtctgagtccagaggtcaaggtgttatatctacaataaaagtaaaaaagtrtgggctgaagaaaagttgaatttaagataaatgcataaatcaatgcattaattaggtacataaaaattgtttaaacttttctttacgatgttttaattttcaaccttccagtcattgacaggactcatttctgtactctctcaaaacccagggtctctcttaactttgtagttaagaaaaatctggaagtatcagcctaactaatatcaagggaagtaaaagttg

SEQ ID NO: 105522 - DNA, 598 bp, Homo sapiens
taataccctctacccatttccagtccatcaaaatccctgccctagttccacattcactcctactacacagctctcatctcattagactcccaccacctacagatgaaaagccaaattcttaggactgacatttcatatgcccagcaatcccatttggaagcctggagatggtactttccattggctctagccccctcctcctcataccaggatcaaatgagagatgaggagtgggaagaaagtcaggggaggcctgacctccaagggctctccctttggatgtcctaatatcagctctacctcaggctgtcaacaacasgattcacgatccctttgcttcccacccacctccaaacctttaataggaccctcatcaatgaggaggtaatgttctaacgccttgaacccaagagatgctgctcagctcttcctcattgcattagcgactttcttctctctctttttttttctttttagtggtgtctttttttacagtcatcatctacatccatcagctaaggctaaaataagctgcagtaacaattccaaaatctcagtgggttatgatgccagtgtttatgtcttacaaatatgtgtt

SEQ ID NO: 105523 - DNA, 598 bp, Homo sapiens
taataccctctacccatttccagtccatcaaaatccctgccctagttccacattcactcctactacacagctctcatctcattagactcccaccacctacagatgaaaagccaaattcttaggactgacatttcatatgcccagcaatcccatttggaagcctggagatggtactttccattggctctagccccctcctcctcataccaggatcaaatgagagatgaggagtgggaagaaagtcaggggaggcctgacctccaagggctctccctttggatgtcctaatatcagctctacctcaggctgtcaacaacaggattcaygatccctttgcttcccacccacctccaaacctttaataggaccctcatcaatgaggaggtaatgttctaacgccttgaacccaagagatgctgctcagctcttcctcattgcattagcgactttcttctctctctttttttttctttttagtggtgtctttttttacagtcatcatctacatccatcagctaaggctaaaataagctgcagtaacaattccaaaatctcagtgggttatgatgccagtgtttatgtcttacaaatatgtgtt

SEQ ID NO: 105524 - DNA, 447 bp, Homo sapiens
aattctgagcagcccagagacctgccatcgctttctcgcgccgagtcacgtggtctggcaaggcgcgcggtttcctccctagccgcccccagctgccctgaaccttcaaagtcacatttcagtcactccccagtctgaccaacaacgctcacaatgagggcgctgccagcacaggcgacggcctgcgctccagtcttacgaggaaccccaaattcaagacccctgtgacccaggcctgtgtgccccgacaggctaaacctccgcccaggggcttcccgatgtcggctgcagcgagtctgggttttcggcctgcagagctcgcgtctgacggctgaggaacaaaacaccctccctctagcggctcaagcgcacacaccctcttgccttccgcagccmccgagcgagtcacgggagacactctggagccattttgcggggctggaattc

SEQ ID NO: 105525 - DNA, 572 bp, Homo sapiens
ccaaattactgcaagatgaacactttggtaaaggttagatgttgcagatatcagtttacatattttaacagaaaagtgagcagtgatgatgaccttgcagtcctttcaaaagcttaattctctccaattccaaagagcactctaggaattttagaaaatactctgagagactaatccatgacctttatttccagggtaaataaaaagtaaattatttgcaacactttttacttttagaaaagttataatccatgaggactttagmataatttttatttattaggcatctattaaatgcctatgtaaatgtatacctattttatgcccaggtaaattttcttccttttttttttttttcccagacacatggtctctttatgttgtccaggctggtctcaaactcctggcctcaactgatcttcccacttcagcctcccaaagtgctggaattataggcatgagccattgtgccttacccaacctacttatttggggatgattgtaacataccaaaagttagcaaaaatttcatttagatatttttatatattcaagtgaaagtgctgccatat

SEQ ID NO: 105526 - DNA, 489 bp, Homo sapiens
tacccttatttcacaaaagaaaacattgatattaggtgaaattgacaagtttaaaattcatgacatggtttagtgatctgtatctttccatgacatatgaaagatgtacttggagtgaaacagttttgtatttgtccattatcaagctgctatgaagaaatacctaygactgggtaacttataaaggaaagaggtttaattgactcacagttctgcatggctgggaagacctcaggaaacttacaatcatggtggaaagagaagccaacatgtccttcttcacatgtaggcagcaaggagaagtgctgagcaaagggggaaaggtcccctataaaaccatcagatcttgtgagaactcactatcatgacaacagcatgggagtaacctcccccatgactcaattatctcccaccgggtcccacccacaacacatggggattatgggaactacaatttaaaatgaaattcgggtgggaacgtagccaaat

SEQ ID NO: 105527 - DNA, 489 bp, Homo sapiens
cacatcccctggtcgtgtggggctgtgtgaggagttacccaaaaaggatgtggtttgtgtaagcagggggatgtctgcttaggatgaaatggccactgttgttggtgtgtaaataagataacctttcrtagatatcacggcttgcttatagtttggggctggatgatgctgttcaaattcaattaatttattaagcacctactttatgtcagctactatgtgtggtacctgggatataacagattttaagacaagattctttctcttgagaagctcccagacttgcaaggaaaacagagatacagaagatgaattatgatgccatgtgacgcatggtgcagagtagcatgggataagaaaggtccacatgtaaagtgatgggaacagaaagatgaattgatgagcttgtagggagttggaaagacttcccagagagggagctgagtgttgaggaatgaatatgggtttgccagatagaaaagggaattc

SEQ ID NO: 105528 - DNA, 431 bp, Homo sapiens
catttttagctgactccaatgagggtttgccgacctcgctttgagtatatctgcatggatgaccttgtactcgtcacttcygccctttcacttccactgtaactctatgtgggcagaaaacatgtcttcttgtctctttgtggatcagcccccaggcaccaccaattaattgcctagcacagagaaagtgctccccaaattttactttttcttgttcagaatacaatgccatccaagttctcatttggcacttacaacagccgcgccaggtaggaagaaagggcgtccttcttacagacagatggggagagagtccaagccaccagagagcagagactggctgacgcaggcttagttagaaatcatagtgcaagccacacagttgctttagttgtgggctccctggcactagcttcctggactggtgttga

SEQ ID NO: 105529 - DNA, 552 bp, Homo sapiens
tattgttagctataggctccatgttaaaagtagatttccagagcttatatatcctgcaaaactgacactttgtacccttcaaycatcacctccccatttcccacttcctgcagcccctggcaaccactactctactctctgcttctgtgagagggactagtttagagtccacacataagtgagatcatatagtatgtgtcttttcgtgtctgcttatttcactcaacatgaccctccaggtctatctatgatgtcacaaatggcaggatttccttctttttaatgctgaacagtatttcattgcatgtatggactacggtttttttttttatccattcatccatcaatggacatttaggttgtttgctggctattttgtatagtgcagatatctctttgggatcccagtttcaatttatttggacagatacccagtaatggaattgctgtatcatatggtaatcctatttttagttttttgagaaactttcatgctattttccaaagggctatgccaaattacattcctactacctgtgtacaagggttccc

SEQ ID NO: 105530 - DNA, 594 bp, Homo sapiens
atactaactgatacagcatacatgtttactgcttcctcccccaaccacaatgcaagccttttaaatctgagctgtgacttctagaggattgagaaaaggtaaacttcagtgagttaaaactatattatcaattaagtttgcaagctgggtgccttcttctccaggctcctgagagcttattatttaggaaattgagtaaaagttatatgtggaataaagaactatccccaaacctgaaaataggcagcgtgctcttggagggtccattctgacagtgttcactttaccacaccagggtttttttgttacaaaaatcattgaccttaattactcacagtctttcttctcctctyactgcttaatatgataactctattggcctgcttgttcatactcatgaacttggtattgaaggccttgaacaattgggctccaggctttctttctgtttctccattcagtagccttccttaaaaatcacaggtccctcaaactggctcatccacaactctctgcttttccctccctctatacttttattagcaagggcacactgactcataaggtccttgcctgtcttccccactcatgcta

SEQ ID NO: 105531 - DNA, 383 bp, Homo sapiens
cccctcatcctactgtgtacccaaggtagtgccttcactgagcagctgttaacaagagagtgcaaaactactacttctcctctaaatctctagcaatgtcaccattgctcacatctttggagaggacagctgggagcttccctaaattgtctcacatcactcaacatatattyttatataggaagaataagtatccacagttcatgaaagagtctgaatgagggaaatttatcatgtttcatatgtgtagaatgatagggttctggatcattgcccaatggaactgatatttggggattatatcaggctcttgacttccataagaacctgctcatcagctcttctgacttgagatgaccaacactaattaaagagcagaattc

SEQ ID NO: 105532 - DNA, 657 bp, Homo sapiens
acattgggaatcagtgaagcaactgaaagagaaggatttatttctctctttccaattactgttctgcatcccaatcccttccttcttactttacaccaatgtccatggcagcacctgctgacagtgtaatgcaatactattgcaacctgccccatgtcaaaagtggattctgtaggtgtcccacattaacatctatggtgaacagtttaaagctagtaaaaagtacttccttgggacttcttataatcaactgaatataattcacctttaaaagaaaagactggaaaaaatgcaattttcactaccatgtttcaagaatttcaacgcaatccttcaacaaatttgaaaacactatccgccactaccatttgaacattaatgaaatatactgacaaaaatataaatataaatattctacataccaaaactaccacagtatcakgtttatataaattaatcaaaaacatttatggctagtgagtttgatcgtaaattgtaataacttttctacaaaagacacacacacacacacataaatttcactgcaatttttaaagtaatggaattaagcaggtagagtattgtttaacaatattcagtgacatacattagggaaatttattcactaacctgacaaacatcctatgtgccccaagc

SEQ ID NO: 105533 - DNA, 514 bp, Homo sapiens
gggggtctcgtcatgtaatacaatgctttgttccgtttcttttgccaggaactggatgtctttctagcttagataactaacatcatctggaagacccccaagggactagactcatcttaaaaccattttagaaatttcagtttccttaaggccaaggcagtgtatattgagggttatctatattaagcttagccctttacaataagacaatctggamcacaactggatcaccctcatgcccttgtctgagaaggtaagacacagtccagatggaaactcttcaggctctcctgcaataaaagtgcagcatatgggggttctagctctgcatttttctgtggcttttgtgatcctggaccttacataaaatttctattaccaagatttttgttgatttactttgatcagcttaattctttttgcaagtaactgttcattatatgagaacagcattgactattttaggtaactagttgtgtcagtgattggcagctataaactgttaataaaatca

SEQ ID NO: 105534 - DNA, 514 bp, Homo sapiens
gggggtctcgtcatgtaatacaatgctttgttccgtttcttttgccaggaactggatgtctttctagcttagataactaacatcatctggaagacccccaagggactagactcatcttaaaaccattttagaaatttcagtttccttaaggccaaggcagtgtatattgagggttatctatattaagcttagccctttacaataagacaatctggaccacaactggatcaccctcatgcccttgtctgagaaggtaagacacagtccagatggaaactcttcaggctctcctgcaataaaagtgcagcatatgggggttctagctctgcatttttctgtggcttttgtgatcctggaccttacataaaatttctattaccaagatttttgttgatttactttgatcagcttaattctttttgcaagtaactgttcattatatgagaacagcattgactattttaggtaactagttgtrtcagtgattggcagctataaactgttaataaaatca

SEQ ID NO: 105535 - DNA, 524 bp, Homo sapiens
ttgcactcccacatggctgggacaataggcacacaccaccatccctggctaatttttgtagttttttgtagagatggggtttctccatgttgcccaagctggtcttgaactcctgacctcaggtgatctgcccacctcggcctcccagagtgctgagattacaggcatgagccactgcacctagcctaattcttttcttggtactacattaatacaaagactccactgaccctaaacaatgggttttagagcasggctaccctttgattaatgtggtgttaacactctgtaggaactgaaaaatgctttaagaaatagccttgtataaatccaatgcatgtagcagaataatcactggattccttattttgaacttcttataataaaccataggcacaaatgtcacttcttgaaaatacgctaatattttattgctggggaaatctgacataaaactgatttgggcaggaatgtactaccacatatttatttttctcaggccatgataatgttcttcagaggtg

SEQ ID NO: 105536 - DNA, 568 bp, Homo sapiens
ataattttatccttctgcatgtggatatccagttgttccaacactatgtatgaaaatactgttcattccccattgtgtgttattgacatctttgtcctcaattgactataaatatgtggttttatttctatgctctatattctgttccattgatgtatgtgtctgttctattactctatgtgatagtactttgctgttttaatcactrtagctctgtggtatgctttgaagtcaggtaatgtgatggctccagctttgttccttttgctcaatatttctttggttattcagggttcttttgtggttccataaaaaaaacttaagattttttttggatatttctgtgaaaaatgtcattttgatagagattgctttggaaagtatggacattttaacaatattaatttttccagtccatgttcatggatttatttgtgtcttcaatttatttgtgtcttccatttatttgtgtcttcaatttttttcatcaatgttttacagtttttcagtgtacaaatatttaacctccttggttaaattttttccccaaaacagttgtgtgttgctt

SEQ ID NO: 105537 - DNA, 568 bp, Homo sapiens
ataattttatccttctgcatgtggatatccagttgttccaacactatgtatgaaaatactgttcattccccattgtgtgttattgacatctttgtcctcaattgactataaatatgtggttttatttctatgctctatattctgttccattgatgtatgtgtctgttctattactctatgtgatagtactttgctgttttaatcactgtagctctgtggtatgctttgaagtcaggtaatgtgatggctccagctttgttccttttgctcaatatttctttggttattcagggttcttttgtggttccataaaaaaaacttaagattttttttggatatttctgtgaaaaatgtcattttgatagagattgctttggaaagtatggacattttaacaatattaatttttccartccatgttcatggatttatttgtgtcttcaatttatttgtgtcttccatttatttgtgtcttcaatttttttcatcaatgttttacagtttttcagtgtacaaatatttaacctccttggttaaattttttccccaaaacagttgtgtgttgctt

SEQ ID NO: 105538 - DNA, 609 bp, Homo sapiens
aaaggaaccatccccagtgaaggaaactgacgcaactgtcttcatgagcttgcaagggaacaaaatgttcagaagctgagcccccaaaacttcagagacctggaatgaaaagtgtgggtggtaagggaggtaataggcagagtaacacagccttagggatggcccggcctgaccacggtgataaaggagctgtctacacaatagtgttaccaacttgaggggagttggtatctgccttagcctggggaaaagcaagagggcatcaagcaggggaagaggaagaaggtctgaagggtaggctgasagaaacagaagcccacagagagggctagagaggcagggggcagggcaacagcctagaaggcagcccttgccaaaataccaagctaagccagcggtagtattctatgtaatgtgtttaattgtattgctgctgacttatttccagctgttattcagttaatgtcccaacttccttggacaggaataaatttcaggtcttatttcattccacagttcactggttctccaactctagtgtgcatcagaaccacgtggaaggcatgtcaaaatacagatctgtgggccccaacccagggcttctgactc

SEQ ID NO: 105539 - DNA, 652 bp, Homo sapiens
tacatctcagaaatatgagatgtcattgctcccatataaaccagaataggacacaatatacctctgtacagcattcagagaatacaaataagccactgaaaatctaacattttaaagtttgcctttaaaaaatattttgtagaggtattgaaaagacatatcccaataagtaaacaaagaataagtagatgaaaataaaatatttaagaatgcgaaatttagatgattagtctattatcttaataataaacttttcagaaggaaaaagcaggttttagctgtctcttgttttctaggacagtcatactttccatgttaaaagaaagtatgttactttttttttttacatgttttgtttgtccttgttggctyttttcgtgcaactcaaggcctgttatgtacagcttcatcatgaaatatgagaatgcagctgataaaaagtatattctaaaagcttctaggaaaaaaatgtgacaagcaaaataattaaaatcagaatagcaccgtacttttggagagcaacattgaaaaccataaaacaatggtgttattgaaattctgaagaaaaatatttccagcctagaactctattcaacaatatcccattaaagtatcaaagtagaataaaaatacaggtcctttaaaaattgcc

SEQ ID NO: 105540 - DNA, 508 bp, Homo sapiens
gagtcctgctttgtcacctaggctacagtgcagtggcacaatcttggcaacctccaccttccaggttcaagcaattctcctgcctcagcctcctgagtagctgggcctacaggtgcacaccaccacatccagctaatttttgtacttttagtagagatggggttttgccatgctgaccaggctggtctcaaactcctgacctcaggtgatccacccaggttggcctgctgaagtgctgggattataggcatcagccaccgtgccgggycagactgtgactcttgatggccagttgcctcggatgaagcacagagaacggtttgcagccacataattgggaagtggcatagcactatgtaagtctacttggtctactgccttatggttcatcactttttcaattagcgtagcatgtttcccctttctcagtattatgttgtcaactgagagtggtaggaggttggagaagatagggtgatttctattgtctatccttacatgtggtata

SEQ ID NO: 105541 - DNA, 593 bp, Homo sapiens
tgttcactgatatattccaaatgtccagaacagtaccacagtgcctaccacagagtagtaggtaatctataataatttgttgataaataaatgatttaactcaaaaatgagataattaatacaaagaatttagcatggtgaccatcaaattatggcataacaattaaatctttttaattcttctattaattgattatatatatatatatatatatawaatatatatgcttatattggcaaattgcccaaactctcccttttgtcacttttcagtgtagtgctgcatccaaatcctaggcagagagaaataaataattgtataaactgccattgattttcacagttgtaccatcctttgggaagacagtccacaaagccaatagaattgatgttgttctgaattgttattgctgtgtatcgcttctgtacacaggctgctgtgtacaggctgtgtaacaaaaataccataaactgggtggcttatacacaatgaaaatttatttcttacagttctagaggcttggcagtccaagattaaggcaccagcagatttagtgtctggtgagggcctactccccatagtgcatcctcgc

SEQ ID NO: 105542 - DNA, 564 bp, Homo sapiens
gtctattcctgtcgtgacccacgtgcagcctctggggctatagacattagtctgatttgtcagttacaggtaaggccttcttcctggggaatctgctacatagccattctgcattctacatagcatatctgcrtcatgatactgatgcagaaaatgaaacaattccttcagattacattccctggtttcaggaaattctttgttttccccttcttccactttgtctctgtctctttggctgacaaatagaacagttctttctggcattttgtgcctcagagggtgcaaaaggacaatgtctacattcggcctgtccctgcattgatgctgtcctcctatatccatcatctcatggattcaggtggcccctttaagggtatacaccaaaggttcacctggtttttccaatcaccttccaaatctgaagaggagttcttcttatgggcactgacaagttcaactttaatgtgcccttcgaatttccatagggctgtgcacaccatatcaacatccctttaacaagccaggtttccactgccctcctgcctgatcatatggccggga

SEQ ID NO: 105543 - DNA, 564 bp, Homo sapiens
gtctattcctgtcgtgacccacgtgcagcctctggggctatagacattagtctgatttgtcagttacaggtaaggccttcttcctggggaatctgctacatagccattctgcattctacatagcatatctgcgtcawgatactgatgcagaaaatgaaacaattccttcagattacattccctggtttcaggaaattctttgttttccccttcttccactttgtctctgtctctttggctgacaaatagaacagttctttctggcattttgtgcctcagagggtgcaaaaggacaatgtctacattcggcctgtccctgcattgatgctgtcctcctatatccatcatctcatggattcaggtggcccctttaagggtatacaccaaaggttcacctggtttttccaatcaccttccaaatctgaagaggagttcttcttatgggcactgacaagttcaactttaatgtgcccttcgaatttccatagggctgtgcacaccatatcaacatccctttaacaagccaggtttccactgccctcctgcctgatcatatggccggga

SEQ ID NO: 105544 - DNA, 564 bp, Homo sapiens
gtctattcctgtcgtgacccacgtgcagcctctggggctatagacattagtctgatttgtcagttacaggtaaggccttcttcctggggaatctgctacatagccattctgcattctacatagcatatctgcgtcatgatactgatgcagaaaatgaaacaattccttcagattacattccctggtttcaggaaattctttgttttccccttcttccactttgtctctgtctctttggctgacaaatagaacagttctttctggcattttgtgcctcagagggtgcaaaaggacaatgtctacattcrgcctgtccctgcattgatgctgtcctcctatatccatcatctcatggattcaggtggcccctttaagggtatacaccaaaggttcacctggtttttccaatcaccttccaaatctgaagaggagttcttcttatgggcactgacaagttcaactttaatgtgcccttcgaatttccatagggctgtgcacaccatatcaacatccctttaacaagccaggtttccactgccctcctgcctgatcatatggccggga

SEQ ID NO: 105545 - DNA, 591 bp, Homo sapiens
tttaatttctgtgccacagtttcctcctctataaattggctttaatggtacccaccctaaaggtggttgttataattaaaatagtaaatatttgtaaactattatgaatagcacccagcacttaaaaagcactatggagtgtatgctatgaaagagttcaggaatgctacccaagatatattgttttggtatgcaaattacttcaaactaagcatacttggggaatggtaaatgcaggaagaggctttctctgaacttcttctgtctgcctaaagataggtccttcaaaaggaactcaactgtgtaaattctcttcccaggaatctcatcaaccagggaagatcagcttgtatcacaggagaggaagctagaggtccacactatgcccagacagactttgtcacaggctttcacgtgtttttctgagggcctattcatcttgacaaaataatttactctgttctaagttgcctacttctccccctcacactccgctaggaagatttgcacctaagcttctagatctcactgggtttttgagtatttgatttttytcatgtgatgtttccttgcatataataaatttgtata

SEQ ID NO: 105546 - DNA, 570 bp, Homo sapiens
tccttactgatctttctatttctctatctatgtctcagctggctttgtgcctttgtgcctttttttctctgtttttgtatcttcttctttgtctctacctgtctttatttctctcattgacattggcttatttgtgccaaaacagaagagagcctaacaaaataacttacaaatacaacatcctcggtagattcagtagatgtttattgagtcaatgtccatacaggattcagtgcaagacaagattggtggatgtgcagtttataaggctaaagccagatgggcgagagatactgtgagctttcgtttttaatatttcaatactgtattggtcagggtttgcctgagaaacagaccaataggatatatatatagtctgaaaggaaaataaatctcgggacccccaaatcactaaatcaaagggaaaagtcaagctggraagtgcctgcctccattttattcctaaataagatagctattatacaaagacaaaaaaagaaaaaaaaaagctacataccttcctcacagtttgcgcacaaggaaattgctcgtaggcaaaggacagacaga

SEQ ID NO: 105547 - DNA, 585 bp, Homo sapiens
aaaaaaatcttagtccataatatttacaatgtttgctttaaggaaactatttattttctacaattctgaaacatataggtgttatcttttctacacatagtgaataactgacagaattccatgacttcagaagcatgtgggtagaaaatgtccttttgccccatggcaaagaaggaagatagtttccagaagctgagctttgtaaactcacttcattctgagtatattcctattgataagaaggagcagctctctctgtctttgaagtgttaccatggtaatttgatgaacatgttattttcacctattacatcagaatatgtcaatggatcagtcatgcaatgttttgcagtgcaacaatccataatataaaaatccactcactttaaaatcttaccttgactgattcaaattctactctgctatataaatatgcaacttccaatatgtctaaataataaytatatttttgtaaaaaacataggcccagatttttttgtagcaagtatatatactaggtatttcagcttctcatccaaataaaatcatctagctagcatggggggtaaacagacatagtgcagt

SEQ ID NO: 105548 - DNA, 631 bp, Homo sapiens
ctgtgcctctggactgtgagtatcacacgtgcttttctgcccccttttaagtgagacagataggtaaaatgggctgtggttgagtatttctcttctccacattggaacctagagtaaagaagagttgtatatttccctttctccatgtagattaggctctggtaaaactccagcaggttaggctctggttaaatagttttttcttagtgaagacattgttaagaagaaaagaatgtctagcatatttcaaaatggttattttgccctttccctgtaagaagaatgaaataattttttctgatatttaccatgagtacaaagtcaaggttctggaaattacactcaccaaaggtggggacatccttatgactgccycagacttgagcacactgagcctctagcaattcattgattacatttcaggtttcctaacctggtaccaatttctgtggtgatttctgcacatgggtttctgctgcagtaagttgtgattctctgcatttgcttgagggtatctctaattttgagggcagtgttttgtgctgtgatctcacttgtcttatggatctaagaagagtttttgatttcttagtttgttcagctttttacttcttgttaggatgaagtggga

SEQ ID NO: 105549 - DNA, 674 bp, Homo sapiens
tctacaaggtttaccaccaacaactggagacatgacctagaagggacacacatgactaacactcatgacttatccaaagctagtcacttggccctacacacccacaagagtgctagragctgtgattctgtaagtgtccagagggcagaccttcagaaatatttctgaagttcactactgcctatcacagagagaaagaaaacgcaaagattgaatatgtaggctgggcattctaagaaaagtacaagcccagtattccacaagggaggtgtagttacaggggatcctggggagaaacattactaacaagccatcaaaaaagacacatctgatatttgtttcatttggaaagttctgtgtttacaaccataaagaaaagttcatgttcgatagcatgattcaatagacacatttgataaaaagacaccctcaccgtatctctcttacagaatcataaaagggggcttgaggtttcatttattcagactgagtgttgtcgtgtgtgtcataatttcagagactgtattcagtccatgatttccagtgatggaaatgttctaactacgattcctagtttcttctgtgttcctaacacctaacctaaatcacatgggttaattcaatttcctcctgttccacagccaaaagaaatgcagaactgctagttcccataa

SEQ ID NO: 105550 - DNA, 674 bp, Homo sapiens
tctacaaggtttaccaccaacaactggagacatgacctagaagggacacacatgactaacactcatgacttatccaaagctagtcacttggccctacacacccacaagagtgctagaagctgtgattctgtaagtgtccagagggcagaccttcagaaatatttctgaagttcactactgcctatcacagagagaaagaaaacgcaaagattgaatatgtaggctgggcattctaagaaaagtacaagcccagtattccacaagggaggtgtagttacaggggatcctggggagaaacattactaacaagccatcaaaaaagacacatctgatatttgtttcatttggaaagttctgtgtttacaaccataaagaaaagttcatgttcratagcatgattcaatagacacatttgataaaaagacaccctcaccgtatctctcttacagaatcataaaagggggcttgaggtttcatttattcagactgagtgttgtcgtgtgtgtcataatttcagagactgtattcagtccatgatttccagtgatggaaatgttctaactacgattcctagtttcttctgtgttcctaacacctaacctaaatcacatgggttaattcaatttcctcctgttccacagccaaaagaaatgcagaactgctagttcccataa

SEQ ID NO: 105551 - DNA, 600 bp, Homo sapiens
actcttttgtgaaaggaagagtcaatcagtatgtcaaacttcatttctgtctttctttgttcaattgccacagtcaccaccaccttgatcaatcagcagccatcaaattctgaggcaagacactccaccaacaaaaagataatgactcgctgaaagctcagatgctcattagcattttttaacaataaagtatttttaattaagatatgtacattatttttagacaatgctattgcacatttaacagactatagtatagtatgaacataacttttatatgcaccagaaagccaacaaatttgtatgagtcactttattgtgatagtccttttaatgtggtggtcaaaaccatgcctgcaatatatctgaggtattcctgtatatgttattggcagactctgcaatatagtcacttactgcatcagtttgcttgagaattaggggctttcgagaatgttggactttcaatgctaaaaccagaaagtccccagcaaactgggagaagttgttcaccctattytgaagctaccttagttatgatttccttctactcttttcctgcttagaaaggcaatcttctcacttttgagcatgtagcta

SEQ ID NO: 105552 - DNA, 588 bp, Homo sapiens
tctgcagtgtgctgtagcctgtgataaagaacccttctgagggctttgaaatcttgcaggttgatgaataattaaccaagtagacaatggtgggtgtgcattctaagctgaggaagtggcacactcatgggctcactggtgtatgaaagcatgacatatttgggttcagtggagctgggatgggcaagatacaggtsaattagatgaagttgcaccggtcgagcttcggctgaggcatgggggtgttattatctttgttatttacttccttttaattgttttggctttatttgctcatttcttccctaagttcttgaggtagaagctgatattattgatttgaggctttttctgtgtttgaatgtattcatttcatgctttaaatgtccctgtcagctctgctttagctctaccctacacgttttgatatatttctttttaattttcattctgtcttttaaaaatgtatttgaggcttccatttttattctgaatgttttagatgtatcatatttagttctcaaatgtgtggagacttctctgtaatctttctgttataatttctcgtttgatttccttttgggtaga

SEQ ID NO: 105553 - DNA, 587 bp, Homo sapiens
ctcactgggagctctctctctctctctctctctctctctctctctctctctctctctctctctctctcccccccatctatatatctctcccatatatctatatagagatagatagatcgatatagatacagtggtctctctcgctctcatatacacatagtatgagcacacacacacacacacatatatacagtgtgtactcagtttcatttaactcttttccttagaaaagagtctatgtctttaagcaccytgtggtctccaaagtttcaagcaaatgaaacattagcacaataaaagtgaatatatgttcagggtaaataattggccttatggactttctcactgtgcaaacatccacacacctcaggatggagcaacaggaggtgctccgagcttagtcagtgggtccagggtccagtcttatatgatgatcttctgaaggtcaccacttcttagaattttgtttttctcataatattttatctaatgctaaacctaccctgaaaccttatgcaaaatgcctacaaggcatagataccagagcttgttcattgaaacattaatccaccttctctctgtttctc

SEQ ID NO: 105554 - DNA, 587 bp, Homo sapiens
ctcactgggagctctctctctctctctctctctctctctctctctctctctctctctctctctctctcccccccatctatatatctctcccatatatctatatagagatagatagatcgatatagatacagtggtctctctcgctctcatatacacatagtatgagcacacacacacacacacatatatacagtgtgtactcagtttcatttaactcttttccttagaaaagagtctatgtctttaagcaccttgtggtctccaaagtttcaagcaaatgaaacattagcacaataaaagtgaatatatgttcagggtaaataattggccttatggactttctcactgtgcaaacatccacacacctcaggatggagcaacaggaggtgctccgagcttagtcagtgggtccagggtccagtcttatatgatgatcttctgaaggtcaccacttcttagaattttgtttttctcataatattttatctaatgctaaacctaccctgaaaccttatgcaaaatgcctacaaggcatagataccagagcttsttcattgaaacattaatccaccttctctctgtttctc

SEQ ID NO: 105555 - DNA, 591 bp, Homo sapiens
ccatgacaagagcagggatttttttctcatccctcctagatgacaataatgctgcatactctacagcaagcccactctgacctttctggtcctgcttgaataatatcaggttggtgcaaaagtaatttctgttttctctgttgcttttaatgatgacaacagcaattacttttgcgccaatctaatgtatatcttgtggttgagatttccaatcacagcaattgctctgctccattcgcaataagtccactcagacacctgcacttactgctcactagagagaatgattcttgctcaaggatttccattaatgtcattctcagttggaggttgacaagatctccaaaacttttttcccccaactctagcattttatcaatctgttttacaattcatctgaagagttcgatctttaaatggcctgtgatttgtatttctggttagggatagaggccattatttttttctggacctctgcattacctgatrtgtctgaccttaaccatgaggatgtatctggaagctctacccgagcagtgaagctactcacataccataaagataatgcaaagtttctatcaatatggaaat

SEQ ID NO: 105556 - DNA, 526 bp, Homo sapiens
tgtcaagaaaagatcctcagacagcattccttctttctcccagggcccttgcatgttgtggggccagaagcgtccgggctgtacaaatagtaccaccatcttcctggagtgactgggagagacacctgggatcttgctgggtcaatagtgactgtgcaaggccatccatgataaaatgcgttccaacctcagacacatgaaaagtgaaaaaaagaaaaggcatcttagaatctgtgaaatgttgtaagtaaaattggaacacggtggttatgtttggattaagtacggctgtgctcaagacaagctcacctgccttctgcctcccgcttctgcctccttcgtgtggtctccagcctggagctggacgttggagtgaacatgagtgtaaatacagaaagcgtcggcatgttttcaacaagsaaattcgtttctttgctctgtgtgtttgtgtgcctgtctaggacagtgttgtaacttcaggaaagattagaatcagtgaactccttcagggctaggaccgggaatt

SEQ ID NO: 105557 - DNA, 498 bp, Homo sapiens
gctgtttctttcggggtaagcctattaggcttctaggatgttttaattggggcagtgtaattgtagggtgccacaarggccctggcaaggggtactttataaatcagattattatgcttagttgtgttaatggacatttatatgccctaaatccttcatatagcaatgagataatagcccttaaggccatagttactattttgggtagcgcttacttgtaaaactggatcattttattgtgaagctgttttcagttagagagtatgtaaaaccctttgaaagacagaatttcaattttgtggttgctgtcttctatagcttaaatggtaaaatcattatacacacacacatatatatatatatgaaagctttgaaccagttaacattgtgctcctgaagcaggacttcttaataatggggaactgcaaaaccttagaggaatttgaccaaatgtccaacctttctcctgaccagtaataatgttaacttttgggagac

SEQ ID NO: 105558 - DNA, 559 bp, Homo sapiens
gactgtagatttcattaagttcaatgagagcatttgtttcagcttaataatacacatgattccccaaacagtaagttgcttatatttaaatatgatcatgtgaggaaacccataattgttattgcctataaaggcatgtgaaaatggtaaaacaggagtaatacttattgatcccttataagtamaatcataatacattaagaggctcgaatatctaatacaaaacttgtagattacattcctacttcattgtgtgtattttacctcttttctttctaggaaacatctagaaaaagatgttgcagctctcaaaacacaaagtattagaatatcttgaagataatacttaaaagagtgagatttccagaattgctatttcaaacatgtgtttaagactattgataattttattattctttttgatggaaattagtttttaaggaactagttggctaattttaaggctattagaggactgacaacaataaaatcaaagaataaagtccactatgatgagcattggaagacttccataattctttaatttctagtagaattc

SEQ ID NO: 105559 - DNA, 634 bp, Homo sapiens
cctgccagctccaggtctagtggttttttcccctggaactattgccaccttttcacccatggctgacttgtgcccacagttagagaagcagctcctggcagttggggttttcctggaagtgctgacctcatccctagttgtcaggtgcccatcagcctggacctggggcagggaagactgttctgactgtaccaccaatctctctctgctctgtgtctcaccctcatggctgtcggtaggtcatgagtatgcagaggagaacctgggctttgcaggtgtggtggagcccgagaacctggcccgggagaggaagatgcagtgggtgcagcggcagcggctggagcgcaagggcacggtgagggactcggggtccaggaggagctgtgtgggcaggcactcagccccaacgggaacccatccatgctgaccccaggcctgcgagcacctccccaaarctctgacctctttggcccatgggccctcaagtcagaactcctgaactccaggatggggcaggggtcgggtcaggcttctctgtcttgggtccatttcccagcttctctccaccaaacctggttcctctcacccacagtgcccatctaccctgggagaggagcgctcctacaacccgttc

SEQ ID NO: 105560 - DNA, 608 bp, Homo sapiens
gttcaaaattttctaaatattttaataaaaagtgaaaatgaaaattaatctccaggtggtttttgttgtctcacatgtaaaatggataataatagtcaatttctcactggagggttttaagggtgaataagatagtattaatcaatctcaaatcatttgttgaatgaggcagtagatagayagacaaataaagtaagataaatatagctacatagatagagactggcagctacatgctgatggtgaatattaaaatctgagctcagtgttcattattcactaggtcttcaatacatgtttgttgaatatattgattattagaacaaagttttgttttgtgtgtgtgaactttgaatctgtaaacattatgtcttcacatgcaataactatctaaaagttaggataaaagctgtatttcaaaacgttgcatttccactggtcaattccacttgtagagtattgaacaattatccaaagcagttacaaggacaagtatcttctgcctgagctgaaagcataaacttccacagggcagatacctatctatgagtacggagtccatgaggaaatgtagatgcatcactttcctacttggagggaagagtttc

SEQ ID NO: 105561 - DNA, 608 bp, Homo sapiens
gttcaaaattttctaaatattttaataaaaagtgaaaatgaaaattaatctccaggtggtttttgttgtctcacatgtaaaatggataataatagtcaatttctcactggagggttttaagggtgaataagatagtattaatcaatctcaaatcatttgttgaatgaggcagtagatagacagacaaataaagtaagataaatatagctacatagatagagactggcagctacatgctgatggtgaatattaaaatctgagctcagtgttcattattcactaggtcttcaatacatgtttgttgaatatattgattattagaacaaagttttgttttgtgtgtgtgaactttgaatctgtaaacattatgtcttcacatgcaataactatctaaaagttaggataaaagctgtatttcaaaacgttgcatttccactggtcaattccacttgtagagtattgaacaattatccaaagcagttacaaggacaagtatcttctgcctgagctgaaagcataaacttccacagggcagatacctatctatgagtayggagtccatgaggaaatgtagatgcatcactttcctacttggagggaagagtttc

SEQ ID NO: 105562 - DNA, 558 bp, Homo sapiens
cggagcaccacatgccaatgtataagaaaagaggcctcttcatcctactacggtgactcgaatttttaaaaattagaaaaatccaaacattcattattttaattgacagaaatagctgaaamtcatttttaaacacaaaagtggcaatgcctggtaaaatctcaaggaagttaaattttatttagatttagttgccatgataagtttgtgtgcagtgattaagtttgttgttttctgataagataaggacatctagagtcaacacctctggacatgattgactacattcctttggataaaatatgaatgttgttggtacaaaaagagaaagagaaaaggaaagtcatttttaactgtagataacatatcttatatttgattaatttatgaacaacagcaaatacaataatggaatgaacaaatattgaatggcaaactagaaatcagaatttgccaatctcaggcagttcttacatgatgtgttcacctttgaagtcagtgggttcaagtgttatgtgaacatagccttgcctctgtgattcagccttgtgacaaggg

SEQ ID NO: 105563 - DNA, 572 bp, Homo sapiens
aaaatggctattctcataaaaaggaatgagttaatggcatttgcagcgacctggatgacattggagactattattctaagtgaagtaatcagggatggaaaaccagacatcatrtgttctcactcgtaagtgggagctaagctgtgaggatgcaaaggcataagaatgacacatggactttggggactcggaaagggtcgaaagggggtgagggacagaagactacaaaaagggtgtagtgtacactgcttgagtgatgggtgcaccaaaatctcactaatcaccactaaagaacttacataatcaaaaacctctgttccccataacctatggaagttaaaaaattaaagtgatagtaaggaataaaaatgctttttcatgaaaacaaaatggcatttctgatatctctagacaaaaggaggtggagggcttggaacaagagtatgtaggaataaaagcatctagcatataccattaataatggaggtatataccaaagttccatttccattcagtcccactagatcattcccaggacacgcagaattattccattccatacgctgcctaca

SEQ ID NO: 105564 - DNA, 590 bp, Homo sapiens
gttatcacaagccaagaagggaggcctgagaaagaaagcaacactgttgactgacacctcaacctcagacctatgccctccagaactataagaaaaaatgtctgttgtttaaattacatacgatatggtttggctctgtgtccctacccaaatctcattttgagctctaatccccatgtgtagagggagggagggggttgattgaatcatgggggtgggctccccccatgctgttctcatgatagtgagttcttacaagatctgatgrttttaataaatggtagcttttcctgcactcatatgctctgtctctcttgctgccttgtaagatgtacctggtttgccctctgccatgattgtaagtttcctgaagcctccccagccatgtggaactgtgagtcaatgaaaactctttcctttgtaaattacccagtcttgagtttctttatagcagtgtgaaaacagattaacacacctagtctgaggtatttagtcatgggaatcctaacaagataatacaagagctttgcaaatatcgagctttgaaactctctggatttttgtttttagtcttacagaaaggctttgaa

SEQ ID NO: 105565 - DNA, 590 bp, Homo sapiens
gttatcacaagccaagaagggaggcctgagaaagaaagcaacactgttgactgacacctcaacctcagacctatgccctccagaactataagaaaaaatgtctgttgtttaaattacatacgatatggtttggctctgtgtccctacccaaatctcattttgagctctaatccccatgtgtagagggagggagggggttgattgaatcatgggggtgggctccccccatgctgttctcatgatagtgagttcttacaagatctgatggttttaataaatggtagcttttcctgcactcatatgctctgtctctcttgctgccttgtaagatgtacctggtttgccctctgccatgattgtaagtttcctgaagcctccccagccatgtggaactgtgagtcaatgaaaactctttcctttgtaaattacccagtcttgagtttctttayagcagtgtgaaaacagattaacacacctagtctgaggtatttagtcatgggaatcctaacaagataatacaagagctttgcaaatatcgagctttgaaactctctggatttttgtttttagtcttacagaaaggctttgaa

SEQ ID NO: 105566 - DNA, 478 bp, Homo sapiens
ttaattgataggttcaaagatatactacttgactttgggggctggaagaaagtggtggtagaagctgtagtttttaccagaacctgtctttaggaaccaagttatgagtggttctctagtcctgggaacagctatgtaatagattgtatttatatatttccagaaatttatctctagcaaaaattcctaaattaaaggaatgtggagatgccttcattcatttcttcatctagcatttactgagcacaaattttattctaaacgctgtcttaaactctaagaacacaagaatgaattagcttcagttctcctcttaaacgactctcagctgaagagtctgagattcctacatagcaattgatattcctatgtgtcaaatgtaggtgtttgcgtgcatgggctcatgcatgtatatgcrtttcagttgtctcatttaggtatgagttttcttgtaggagtctattattttttccatgaa

SEQ ID NO: 105567 - DNA, 612 bp, Homo sapiens
ttccttgctccctccagtatgtaaggacacagcaagaaggtgccatctatgaaccagaaagcaggccctcaccagacacctaatcttccttgatcttggacttccagcattcrtaactatgaaaaataaatttctgttgtttataagccacccacccagtttatggtttgttatggcagcccaaaaagacaaagatgctgtcttatagagttgggttgactgttgtgttaaaaggcacactgaggcacaatcaattttagtttgtttgagcaaacagtgactcatgaatcaggaagcactaaaccaaacttggttttggactctgcaaaggaacacaaggggaaggcttttattggatgaacatggatgtaaagcaaagaaaatatttgattggttatagtcacatagttgccttatttagtctatcctgctggaaaattcctacttatatgaactatttggtaacttttgattggttatccttaagttttatttttcttttacataggcatttatgagaagtaccttaagttttgcttacgtttgcaaattgagcaaggttaaggtcacttctgaggcctacctaactggctttgtgggctcaggagtgtt

SEQ ID NO: 105568 - DNA, 612 bp, Homo sapiens
ttccttgctccctccagtatgtaaggacacagcaagaaggtgccatctatgaaccagaaagcaggccctcaccagacacctaatcttccttgatcttggacttccagcattcataactatgaaaaataaatttctgttgtttataagccacccacccagtttatggtttgttatggcagcccaaaaagacaaagatgctgtcttatagagttgggttgactgttgtgttaaaaggcacactgaggcacaatcaattttagtttgtttgagcaaacagygactcatgaatcaggaagcactaaaccaaacttggttttggactctgcaaaggaacacaaggggaaggcttttattggatgaacatggatgtaaagcaaagaaaatatttgattggttatagtcacatagttgccttatttagtctatcctgctggaaaattcctacttatatgaactatttggtaacttttgattggttatccttaagttttatttttcttttacataggcatttatgagaagtaccttaagttttgcttacgtttgcaaattgagcaaggttaaggtcacttctgaggcctacctaactggctttgtgggctcaggagtgtt

SEQ ID NO: 105569 - DNA, 612 bp, Homo sapiens
ttccttgctccctccagtatgtaaggacacagcaagaaggtgccatctatgaaccagaaagcaggccctcaccagacacctaatcttccttgatcttggacttccagcattcataactatgaaaaataaatttctgttgtttataagccacccacccagtttatggtttgttatggcagcccaaaaagacaaagatgctgtcttatagagttgggttgactgttgtgttaaaaggcacactgaggcacaatcaattttagtttgtttgagcaaacagtgactcatgaatcaggaagcactaaaccaaacttggttttggactctgcaaaggaacacaaggggaaggcttttattggatgaacatggatgtaaagcaaagaaaatatttgattggttatagtcrcatagttgccttatttagtctatcctgctggaaaattcctacttatatgaactatttggtaacttttgattggttatccttaagttttatttttcttttacataggcatttatgagaagtaccttaagttttgcttacgtttgcaaattgagcaaggttaaggtcacttctgaggcctacctaactggctttgtgggctcaggagtgtt

SEQ ID NO: 105570 - DNA, 598 bp, Homo sapiens
gcctgcagagccaggagccaaacaagcctcttttatttataaattactcagcctcagatattcctttacagcaacacaaaatggattaagacagtgtggtgagatccgaagcagtgaatccagtcatgctgtgctggacttttggctgacagaactgtgagacagtaaatgagtcctgttttaagtctctaaggctgcaataatttgttatgcagcaatagaaaaccaatacagttcggtacatttaaagtctatggaattcaaagagaaatttttggtctttttctatatcacattcttgacctcacttrtgagatccttttcctggacactgagatgagagagtggcagaaatctccatttatcattgtcaaacaagtacatggctccaggggatcctaaatggcttcttcacatctttatcaggagacttttaccactccctgtgcaacaataacatttctctatttgtaaacaaaaggagtctgaaccacttcagatgggcatgcatttgggtatttctaataatgataatggtatctaccaaactgtctacatactctttcatctgcctgcactttgacaggggccatgcatt

SEQ ID NO: 105571 - DNA, 575 bp, Homo sapiens
tggactgctttgagactttcattggaaacgggaatatcttcacacaaaaactagatataagcattctcagaaacttctttgtgctgtgtgcattcaactcacagatttgaacctttcttttcatagagtagttttgaaacactctttttrtactctctgcaagtggacatttggagagttttgaggccaatggtggaaaaagaaatacctacacacaaacagtagacagaatccttctcagaaacttcattgtgatatttgctttcaactcacggagttgaagataccttttcatagagcagttttgaaacactcttttcgtagaatctgcaagtgtatatttgaacttctttgaggtgttcattggaaacgggtatatcttcacacaaaaactagacagaagcagtctcagaaacttctttgtcttgtttgcagtcaaatcacagagttgaacgtaactttccatagagcagttttgaaacactcttttcgtagaatctgcaagtgaatatttttactgctttgaggcctccattggaaacgggaatatcgtcacataaaaattatacagaatc

SEQ ID NO: 105572 - DNA, 464 bp, Homo sapiens
tgttagattaacgaggaaacatatccgtgagaaggttctggtttacaaacattgaattcttccaagcctgttggtgtcggctgagccattgtgacttcagagatgtttgcctatttggggtgaaaaggagggtgtttacacagagaaacagacctggctttgccctatcacgtcttcttgcctaygttatcagtcaactgtgtgctcactcttccgtgggctctgtgtggaggtaatggggcacaatgccggcttttgaagaaaggatctgaatgtagatctttttagtttaaatatctatgtttttaatcactgtgcttagtagtcagaatcctaaagtcataatccactattgtagaaggaaacagaatcctagagattgtagactttaatggttttcaaattgttctttctgcaggtggtttcctcactggttcctcaaataatgcagaattttacaacta

SEQ ID NO: 105573 - DNA, 490 bp, Homo sapiens
gtacccaagaataaaccctcctctcctgacctgtgcttcctcctctggctccctttcagccacacctgggtgctcctccctccccagcatttcagggcagcctcactgtgaggtggcagaatgcgtatttaaaatggaatccaaccatgtgtcaaaacaattacttctattcagtcaattcgttctaaatgaaaccaaaaatatagtatacttcgtgaaacaatgtaaactgcttaaaaatgtrtcatcagctgaacaatgtataaaggagaactaaatttataaagaataaaatagacccacagtcttttacaggagacagcaggtgctgtgggaaggctcaggcttggaggcgcacaggcagctttggattctccagacagccacctcctagacgcatgttacaggacaaatcacctgcctaattttgcttaagtagaaaattggaattaataataacaataaaaacacttcttggggttttggagcc

SEQ ID NO: 105574 - DNA, 548 bp, Homo sapiens
aattttgtggaattattttaaagaaaaggcaagctcaattgctttgaaatgggtgtttctgccaagctgtgtttattcatgcaatcagcatttgttgtagccctactagatgtgagggcctgtactgcacaatagcatgaggggagggaagtaaggaattagaaccactctcccggcaagcatcagagatagacacactagcagctggctcaaatacagtgtaataagtagcctaatgaaggtaaattttaagtgctctgggactcaaaggtggtgacatttgagctgaatcttaagtagaaagcacaagcttctctggtttagaaaaaggaaagagtatatcagaaagaatcatgtgtatatagacatggaggtgggagacagcatagcatggcttattgacaaaataaaaaatattttgctattattaaaarcaggaaatctaatgaagaaacacgttaaagacaaaattattcagacacgttaaaatgataaggaaaactttattcaagactattgcaataagggagagagattgaactgaactc

SEQ ID NO: 105575 - DNA, 575 bp, Homo sapiens
aatttacctaacatgggtaaagctaaagctcttggctttatatgctatcccactgaaaactcacagccaccccrcaaggcagttattacatttcacagaggaaattcagaagggctaaaacatttgtccaaaataattcacccaagtgcataaaactaagaattgaagctctaccaagctggaaccgaggtgaagtgttgagctgggaagaatacaggtagcatttccatcagattaaaaccgtaaatttttaattgccatatatccaaattacattctgactagaataccggcccctttttgtgaccccttgctaaaataccaaccatcctttaaatcacagatcaaactacttcagagagcgttccccgatcacgccagtcaaacttgattaatcctttggaagctacaaagccttgtaccttcttccacaatatttagcacactttgccttgaatgttttacatgtaaatgtcatgtcaacactactctatgatcctccaagatatgtttatctctcatgtcacctcattcatgtacagcacatagtagatactcaaaagatgttatttgaa

SEQ ID NO: 105576 - DNA, 518 bp, Homo sapiens
ttgaaagccttctccatgacgaattccttgaaccctgtatgtccccttataacactccaatactgcctgtatagcrgccagatgggtcataccagttagtgcaagacctctgggctattaatcaaatagttcaaaccacccaccctattgttcctaatccgtacactattattggtagaagtccacataaccaccaatggttcacagtaatagatttaaaagatgcctttgagcttgtccgttagcagaggacaactgggacatgtttgcctttgaatgggaagacccctactccagtcaaaaacaacaataccgacggacagttttacccccagggtttacaggatcaccaaacttatttggtcaaattctacagcaagtgataaaaaacttttccctgccctcatccatatgcctactccaatacatggatgaccctgcttaatttcaggagagaacaaagattgagtaacattttcaatcagcttcctaaatcatctaagagaacaagggttacc

SEQ ID NO: 105577 - DNA, 556 bp, Homo sapiens
tattcagtaagccatgctataagcttatttgctgtcatccaggcttgttgtttcatatatacagcacaatcagagtggacttagcattattattaagggccctaagatttttgaactggtcaatgagcattagcttcaacttaaagtcaccagctgcattagcccctaactgaagagtcagcctgtcctttgaagctttgaggtcaggcattgagttctcctctttagctagtaaggtactagatggtatcttctcygttgaagactgtttcacctacattgaaaatctgtttagtgtagctatcgtcatcagtgatcttatgtagaccttctggacaacttgttgcagcttttccattagcacttgctgcttcaccttgcacttttatgttatggcgatggcttctttccttaaacctcatgaaccaacctctgttagtttctaacttttcttctgcaatttcctcacctcactcagccttcatagacctgaagagttagggtcttgctctggattaggctttgacttaaaggaatgttgtgggctggtttgttt

SEQ ID NO: 105578 - DNA, 556 bp, Homo sapiens
tattcagtaagccatgctataagcttatttgctgtcatccaggcttgttgtttcatatatacagcacaatcagagtggacttagcattattattaagggccctaagatttttgaactggtcaatgagcattagcttcaacttaaagtcaccagctgcattagcccctaactgaagagtcagcctgtcctttgaagctttgaggtcaggcattgagttctcctctttagctagtaaggtactagatggtatcttctctgttgaagactgtttcacctacattgaaaatctgtttagtgtagctatcgtcatcagtgatcttatgtagaccttctggayaacttgttgcagcttttccattagcacttgctgcttcaccttgcacttttatgttatggcgatggcttctttccttaaacctcatgaaccaacctctgttagtttctaacttttcttctgcaatttcctcacctcactcagccttcatagacctgaagagttagggtcttgctctggattaggctttgacttaaaggaatgttgtgggctggtttgttt

SEQ ID NO: 105579 - DNA, 558 bp, Homo sapiens
tcttttaagtggagcatttaggcaatttacattcaacatcagtatcaagatgtgaggtactattccattcatcatgctattttttgcctgtatactttgggttttgttttattttwtttttttttttttagatggagtttcactcttgtcacccaggctggagtgcagtggcgggatatcggctcactgcaacctctgcctcctgggttcaagtgattctcctgcctcagcctcctgagtagctggaactacagacacacgccaacatgcctggtgaatttttgtatttttagtagagacggggtttcactatgttggccaggctgatcttgaactcctgacctcaggtgatccacctgcctcgttctcccaaagtgctgggattacaggcatgaaccactgcacccagccagatttttttaattgtatttttgttttataggtcctgtgacatttatgctttgaaaaggttctgttttgatgtgttttcaggatttgtttaaagatttagagctcttttagtagttcttgtattgctggcttgttagtggtgaattc

SEQ ID NO: 105580 - DNA, 473 bp, Homo sapiens
gagtctctcaatcaatggtagaactctcatgcacaatcttctttggttgggggcagaggaggggtaacttggagcaggtgatagtgtggctcccgacaggctagccactttacaaggattcaccttctgtcccttcactatgtatcagaagctacactttatggccacgttttgtttcctcttttcttcctcttcctctttactgtacctccatccatccttttatagtgccgctttcaccttggtgtgtgaacttgccgctgacttcccaaatgagttctgagaaccgatttcctgtgctttgtgctctgtgatggttcagsccactcatcacacctctcatggagatctctggcactttggtgggccctacttagaaaccatcttcctccttgatccttcactaacaagttctataatcttaacctcccagggtctcagttatactacctgcaagatgggcagaagaattc

SEQ ID NO: 105581 - DNA, 541 bp, Homo sapiens
accacaggcatgcaccaccatacccagctgatttttttttttttaaaggttttgtagagacaggcccatgctggtcttgaactcctgggctcaagtgatcttcctgccttggccttccaaagttctgggattacaggtgtgagccactgtgcctggcccattgtcatatttattaagtaaatatgaggacttaagtggtatttgaatattgatatttataaaataccctycactgccttcctcttcagcatcatttcatccttactggctctacctactcaaaacaggaatggttgtttatggaagtggatatgtttaatggaaattcatatgtttcactgacccattgttgccatcatgccatatatcataaagcacttttgtataaattaaatataaggataagcaagttattgctcagattagatactgtattcctcatgctcagacctgctgccagtgtcagaggcctgagagtatgccagctggggtgggtcaggccagcgtgggatttaaaagttctctagataagccacatgtg

SEQ ID NO: 105582 - DNA, 541 bp, Homo sapiens
accacaggcatgcaccaccatacccagctgatttttttttttttaaaggttttgtagagacaggcccatgctggtcttgaactcctgggctcaagtgatcttcctgccttggccttccaaagttctgggattacaggtgtgagccactgtgcctggcccattgtcatatttattaagtaaatatgaggacttaagtggtatttgaatattgatatttataaaatacccttcactgccttcctcttcagcatcatttcatccttactggctctacctactcaaaacaggaatggttgtttatggaagtggatatgtttaatggaaattcatatgtttcactgacccatkgttgccatcatgccatatatcataaagcacttttgtataaattaaatataaggataagcaagttattgctcagattagatactgtattcctcatgctcagacctgctgccagtgtcagaggcctgagagtatgccagctggggtgggtcaggccagcgtgggatttaaaagttctctagataagccacatgtg

SEQ ID NO: 105583 - DNA, 498 bp, Homo sapiens
actcctttcctttgcaggaagtgattttccacccctgaggcataacaccaggcagaggctctatcagtgcctgctgatataattagctctggacagactctccaaccaaggcagacacaaccaggcccttgctctagaaacaaaaagaatgttctggacctatcccagtacacttccaaaccccacgccttcctgggcaagtcggggctcagagaccaacaaacccaacagacttcagcagcagccagggagctggcagcctctgtcccctgaaatgccacttttttttttgtgattcagcctctgtttcaagctatttttagtgtaagcaaaggctgcatctgagggaaggtggtgtgggaaaggggtctttactttctctctcyttttcaatgaactgtcctgtttcccttaggacagccatttcaccaaaagccacaaaacatgtggggagggaggattaaaaagaaaaatgggaaaaaggtcaaaattcagcct

SEQ ID NO: 105584 - DNA, 625 bp, Homo sapiens
tattctaactgtagaatttcttattaatacagatttacatttattcaaaaacacattcgaactgctwgttgccaaataataaatggtataatcacttccaaattaactcagtgttgtaattatgttttttcagtgtttaaaaattaagtaaaattaatcacattgccagtggaactgtttctcacagacatttcatctttagcttaataaaagagttttaattacatttataatatggagttggtttattttgacatatacaaactatgattttcatgtaatcattgagataatcctctaactctgagttactacttataaaacatgtaacatctgtctagaatctctacatagtaatacatcaatataaagtgttctgcagcctaagtttggaagtctcacatctcactgtccttctcagcgtatgttgcatgtatgttttatgagtaaaatcattatcatctcttcaaagttaccttcaatgtcatggagatctcgtcatagtcaatctctcataaaaacttttcaaattgatcaatataagaaaagcattttattctcttccagtttttcaagcaagttttaaagtgctattactggatcagattatgagagatgcacagta

SEQ ID NO: 105585 - DNA, 625 bp, Homo sapiens
tattctaactgtagaatttcttattaatacagatttacatttattcaaaaacacattcgaactgcttgttgccaaataataaatggtataatcacttccaaattaaytcagtgttgtaattatgttttttcagtgtttaaaaattaagtaaaattaatcacattgccagtggaactgtttctcacagacatttcatctttagcttaataaaagagttttaattacatttataatatggagttggtttattttgacatatacaaactatgattttcatgtaatcattgagataatcctctaactctgagttactacttataaaacatgtaacatctgtctagaatctctacatagtaatacatcaatataaagtgttctgcagcctaagtttggaagtctcacatctcactgtccttctcagcgtatgttgcatgtatgttttatgagtaaaatcattatcatctcttcaaagttaccttcaatgtcatggagatctcgtcatagtcaatctctcataaaaacttttcaaattgatcaatataagaaaagcattttattctcttccagtttttcaagcaagttttaaagtgctattactggatcagattatgagagatgcacagta

SEQ ID NO: 105586 - DNA, 625 bp, Homo sapiens
tattctaactgtagaatttcttattaatacagatttacatttattcaaaaacacattcgaactgcttgttgccaaataataaatggtataatcacttccaaattaactcagtgttgtaattatgttttttcagtgtttaaaaattaagtaaaattaatcacattgccagtggaactgtttctcacagacatttcatctttagcttaataaaagagttttaattacakttataatatggagttggtttattttgacatatacaaactatgattttcatgtaatcattgagataatcctctaactctgagttactacttataaaacatgtaacatctgtctagaatctctacatagtaatacatcaatataaagtgttctgcagcctaagtttggaagtctcacatctcactgtccttctcagcgtatgttgcatgtatgttttatgagtaaaatcattatcatctcttcaaagttaccttcaatgtcatggagatctcgtcatagtcaatctctcataaaaacttttcaaattgatcaatataagaaaagcattttattctcttccagtttttcaagcaagttttaaagtgctattactggatcagattatgagagatgcacagta

SEQ ID NO: 105587 - DNA, 623 bp, Homo sapiens
aaacacctccagggtctagactccctgagagcagtgcagaaagggggctggaatatgaagcttccattttatctccagaagggttttgctgcattacctcctagtagattcttgataaattggactctaaattgcatcaggggatctaacagggcagaaaagccgtagctcttatacagcctgagcagaaacttggtacatactaagtctttcctctagctcaccccaacaataaatccaagtctactcattctttctgggagtagtttgtatatatgctgtgtatcacaactacattcctgattctctctcaaccacaggatacaaagaggtagacatacaatgggttcctttccagcagctctctccccaggaccagagggtgcagcctgaaacctagcacaggcatttggcacagaatctctccccagcctagtttagagaaaatgggagaataacactcaaacttagcttcaacatgaaaatagaagggactggaacamatattaaacattttaatcttttcatctacatctagagagttctaccttctacttcactgattgcagggtactgacaggacgtggaacatcctaatctccaagggactaccaaaaacagag

SEQ ID NO: 105588 - DNA, 622 bp, Homo sapiens
tggaactttgaaatttggaggagaaaaaagactgcacctatactgaaggaaagagttatctggctatctagtaggggagaagaacatttgggaaagagggaagacaaggcagaattgtgcttcgcaattttaacaaatagcaagaaagctaatgtagcttgaggacattagaaagagagagagagctttagataaaataaagtcagatacatattcaggggtcaattaatgttggactcattaaaccacggttaaaagtatttgaatttattccagatgagctgaggccaaacttattggaggtgtctgaacagatacatgacataatctgatttttattcgcaaaggatcgctctggatgcagtgtggacaattgacttagagtgtcaaaattagaaccatgtgaatcagataaaccatgtgaaacaggtaaatccagtgatagagaataatggctgaactacagtggtgatgtaggtcatgtgaagtggttagacatgagttttatcttgaggttaraaaactaaaggatgtgcttgtaagatgggtgtatggtgagaaagtcaagtctgagtccaaggaacaagaccaaacaactgcacaaatgttgatgctactgact

SEQ ID NO: 105589 - DNA, 604 bp, Homo sapiens
tgagggacaccatctataaatttatggtaattaacaaatactctcacatatctgccatgttcatattctaaagtttagaccaatggacatttttgtaaaataagaaccctcactcaaaggtaaaaatattaccacttagaaatctcaaagaaatttttttctctgtatatcagtacagaaatatgagactattatatgacagtcattagatacaaataatttacaaggaaatgattttaaaaacccaatttcaaataaaattataagcaatatctattcagagcttttaagaatacgcctctatctatctctcttttgcactccttgtgttgacaaggcacacaatgtggttggatcatgtagattaataaccaatgcaagtgctgacccatgtttctttggttaaaatatagataagwtgttggagagaatttcaaaaaacaagagttttgaaaatgttcacttaaacataatatctcacatttttctaggctctagttatatttttttacaacactatcttaaatggattgtattgacttatgtggctgttaaataaatgtcacatatcttcattttaggcataactattttaaaggatgag

SEQ ID NO: 105590 - DNA, 593 bp, Homo sapiens
aagcttgataataataacctgtctaatttccccatccttctgttgacacatgaagtcttgtctgttcttttctgacatccaacccccaccaatcaaactactragcctcagtggatttacagccacacagcagagccttctgtcctatagatcagctttccaggcaataacctgtattcagcccaactgctggatatccccactatttcatctgactacttccttgaacttgctcctttcagacaaagctcacagctgcctcattaaacatcttacatcacttaataaacaggctctgtgtccccatttactgccagtgcactgctctgtcttcttgaggaattctgaggtaacataaaagcagtttaatttcattagaatttactaaatgtctactgtgatacagtcaatgggcctggtgctagggattaaatgtgaaaaaatagaatccctaaccatcagagagaatatagaaatcttaaaggaacctcaatattctttgttctaactcttcattttcaagagaaaatatgtccatgaagattaaataccctcccaaaggccacaccccagcaatccctccagtgaactgc

SEQ ID NO: 105591 - DNA, 624 bp, Homo sapiens
gggctgcagtaagccatgctcgcaccactgtactccagcctgggtgacagagcaagactctgtctcaaaaaaataaaataaaataagcagcatgaggatttctactctcctatgggagctgagatattgagaaaatttatcttagaaaatgacactgattggtattataagacccagcagaagtaattgtttcaaacattaacctctctgggcctcagttttctcatctgtaaaatgagaaatcayaatgggtgaccctgagttgtaaaattctacagatctaattgattccatgacagctcctaagggagtgatcaaagcaaatgagaggaaattcagctgcatattcaaagggaaagagtagaagcaaattgagagaaaggaaaataactccctgttgttgggaaaaggccatcatagagcttcccattaatttctttccctctttcattcttctgtcagtgaaagctctgtaggggttgaagaaataagtgatcagagtgggcttcaggaggcacatatactttccacagcaagtggtaattagaactgggggggtcgaagaaagaggagatgttggttaatcgagatgagggtagaatggcattcccaacagagagagac

SEQ ID NO: 105592 - DNA, 567 bp, Homo sapiens
agtacctttattctgaaggattgtggcagaggaaatattgtccctccaaggtgatacaatgttatgacttacgagcagcagtcagggaatcctcaagccatataatacttaagcccctagcctagcctggtgccaggtaactcatcttacatgaagacacacatgccttgagtatttatcctcagcaaaggatggcaagagtcacctcttctctgacctggtatgmcagggagaactaaatggaacaatctgtcaggcctctcttctcatgtggatggagaaatctagagcccattgctagcaagtctctctagatctctagagattatcttgctcatttactttcttctagatagcactgtacattgggcaatctagtcagaagagaaacagtttcttgtgagtgtaagtaaaggcttcaaattcttgacacacccttcccattaggaagtggtatctatctcttcctcttgaatctggctgggcttgtgacttcttcaaccaatcgggtatggcagaagtgatcatatgtgatttctgagactgagtcataaaagccataaagct

SEQ ID NO: 105593 - DNA, 622 bp, Homo sapiens
atgctttgctattctcactgttgacacagccaatcaatgtttagtcacccaaaatgccttcaaaatcagctaagttagtgctaaaaytgtttctcaagataacagaaaatatgtctattaattaaaaaaaaaaaggctttaatacttaaaatgtagacatgggccctattcagcaattattgaaaatctaagctactctgacaaagaaaatgatagagaaaagttcacaaagaattataatgccaagagtttattttactgacctgaagatataactcatatagtttggattccagatataaggcccgtggatttgaaaatttagagaaaacttgcaaatgagcaattaattgcctaaacaaaaacaaaacagagagtgttacagaattaaagaattgagatcattttcttaaactgacatctacaattttattctgactagaacttcaaacaccccgcctatagtttcactattatataaacaaggcttagttatttacatttaggaaattattctccagaaatcccatattttgggcaggcctgtccctaaaattcaggttctccacaccaaaaaatcattcagtgtgtgctcagaatggtttaaattgaacaaaaatta

SEQ ID NO: 105594 - DNA, 551 bp, Homo sapiens
atctgtgtaggttgaatggatttgagattctttgagctttctgaatctgaatgtccatctctttcccatgacttgggaagttttcagctaccattttcattttatatgttttctacaccatttccattttcttttccttctgggatgcccaaatgtgaatacttgttcacttaaccatgtcccataaatcttgtaggttttcttcattcttcatgctttttctttttgtctgcctgtgttatttctaatgacctgtctttaagtttcaaaaattctttcttctgcttgacctattcttgaaactgtcaattgtatttttttatttcattcattsagttcttcagctatagattttctgtttggttctttttaatgatatctatcttttcattgaacgttttccttcaaatcatgcatgaattgttttcctgatttcattaaattttctgtgttctcttgtatcttattgaatttccttaagattattattttgaattctttttgtggcagtttgtatatttccttatgatcagggtctgttaccaaaaact

SEQ ID NO: 105595 - DNA, 551 bp, Homo sapiens
atctgtgtaggttgaatggatttgagattctttgagctttctgaatctgaatgtccatctctttcccatgacttgggaagttttcagctaccattttcattttatatgttttctacaccatttccattttcttttccttctgggatgcccaaatgtgaatacttgttcacttaaccatgtcccataaatcttgtaggttttcttcattcttcatgctttttctttttgtctgcctgtgttatttctaatgacctgtctttaagtttcaaaaattctttcttctgcttgacctattcttgaaactgtcaattgtatttttttatttcattcattgagttcttcagctatagattttctgtttggttctttttaatgatatctatcttttcattgaaygttttccttcaaatcatgcatgaattgttttcctgatttcattaaattttctgtgttctcttgtatcttattgaatttccttaagattattattttgaattctttttgtggcagtttgtatatttccttatgatcagggtctgttaccaaaaact

SEQ ID NO: 105596 - DNA, 550 bp, Homo sapiens
tctccacgacgaagcaccgccagtcccaaactccaatcagccgctgggctgggaggccgaaaaggcaagaagacacagagcggggttgaaatgaagaaggaactctttttcaacgagactcattacagtatgcaaaacctaaaaaactgtaccctgtgttgtaatgagaatatgactgcatgggaaatgtgggttacaactcttgactttacctgcttttcacatattttcacatagtgagtaaaatcgctgtgggaggaaatggcaatgtgggaattttttttttaattccatccaattcaacaaataactcattgagttcctgccatgtgcctggcctgtgctaagtgtatggtgaatgaagagagaagtaaaaatacaatgcaaatgcttcaaggattggacagtctttatatctgagccacattccattctttaacttgctgagcaagaaaaactggccttctaaggcagtggttctcaactttggctgtacatgggattaccwggggacgcttaaaaaacccaaaacctggattccgtttccaga

SEQ ID NO: 105597 - DNA, 550 bp, Homo sapiens
cccctgttttaatgagaaccgctgttctttcgtgaaccaccctatacacaatacaaaagtctaaagctttaccatggctccaatcaagaccagaacacaaaactgattgttccaagttttaaactcttgacttactatcttttatataaaaaagtactctgtaaataaaaacataagcaaaataattaatcaagggagtactctcaagaggcatgccctctagcaatgagagaaggtaaaggcagaaaacytccctttagcaagaatatgatagggcaactagaaaggaattggttttatggagctttataggcaggaggaagaaaagtgaaagaattttccgtgttttagaactacagtacaagaaacaacaatggaaaaacaaggtgtgcctctagtggaaaatattgcaggaaagccgtggaagagaagattggaaaggtaggttgtgatcctggggtccagcacagaggtacattaaagatttctgaatgggtaagagatgtggtttatgtactgtagagtataactggagagtaaaatgaagaac

SEQ ID NO: 105598 - DNA, 569 bp, Homo sapiens
ataacaaattagagttgctctttttgatgttaaaatatgtatgcgtatatgtagatctatctggtgaattttaaaaactgctttttatactctgtatcagagtttccatttctttgtggtttcttaccaatgcatatgtgtgtatgcttcagctactgaggaaatttctctagataaagggttcacatgttattgccatttcgacattccttgtcaarttccagtacaagcttatatttcactataggtcttccagaaacctgagtattacaagatgtagataaaggcttaaataaagcataactaaagtagctttctatgtacaaaaccaatgtacttcttgattgagatatgccagaaacagcacatggtctgagactttacagtaatggcaagctaatgagttagtctcccaagttttatagatgctggcagaagatatgagattctaggtcagagataaataactttatgacagatgtcatatcaggcaccatgagttttatgttctcattggttccttttgcttcccaagtcccacagggcgatgcagggatgggctcaggtgg

SEQ ID NO: 105599 - DNA, 439 bp, Homo sapiens
acttccagatgacccccatatttgtatctccagctgattctctccctcaactccatactcagatatttgcctgctcactcaatatctgcacttgtttacctaatagattcctcatacctaaaacttccaaaaccaaagrccgcatctcagtcctccaaaaccagagaacattcctcttatgatggcaactccatccctctggttccactggctaaacatattggagtcattcttactcctatttcacacactagattcaatcttacagaatgttacatatacctccaaaatatatccagaatctgactgcttctcaccatcttcatgccacccctttggtccaagccaccattgtctctcatctgtattattgtaaaattcttaatcattctccctgcttctactccctgtgttcatcattttaaaaatataagccaag

SEQ ID NO: 105600 - DNA, 588 bp, Homo sapiens
ctgtgatattctaatctacctgaagtaagtcaagttgaatttcccagattaatagattgactggagattaaagataaggcctgagaaacatgtcgaattcaaggagcccttctgttcatctcaaaaatagtcctgactcccttccttcctgtccacacataccttcttaaacacgagggaagccttcggaagttttattcttctcttcttatggtagctgctcaccacttggtgtttttgcaccctgcagattgagaggctaggggtggcatgaatcaagtaagccttttcagtgaactcagtgggtgaaaaycccatctgccttttatccttgcctgaaagagtccccaagtgactgacctttccagaggggccacatcactctcccgaaacccacgtcattgttctctagcttacggcacattctgtgtccattctgcctccttcctcatcaattcctccaatctttctccacttactgcaccactggtggtctggggtgtgcagcccagatgttttccccaagtgaccagaggattacttttcaagtggcttcacagagcagatgttccctttcacctcccccct

SEQ ID NO: 105601 - DNA, 588 bp, Homo sapiens
ctgtgatattctaatctacctgaagtaagtcaagttgaatttcccagattaatagattgactggagattaaagataaggcctgagaaacatgtcgaattcaaggagcccttctgttcatctcaaaaatagtcctgactcccttccttcctgtccacacataccttcttaaacacgagggaagccttcggaagttttattcttctcttcttatggtagctgctcaccacttggtgtttttgcaccctgcagattgagaggctaggggtggcatgaatcaagtaagccttttcagtgaactcagtgggtgaaaaccccatctgccttttatccttgcctgaaagagtccccaagtgactgacctttccagaggggccacatcactctcccgaaacccacgtcattgttctctagcttacggcacattctgtgtccattctgcctccttcctcatcaattcctccaatctttctccacttactgcaccactggtggtctggggtgtgcagcccagatgttttccccaagtgaccagargattacttttcaagtggcttcacagagcagatgttccctttcacctcccccct

SEQ ID NO: 105602 - DNA, 591 bp, Homo sapiens
caatatttactttatctgtccattcaacaatgctccaacaagaagccaagaagaaattacttagaattactaaacaatttttttattgattagaaaaattactttctagggtctttgaagcctggatattttttgtcttccctatccatggaagctaaaaaaaatcatgcaaaatattcaggtttatatattaactctctckgacaggaagttgccatacctcacagttcaaagtgtattctatagatcagcaatgttaaactgatatgtaattgtaatttgctaggtagcaaaaatgattcaagaagaaaaacaacctaccatttatttacctttgtacaggcgattgcttaagttaccctgcttttaatatttgcacttggataaaatgcctatttatatataggaaagtcacagtgcaagatgctgctagcacaggcacaaagtattagaaactattttgtgaagattaatgattgtattaagtaactgaacaaataaggtccttgtctgattggttcaccaatgctatttcctatgataagttttctacttcttgaccttgctgtgaccctgttgcagtgtagttat

SEQ ID NO: 105603 - DNA, 591 bp, Homo sapiens
caatatttactttatctgtccattcaacaatgctccaacaagaagccaagaagaaattacttagaattactaaacaatttttttattgattagaaaaattactttctagggtctttgaagcctggatattttttgtcttccctatccatggaagctaaaaaaaatcatgcaaaatattcaggtttatatattaactctctcggacaggaagttgccatacctcacagttcaaagtgtattctatagatcagcaatgttaaactgatatgtaattgtaatttgctaggtagcaaaartgattcaagaagaaaaacaacctaccatttatttacctttgtacaggcgattgcttaagttaccctgcttttaatatttgcacttggataaaatgcctatttatatataggaaagtcacagtgcaagatgctgctagcacaggcacaaagtattagaaactattttgtgaagattaatgattgtattaagtaactgaacaaataaggtccttgtctgattggttcaccaatgctatttcctatgataagttttctacttcttgaccttgctgtgaccctgttgcagtgtagttat

SEQ ID NO: 105604 - DNA, 576 bp, Homo sapiens
cattattctggaggtcacaagctttacaacttccccaattactcctgtaattaacaacactattgtagaacctaagatgtcttttcaggcttttgcatttctgacgactgaatagccccacctggacccacaactctcagctcaactagtcttgtggcccccacctagaagagggctaggcacatgacaaccattttctacacccctatgactgcattaccaaccaatcagtagtacccctgcccaccaaactatctttgaaaaactctagcctccaaattttcagggaggctgacttgagtaataataaaactctgatcttctgtttagctggctctrcatgttaaaatatttctctattacaattcccctgtcttgataaattggcagtttctgggcagtggacaatatgaatctataggtcaagagaaccctgactaatacagtcagttacatgaattggcatgactgtgtgctgataaaacttaatacatactgaaatctgaatttcatataactttcatgttcctgaaaatttttttttactatttttcaaccttttaaaaatgcagtgac

SEQ ID NO: 105605 - DNA, 576 bp, Homo sapiens
cattattctggaggtcacaagctttacaacttccccaattactcctgtaattaacaacactattgtagaacctaagatgtcttttcaggcttttgcatttctgacgactgaatagccccacctggacccacaactctcagctcaactagtcttgtggcccccacctagaagagggctaggcacatgacaaccattttctacacccctatgactgcattaccaaccaatcagtagtacccctgcccaccaaactatctttgaaaaactctagcctccaaattttcagggaggctgacttgagtaataataaaactctgatcttctgtttagctggctctgcatgttaaaatatttctctattacaattcccctgtcttgawaaattggcagtttctgggcagtggacaatatgaatctataggtcaagagaaccctgactaatacagtcagttacatgaattggcatgactgtgtgctgataaaacttaatacatactgaaatctgaatttcatataactttcatgttcctgaaaatttttttttactatttttcaaccttttaaaaatgcagtgac

SEQ ID NO: 105606 - DNA, 564 bp, Homo sapiens
ggcatttttcttcctccattacttgggtcaaaaggagctctcatgaaggcgtaggtgtgagttgaaggaaagacaccagggcagttgctgatggccattcctacagacagtctttgttattagccatcagcagtcacacgcccagcaactagggaaataagagtctaaatcttgggcagtgagtcatagcattccttataccatcatcccactgaatctgcttctcctgcattgcatttcttttgatagcaccaccacccattattcaatgaggttgtaagtgtgtaaattattcctgactccttcttcttcataacctttacttcctcaccctagatgactagttattgattgctacatgtctaaacatttctagactctgtcccctgctcctcatctctggtttaagcrgtggaaataggaatgaccaaatctaaatttcagaaaaatcacttcagtctcagcatggaaaatggattgatggaggcaggactggcaataggaaaaatttaggaggttaatacaaagagatttatagtagaaacttgaagtttgttttagatt

SEQ ID NO: 105607 - DNA, 648 bp, Homo sapiens
tgttgccaatgagtgtcatcttcatacaatattaatgacacagccaagtcaagtggtcacaacttctctttggmaatgatcaagaaacagtaagtgcaggagccacaggtgaaagaaaaatgagtaagaaaacttagaattggaaaatataatttattaacttgggttttcttttttgccacttggaaaatagtattattactactcagttttagtgagggaggaccagtgagcgcaccttttgagaggcactgatacgatggttaattttatgtgtccacttagctaggccacagtacccaaatactttgtcaagcatcattgtacatgtctctgtgactttttaaggtgagattaacatgtaagtcagtagactttgagcaaaggagattacctccataatgcgagtggtctcatctaatcagttgaaggccttaataaaaagagactgacctcttcctcagaagaagaaattctgctagcagactgcctttgctcccctccctggttctccagcctgctggtctaccctgcagactttgactttccaagctgccacaatcatgtgagccaattccctaaaataaacctctctatatatacttgtatacatcctgttgattttggttctctggagaaccatgacta

SEQ ID NO: 105608 - DNA, 482 bp, Homo sapiens
tgacttcaaataaaaattttcaagaagggtacatgattaacctattttctcagtttatatgtgtctgttttgtttatcattgcatctaaagtgcctgacatcgaataagtatggttatatttgtagagaaaaactcagttcaataatgttttagtactttcccaggagttcgaggtcagtctcaaactcctgacctcaggtgatccacccaccttggcctaccaaagtgcttggattatatgtgtgagccactgcacccacatgaaagagtaagataatttggttgcacataaaattcttggyttctaattattttttctacctcaaaactctgtaaacattgaatttatcaatatgaagaagactgagcctagatttttcttactattattttttctgtctgtatttgtgttaaatttttctttatcctcttactccagaaatctcgcctggatgaatgtaaatttaattctcttttcact

SEQ ID NO: 105609 - DNA, 524 bp, Homo sapiens
gtcctaaaccagcaaggtagaagtaggaacagggtggaaaggacaggtgtgaaaaacagaaactaagacaagactgataggacttggggactaatgaaatatgaaatatgaataataataataagactaagatgctctgatacttgaatgactacctagaattgtgtgataaaaatataaggaagtttwaaaaaaaaaaaaaagaagggaaaagtgggcatccaagtaagaaagagatgaatattttagacctttatcatttttggtcactatagaatacctaactgaagacgtatactaggaaaatgtaaataattacctatagatagaagtgagaggtgtagatatgaattttaaagttaacaacagacagtatttacagctgtaagaatgaatgaaatttcctaaagagagcatgtacagtgagcaaacgttagggacagagtctacagaataccggtatgtaaggagaagacttgtttttattgggagaaaacacatgatgcctggggtataattaaaaa

SEQ ID NO: 105610 - DNA, 542 bp, Homo sapiens
gaccttaaataatgtgtatccctgccttttgtggcagtgcatgcatacacaccgtggaacgccctcgcattcacgacaaatctaatgagaccttgctttcaggaagccatacctttgtcatggagcctgcacattgctaattcagtaccttaccaagtcatactgtgttcccaaccacacatttcaattcacagggaaagactccacagcctgtaattcaagggtcacattgggacactttctgctaacaccacctgagaactttaattgtcaagcctcaggaggcagctggggcaggtgaggtgcttggtggtttcctaaggtaacttgtcttattttttgaaacaaagaatcccaggctgatttactgattggtgaaatgaggaatgtgcaatgatagagctgtgtgcccactgacagatggaagcagaaaaatctcatgggagttgaggggaccttccccagatttctgaaaagaggcctgatwcatggcacatgggcagccttaagtcttaagacagatttccaaggctcagtaggac

SEQ ID NO: 105611 - DNA, 581 bp, Homo sapiens
tcggcatcatttgtaatcacaagaagttgaaaactatatattcattaatagaagagtgaatagataattatatagtcatacaaggaaatactatgcatcagtgaaaataaatgaaataaagctgcacagatgaacatagataaatctcgtgaatataattctgagggcagatagtggaaacacagctaggtacycattaaatcttaaagctccaaaatctcctttgactccatgtctcacatccagggcatgctgatgcaaggggtgggctgacacggctttgggcagctccgcccctggactgttcagggcacagcacctgcagctgctttcatgggctgatgtcgagtgcctgaggcttttccaggcacagggtgcaagctgttgatggatctacctttctggggtctgaaggatggtggccctcttctcacagctcccctaggtagtagcccagtggggactctgtgtgggggctccaaccccacatttcccttccatactgtcctagcagaggctcttcattagcgccctgcccccgcagcagacttctgcctggacatccaggcatttccacacac

SEQ ID NO: 105612 - DNA, 630 bp, Homo sapiens
cagtttcttcataacgtcgatggtctttacaatttggcgtgtttttgcagtggctggtactggttgtttctttccatgtttagtgcttccttcaggagctcttgtagggcaggcctggtggtgacaaaacctctcagcatttgcttgtctgtaaaggattttatttctccttcacttatgaagcttagtttggctggatatgaaattctgggttgaaaattcttttctttaagaatgttgaatattggtccccactctcttctggcttgagggtttctgctgagagatctgctgttagtctgatgggcttccctttgtgggtaactcagcctttctctctggctgcccttaacactttttccttcatttcaaccttggtgaatctgaccattatgtgtcttgggctgctcttctcaaggagtatctttgtggtgtcctctgtatttcctgaatttgagtgttgkcctgccttgctaggttggggaagttctcctggataatatcctgcaaagtgttttccaacttggttccatctccccatcagtttcacatacaacaatcaaacgtagatttggtcttttcacatagtcccatatttcttggaggctttgtttgttcatcttcattctt

SEQ ID NO: 105613 - DNA, 630 bp, Homo sapiens
cagtttcttcataacgtcgatggtctttacaatttggcgtgtttttgcagtggctggtactggttgtttctttccatgtttagtgcttccttcaggagctcttgtagggcaggcctggtggtgacaaaacctctcagcatttgcttgtctgtaaaggattttatttctccttcacttatgaagcttagtttggctggatatgaaattctgggttgaaaattcttttctttaagaatgttgaatattggtccccactctcttctggcttgagggtttctgctgagagatctgctgttagtctgatgggcttccctttgtgggtaactcagcctttctctctggctgcccttaacactttttccttcatttcaaccttggtgaatctgaccattatgtgtcttgggctgctcttctcaaggagtatctttgtggtgtcctctgtatttcctgaatttgagtgttggcctgccttgctaggttggggaagttctcctggataatatcctgcaragtgttttccaacttggttccatctccccatcagtttcacatacaacaatcaaacgtagatttggtcttttcacatagtcccatatttcttggaggctttgtttgttcatcttcattctt

SEQ ID NO: 105614 - DNA, 589 bp, Homo sapiens
ccaatatgtttcattttaggaagaaagtctgtagctttatttagattatcaaaggagtccaagaccctaaagatattaagaacattaccttagagaaaagtatgtgtgtgtgaaagtatattcaaaacactctttttttattctcagaaaattttcttccatttttgatcatttctcatcacatactatttgcaataaattgtttttcttttgtgcatttccatttatgactcaaaaaatctttgctgatatttaaagccattctttattttttcaatgaaaccatgttagtaaaaacagatctttgacagtccatagaaaacatttaagcctcagcttcaaagtttttgaaacatgtcagactatagaaatgattactttyaacacaaatctattactaaagcttaatgtcataaaatatgagttgtcaacagaagttaaataagggtaaaacaagaataataatcccaatagatataagaaaatatacaaaagggttaaaatgtacacttaaatctgttcttgaaaataaacactttaacaaaataaagcaaataggtatgtagacagacaaaaagtctatcaaatg

SEQ ID NO: 105615 - DNA, 551 bp, Homo sapiens
acatgttttaccttagatttatccagtgtttgtttccctgaaatcttagtcactggctctgttgattttttccattagggctgtattaaatccaattcctcttccacccaccagcccttcaaatatttgaagacagatattatattctctcaatcttttcttctccaagccaaacagctatagtttcttcaactgttccttcagtgatcatgagttgaaattatggttaagtcagttcattagttaattcagtgagggtttagcccaccatgccaggtgctaagtttttgaaacatttaagatcctgtcatttctataatgaacatgcaaaacaatattcacttagtagttcaaaattctggggaaaagctaaagctaactagggtgtgcagtactrtaaaacaatacaattatatgttcatagactcctaaaaaatttccatgtagacttaatacttcaggttgatttttgatatgcatttaataagaatctgcttaaaataatgtttttattcattagagaattcagtcctgggatacatttgtgttta

SEQ ID NO: 105616 - DNA, 468 bp, Homo sapiens
ccatcatatatgtcctttcaggtattgagatacattccttctatacctaatttgttgagattttttatcatgaaaggggattggattttgtaaaataatttttctgcaactattgagattatcatatggtttttgtccttcattctgttaaggtgatttatcatatttatagatttatgtatgttgaaccacctttacatcactggaataaattgcacttgatcatggtgaatrcttcttttaatgtgatgttaaatttgacttgctagtattttgttgaggttatttacatctatgttcatcagggatattcgcctgtaatattcttctcttgcagtgttcttgtcaggctttgatgacaggaaaatgctggccctataaaatgtatttaaaagtattccctctgctgcaattttttggaagtcttgtttgaaaagtattagtatcggttcttctttaaatgtttgt

SEQ ID NO: 105617 - DNA, 318 bp, Homo sapiens
tccatacttttgcagatacactgcttctttaaacaatgctttaatcacaacatttggctgcttcaaacctgtatgtgacttgttatttcattctttatcaagtytgaattcctcagtatagatttaaagagcactgatatcatagatcaacccatagtgattttcaccttgttctaatatgtatctttgacaccaagaagaccagtcactttactctcccaacgcgctatacttataccaccattcagtctttactcagctcatactccagctcattattcttcttccattctaaacctgacttagattattaggcaa

SEQ ID NO: 105618 - DNA, 656 bp, Homo sapiens
tttgtgtctctcagtgacatctggaattgtactggtggcagatgcaaaatttagggatgaataatatatctgtgctgtgtttacagaagaaggtgagctaggacaagactgcttttggtcctctagtcctggtcattttgggctcagaggaaaatcaargaaaacaaatacaattggattgattttttttttttttttttctgagacggaatctcactctgtggcccaggctggagtgcagtggcatgatctcagctcactccaacctctgcctcctgggttcaagcaactctcctgtctcagcctcccgaatagttgagactataggcgcccaccaccatgtccagctaatttttgtctttttagtagagatggggtttcactttattggtcaggctggtctcgaacacctgacctcaggtgattcgctcgcttcagcctcccaaagtgctgggattacaggcatgagccaccgtggattgatttttaaaaacattaaccagaaaaaatattttaagctagcaggaatatatggaatgcttaacaaggctggcagctatgctagtgcacagagaaaaaaaaaatctaatatatggttcttggacttaaggcagtaaaatatttttttctagctttacgtgacccaacaacaaagt

SEQ ID NO: 105619 - DNA, 545 bp, Homo sapiens
acagacttatgatctccttggaaagaataaggctttggaaccagaaaggcttgggttcaagaccacttgactatcttagtgaatgtgggacatctcctattttttcacctgtacaattggaataataatacctacctccaaggaccctagtaagaattaaatgagataataattataaaagcacttaacctattcaccagcattaaggctgatgttcaagaaataatctcctttattccctgcatccgtttgtctgtctccttgcctttttgcagaatagatatagttaaaggacttgaagagcatctcagagcacaccagaagtaaattacacagaaacagaaggtggaccgtgaacctcggtagtctgtagktttctcagtgttaaaatgttcaaccatttagcataattcatatattatataattccaccattccaattcatccaatcatttttagagtacagtataaaaataaaatgcagaaagcaattatagttggttaaaagttggggccaggaaagcaggaaagccaattatagttgg

SEQ ID NO: 105620 - DNA, 545 bp, Homo sapiens
acagacttatgatctccttggaaagaataaggctttggaaccagaaaggcttgggttcaagaccacttgactatcttagtgaatgtgggacatctcctattttttcacctgtacaattggaataataatacctacctccaaggaccctagtaagaattaaatgagataataattataaaagcacttaacctattcaccagcattaaggctgatgttcaagaaataatctcctttattccctgcatccgtttgtctgtctccttgcctttttgcagaatagatatagttaaaggacttgaagagcatctcagagcacaccagaagtaaattacacagaaacagaaggtggaccgtgaacctcggtagtctgtagttttctcagtgttaaaatgttcaaccatttagcataattcatatattatataattccaccattccaattcatccaatcatttttagagtacagtataaaaataaaatgcagaaagcaattatagttggttaaamgttggggccaggaaagcaggaaagccaattatagttgg

SEQ ID NO: 105621 - DNA, 587 bp, Homo sapiens
cttgccgttgtgttagaattgcctacagtattcaatccagtagcatactgtacaggtttgyggcctaggaggaactggctatatcatatagcctaggagtgtaacagggctgtaccatgtaggtttgtataagtaaactctatcatggtcgcacacaataaaatcacctaacaacacatttgtcagaatataaccctgtcattaatcaatgcatgactgtaattactaaacaacttccactggtttcatcaggaaaatatatatttgcattgacacagcataagacttagaaacaagtaaattttaggctttatagatcattattatttcctccaaaacagcggttcttaatggaggcaatcacccttcctctccccggagatatctggcaatgtctgcagacatattttgttgtcagaacttggtgtggggttgggggattgaagggtgtgtggggggcgatgctactggtatctaataagtagaggccagaaatacacatcaaggaattatctgactcaaactgtctataacgcagggattgagaaactgtgttctaaagacccagctctggactaagaataaat

SEQ ID NO: 105622 - DNA, 587 bp, Homo sapiens
cttgccgttgtgttagaattgcctacagtattcaatccagtagcatactgtacaggtttgcggcctaggaggaactggctatatcatatagcctaggagtgtaacagggctrtaccatgtaggtttgtataagtaaactctatcatggtcgcacacaataaaatcacctaacaacacatttgtcagaatataaccctgtcattaatcaatgcatgactgtaattactaaacaacttccactggtttcatcaggaaaatatatatttgcattgacacagcataagacttagaaacaagtaaattttaggctttatagatcattattatttcctccaaaacagcggttcttaatggaggcaatcacccttcctctccccggagatatctggcaatgtctgcagacatattttgttgtcagaacttggtgtggggttgggggattgaagggtgtgtggggggcgatgctactggtatctaataagtagaggccagaaatacacatcaaggaattatctgactcaaactgtctataacgcagggattgagaaactgtgttctaaagacccagctctggactaagaataaat

SEQ ID NO: 105623 - DNA, 587 bp, Homo sapiens
cttgccgttgtgttagaattgcctacagtattcaatccagtagcatactgtacaggtttgcggcctaggaggaactggctatatcatatagcctaggagtgtaacagggctgtaccatgtaggtttgtataagtaaactctatcatggtcgcacacaataaaatcacctaacaacacatttgtcagaatataamcctgtcattaatcaatgcatgactgtaattactaaacaacttccactggtttcatcaggaaaatatatatttgcattgacacagcataagacttagaaacaagtaaattttaggctttatagatcattattatttcctccaaaacagcggttcttaatggaggcaatcacccttcctctccccggagatatctggcaatgtctgcagacatattttgttgtcagaacttggtgtggggttgggggattgaagggtgtgtggggggcgatgctactggtatctaataagtagaggccagaaatacacatcaaggaattatctgactcaaactgtctataacgcagggattgagaaactgtgttctaaagacccagctctggactaagaataaat

SEQ ID NO: 105624 - DNA, 587 bp, Homo sapiens
cttgccgttgtgttagaattgcctacagtattcaatccagtagcatactgtacaggtttgcggcctaggaggaactggctatatcatatagcctaggagtgtaacagggctgtaccatgtaggtttgtataagtaaactctatcatggtcgcacacaataaaatcacctaacaacacatttgtcagaatataaccctgtcattaatcaatgcatgactgtaattactaaacaacttccactggtttcatcaggaaaatatatatttgcattgacacagcataagacttagaaacaagtaaattttaggctttatagatcattattatttcctccaaaacagcggttcttaatggaggcaatcacccttcctctccccggagatatctggcaatgtctgcagacatattttgttgtcagaacttggtgtggggttgggggattgaagggtgtgtggggggcgatgctactggtatctaataagtagaggccagaaatacacatcaaggaattatctgactcaaactgtctataaygcagggattgagaaactgtgttctaaagacccagctctggactaagaataaat

SEQ ID NO: 105625 - DNA, 558 bp, Homo sapiens
tcaaagatatagtacaatattgtaatactgcaatgaacctcttaataaaaaaatgagcaaaaacaaaccacagagttcataaagtctagaagtgtctgttccatcaaatgtgcagacatcaaaacagaacaaaaagaaacataaaaaaaatcaaagaatcatgacattgctaaatgaaaatgaatacaatagttttccagtaactggcctcaaagaagtggagatttattacttatttgacaaagaattcaaaatcttttttttaagaaagctcagcaaaaaagagaacatagacaactcaaataattcagaaaacaatgcatgaacaaaatgagcagttcaataaagcaacatatatcattaaaaaagacattctgaagctgaatattataaaaaatgaaacaaagaatgcaatagagagtatcaacaatagactagacttgatcaagcygaaaaagaatttgtgagctagaagacaagtctttgaagacagagaaaaaaaggaaaggaaaaaaaagataaaaataaatgaaaatgtctgtgggagttatgagactc

SEQ ID NO: 105626 - DNA, 592 bp, Homo sapiens
ccactagagacaaagaatacattaactttccctttccttttaataaatagctaaatatttatagattccttccagtcctaccagccagatggtaattaccattgtcagaaatattaagcaatgattatatgcaatatttcctttcatctggttacgtgggagcagatsccctttcagtatgcttatagtcactgtcctctggtcagcacactaggcattgcagaaaaataaaaaacagctccattatagtggtattcagcaactctcttcttttcttagctgaattactttaaatacatattttcattacttctgcctttggtccatatttatccgtctttaaaataagaaggtagaacaaatctctgaggtgcctttcacctgggacattctgagactccttccggtgaatagaggtcaattgtctgtgaacagaaacctcaaaccacaggtgagacagaggccaccccaaatggctatgactacaaagcatttatgttccaggtgaggaaagagagagcatcacaaatgattctttttagactgcttccattccctgtaggtcagaactgtcatctgcaaaaaaggcagc

SEQ ID NO: 105627 - DNA, 519 bp, Homo sapiens
atatgcgtaatttattctttagtagagttgtataatattccataacttgttcatccatttccttatttaagaacctttcaatataaaaattagccaggcatggtggcgggtgcctgtaatcccagctactcgggaggctgaggcaggagaatcacttgaacccgggaggcagaggttgcagtgagctgagatcgtgccattgcactccagcctgggcaacaagaatgaaattatgtctcaaaaaaaaaaaaaaaaaaaaccccttcagattattttgtgggtttttttcctgagcatgtggtctacaaaaaaaaaaaaaaaaaggtgcaacaacaacaaaaaatattgcaacaaatttctttatgcatctaccctttaattgttggtattttttwtttctggattttcaaaagtggaactgctgggtcaaaagaaaggtgcaagtttaattttattgatttacccactgatttaactttcccaaggattgtggcaggtcacactctcaccagcaatgct

SEQ ID NO: 105628 - DNA, 519 bp, Homo sapiens
atatgcgtaatttattctttagtagagttgtataatattccataacttgttcatccatttccttatttaagaacctttcaatataaaaattagccaggcatggtggcgggtgcctgtaatcccagctactcgggaggctgaggcaggagaatcacttgaacccgggaggcagaggttgcagtgagctgagatcgtgccattgcactccagcctgggcaacaagaatgaaattatgtctcaaaaaaaaaaaaaaaaaaaaccccttcagattattttgtgggtttttttcctgagcatgtggtctacaaaaaaaaaaaaaaaaaggtgcaacaacaacaaaaaatattgcaacaaatttctttatgcatctaccctttaattgttggtattttttatttctggattttcaaaagtggaactgctgggtcaaaagraaggtgcaagtttaattttattgatttacccactgatttaactttcccaaggattgtggcaggtcacactctcaccagcaatgct

SEQ ID NO: 105629 - DNA, 458 bp, Homo sapiens
ttatagaacactacaattcttgataagcactaacatgatcattcctatgcttctcaaaccattccagaccatggaaaaagatggaaagctctttagttcactgtatgattttgccatgtccttaataccaaaacctaccacaaaatatataacacaaaaattataaaacaatcttacttataaagatcaaagtaggccgggtgccatggctsatgcctttaatcccagcactttgggaggctgaagtgggaggaatgcttgagcccaggagttcaagaccagcctgggcaacatggcaaaactccatctctactttctataattaaaataaattaaattttaaaaagatagaagtaaacaattttaaataaaatattagcaaattaaatccagcagtgtgttaaaaaaaatgatatgagagtatacttagaaaacccgagtcaaccaaaaaaaatgaa

SEQ ID NO: 105630 - DNA, 654 bp, Homo sapiens
tttgaagttgatcaccaacatatgttttacgaaactgatccaagaaccacagaattgcaagctctattttctcattacaacatcgaggcaatccggtatccattaaagatataagctgaaaaactcttcatgaagggaaaataaaaaaaaaaccttcagtacaaaaccttagagaaacaacattaaaacatttaccataaatgtaatataacatataatcactgtaaaaagtgggaaaataaaaaaatataaagaaaatattttttgaatcatctgaaatcctactactgagagatattactacttggtctaattcattctagcctttttttcctaagacatacacatacatgcatatagatgcaaaactctgtatgtatatacagatattattttactaaaaactgataaaataaatgcatggcatacacataaaaaaccctatactayagtaaaaatttactataaatttttagtaaaagaagaaggatattaagtatgtagtcttgtatttcacctttttacttaatcttgtatttctaaataattaaatattttgaggtcatgactcaaagttcaaaaaaatatcaagaggtacatctaacaaaagttatatcctgcccttaatgaataataaaattttaccttaaataa

SEQ ID NO: 105631 - DNA, 573 bp, Homo sapiens
tctttagacttcaaggctccctcatgattttacattaagttagagttactcattgaagattatttgcttttgtttgattagggcagggtgtgtttacagctgaaaatacagagataataagtattaaatgtaaatgactcctgcaaaaaaaatcataaagaagcaggtttttccactccaatcagacaatagagaggatgccacctagcattgctatctgcatagcaatattcaggagacagtttattgtctaaatagttcagactctcacaattcaagcactyttttttttggcaagctattttctccaatgaatatacacctcaaacatttttaaatgttttttatatataggtgaatatttattttgacataaaatagaatttatttgaaacttacattcatttttgcaatgagcaagtgacctagatttcttttttaacttgtacaaattcagtgactcaatcttgactcacatttacctttacctgaagggtcttgtttcactagtttgattgtaagttgagaaattgagacaagaaatttttacgaagtttcataacatgattaaaa

SEQ ID NO: 105632 - DNA, 488 bp, Homo sapiens
caatatcagtgtccagaaaacattaataatgtaatgccatgcaatgttttaaaaacacacagtgatgactgcaagttctccatrtttacctaaataaatttgattataagaaaatttgataagtttggtgaaaaagaaagtttcttctgaatgactattgttaatccttaaaagagatgactaagaaacattgtagtattctcttttttggacacagagtcgtctctgcatgagttgatgtaatcatgacccagaagggtcaagataataagaaaagcaacagtcttctttgactatggagtaacattggtgatcatcattcatccaaagagcctaggggcttccatttatgaagcctagtacatggtctccagagaaataattataactatagaatgtaagtcctgggaaaaaaaaaagacttctgtggtcatttggtcaaaccatttatatttcaaatgaagacatggtcccagagaggctaaatg

SEQ ID NO: 105633 - DNA, 530 bp, Homo sapiens
cgatggccaatacattcaggttttgacttctacgactggagtgtgattgctagtaattattcagactcctaatcagtgcaaatattttagcttatttttctccaacaccagcatgcctactggttggtttgacctcattcactctgatccctggaagtgtttcccacattggtgggttcaagtacatttctgcaagctacctaaattcttaaagcctgccaacggcctgcagttaaagcattaccacacactaaaatggtaaaaataaataatcattcttatatgtgggatttaaagcttctgcaggtgctrtataatgcatctcctcttttaatggccttgaaaataaggcatagaattgtctgactttaagacagaaaaatccagggaggtgctgctgccatcatcatactgactgacagcctgctgtattgaccactcagcaaaatgggctgaactgacagcaatgtgctggccacagaaaatgctgttcctacatttatataaatgctggattcattgttaaaaga

SEQ ID NO: 105634 - DNA, 576 bp, Homo sapiens
gttaaagcattaccacacactaaaatggtaaaaataaataatcattcttatatgtgggatttaaagcttctgcaggtgctgtataatgcatctcctcttttaatggccttgaaaataaggcatagaattgtctgactttaagacagaaaaatccagggaggtgctgctgccatcatcatactgactgacagcctgctgtattgaccactcagcaaaatgggctgaactgacagcaatgtgctggccacagaaaatgctgttcctacatttatataaatgctggattcattgttaaaagaccagatgggygtacaggctcctggactacccagatatgtattgtttaaggaatgaccacgtgtgttgactaactatgggaacagatgcaaatatttaggcaacaagccaatcgtattgtcacacatgtacctgcccaaagagggttccacatctagaggaaaaatcctttctgccagcaaaacctatccattcagttacaattctctgggattgtgaaagtctggagactcttattctgtgactgtgaaagtctggagactcttacgcatcctaata

SEQ ID NO: 105635 - DNA, 576 bp, Homo sapiens
gttaaagcattaccacacactaaaatggtaaaaataaataatcattcttatatgtgggatttaaagcttctgcaggtgctgtataatgcatctcctcttttaatggccttgaaaataaggcatagaattgtctgactttaagacagaaaaatccagggaggtgctgctgccatcatcatactgactgacagcctgctgtattgaccactcagcaaaatgggctgaactgacagcaatgtgctggccacagaaaatgctgttcctacatttatataaatgctggattcattgttaaaagaccagatgggcgtacaggctcctggactacccagatatgtattgtttaaggaatgaccacgtgtgttgactaactatgggaacagatgcaaatatttaggcaacaagccaatcgtattgtcacacatgtacctgcccaaagagggttccacatctagaggaaaaatcctttctgccagcaaaacctatscattcagttacaattctctgggattgtgaaagtctggagactcttattctgtgactgtgaaagtctggagactcttacgcatcctaata

SEQ ID NO: 105636 - DNA, 488 bp, Homo sapiens
caatatcagtgtccagaaaacattaataatgtaatgccatgcaatgttttaaaaacacacagtgatgactgcaagttctccatatttacctaaataaatttgattataagaaaatttgataagtttggtgaaaaagaaagtttcttctgaatgactattgttaatccttaaaagagatgactaagaaacattgtagkattctcttttttggacacagagtcgtctctgcatgagttgatgtaatcatgacccagaagggtcaagataataagaaaagcaacagtcttctttgactatggagtaacattggtgatcatcattcatccaaagagcctaggggcttccatttatgaagcctagtacatggtctccagagaaataattataactatagaatgtaagtcctgggaaaaaaaaaagacttctgtggtcatttggtcaaaccatttatatttcaaatgaagacatggtcccagagaggctaaatg

SEQ ID NO: 105637 - DNA, 622 bp, Homo sapiens
tatctttttgttattgatttctagactaatttcattgcagtcccagagcatactttgtatgatttttgttcttttaaatttgtaggtaagttttatgccaagaatatgatctgttttgatgaagttttgtttgagtttgagcataatatatattctgtctgttgctgtattttatatayagcaattagatatcattgtttgacgatactatttatttaaactatgtatttgttcatttactacctgttgaatctttcaattactaataggtagtgaaatctccaactataaaaatgagtttatttactcctctttgggattataacagtttttccttcatgtattttgatgctccatctgagatgaatgcaaattaatgattagtatgtcaccttggaaaatcaactcttttatgcaatccacctctatatcccgataattatctttgtaatattttgtaattcttggtaattctctctaattctctctgtaaatttcagatacagaggccactcaatgtatctgaaattaataagctactccagctttttctacttttgtgttaatatggtgtacccttcaccataaatgttcttttaatttgtatctttatatttaaaat

SEQ ID NO: 105638 - DNA, 496 bp, Homo sapiens
tgtcagctccttcacatcctttgtgtctgagttcagatgggcctccccattctgcttctctactacagcatcctcrccattccctccatagcgggttcccagtggatggccacatgttcctgttttacatcttggcggtctcttcccatggaccataaaccgcaaaagggcagggccttgtttgttgtgtttacccagtgcgtggccatgaactgctcaacaaatgtttatcgactgaacatacagatggatggatgaatgagtgaacaaatgaactgatcaaaggaaggactaaagagagggaagaattgcttctcaacactgggagatatacattcagtaaaagtagcagtattctggtggaaaaatttgaggctaaacttcaggattatgaatccatggttttattaatacctgtttggagaaaatgacagagaactcttaaccaattcatctgtcctggtggtttgtgcaacttaaacattgccttcttaag

SEQ ID NO: 105639 - DNA, 517 bp, Homo sapiens
tagacctaccagctccccacctgtcagctccttcacatcctttgtgtctgagttcagatgggcctccccattctgcttctctactacagcatcctcaccattccctccatagcgggttcccagtggatggccacatgttcctgttttacatcttggcggtctcttcccatggaccataaaccgcaaaagggcagggccttgtttgttgtgtttacccagtgcgtggccatgaactgctcaacaaatgtttatcgactgaacatacagatggatggatgaatgartgaacaaatgaactgatcaaaggaaggactaaagagagggaagaattgcttctcaacactgggagatatacattcagtaaaagtagcagtattctggtggaaaaatttgaggctaaacttcaggattatgaatccatggttttattaatacctgtttggagaaaatgacagagaactcttaaccaattcatctgtcctggtggtttgtgcaacttaaacattgccttcttaag

SEQ ID NO: 105640 - DNA, 517 bp, Homo sapiens
tagacctaccagctccccacctgtcagctccttcacatcctttgtgtctgagttcagatgggcctccccattctgcttctctactacagcatcctcaccattccctccatagcgggttcccagtggatggccacatgttcctgttttacatcttggcggtctcttcccatggaccataaaccgcaaaagggcagggccttgtttgttgtgtttacccagtgcgtggccatgaactgctcaacaaatgtttatcgactgaacatacagatggatggatgaatgagtgaacaaatgaactgatcaaaggaaggactaaagagagggaagaattgcttctcaacactgggagatatacattcagtaaaagtagcagtattctggtggaaaaatttgaggctaaacttcaggattatgaatccatggttytattaatacctgtttggagaaaatgacagagaactcttaaccaattcatctgtcctggtggtttgtgcaacttaaacattgccttcttaag

SEQ ID NO: 105641 - DNA, 316 bp, Homo sapiens
cataacttcctgactgtcacagagcctaaattcccttttgtctgatagtagcagtggaacatctatacataagyagtgtattacacatggtatattacaaatgctatatctgatagtatacatgatattaaaactgctattaacaccacaactaattatctggttattagattattgattatctagattacttagtgaattatttgatcattatgcatgctctttttcttactgtttcttcttcaattctatatatactgttcacagtttactgtgctgtattcaatctcagtttcctggaattttataaacacag

SEQ ID NO: 105642 - DNA, 561 bp, Homo sapiens
atgaacatctgtttctcttttcatgatgttttggctgctagactctaagaataaagttattgaagtcagaagatctgggctccagtcttgaggacaccagttagttctaaaatgatcttaagtaaggaaatataacaaacacaaaatgaagaaaatagaaaggaagacagaagcatagaaatggaaatatttaaaaagccctgattcctgatttgtagccctacttgctgccctaaattcattttattcatttttatttggccaatttmttttgagtaatgtgcttttattttcattcattcaacaaatattgagccctaatatgtattagactctaatgtactgagaataaaaactaaagaaaatgtggtataaacatacaacggaatagtcttcaaccataaaaaagaatgaaattctggtatttccaacaaggcgcatggaactggaagtcatgatatgtggaataagttgggcacggaaacaaatatcgcaagttctcattcatttgtggaagctaaaaaagttgatctcagggaggtagagagtagaatgctagat

SEQ ID NO: 105643 - DNA, 636 bp, Homo sapiens
gaaggtcaaatcagtaagtcctaatcaagttcctgatatatatttacctctttaaccttgtggatgtatatcaacatatatcagagttggaaaacccatatatcatatggatataagcactctgtttatttataattttctagagaacaaaattttcaaggttttaatcacctgtattctcatacctaatgtacattttcagtttgtatttctgatccatataaacataatgactgagaaatattctaccttcatttgatgcaggagaatactgaattgtcttattaataaaattttaaatgagacctatattagtccattatcgcaccactataaagatgtacctgagactgggtaatttatataaaaaacacaatttaattggctcatggttctgtgggctgtataggcttctgcttctgcataggtctcaggaaacttacagtgatggcagaaggtgaaggggaagtaggcatatcttacaaggtggtagcagaaagaagagagagaagggggaggtgctacatattttaaacaaccagatcttktgagaactctatcatgagacagcattagggggatggtgctaaacaactggaaaccactcccatgattcaattacctcccaccacgctc

SEQ ID NO: 105644 - DNA, 512 bp, Homo sapiens
aagctgaaaagatgcagtggaagctacactgaaaatttcagatgctgaagatcttaaaggatagttgaactccgttttgtactttatccatcagagatgcatctccaaccccactgtggggtggggtaaaaaaaaaaaaaatgtcactgaaaagcatgcttctgttttacctataatttgaccttgagacttgaggtaggaaggctacttacttartatcaagggacctttccaaactgtacaaaaataatcgctattatgttttcttttgtcataaggtcatgatacataggcatttattaaaatttatgtgttcatttattttttagctttactgatagatatagaaaacaagttcaatatcacctgaaaaagtctaacatctccttagctaaaaattactcctactaaatctgatgttttataagtattacgaccaaaatgtgatttcatttttggtagtgaggtataaaagtaattagtaaaatgaacaaaattgttgcctggtgcac

SEQ ID NO: 105645 - DNA, 613 bp, Homo sapiens
aattaaatgtgggacagtgaatggtagagctaagattcatacacgagtaagytgactactgagtctgagttttaaaatattgagacaaattgtattcctaatgaatctaagtaattttaatgaaggtcaaaaaattaggtgaaaacagcctgctaatcttcaaaacaactatctcacattataccaaactagataattgttttagttgagccatattttctagttcatccttatgtagtaataataataataataacttggcagctacttgcattaacaagtacaattatgttgttttgattagttgttgttctgatgaatctctctcttaattttgatcactgtaatagaatctgctttgtttagaggcaactttcttcttctggcttaacagaaccatgattttgtttagagagcaattgagcccagccctaaggagtacataatggccataataattgattcaaaccaatcatgaaaatataattttccttttgccagccattgtctaggagtaagcagatgaagcagttcggacaaatgagatagaaggggatgtctctgttagtggggtttccaggaaagatttttctccctgattataaaacaaaac

SEQ ID NO: 105646 - DNA, 574 bp, Homo sapiens
ttttgccattcagtataatgttggctgtgggtttgtcatagatggcttttattaccttaaggtttgtcccttctatgtcaattttgctgagggttttaatcataaatggatgctggatttggtcaaaygctttttccacatctattgagattatcatgtgatttttgtttctaattttgtttatgtgatgtatcacatttattgacttccatatgttaaaccatccctgtatccctggtatgaaacccacttcatcttggtagattatctttttgatatgctgttggattcagttctctagtattttgttaaggatttttgcatctacgctcatcaaggatattggtctgtagtttcctttttttgttacgttcttccctggttttagtattcgggtaatactggcttcatagaatgatttagggaggagtccatctttctgtattttttggaatagtgtgaataggattggtaccaattcttctttgaatgcctgatagaatgcagctgtaaatcctgggctgttttttgggttggcagtttttaaattaccatttcagtctcgccacttctt

SEQ ID NO: 105647 - DNA, 635 bp, Homo sapiens
agctaactctcttgtttatcttaaaatccaacaccgttaactttacagtttagtcaggttattttctggaagcttttcagagaaagaagtttcaacattataataacattaaaattggacccaggtaacaataaaccctattgttcaactgtataataagtattttatgcttgtgaaagttattctttgtcagacaatgggattttacccaagctcagtgaaaatgccttttgaatttgttcctagtaccctgaggggtgatggctcacctgccttgccaaggttaatgtggcaaaatgtaaagaaaaaaggaaggattagatgcttgggraaaaatggagagaaggatttagggagaaaattcagggaatgtctcaatcctacatccatactgccagacctgggtatggttaattacaatgctgtgacagcctaaagcaaaaagcaagttaaaacatgtaacttacaaatggattcattagagagaacgttgccaattttattcttctagtgaagatgattgttatatctgccacattacataggattatccctttagtgattagatatgttttgaagaaggaaactaatttttttgggaacctggttcacattgctgtcatatcacctgtaaa

SEQ ID NO: 105648 - DNA, 420 bp, Homo sapiens
attaaagcatttgtaaaataatgatgttgaaaatattattgaagattgtgaaagaaagtttaaaaataattatgcctctttttaaatgcctaccctgctggtagaccctgtattgttttatctgccatcttgtagggctaatgctctgccagatatcatcagacacattagttgggttatgaaayagaaccatacagtattatgcactgatgatttctgactcctcattaattgaactagaagatggctttagcctaaatatcaaccttggatgatgaaaaggctaatgggaccaaactgcaaattcaggagagagagtgtggaatgtcaacaacagcatgtcaaagtggcctgaagtgaagtggctcttggagtcagacagaactgaacttgaatgccaactcatgaattactcactgt

SEQ ID NO: 105649 - DNA, 528 bp, Homo sapiens
tgaggctggagtatctcatggtactacaaagtaaggaggtgctcaaacagcacacacacacacacacacacacacacacaatcacacaatggggggttgtcaaagagacacaggagccaacagaaatagttcccaatgatgaggaactgtggttcagcaagattcagttactcgtccatgagcactcagcaaatggtggtagagccaggacttaaacccaggttctgatcctggaaacaagttcttataagcatygtccacacacctggcattataagctccttgagacaatgtgttcagggtgtttaggaagacatggagtatgacaaggcttgcaataaatatctgctattaaattatcaccagtactatccccactcacagtgaggctctttatccacactttcctcactctagggctttcccatgctgctgtattccctctgctgacaatgccctttcacctgttctctcttgctggaattccactcatcttttaagacttggtggaaacctctgctgtctcct

SEQ ID NO: 105650 - DNA, 528 bp, Homo sapiens
tgaggctggagtatctcatggtactacaaagtaaggaggtgctcaaacagcacacacacacacacacacacacacacacaatcacacaatggggggttgtcaaagagacacaggagccaacagaaatagttcccaatgatgaggaactgtggttcagcaagattcagttactcgtccatgagcactcagcaaatggtggtagagccaggacttaaacccaggttctgatcctggaaacaagttcttataagcatcgtccacacacctggcattataagctccttgagacaatgtgttcagggtrtttaggaagacatggagtatgacaaggcttgcaataaatatctgctattaaattatcaccagtactatccccactcacagtgaggctctttatccacactttcctcactctagggctttcccatgctgctgtattccctctgctgacaatgccctttcacctgttctctcttgctggaattccactcatcttttaagacttggtggaaacctctgctgtctcct

SEQ ID NO: 105651 - DNA, 312 bp, Homo sapiens
tgtgtttgttgtgaaaatcaagtaagatagaatgcataggtgtctaccacagtgtccagtatatagtgtgygtttcataaactttgtttttcttctgttttgagatttttcaggttgaatcttctttcctctctgccccctgcctccacccacccgcagaaggtagccccatcataggactggctttccagaactctgtgcaggcaggctttccctgagccaatttcccaaatttggaaagaatcctttggaagaactgcttggcctttcacctgcccaaaaaaaaaaaaaaaaaaaaaaaaacttttcatg

SEQ ID NO: 105652 - DNA, 594 bp, Homo sapiens
aatgaatacaaaggtgctttgtaaactccatcaaattatttgttatgctaatgtcatcattactagtttctctaataaccaatcacacaattaggaagcactaactgaactttcaccttgtcacacaatccacagctggatttgccccaaggactctctttctggagtgtgtaagcagattcaattggtacccagccctctttctgatgcagaaatctagccgtgtccaagaggcatcgtaacatggtgcagtgaaggtgtccctgatggcttgacccaagcagaggagcttaagaggaaacagaccccttccctggagcacccagcaggacacagtgagcaccctggtagggcttcaggaatgataagcctatgagagagaaggagcaaggagcctcatgccaatccatgcaccaacaatgctgggaaattggcaagtgtttagatataaaatgtagactacagcaagacacccctgatctgaatcaaacatgaaacatttctccctcttagatttaaactgagtgaggattttcctgttttttaaatggcaggtgatttggttgggtaycccactaccgttaaactgtcaag

SEQ ID NO: 105653 - DNA, 565 bp, Homo sapiens
ccagtggcccatgggcccagccctccatctgcatcctcctgcctcatcctacaacctcyccaggtggaggagctccacgagggagaaactgagtctccaaggggctccacgaggcctgtttgttcctgactcagcctactgcccccagaaaagggggatgtgggccacacaggggccccaaggcaggttcccagaagctaagccacagccaaaccacccttggctccctgagaccctatggctggactccaggcctttggccagggcaggagttggggggaaaaagtcatgccccccggagacccctcccaccagcaggccctaccttgttctgcagctcctcgattatcctgtagtactggctgtagtcacgggcgggccccggggcctgcctctggtaccagtcacggatctttacctccagctcagtgtcggcctcctccagggcacgcaccttgtccaggtaggaggccaggcggtcattgaggttctgcatggtggccttctcacctccgaccagcagcccatcaacgccctcaaagctgctgctgccatagccaccgcc

SEQ ID NO: 105654 - DNA, 565 bp, Homo sapiens
ccagtggcccatgggcccagccctccatctgcatcctcctgcctcatcctacaacctctccaggtggaggagctccacgagggagaaactgagtctccarggggctccacgaggcctgtttgttcctgactcagcctactgcccccagaaaagggggatgtgggccacacaggggccccaaggcaggttcccagaagctaagccacagccaaaccacccttggctccctgagaccctatggctggactccaggcctttggccagggcaggagttggggggaaaaagtcatgccccccggagacccctcccaccagcaggccctaccttgttctgcagctcctcgattatcctgtagtactggctgtagtcacgggcgggccccggggcctgcctctggtaccagtcacggatctttacctccagctcagtgtcggcctcctccagggcacgcaccttgtccaggtaggaggccaggcggtcattgaggttctgcatggtggccttctcacctccgaccagcagcccatcaacgccctcaaagctgctgctgccatagccaccgcc

SEQ ID NO: 105655 - DNA, 565 bp, Homo sapiens
ccagtggcccatgggcccagccctccatctgcatcctcctgcctcatcctacaacctctccaggtggaggagctccacgagggagaaactgagtctccaaggggctccacgaggcctgtttgttcctgactcagcctactgcccccagaaaagggggatgtgggccacacaggggccccaaggcaggttcccagaagctaagccacagccaaaccacmcttggctccctgagaccctatggctggactccaggcctttggccagggcaggagttggggggaaaaagtcatgccccccggagacccctcccaccagcaggccctaccttgttctgcagctcctcgattatcctgtagtactggctgtagtcacgggcgggccccggggcctgcctctggtaccagtcacggatctttacctccagctcagtgtcggcctcctccagggcacgcaccttgtccaggtaggaggccaggcggtcattgaggttctgcatggtggccttctcacctccgaccagcagcccatcaacgccctcaaagctgctgctgccatagccaccgcc

SEQ ID NO: 105656 - DNA, 565 bp, Homo sapiens
ccagtggcccatgggcccagccctccatctgcatcctcctgcctcatcctacaacctctccaggtggaggagctccacgagggagaaactgagtctccaaggggctccacgaggcctgtttgttcctgactcagcctactgcccccagaaaagggggatgtgggccacacaggggccccaaggcaggttcccagaagctaagccacagccaaaccacccttggctccctgagaccctatggctggactccaggcctttggccagggcaggagttggggggaaaaagtcatgccccccggagacccctcccaccagcaggccctaccttgttctgcagctcctcgattatcctgtagtactggctgtagtcacgggcgggccccggggcctgcctctggtaccagtcacggatcttyacctccagctcagtgtcggcctcctccagggcacgcaccttgtccaggtaggaggccaggcggtcattgaggttctgcatggtggccttctcacctccgaccagcagcccatcaacgccctcaaagctgctgctgccatagccaccgcc

SEQ ID NO: 105657 - DNA, 552 bp, Homo sapiens
tgtcctgtgtctctctaatcctcttaaatttttttttcctccttaggttttagtttgggtattygttttaattgacctgtcttgctgtttactagtcttatcttctgtatctaatttgctgttaaacccatctgttgagttactcattttagatgttgtattttttagttttatattttctctttgattattaatttttaccaattatagttatctggtgaaattcttcttttcatttattttattcatctttttctctgttttcttgggcgtaataactataattgttttgaagtcagccagctaactttattgtccagattatctggtgttcatcaccttcattgaagcaaggactgtgctgactcagagctggtttgcagccctggtaagcttcagtcttgctgttgtttgtccttgccttttagggttttcaaatgagagtcttctatatttgtcacagcccctctctcttgtgtttcctaattacaatttttattttgaggctgccttccagtggctttttgttaaaatttaagtctcttaccctca

SEQ ID NO: 105658 - DNA, 536 bp, Homo sapiens
aaagtaaaagcataaatatactgttaagaaatatgtatgatcatgtaactgatcccaagacaataatagtagtaataatggcagctgtattaggtatcaaatgctgtgtaacaaactattccagaacatagtggcttctaccagcaactacttactcagtgggtgatttgggttggaaattcaggctgggcttggctgggtggctctcttygctgagctcattcatggtcgtgcattgatggcctcacatggttagtatggcttgcctgtaagctggggcgggcaggggtgatgggctgcattgtcaggatggctgcctgtaaactggggtgagcaggggtgatgggctttgtagtctcatcccccagcaggctgggcttcttcacatggagacagcagagtttcaggagttgtaagaggcaggctcctgtgtgtaggtgacttcacgtttgccacagctccattggtcagagcaaatcacacagtcaagctgagctaccccaggtggagacggatttcctctttccatgggagga

SEQ ID NO: 105659 - DNA, 575 bp, Homo sapiens
aagtaaatggcctaaatgctccactttaaggacacagaattacagaatggataactattcaccaaccaactatctgctgcctccaagagactcacctaacacataaggactcacacaaactcaagataaaggggtagaaaaaaacattccatgcaaatgaacactgaaagccagaagtagctatttttatatcagacaaaacaaaytttaaagcaacagcagttaaaaaaggcaaagatggacattataaaatgataaaaggccttgtccaacaggaaaatatcacaatcctaaatatatatgcacctaacactggaggtcccaaatttataaaacaattactaatagacctaagaattgagagagtcagcaacacagtaatagtggaggacttcaatactccactgatagtactagacagatcatcaagatggaaagtcaacaaagtaacaatggatttaaaccataccccagaaaaaatggacttaacagatatttacagaacattctacccaacaaccacagaagatacattctattcatcagcacatggaactttctccaagatagactgt

SEQ ID NO: 105660 - DNA, 575 bp, Homo sapiens
aagtaaatggcctaaatgctccactttaaggacacagaattacagaatggataactattcaccaaccaactatctgctgcctccaagagactcacctaacacataaggactcacacaaactcaagataaaggggtagaaaaaaacattccatgcaaatgaacactgaaagccagaagtagctatttttatatcagacaaaacaaactttaaagcaacagcagttaaaaaaggcaaagatggacattataaaatgataaaaggccttgtccaacaggaaaatatcacaatcctaaatatatatgcacctaacactggaggtcccaaatttataaaacaattactaatagacctaagaattgagagagtcagcaacacagtaatagtggaggacttcaatactccactgatagtactagacagatcatcaagayggaaagtcaacaaagtaacaatggatttaaaccataccccagaaaaaatggacttaacagatatttacagaacattctacccaacaaccacagaagatacattctattcatcagcacatggaactttctccaagatagactgt

SEQ ID NO: 105661 - DNA, 579 bp, Homo sapiens
cttctaactgaatgacaatagtgacacagcctatcaaaacctcagggatacaacataygcagtactaagaagaaagttcatagccctaaatgcctacaccaaaaagtctgaaagagcacacatagacaatctaaggtcacacttcaaggaactagagaaacaagaacaaatcaaaccaaaactcagaagaagaaaggaaataaccaagattggagcataactaaatgaaattgaaacaaaaaaatacaaaagacaactgaaacaaaaatctagttctttgaaaagataaataaaattcatagatcattagcaagattgatcaagaaaaggagaaagtccaaataagctcaattagaaatgaaatgcgagatactacaactgacaccacagaaatacaaaagatcattcaaggctactatgaacaccgttacacacataaattagatgacctagaagagatggataaattcctggaatgacacaaccttaaatcgggaagaattagataacctcagcagatcaataacaagaagtgagattaaaatggtaataaaaattaccaagaaaaaaatgtccagg

SEQ ID NO: 105662 - DNA, 589 bp, Homo sapiens
tgttcgcttgctagcttgtttttactcttcagggctgtctattcagtataagcccaaccaagccagtttctcaaacagacaattggtggtccccagagcatccaaaccagatgacaatttgctttcctaaattctgaccattacagttttggtccatgtttgccccaattcaatgaaccactgtatctgtgctgtgacagcctgggaagactctttgtgtggatgtgggatatatttmaggaaggcagtggtgatgctatcaaggagaaagactagaaaaaaaaggcaatcatttaggtaattaattataaagtctttatattaaaattaacaacccttgttattatttttaaagatatagcctaatatttcttctactgaaaaaagattttccactcttttgtaatttcagttttagctattttatttcctttatcattttttttccattttctttccccactttcacactcaataatgtgtgattcatcttttctgatccaaggatgtctgccactttcctttaatataacagcaattcacatcagtattaatggcataaagttctactccttcacctggttctttt

SEQ ID NO: 105663 - DNA, 589 bp, Homo sapiens
tgttcgcttgctagcttgtttttactcttcagggctgtctattcagtataagcccaaccaagccagtttctcaaacagacaattggtggtccccagagcatccaaaccagatgacaatttgctttcctaaattctgaccattacagttttggtccatgtttgccccaattcaatgaaccactgtatctgtgctgtgacagcctgggaagactctttgtgtggatgtgggatatatttaaggaaggcagtggtgatgctatcaaggagaaagactagaaaaaaaaggcaatcatttaggtaattaattataaagtctttatattaaaattaacaacccttgttattatttttaaagatatagcctaatatttcttctactgaaaaaagattttccactcttttgtaayttcagttttagctattttatttcctttatcattttttttccattttctttccccactttcacactcaataatgtgtgattcatcttttctgatccaaggatgtctgccactttcctttaatataacagcaattcacatcagtattaatggcataaagttctactccttcacctggttctttt

SEQ ID NO: 105664 - DNA, 169 bp, Homo sapiens
ttacatactgcatgatttcacttacataacactcttgaaataacaaaactacagagatagraaacaaattgttgccacaaaaggttagaaatgggagagtggatgtggctttaaagaaccaccacaagggaatctttagatataactgttccatatcttgattgtgatg

SEQ ID NO: 105665 - DNA, 553 bp, Homo sapiens
ctggcgtctccagcccgaccactgcactgcactgtctctcacagagcaaatagcaaggggcagacttataatttccaggcaaagttagagatgtccttccttagttgccagctcagagaagatggaattgagggccctattctgggaagagaacattgaaatgcctggacacgttccatttaaagccttcattgaaagcagcttgtgtattttccctctaaggaggggaagggggcttatgtctgagctcggatctagctttgacatacggtgctctcggcgtccacagccagtcccctcagagcacaactctgggcctcagccccctccactccctttcttcctgctcaacccaaatcccccttaagtctgcactcttctggacagagcttctgcwgcctttggaagctcaggggattgctgtgggctcagaagctccctgccttgggcagaagggtggggtgggatgggcttagaggcctactggtctgccccacactatccttgtctgtggccatgagctggccatgctgtgctgagagacctagagccc

SEQ ID NO: 105666 - DNA, 582 bp, Homo sapiens
aagaaggcttggtggcttctatttagatttcagagcatgtatggaaaagcctgggtgcctggcagaagctgccacaggggcaaagcacccagagaaactctactagggaaatgcaaaggggaaatgtggggttggaactcccacacagttcactgcctaatgaagctgtgggaagggggccaccaccctctagatcccagaatggtagagccactggaagcttacatcctcagcttggaaaagccacaggagctcaactccaacccatgacagcagccatggggactgcaccctggaaagccccagggcgagagatgcaaggccttgggagcccaccctttgcaccactgtgcctgaacgtggaatgtcatttcaagattttagagctttgagatttaatgactgccctattgggtttcagacttgttgcccctttctcttggtagatttatcccttttggaatgggaatgtatacccratgcctgcaccaccattgtttcttgggagtaaataacttgtttttgatctcaggtttgtaggtggaaagatgagactttggactttagacttttgacttggga

SEQ ID NO: 105667 - DNA, 576 bp, Homo sapiens
attatgtgaacagcagtgaaaaggtttaatcactggatatgaagttactagaagaagcaatgatataaccaaatgatcagattgagaacttccatgtcaacagtaaaataatcacaacaacaaaaaaagyatagataagttataaacaaatgtaaagatacaaaaatacaactaagaaaaaaaaattccatctataaaggattacttatttcctatgcagaagtaaatatctagagcagtgaccccttgcggctattgccttcatttaagtaaatctgttctgataaaagcagttttcagaaattcatctgaaattaacaattaaaggaatgttgtcagaataatgtaggaagcacactatttcatctttaggaaaggcaaatagttgcaatccaattaaacaggaaagaaaacagccctcatttcagatgatgaactggcagcagtactttcaactctaccttaagaaaatggcaagtgaatgcctgtatctgcaaacttttgagtccttaagaaaaggcaaacaccacgatgagacagccacttcacatgcacaaaaatgtggagaaactggca

SEQ ID NO: 105668 - DNA, 479 bp, Homo sapiens
gaactcaatcactctagaggggaaagtgyctgcattctaaaatttaaaaagcctggcttatttaaattaaatgaaaacaaaattgcattcagtgctttgcacagatagaagggaggagcaagaagcctaaaacagtatgatgcatctgagcatgcattaagactaactttctctcttcactgccggttcttccagtccttaattcatttaatattagtactaaagtataattttcaaaagagataaacttatgactcacatacaaatataaaatgaacacttgtcaaatatttggtcaactaattaatgaatgaaccaatagacatgaaaatcagttcaaatgagagtttaattacagaaatttgtattctctatggcatacaattcattcacgtcgccaaaaacatgaataattctaattgttgtcagcatcagtgtattttacaagttatcttctacctctagagctgttaaattgc
